United States Patent Application Publication US 2020/0392482 A1 - sequence listing, part 4

SEQ ID NO: 1215 - DNA, 4000 bp, Escherichia coli
  misc_feature (4)..(4): n is a, c, g, or t
  misc_feature (7)..(8): n is a, c, g, or t
  misc_feature (10)..(13): n is a, c, g, or t
  misc_feature (15)..(15): n is a, c, g, or t
  misc_feature (17)..(24): n is a, c, g, or t
  misc_feature (26)..(27): n is a, c, g, or t
  misc_feature (30)..(30): n is a, c, g, or t
  misc_feature (34)..(35): n is a, c, g, or t
  misc_feature (37)..(41): n is a, c, g, or t
  misc_feature (45)..(46): n is a, c, g, or t
  misc_feature (48)..(49): n is a, c, g, or t
  misc_feature (51)..(52): n is a, c, g, or t
  misc_feature (54)..(59): n is a, c, g, or t
  misc_feature (61)..(62): n is a, c, g, or t
  misc_feature (67)..(75): n is a, c, g, or t
  misc_feature (77)..(83): n is a, c, g, or t
  misc_feature (85)..(85): n is a, c, g, or t
  misc_feature (89)..(94): n is a, c, g, or t
  misc_feature (98)..(104): n is a, c, g, or t
  misc_feature (106)..(107): n is a, c, g, or t
  misc_feature (109)..(112): n is a, c, g, or t
  misc_feature (115)..(119): n is a, c, g, or t
  misc_feature (121)..(122): n is a, c, g, or t
  misc_feature (124)..(130): n is a, c, g, or t
  misc_feature (132)..(136): n is a, c, g, or t
  misc_feature (138)..(141): n is a, c, g, or t
  misc_feature (143)..(144): n is a, c, g, or t
  misc_feature (146)..(150): n is a, c, g, or t
  misc_feature (152)..(153): n is a, c, g, or t
  misc_feature (155)..(155): n is a, c, g, or t
  misc_feature (157)..(158): n is a, c, g, or t
  misc_feature (160)..(163): n is a, c, g, or t
  misc_feature (169)..(171): n is a, c, g, or t
  misc_feature (174)..(174): n is a, c, g, or t
  misc_feature (178)..(181): n is a, c, g, or t
  misc_feature (184)..(187): n is a, c, g, or t
  misc_feature (191)..(194): n is a, c, g, or t
  misc_feature (196)..(200): n is a, c, g, or t
  misc_feature (208)..(208): n is a, c, g, or t
  misc_feature (210)..(212): n is a, c, g, or t
  misc_feature (214)..(217): n is a, c, g, or t
  misc_feature (221)..(221): n is a, c, g, or t
  misc_feature (223)..(230): n is a, c, g, or t
  misc_feature (232)..(238): n is a, c, g, or t
  misc_feature (241)..(244): n is a, c, g, or t
  misc_feature (247)..(250): n is a, c, g, or t
  misc_feature (252)..(252): n is a, c, g, or t
  misc_feature (254)..(255): n is a, c, g, or t
  misc_feature (258)..(258): n is a, c, g, or t
  misc_feature (260)..(263): n is a, c, g, or t
  misc_feature (265)..(265): n is a, c, g, or t
  misc_feature (267)..(271): n is a, c, g, or t
  misc_feature (273)..(275): n is a, c, g, or t
  misc_feature (277)..(279): n is a, c, g, or t
  misc_feature (282)..(282): n is a, c, g, or t
  misc_feature (287)..(288): n is a, c, g, or t
  misc_feature (291)..(299): n is a, c, g, or t
  misc_feature (301)..(302): n is a, c, g, or t
  misc_feature (304)..(304): n is a, c, g, or t
  misc_feature (307)..(308): n is a, c, g, or t
  misc_feature (310)..(310): n is a, c, g, or t
  misc_feature (312)..(315): n is a, c, g, or t
  misc_feature (317)..(317): n is a, c, g, or t
  misc_feature (319)..(322): n is a, c, g, or t
  misc_feature (324)..(326): n is a, c, g, or t
  misc_feature (329)..(329): n is a, c, g, or t
  misc_feature (331)..(332): n is a, c, g, or t
  misc_feature (335)..(335): n is a, c, g, or t
  misc_feature (338)..(338): n is a, c, g, or t
  misc_feature (340)..(340): n is a, c, g, or t
  misc_feature (342)..(348): n is a, c, g, or t
  misc_feature (351)..(351): n is a, c, g, or t
  misc_feature (354)..(356): n is a, c, g, or t
  misc_feature (358)..(359): n is a, c, g, or t
  misc_feature (361)..(362): n is a, c, g, or t
  misc_feature (368)..(368): n is a, c, g, or t
  misc_feature (370)..(370): n is a, c, g, or t
  misc_feature (372)..(374): n is a, c, g, or t
  misc_feature (377)..(377): n is a, c, g, or t
  misc_feature (379)..(379): n is a, c, g, or t
  misc_feature (381)..(381): n is a, c, g, or t
  misc_feature (383)..(389): n is a, c, g, or t
  misc_feature (391)..(394): n is a, c, g, or t
  misc_feature (397)..(397): n is a, c, g, or t
  misc_feature (399)..(405): n is a, c, g, or t
  misc_feature (408)..(408): n is a, c, g, or t
  misc_feature (410)..(412): n is a, c, g, or t
  misc_feature (414)..(414): n is a, c, g, or t
  misc_feature (416)..(419): n is a, c, g, or t
  misc_feature (422)..(424): n is a, c, g, or t
  misc_feature (427)..(431): n is a, c, g, or t
  misc_feature (433)..(435): n is a, c, g, or t
  misc_feature (437)..(437): n is a, c, g, or t
  misc_feature (439)..(440): n is a, c, g, or t
  misc_feature (444)..(445): n is a, c, g, or t
  misc_feature (449)..(449): n is a, c, g, or t
  misc_feature (451)..(452): n is a, c, g, or t
  misc_feature (455)..(456): n is a, c, g, or t
  misc_feature (458)..(462): n is a, c, g, or t
  misc_feature (465)..(467): n is a, c, g, or t
  misc_feature (469)..(471): n is a, c, g, or t
  misc_feature (473)..(477): n is a, c, g, or t
  misc_feature (479)..(479): n is a, c, g, or t
  misc_feature (482)..(484): n is a, c, g, or t
  misc_feature (487)..(490): n is a, c, g, or t
  misc_feature (492)..(492): n is a, c, g, or t
  misc_feature (496)..(504): n is a, c, g, or t
  misc_feature (510)..(511): n is a, c, g, or t
  misc_feature (513)..(513): n is a, c, g, or t
  misc_feature (517)..(517): n is a, c, g, or t
  misc_feature (519)..(521): n is a, c, g, or t
  misc_feature (523)..(527): n is a, c, g, or t
  misc_feature (529)..(531): n is a, c, g, or t
  misc_feature (534)..(541): n is a, c, g, or t
  misc_feature (544)..(544): n is a, c, g, or t
  misc_feature (546)..(546): n is a, c, g, or t
  misc_feature (548)..(549): n is a, c, g, or t
  misc_feature (551)..(551): n is a, c, g, or t
  misc_feature (553)..(554): n is a, c, g, or t
  misc_feature (556)..(560): n is a, c, g, or t
  misc_feature (562)..(564): n is a, c, g, or t
  misc_feature (566)..(566): n is a, c, g, or t
  misc_feature (570)..(570): n is a, c, g, or t
  misc_feature (572)..(575): n is a, c, g, or t
  misc_feature (577)..(578): n is a, c, g, or t
  misc_feature (580)..(580): n is a, c, g, or t
  misc_feature (582)..(585): n is a, c, g, or t
  misc_feature (587)..(588): n is a, c, g, or t
  misc_feature (590)..(590): n is a, c, g, or t
  misc_feature (593)..(597): n is a, c, g, or t
  misc_feature (599)..(601): n is a, c, g, or t
  misc_feature (603)..(604): n is a, c, g, or t
  misc_feature (607)..(607): n is a, c, g, or t
  misc_feature (609)..(610): n is a, c, g, or t
  misc_feature (615)..(616): n is a, c, g, or t
  misc_feature (618)..(619): n is a, c, g, or t
  misc_feature (622)..(622): n is a, c, g, or t
  misc_feature (624)..(625): n is a, c, g, or t
  misc_feature (630)..(630): n is a, c, g, or t
  misc_feature (636)..(636): n is a, c, g, or t
  misc_feature (640)..(643): n is a, c, g, or t
  misc_feature (646)..(646): n is a, c, g, or t
  misc_feature (648)..(649): n is a, c, g, or t
  misc_feature (652)..(655): n is a, c, g, or t
  misc_feature (657)..(659): n is a, c, g, or t
  misc_feature (661)..(665): n is a, c, g, or t
  misc_feature (669)..(670): n is a, c, g, or t
  misc_feature (672)..(674): n is a, c, g, or t
  misc_feature (676)..(676): n is a, c, g, or t
  misc_feature (678)..(681): n is a, c, g, or t
  misc_feature (683)..(685): n is a, c, g, or t
  misc_feature (689)..(693): n is a, c, g, or t
  misc_feature (698)..(699): n is a, c, g, or t
  misc_feature (703)..(703): n is a, c, g, or t
  misc_feature (705)..(705): n is a, c, g, or t
  misc_feature (708)..(712): n is a, c, g, or t
  misc_feature (714)..(714): n is a, c, g, or t
  misc_feature (718)..(718): n is a, c, g, or t
  misc_feature (722)..(722): n is a, c, g, or t
  misc_feature (724)..(724): n is a, c, g, or t
  misc_feature (728)..(728): n is a, c, g, or t
  misc_feature (730)..(730): n is a, c, g, or t
  misc_feature (735)..(739): n is a, c, g, or t
  misc_feature (741)..(743): n is a, c, g, or t
  misc_feature (746)..(747): n is a, c, g, or t
  misc_feature (749)..(752): n is a, c, g, or t
  misc_feature (754)..(757): n is a, c, g, or t
  misc_feature (759)..(759): n is a, c, g, or t
  misc_feature (761)..(761): n is a, c, g, or t
  misc_feature (763)..(763): n is a, c, g, or t
  misc_feature (770)..(770): n is a, c, g, or t
  misc_feature (772)..(773): n is a, c, g, or t
  misc_feature (775)..(776): n is a, c, g, or t
  misc_feature (781)..(781): n is a, c, g, or t
  misc_feature (783)..(786): n is a, c, g, or t
  misc_feature (788)..(788): n is a, c, g, or t
  misc_feature (790)..(793): n is a, c, g, or t
  misc_feature (795)..(795): n is a, c, g, or t
  misc_feature (798)..(800): n is a, c, g, or t
  misc_feature (802)..(805): n is a, c, g, or t
  misc_feature (807)..(809): n is a, c, g, or t
  misc_feature (811)..(811): n is a, c, g, or t
  misc_feature (813)..(813): n is a, c, g, or t
  misc_feature (816)..(816): n is a, c, g, or t
  misc_feature (819)..(819): n is a, c, g, or t
  misc_feature (822)..(823): n is a, c, g, or t
  misc_feature (825)..(826): n is a, c, g, or t
  misc_feature (829)..(837): n is a, c, g, or t
  misc_feature (839)..(850): n is a, c, g, or t
  misc_feature (853)..(853): n is a, c, g, or t
  misc_feature (856)..(858): n is a, c, g, or t
  misc_feature (860)..(860): n is a, c, g, or t
  misc_feature (862)..(871): n is a, c, g, or t
  misc_feature (873)..(874): n is a, c, g, or t
  misc_feature (876)..(879): n is a, c, g, or t
  misc_feature (881)..(884): n is a, c, g, or t
  misc_feature (886)..(887): n is a, c, g, or t
  misc_feature (889)..(893): n is a, c, g, or t
  misc_feature (895)..(895): n is a, c, g, or t
  misc_feature (897)..(899): n is a, c, g, or t
  misc_feature (901)..(901): n is a, c, g, or t
  misc_feature (903)..(905): n is a, c, g, or t
  misc_feature (909)..(909): n is a, c, g, or t
  misc_feature (911)..(912): n is a, c, g, or t
  misc_feature (917)..(919): n is a, c, g, or t
  misc_feature (921)..(921): n is a, c, g, or t
  misc_feature (923)..(925): n is a, c, g, or t
  misc_feature (928)..(928): n is a, c, g, or t
  misc_feature (930)..(932): n is a, c, g, or t
  misc_feature (934)..(934): n is a, c, g, or t
  misc_feature (936)..(940): n is a, c, g, or t
  misc_feature (942)..(943): n is a, c, g, or t
  misc_feature (945)..(945): n is a, c, g, or t
  misc_feature (949)..(953): n is a, c, g, or t
  misc_feature (956)..(956): n is a, c, g, or t
  misc_feature (959)..(959): n is a, c, g, or t
  misc_feature (962)..(964): n is a, c, g, or t
  misc_feature (968)..(971): n is a, c, g, or t
  misc_feature (974)..(976): n is a, c, g, or t
  misc_feature (978)..(981): n is a, c, g, or t
  misc_feature (983)..(986): n is a, c, g, or t
  misc_feature (988)..(992): n is a, c, g, or t
  misc_feature (994)..(996): n is a, c, g, or t
  misc_feature (999)..(999): n is a, c, g, or t
  misc_feature (1003)..(1003): n is a, c, g, or t
  misc_feature (1005)..(1008): n is a, c, g, or t
  misc_feature (1011)..(1014): n is a, c, g, or t
  misc_feature (1016)..(1019): n is a, c, g, or t
  misc_feature (1022)..(1022): n is a, c, g, or t
  misc_feature (1026)..(1027): n is a, c, g, or t
  misc_feature (1030)..(1030): n is a, c, g, or t
  misc_feature (1035)..(1036): n is a, c, g, or t
  misc_feature (1039)..(1040): n is a, c, g, or t
  misc_feature (1052)..(1052): n is a, c, g, or t
  misc_feature (1054)..(1057): n is a, c, g, or t
  misc_feature (1061)..(1062): n is a, c, g, or t
  misc_feature (1064)..(1068): n is a, c, g, or t
  misc_feature (1073)..(1073): n is a, c, g, or t
  misc_feature (1078)..(1079): n is a, c, g, or t
  misc_feature (1083)..(1084): n is a, c, g, or t
  misc_feature (1088)..(1088): n is a, c, g, or t
  misc_feature (1091)..(1091): n is a, c, g, or t
  misc_feature (1094)..(1100): n is a, c, g, or t
  misc_feature (1103)..(1104): n is a, c, g, or t
  misc_feature (1107)..(1107): n is a, c, g, or t
  misc_feature (1109)..(1109): n is a, c, g, or t
  misc_feature (1112)..(1113): n is a, c, g, or t
  misc_feature (1115)..(1115): n is a, c, g, or t
  misc_feature (1117)..(1117): n is a, c, g, or t
  misc_feature (1119)..(1123): n is a, c, g, or t
  misc_feature (1126)..(1127): n is a, c, g, or t
  misc_feature (1129)..(1129): n is a, c, g, or t
  misc_feature (1131)..(1132): n is a, c, g, or t
  misc_feature (1134)..(1134): n is a, c, g, or t
  misc_feature (1138)..(1139): n is a, c, g, or t
  misc_feature (1141)..(1142): n is a, c, g, or t
  misc_feature (1144)..(1144): n is a, c, g, or t
  misc_feature (1160)..(1160): n is a, c, g, or t
  misc_feature (1163)..(1163): n is a, c, g, or t
  misc_feature (1181)..(1181): n is a, c, g, or t
  misc_feature (1183)..(1184): n is a, c, g, or t
  misc_feature (1186)..(1187): n is a, c, g, or t
  misc_feature (1189)..(1190): n is a, c, g, or t
  misc_feature (1194)..(1194): n is a, c, g, or t
  misc_feature (1196)..(1199): n is a, c, g, or t
  misc_feature (1202)..(1203): n is a, c, g, or t
  misc_feature (1205)..(1205): n is a, c, g, or t
  misc_feature (1207)..(1210): n is a, c, g, or t
  misc_feature (1212)..(1212): n is a, c, g, or t
  misc_feature (1214)..(1215): n is a, c, g, or t
  misc_feature (1217)..(1217): n is a, c, g, or t
  misc_feature (1219)..(1219): n is a, c, g, or t
  misc_feature (1221)..(1222): n is a, c, g, or t
  misc_feature (1225)..(1227): n is a, c, g, or t
  misc_feature (1229)..(1234): n is a, c, g, or t
  misc_feature (1236)..(1238): n is a, c, g, or t
  misc_feature (1244)..(1244): n is a, c, g, or t
  misc_feature (1249)..(1252): n is a, c, g, or t
  misc_feature (1254)..(1258): n is a, c, g, or t
  misc_feature (1260)..(1263): n is a, c, g, or t
  misc_feature (1265)..(1269): n is a, c, g, or t
  misc_feature (1274)..(1280): n is a, c, g, or t
  misc_feature (1282)..(1283): n is a, c, g, or t
  misc_feature (1286)..(1292): n is a, c, g, or t
  misc_feature (1296)..(1297): n is a, c, g, or t
  misc_feature (1300)..(1300): n is a, c, g, or t
  misc_feature (1305)..(1306): n is a, c, g, or t
  misc_feature (1309)..(1310): n is a, c, g, or t
  misc_feature (1314)..(1320): n is a, c, g, or t
  misc_feature (1322)..(1323): n is a, c, g, or t
  misc_feature (1325)..(1325): n is a, c, g, or t
  misc_feature (1328)..(1329): n is a, c, g, or t
  misc_feature (1334)..(1334): n is a, c, g, or t
  misc_feature (1336)..(1336): n is a, c, g, or t
  misc_feature (1340)..(1340): n is a, c, g, or t
  misc_feature (1342)..(1343): n is a, c, g, or t
  misc_feature (1348)..(1349): n is a, c, g, or t
  misc_feature (1352)..(1353): n is a, c, g, or t
  misc_feature (1355)..(1356): n is a, c, g, or t
  misc_feature (1358)..(1360): n is a, c, g, or t
  misc_feature (1363)..(1367): n is a, c, g, or t
  misc_feature (1370)..(1371): n is a, c, g, or t
  misc_feature (1373)..(1374): n is a, c, g, or t
  misc_feature (1377)..(1386): n is a, c, g, or t
  misc_feature (1388)..(1389): n is a, c, g, or t
  misc_feature (1391)..(1394): n is a, c, g, or t
  misc_feature (1397)..(1400): n is a, c, g, or t
  misc_feature (1405)..(1405): n is a, c, g, or t
  misc_feature (1408)..(1411): n is a, c, g, or t
  misc_feature (1414)..(1417): n is a, c, g, or t
  misc_feature (1419)..(1419): n is a, c, g, or t
  misc_feature (1421)..(1421): n is a, c, g, or t
  misc_feature (1423)..(1425): n is a, c, g, or t
  misc_feature (1427)..(1430): n is a, c, g, or t
  misc_feature (1433)..(1435): n is a, c, g, or t
  misc_feature (1437)..(1438): n is a, c, g, or t
  misc_feature (1440)..(1441): n is a, c, g, or t
  misc_feature (1443)..(1444): n is a, c, g, or t
  misc_feature (1446)..(1450): n is a, c, g, or t
  misc_feature (1453)..(1456): n is a, c, g, or t
  misc_feature (1459)..(1460): n is a, c, g, or t
  misc_feature (1465)..(1465): n is a, c, g, or t
  misc_feature (1468)..(1469): n is a, c, g, or t
  misc_feature (1474)..(1476): n is a, c, g, or t
  misc_feature (1478)..(1479): n is a, c, g, or t
  misc_feature (1482)..(1482): n is a, c, g, or t
  misc_feature (1484)..(1486): n is a, c, g, or t
  misc_feature (1493)..(1493): n is a, c, g, or t
  misc_feature (1498)..(1499): n is a, c, g, or t
  misc_feature (1505)..(1506): n is a, c, g, or t
  misc_feature (1508)..(1508): n is a, c, g, or t
  misc_feature (1510)..(1514): n is a, c, g, or t
  misc_feature (1516)..(1516): n is a, c, g, or t
  misc_feature (1520)..(1523): n is a, c, g, or t
  misc_feature (1525)..(1528): n is a, c, g, or t
  misc_feature (1531)..(1532): n is a, c, g, or t
  misc_feature (1534)..(1537): n is a, c, g, or t
  misc_feature (1540)..(1544): n is a, c, g, or t
  misc_feature (1546)..(1549): n is a, c, g, or t
  misc_feature (1551)..(1551): n is a, c, g, or t
  misc_feature (1555)..(1557): n is a, c, g, or t
  misc_feature (1559)..(1559): n is a, c, g, or t
  misc_feature (1561)..(1561): n is a, c, g, or t
  misc_feature (1563)..(1563): n is a, c, g, or t
  misc_feature (1566)..(1566): n is a, c, g, or t
  misc_feature (1572)..(1572): n is a, c, g, or t
  misc_feature (1576)..(1576): n is a, c, g, or t
  misc_feature (1582)..(1582): n is a, c, g, or t
  misc_feature (2280)..(2280): n is a, c, g, or t
  misc_feature (2946)..(2947): n is a, c, g, or t
  misc_feature (2950)..(2956): n is a, c, g, or t
  misc_feature (2960)..(2961): n is a, c, g, or t
  misc_feature (2963)..(2963): n is a, c, g, or t
  misc_feature (2968)..(2968): n is a, c, g, or t
  misc_feature (2971)..(2974): n is a, c, g, or t
  misc_feature (2977)..(2977): n is a, c, g, or t
  misc_feature (2980)..(2981): n is a, c, g, or t
  misc_feature (2983)..(2986): n is a, c, g, or t
  misc_feature (2988)..(2988): n is a, c, g, or t
  misc_feature (2990)..(2990): n is a, c, g, or t
  misc_feature (3666)..(4000): n is a, c, g, or t
tttnatnntnnnngncnnnnnnnnannganaganntnnnnnttannannannannnnnntnnccctnnnnnnnnntnnnnnnnancaannnnnntttnnnnnnnannannnncannnnnannannnnnnnannnnnannnntnnannnnnannantnntnnnntttcannntcnccannnncannnncatnnnnannnnnaagggaangnnnannnncatntnnnnnnnntnnnnnnnatnnnnatnnnnantnncantnnnntncnnnnncnnnannnatnaatannaannnnnnnnntnntnatnntnannnngnannnngnnntantnntantantnannnnnnnttnatnnntnnanntgaaantnannntantntnannnnnnnannnnaanannnnnnntcnannncnannnntannngtnnnnntnnnantnnaaannaaanannaannannnnnagnnnannnannnnnantannnatnnnnantcannnnnnnnnaataannanaatnannntnnnnntnnnaannnnnnnncangnannananntnnnnntnnnantaanannnnannantnnnnannantannnnnannnannatnannataannannatnannatcantatcantatnnnnatncnnatnnnnannntnnnnntttnnannnanannnnannnatannnnnaattnnaatngnaannnnnanaatnatantnatantnataannnnnannnatnnannnnannnnantntnattcttntnntnntaatnannnnanannnngnaannncnnnnannntnanaanaanaannannatnnnnnnnnnannnnnnnnnnnncanctnnnantnnnnnnnnnntnnannnnannnnanntnnnnntnannntnannntgananngaaannnanannnatnannntnannnnnannangaannnnnaantanaannnaaannnnaannntnnnnannnntnnnnntnnnganaaanannnnaannnnannnnaanttannatnattannatnnatatatatatanannnnaaanntnnnnnttttnttttnntttnntttnatnttnnnnnnncannaanantannantntnnnnntannantnntnattnntnntnattattattattattnttnttgttgttgttgttgttntnntnntnntaanannnnaanntnannnnantnnantntnnttnnntnnnnnnannnaaatanaaatnnnnannnnnannnntnnnnntccannnnnnncnnatnnnnnnnaaannganaatgnnaanntaannnnnnntnntnatnntaatnanaatnannatgannatnnanntnnntcnnnnncannannaannnnnnnnnntnntnnnnatnnnnatagnaannnnaannnnantnannntnnnnatnnnannannannannnnnaannnnaannataanaannataannntnntantnnnaataaanataannataatnntnannnnnangaannnnannnnaannannnnaannnnnannnntntttnnntntnantantattantatnattatnattattattattattattattattattattattattattatttaataattaattactaatcatgctaaacttttatactatatattttaaataaaagaaattataacaaattataattcaactacttcatccccaattcatcttacagttgatattaaaaatttaaaataccgagcacctactccaaaaaatattaaggaaggaaaatataaatcaatatcaccagatagttattttaatgagtattcaaataataaaaataatagtattgatagtgattcaactaaatataatacaagaaaattagaattaagtaataataaaaatattaaagaaaccgaatcaaaaatggagttttctcttaaaaagggtatttatttatttattttttttttttttttttcatagttatttcataattttatatagatcttaatttttatattaacattaatttatattttgattattataattataattttatttttattttattttatttattttattttaagaaataaaatctgtaattactacaagagaatcaaataaaacttcaattactaattcaaagttgatacagactccatccccaattaaagtaccttcagcagaaaaatatattccccctaatttgagaaataaatatggaattggtgataattctaatccaaattcaaatcttaattctttgnataaatctattctatcatctgatctatttaatgatgtaaacgataaagttaatcacaaaacatcatctaatataaacaaatcatctgtaaaaattcaaagtgaactcactaaagaaattcaagctcaacaatatttaacaagaaataaatcaccatttacaaatttatctttgcctgataacaatagtaatagcaataataataatactaaaaataatagtaataataactgtactagtaataatagtaataaaataattgagaataaggttaatgttattactaataaaaattcattattatttaattctagaagacataaattaaatccaaaaacgaatttaaataataattatgatacaatgaataatgaagattttatgaatgataattttattaattcaaatccaattaataaatattacattaattcttttaatccttcatcttttgaaaattttgacaataatagtgatagtttaactaattattacagaacatataaataactaataataaataaatatatatatatatttccatatatagtttttatataacttttttattttctccatatctattattagtaataaaatataaatattaaacacgaaaattactatgatgcaggttaaaatctattaaaaaaaaaaaaaaaaaaannttnnnnnnntttnntnttttnttnnnnttnttnnannnntnanaaaaaaaaaaaaaaaaactttatgtagattttattattttattactattattcagtcattaacaatagcaacaacaacaacaacaaaaaaaaaaaaaaaaaaaaaaaaaaaaaaaaaaaaaaaaaaaaaaaaaaaaaaaaaaattaataataaaacataataatgataataaagtactataataattacaaatgaaaaatagattttttatgattttagtttaaatatagattaaataaatatatattataatatattatttttttttttctagttattaaatgtagaatttttattattcatttactaacatagtacatttatgaatattaatcattaattatatttgttaacttcatatttattatactatattttttgaatttattttatatttaattttatatttttattaaattacattttattcatattctcatattctttattatttattttatttattttgtgatttgaataattattatttttaataaaaaagaatcattgtactaattttgctttattttattttattttattttatatacttgtacttttatattattacattcaatatctattttattttattttatatacttgtacttttatattattacattcaatccggttaacgcaatatatatttttttattcctagtctaaaaaaaannnnnnnnnnnnnnnnnnnnnnnnnnnnnnnnnnnnnnnnnnnnnnnnnnnnnnnnnnnnnnnnnnnnnnnnnnnnnnnnnnnnnnnnnnnnnnnnnnnnnnnnnnnnnnnnnnnnnnnnnnnnnnnnnnnnnnnnnnnnnnnnnnnnnnnnnnnnnnnnnnnnnnnnnnnnnnnnnnnnnnnnnnnnnnnnnnnnnnnnnnnnnnnnnnnnnnnnnnnnnnnnnnnnnnnnnnnnnnnnnnnnnnnnnnnnnnnnnnnnnnnnnnnnnnnnnnnnnnnnnnnnnnnnnnnnnnnnnnnnnnnnnnnnnnnnnnnnnnnnnnnnnnnnnnnnnnn

SEQ ID NO: 1216 - DNA, 4000 bp, Escherichia coli
  misc_feature (1988)..(1988): n is a, c, g, or t
  misc_feature (1997)..(1997): n is a, c, g, or t
  misc_feature (2278)..(2278): n is a, c, g, or t
  misc_feature (2280)..(2280): n is a, c, g, or t
  misc_feature (3018)..(4000): n is a, c, g, or t
gcaaatgagctgtgcgaaccttataagtttgatgagtttggcagcagagtttacacagaacttttgggcgctgttatcatttcaattactgtaattgttgttgccattccagaaggattacctctggctgttacgattgctttgagtgttgcaagtgcgatcatgtagaaagaaaacaacttggtgagaaacctaaagtcagctgaagtaatgggtcaagtgactcacctggtatctgacaaaactggaactttaactaagaacgaaatgaacacaatgactgtcatgacaggaaatagagtatttgctattagtggtaaatgcgatgatgcagcgaagaaaaagcttgttgaagagacaaaggactatcttggatctaactgggaagttcttgaacacggtgttctttggaacagtgatgcaaccagaattgaaaataagactgaaaaacaaatcaaggatgagatttctaatggtatcaacaatccaaataaaatggaattcaatggtaatgtgacagagaaaggtcttctcaaattcttccttgctctatacactacagatgtacttgatgacgattataaggcccttcaaaatgtaagagattaactcgaaccagaagatctcctagcttctttcagattcagttccgcaagaaaaatggcttcgatggccatcaagacaggtgatgatgaagtaactatattcgtcaaaggtgcaccagatatcatgttctaacgagcgacccatgttttagcttttgaagatggttcaccagttaccaaatcatgggatgaagaatgtgatgatgtcagtggtattgaaggctgcgaagaaggtgcaacttaccaacaaatgtacggacaatgtgtcaagaactttgctgatcaagcttacagaactatcttggtttcaagaaaagttctcagcatgggagagtgggagtaaatgaaagaagaaaatgacggatttgaaactcaagagagcatggtttgctttgaggaaaacctggaaattttgggcttgtttggtattcaagatccacttagagatgccattgttgattctgttaaaactgttaataaagctggtattaaagtcattatgtgcactggtgacaatttggataccgcaattgctatttcaaagaatgctaaaatcgtgactgatgatcaaattaacgccagtgaagattcgtagagattttcttgcatgactggatcagatttcagaacttatgtttatgacctcgacaaggaagatcccgattattctgcaaaacttgcaggatgtggatttggtgaacctttcgattaaagaaagttcaacatcatggcaaaatacttgagagtgatggcaagatctactccaatcgataagtagttactagtgaagggtttttagaaatctccatacactagtactgaacttattgatgatgataacgtaaacttatgcagtgttgccgttactggcgatggtaccaatgatgctccagctctcaagaaagctaatgttggatttgccatgaacgttggtacagatgttgcaaaggccgctagtgatatcattcttttgaaaaatgacttttcacatattgttactgctttaaaatatggaagaaatatctttgataacatcagaaaattcttgcaattctagttgaccgtcaatgttgttgccatgttcattgtcttctttgggtcagtgattcttaattcatcacccttaactgctgttcaaatgctatgggtcaacttgatcatggatacgtttgctgctcttgctcttgcaacagaacctccagataattccatcttactcagacaaccccaaccatcaagcactgctattactaccaaagtgatgtggagaaatgtcattggacattcaatttaccaaataattgttctcattttggtcatttttgtctcctaaggatgtcttctcccacattatgatatcaaatgcattggtgaaagagatgntaatggtcnttgcccaaaaggataattgaatccattctatgcagcaaatcgctatttctacttgaatactgaaaagtattggaaaacagaaaccgcattggcatggaccgtcgaagattttgaagctgatcttttcattcaatacaattgtgaaaagcttacataggagtttggacacgatgttaagcttaagaaagatttagatgactgtgagactttagatacagtaaaggatttggctaagttccctcttgatacatccgacaagagagccttttcaactattactnanacacctgacagcgttgagaagaaagtctataaagacagaagaagctcaaatgggttgtatatgccttaatacgaatctgcaggagctgatacccccatgttgcttcacatgacgtatctattctagatcttcgtatttatgcagcttttcaaccaattcaatgctagaatgctcaaagaagatgaatataatatcttcagaggctttttcaagaacaagtatttcgtgttcgttgcaatcatcaccttcgttgttcaaatgggaatggttgaagttggtggaaaaatcacaaagacttacccactcaacatggaatagaacggaatctgtgctctgattggttctggtgaactcatttggggtcttttccttaaattcttaccacttagttggttccaattcaaatgcttgcaattcgatgagaagccaatgactccagaggaagaatcaaaatctattaaaggcaaacttaaagcaagttctgttagatatgctggctctgagtcttagagaaagaaggttcaggagcagctctagcaaggtgtccaggatgcataccaaaaaggtaaatggtgagatctaaaccaaatcaaattttcttagataaatatgacaaaagttttcaatattgctgaaacatatacaagatactacattgaaaatatattcatttttctgaaaaattgatataaaaaacataaattttaaagccaatatatttaatatatagatgaaacnnnnnnnnnnnnnnnnnnnnnnnnnnnnnnnnnnnnnnnnnnnnnnnnnnnnnnnnnnnnnnnnnnnnnnnnnnnnnnnnnnnnnnnnnnnnnnnnnnnnnnnnnnnnnnnnnnnnnnnnnnnnnnnnnnnnnnnnnnnnnnnnnnnnnnnnnnnnnnnnnnnnnnnnnnnnnnnnnnnnnnnnnnnnnnnnnnnnnnnnnnnnnnnnnnnnnnnnnnnnnnnnnnnnnnnnnnnnnnnnnnnnnnnnnnnnnnnnnnnnnnnnnnnnnnnnnnnnnnnnnnnnnnnnnnnnnnnnnnnnnnnnnnnnnnnnnnnnnnnnnnnnnnnnnnnnnnnnnnnnnnnnnnnnnnnnnnnnnnnnnnnnnnnnnnnnnnnnnnnnnnnnnnnnnnnnnnnnnnnnnnnnnnnnnnnnnnnnnnnnnnnnnnnnnnnnnnnnnnnnnnnnnnnnnnnnnnnnnnnnnnnnnnnnnnnnnnnnnnnnnnnnnnnnnnnnnnnnnnnnnnnnnnnnnnnnnnnnnnnnnnnnnnnnnnnnnnnnnnnnnnnnnnnnnnnnnnnnnnnnnnnnnnnnnnnnnnnnnnnnnnnnnnnnnnnnnnnnnnnnnnnnnnnnnnnnnnnnnnnnnnnnnnnnnnnnnnnnnnnnnnnnnnnnnnnnnnnnnnnnnnnnnnnnnnnnnnnnnnnnnnnnnnnnnnnnnnnnnnnnnnnnnnnnnnnnnnnnnnnnnnnnnnnnnnnnnnnnnnnnnnnnnnnnnnnnnnnnnnnnnnnnnnnnnnnnnnnnnnnnnnnnnnnnnnnnnnnnnnnnnnnnnnnnnnnnnnnnnnnnnnnnnnnnnnnnnnnnnnnnnnnnnnnnnnnnnnnnnnnnnnnnnnnnnnnnnnnnnnnnnnnnnnnnnnnnnnnnnnnnnnnnnnnnnnnnnnnnnnnnnnnnnnnnnnnnnnnnnnnnnnnnnnnnnnnnnnnnnnnnnnnnnnnnnnnnnnnnnnnnnnn

SEQ ID NO: 1217 - DNA, 4000 bp, Escherichia coli
  misc_feature (1989)..(1989): n is a, c, g, or t
  misc_feature (2543)..(2544): n is a, c, g, or t
  misc_feature (2579)..(2579): n is a, c, g, or t
  misc_feature (2611)..(2611): n is a, c, g, or t
  misc_feature (3239)..(3239): n is a, c, g, or t
  misc_feature (3871)..(3871): n is a, c, g, or t
  misc_feature (3978)..(3978): n is a, c, g, or t
gattttggccgggtctccagaagactctctgacgatccatcgctgcgctggctgggtccgcacaaaggtgtcgtacacctggcgctggcttcgattaccaacgcctgtttcgatctgtgggcgaagagccgccaggtgcccttgtggaaacttctcatcgacctcacggcggcggaggtggttcggctcctggatctgagctacttggaagacgtcctttgccaagcagatgctctcgaactcttgcgcgaaccgtttgggagccgtgccgagcggaaggggattttgaaaaccggatatccagggtatgacacttcagtgggttggatagcttacgacgacactaaggtaaaggaattaacggaacgcgccattgaaaacggattcaaagccttcaagctgaaagtgggttcggccgacgaaaatcgcgatttgcgccgggctcagatgttacgcagctcgatcggcggaagtgccgctttgatgtttgatgctaaccagcgctgggatcttaccaccgccattcgcatgtgccgcagcttgggggcgtttgagcccttatggatcgaggaaccgactcaccccgatgatattcacgcgcacgtggtactggccggagaaatcgctcctgtaaagattgcagccggagagcacattccgaatcgaattctgttcaagaatttcatgcaggccggagccctgcactacgtccaggcagattgcactcggctggccggagtaagtgagttccttaccgtgagctttcttgccaagaagctcgggtttccggttgtgccccatgtcggcgacatgggacagttgcatcaacatctgcttctgttcaatcatattgcgctggggcacgaggtcctgttccttgagcacatcccccacctgcgcaatcattttgtgtttcccgcgcgggtcaacgacggacgctatgagacgccacaggagccgggtgcatcgtgcgatctcaaggtgaccgtagggccgcgtaaagtcatatcttccctggcttagagtggttgcccgcctcgaaaggacttcttgtggacaccctgaaatcaaacctcgaccacgcagagattgccatctggaattcggaaaactggctgtatgaagattttgaggttggcaagcgcgcacgttcaattcgccgaactatatcggagggcgagagcatgatgttcaacgcgctggtactcgacatgcacccgtacgtggccgatgaagttttcgctcatgaggaaggcatttttggcaaacgcctggtagctggcgcaatggtgttcagtttaggtctggggctgatggcccacaacaacattcataccttttcttacggttatgacaagttacgttttatcaagccggtgtttattggggacacgatctacacgatccgcacccacaaagagaaatggccgaagtaccccgagcttggtatggtgcgggtttcctacgaggtgttcaaagtgccgggagaattagtgctttattgcgaacatttacaaaccgtaaagtatcgcaacccggcggcattcaaagatcaaatcgaacgcaaggcgacttgaacacggcccgttcaattttcgcgcttctccgcaggacactgaaagagtgtggctgcgtgaacatcgctcgcgcaccgcagcacactcgaatctcctcacagacatgaagggggaacatcctgcctacgcgtccccaccggaaccgggctctcttatgactagaatgactatgatgacctcaatgaggcttggcggattagttatgggctcgcaaagctggaccgtggctgaagccaaggcaaaattcagcgaaattatcgagaaagcaatgtccgaggggccgcagaccattactcggaagggccgcactgcggctgtggtcgtcggggcagaggaatggcaacgaaagacaaaacgcgttggcaacctggcagaattttttgccgcatctcccctgcgaggatcgggtctnaagctcctgaagcttcgtcggctgaaagagcggcctcggaagactaatctatgagtttctcctggatacaaacgcgatttcggaatgggtcaagccccgacccaatccgggcctcatcggttggatggagtcagctgatgaggatcggattttcatcagtgtggtctcgttagctgagatacgctatggcgtggaacacatggcggcgggaagacgtcggaaccggcttgaggattggctacaacatgaattgccgttgagatttgaagctaggattttgcccgtcgacaccaaagtcgcggatgcctggggtaaaacggtatcgcgcagcgaagcggcagggcgtccgataagcgcaatggatgcctttctagcagcaacagcagaaatccatcgcctaacgctggtgacccgtaatgtttccgactttccactgtttaaagaagtttctcaatccttggacttagactccgctcactgatctcagttcacccgattggttcttcccgattcaaatcctgcccggccagccacatgtgaatgaaagcggggcnngctagttcagtaggaagaacacggctctcataaanctgttgcgcatggttcgaatccatcgcgagcnaccatggagcgcctccggcgaggggcagcggcttatacccacttctccgcaggagggtcgctggcaggacgatcgcctcaggaggagcgctgcgcgacggcaaggactgccaatgcggccagaatgattgccatgccagcggccaggaagagcttgcttggcgctgagactccgtcccactcacccgtaacaaccccggccgcgttgctggtgataatgatcatgcccatcaacagcggccacccgattaccacgccgagattgcccatgtgagagattccaagaccatagagggcttgaccaccaaaccagaacagtcccatgagagcgccacaaaaccagccggtcctggccccttctccggcaaatttactcaaactgtggttctttcgcagaagatagccgcaatagatcagattggcgagaaatcctccgcttaccgcgagagccgtgacgactccggttgcccacaaactgctcgtaccgaattcgcgagcgtgctttaccgcctccccgccgaaggcgtaggaaaaattcagggtcgaggaaagcaagccggaaagacagcaaaccgtgaagcctacccaaaaggacgtccggggagaatcatttggtgcctggttcctgnccgcgtcccgcaacactcctgctcgtgcgctcaccgcgatacccaccaacataatggcggtgccgatcaggtatgtgtgtccttgtggggtgtgcaactgttgtggcgtcagaaccagcagaggtatgagcgaaccgaccgaggcacataagcccaggatgatcgccatccctaaaccgatgcccagcatggtgagccccaccccggtcagggttgcccccatcccccagcacacgccaaagccggcaatgctcaccagcgtttttgtcgaactggcggcataaacctgtccggtatgaggtaccgtcagtgtggtgaggagccatggcaagaacaccattcccgaaaggcaaaaggcgagccagatgttttcgtagctccatcgtcgagcatatttcatgggcacagcaaagacaccttgcaacaaccctgcgaggataacggcgcccaccgccagccagagctgtggggtcatcgcggggtcccagcggcaatttgtgccacacgctcatccgcctcctgcaacaaaacttccacgtttcgctctcctgagtttgcttctgacaccatggcatcaatgatgtggttgatctccggccaagtggtcagcgaaggaatttcacgggcattgncgtggagcgtttccaaatcgcgatagaagggaatcctttgattgatttccggatcttcccaggttgagcggcggcatccgatgccaccttccagggtaagcagcttntccatgcgtttgctggcacagt

SEQ ID NO: 1218 - DNA, 4000 bp, Escherichia coli
  misc_feature (266)..(266): n is a, c, g, or t
  misc_feature (272)..(272): n is a, c, g, or t
  misc_feature (290)..(290): n is a, c, g, or t
  misc_feature (368)..(368): n is a, c, g, or t
  misc_feature (377)..(377): n is a, c, g, or t
  misc_feature (443)..(443): n is a, c, g, or t
  misc_feature (449)..(449): n is a, c, g, or t
  misc_feature (564)..(564): n is a, c, g, or t
  misc_feature (603)..(603): n is a, c, g, or t
  misc_feature (1020)..(1020): n is a, c, g, or t
  misc_feature (1353)..(1353): n is a, c, g, or t
  misc_feature (1464)..(1464): n is a, c, g, or t
  misc_feature (1498)..(1498): n is a, c, g, or t
  misc_feature (1503)..(1503): n is a, c, g, or t
  misc_feature (1506)..(1506): n is a, c, g, or t
  misc_feature (1551)..(1551): n is a, c, g, or t
  misc_feature (1565)..(1565): n is a, c, g, or t
  misc_feature (1578)..(1578): n is a, c, g, or t
  misc_feature (1707)..(1707): n is a, c, g, or t
  misc_feature (2191)..(2191): n is a, c, g, or t
  misc_feature (3111)..(3111): n is a, c, g, or t
  misc_feature (3427)..(3427): n is a, c, g, or t
  misc_feature (3978)..(3978): n is a, c, g, or t
gtgcacttgatgatgccatgagtaaaatcaagaccaacattgatgcttggcttgagtttgatgttgatgtgattatttccagtgccagcggttgtggtttgatggttaaagattacgcatcaatatttgatgagtatgatccgtattatcaaaaggcgatcattatttcaaataaaacgaaagacattgctgaatttttagtagataaggatttaacgcaacttaatttagaaagaactaacgttgtttatcaagagccttgcacnatgcancacggtcagcaattaagnggcttggtaaattctattttgaccagtttgggctacacaactacaccagtggttgattcacacttgtgttgtggttcngcaggtacntattcaatttttcagccaaaattagcccaaactttgaaaattaataaattaaagcatttgcaggcntccaanccgcagatgattgttaccagtaatatcggttgtttaatacacctgcaaaaaggcactaaaataccggtcaaacattggattgagttgttaaatgggtagaagaagaaaaccaaangccaaaacctacgaattagaaatcgaatcgctttcacangaaggtcgaggtattgcgcattttgaagaaaaagtgatttttgtctctggtgctttaccgggtgaaaccgtgattgctgaccgtaccttttctcgtgctaagtttgaagaggcggatgtcaaggaagttcttaaagcggcgaataatcgcatcacaccaaaatgtgaagtatttggtatttgtggtggctgctcgtttcagcatttgtcgagcgaagatcaaatcatcgctaaaggtaaatggctaaaagatgctttgatgcaacaagctaagacagaacctataatttggctggagccgcttcaagttgagagttggggttatcgtcgcaaggcaagactcggtgtgcgttacgttgctaaaaaagaaaaagttttggtgggttttagagaaaaaaaatcttcattcataactaanatgagtcgctgtgaagttttgcatccttcacttggcgatcatcttgaagatctggcacagtgcattgaacaattgagcgtcaaatctcaagtgccacaaattgaagtggccattgctgaacaagacaccgtgttgattctacgacatttagaaccactgaatgctaaagatgagcagatattggcagactgtgcccatgatcttggctttacttggtacacacaaagtggtggtctggatactgttaagcctttaaataagtcagtagtattgacttattctcatcctaatcataatattgaaatggagtttttaccgactgattttactcangtgaattttaagctcaatcaaaagatgattaatttagcgcttgaattacttgaattaaatgaatccgatgaagtgattgatttattttgtggattgggtaactttaccttnccgattgcacgacacgttaaacacgtggttggtnttganggngatttaggtttgattgagcgcgctaaatacaacgccgatcaaaanaatataacgaacgntgatttttacaangctgacttgtttcaagaagtggatggttttgagtggtttaggggtaaaaattacaacaaagctttactcgatccagctcgatccggtgcactggaaattgttgaatttttaccaaaacttggtattgancgcttggtgtatgtatcgtgtaatccggccactttagctagagatacagcgcgtttaatcgagttagggtataaactacaaacagccggcgtgatggatatgtttccacaaacggcccatgttgaatccattgctttatttactaaatgattacaattaacatttcagaacaaacacttgagtacaaagataaatcttatttaatcagtagcgcgttaaatggtgtgggtgaagttgaaggttcttattgtacgccgatagggaagtttaaaatttacgctaagataggtcaggatcttcctgataattcagtattggtatcgcgccaagcaaccggcgagatttacaacaaagcattgtccatccaacatcctgatcgagactggatactaactcgtattctttggttagaagggtcggaagagcgcaatcaaaacaccaaggatcgatacatctacattcacggatcgccagacgaaaccanaatgggaaaaccaggatcaaaaggctgtattcgtatgcgcaataaggatgttgttgagttgtttgagaatgttcaaattggtgaagatgtcgttataatgaagtcatgagtcagttagtacaatacttgccaaaaaaagcctatgagcatttacaagaaaacgataatgcttttttgatagacgttcgcactgaagccgaaaacaagtttgttggtagaccgcttgattgtatttttgtaccttgggtggatgagccagattgggagccacacccacaagagttcattggtgcagtaaaacgttttattggtaagcgtgatcgtattttagacactgaaattattttgatctgtcgcagtggttatcgttcagacgatgctggaaagtgcttaatagatcatgggtttacaaatgtagcacacattgtgagcggctttgagggtgaccttgatgagagtgatcagcgtggtaatgtgaatggctggcgtcacgatggcatgccttggaatcaatgttagtgagttatctcgatagtattaagttgttcgttcatcctcgagtaataaccatgctatttttgggtttttcggctggaattcctattttgcttattttttcaacgttaggcttatggcttaatgaagcgggtgtagcaaaatccaccattacttacttttcatgggcagcactaggttactcctttaaatttgtttgggcaccattggttgatcgcttacctttgccttttttaacacactttttaggtcgtcgtcgtgcatggatgctggtttctcagctggccattatgggctctattttgttaatgtccacagtggatccaaaagccggtgtaagcagtttagagatacttgcctatggcgccgtacttttgggtttttcctcagccacgcaagacatngtaattgatgcttatcgcattgaatcggctgatcaagacatgcaatccatgctttctgccacttacattgcaggctatcgaatcggcatgttggtagcaggtgcaggcggtttgtttatggccagttatctgggctctaccaaagagttatacagttattctgcatggtctaatacttacgtcatcatgtctggtgtaatgctgattggagtgatcaccacgctgattgttagtgaacctaaatctgaacaaaaagaagtggaatacagcacacaagattacgctcgatttttcttattatttttatcggttgttnctgtttttattttgacttttgtatcaacatcagatttggtgaaagacttaaaaggatcattgagtgcggttttttccaataaacatttagccggttttattgtaggcagtttgcgcatggtattggctttagtgggtgcttacgttgctgcaagagtgttgattgcgtttaacattgtgaaccgatccatggttaatagtacttacgtggatccgattaaggatttctttaatcgttatgggttgaacgttgcgctgttgtttttagccgtgattggcttgtatcgaattagcgatattgtgcttggtgtggtggctaatattttttatcaagacatgggttttactaaagttgaaattgccacaatctccaagacattcggtttgtttatgaccattgccggcgggttttttggtggggtaatggcaatcagagttggtgtatttaaagtgttatttttaggtgcattactctcatcactgaccaatttattgtttattgttttagcaaatgtgggccatgacattacctggttgtacgttaccattacnatggataatctttctgccggat

SEQ ID NO: 1219 - DNA, 4000 bp, Escherichia coli
  misc_feature (3141)..(3141): n is a, c, g, or t
  misc_feature (3536)..(3536): n is a, c, g, or t
ggtgatgatcagtgggccgacattgtccgctggatttataatgcgactgtagcagctgaggaattaggtgtttcatcatcaaacgtggacagcatgaagggttccaataaccctgaaattctgcgtcttctcggtgttgaaggcagtcaaggcgaagagcttggaatgagcaaagactgggcttatcaggtcattaagcaagttggaaactacggcgaaatattcgagcgcaatatcggtacaaacacaccgattggcttggcccgtggtttgaataaccaatggactaagggaggacttcagtattctccaccattccgttaatttttattaattaacgtttttgtttttaagcgcacatgttcttttcaatgggactgtgcgcttttacatttgaaggaatcattttcactttttagttaacgggaagttacttacaatgtcctcagcatcagtaactgcaaatgaacccatgctcctgttacgtttgtggcgtaatcaggaataccgctcagtttttattcagatcatgactatgctgatcctgttcacatttttgggaatgatcggcaacaatgtcgcaaacaacttggagaaagcaggcaaagacttcagctttgcatttctaagttatcctgcaggttatgatattaccttccagcctttcatttctttttcacccacagacacccactttagagcagcaattgtcggcttattaaatacccttttagtagccgtttcaggagttattattgcgtcaattatgggtttcaccatgggaatcttgcgactttcgaataactggctggtcagcaagctagtttacgtttttcttgaattcacccgaaatatccctgtacttttacatattttctttgtctacagtatcttcctgtatgttctgcctgttcctaaaaaagcaatcagcctttcagatacggtctttttaactaaccgtgggttttttataccctcacctgtttttgaggacggctttggttatgtctggttagcgttgttgcttgcaattgtggcagttgttgtctttgtcatctgggaacgtaaaaatcaggatcaaactggagagaactatccggtgattacaatttctgcagctataataatcggcttacctctattgacttatttcatttcaggttctcctctgtcctgggaagttccagccattaagggtttcaactttaaaggaggatcctcgatcaagcctgagtatatagctttgacattcgcactggcctactacacttcatgttttatcgcggaaatagtacgcgcaggaatcttagctgtcagtggtggacaatctgaagcatcccatgcactgggattaagtcacggcaacactttacgtcttgtcgtaattccgcaggcactgcgtgtcatcattccgcctctggcgagtcaatatctaaatctgaccaaaaactcatctctggccattgccataggctatatggatgtggtggcaaccatcggagggatttccctgatgcaaaccggcaaagagatggaaacaatgattttcgtcctaatgacttatttaattatttcattaataatttctgcctttatgaactggttcaacaaaagaatgtcattagtagaacgctaaccatgattgaattgtgagtaaaaccgtacaacaagaatttgcaccggggactcatccggacttaccgcctcctgtcaacacgactgggattattggctggtcaagaaaaaatttattttcttctccgctaaatacaatcctgacattactggccatgttgttgttgtggaaaagtctgcctccgcttttcgaatgggcagttatcaattctgtctcaactgcagattcacgtgaacaatgctggaaccagatgtcttctcctggcgcaggagcgtgttgggcatttatcaaagaccgtgttgaacttttcacttatggattttatcctccacctttacgctggcgtgtaaatatttcttttgtactgcttgcattagcagtggttccggtactttatgaaaaattaccgtatagaaaatacggactgatttattcagcagttttccctttcattgcaggctggttgctggtcggaggatttggattagagcaagttgacaccgatcagtttggcggcattatgctcacgttgatcataggtgttacaggcatttcattttcgttgccgataggcgtcgcactggctcttggacgtcagtcgaatatgcctgtgctgaaaattttgtgtgtgcttttcattgaatttatccgtggagttccgctgattacattgttgttcgtcgcctcaacgatgctcaattattttttaccacccggtaccgtctatgccttgctggtgcgcgtcttaattatggttacactttttgcttcagcctacatggcagaagttatccgcggcggtttgcaggcaattgccaagggacagcatgaagcaggtgattctcttggacttacatactggcaggctcatcgactgattattttaccgcaggccatgaaaatttcaattcccggcattgtcagcactttcattggtctttacaaagatacgactctggtactgatcatcggcatgatggatattttgggactcggaaatgcttccttagcagacgcgaaatgggcaggactagccaatgaggtttatattttcgtagccttatattttttcatcagttgtttcagcatgtcacgttactcactttatcttgaaaagaaacttcacactggtcattaagagttaaatactcaactaaaaaatctcatgtctactacagccgatacaaaagaaaatgaaaatgaagtcatgatttcaatcaattccatgcataaatggtttgatgattttcatgtgctcaagaatatcaacctcgaagtaaagcgtggagaaaagattgtcatctgcggaccttcaggttccggaaaatccactctcattcgctgcatcaacaggttagaggaacatcaaaagggtagtatcattgtggacggtacagaactgacaggtgacctcaaacacattgaaattgtacgttcagaagtagggatggtttttcaacattttaatttatttccccacctgactgttcttgaaaactgcacgntggccatgatttgggttagaaaaacaccaaaagctgaagctgaaaaaatagcgatggaatatcttgaaagggtgaaaatcccggaacaggccagtaaatttccaggacaactttcaggtggacagcagcagcgtgtcgcaatcgcacgttcattgtgtatgaaccccagaattatgcttttcgacgaaccgacttccgcgcttgatccggaaatgattaaagaagttttagacgtgatgattgaacttgcggaaagtggaatgaccatgctcgtggttactcatgaaatgggttttgcgactgcagtcggtgattgtgttatcttcatggatggaggagaaattatcgagaaaaatgcgccgaaagagtttttcaataatcctcaacatgaccgnaccaagctctttttgagccagattctttaacactaattggaacggttcatggatgagctgaacatcgctccagcctttccggatattgcagtgtctgcttccgagttccaggttatgcacttcttccggaatatattgcaaaaaataccgacacttttagtcgcgttttttacagtatccctgttactcagtacagcttcacaaccccttcaggcgcgtcacaagtgtcctaaagttccggcacctccgggattgatgggtgttttcagtagttccactcttataccttctggcagcacgatggcagcagctcgttcctccgagacttccggatgtgagcatggtcatccctcagacaatttttacaaaccgaagaccaaacgtctagctttgttcctcaaagataatttcctgcagctaaaactggaaggtgctcagggtcagggtcagcatctggatgcact

SEQ ID NO: 1220 - DNA, 4000 bp, Escherichia coli
  misc_feature (27)..(27): n is a, c, g, or t
  misc_feature (66)..(66): n is a, c, g, or t
  misc_feature (69)..(69): n is a, c, g, or t
  misc_feature (340)..(340): n is a, c, g, or t
  misc_feature (584)..(584): n is a, c, g, or t
  misc_feature (612)..(612): n is a, c, g, or t
  misc_feature (732)..(732): n is a, c, g, or t
  misc_feature (3480)..(3480): n is a, c, g, or t
  misc_feature (3519)..(3519): n is a, c, g, or t
tcaactgttttaaacacatcaagtganagctttagaaaagcatttttaattcaatatccaagtaanggnatctgggttattgcttttcaatcgggtgactataaaggtgaggtagaaagcattattgggaaagatgttattaatttgtttgttccaacaacgccaaatccaacttcaggcttttttgtgatgattccaaaaaaagatgcagtcgagttacaaatgagtgttgaagaggcgtttaagctagttatatcagcaggtgttgtgacacctgaaaatttaaaaattaaggaaaaaaaatgaggacacatttttgtggtgaactaaataagtcagntcttgattcacaagtaaagctttgtggctgggtcaataggagacgagaccatggaggtgtaatatttcttgacgttagagataaaaaaggaatcgcccaaattgttatcaatccagatactgcagatacttttaaattggccgaaacgattaggaatgagtttgtccttcagataactggccaagttgttgctagggcgagtgagatggttaatagtaaaattccaactggtgaaatagaagtncttgcttcacacattgaaatattaaatncgtcaaaacccattccctttcaacttgattcgatggaaacttctgaggaggtgagacttaaatatcgttatttagacctcagaagagatgagatgcaaaagcgcttacgtctcagatcanaggtaacgcactttatgcgtgactttatggatagcaatgactttctagatattgagacgccttttttaactaaagcaacgccagagggagcaagagactatctcgttccatcaagaacacacgaaggtaacttctttgctcttcctcaatcgccacaacttttcaaacagctcctaatgatgtctggttttgaaagatactatcaaattgttaaatgcttcagggatgaagacttaagggcagatcgtcaacctgaatttactcagcttgacgttgaaacatcctttatgaatgaagatgaaattacctcactcatggaagaaatgataagaggacttttcaaagatgtgggcagtattgatctaccttcgaaatttccaacgattacctataaagaagccattaatctttatggtgttgataggcctgatatgagaattccacttcatatggttgatgtgaatgacatcatgaaagatgttgaattcaaagttttttcagggcctgcaaataataaaaatggaagagttgctgcgctcaaagttgaaggtggggcatcaatcagtcgtaagcaaattgatgactatacaaaatatgtaagtatatatggcgcaaagggtttagcttatattaaacttaatgaagatggcccttcatctcccattattaaattcctaggtgacgatgtcactcaaaaagtcattgacctaacagaagcaaaaactggagatattatcttttttggcgctgataaatctaaagtagtcaatgaggctcttggtaatttaagggaaaaacttggtcatgatttaaacctctacaataaagaatgggctcctatttgggttctcgacttccctatgtttgaggttgctgatgatggctctcttaatgccattcatcatccatttactgcgccaagtgttgactcaaaaacactgatagataaccccgaagaatcactctcaagggcatatgatttagttataaacggttctgaagttggaggtggatcaattcgtattcaccagagtgatatgcagaaaactgttcttacacttcttggtattgatgacgaagaagcaaaagaaaaatttggatttttacttgatgcgcttgactatggttgtccgccccatggtggtatagcttttggcttagacaggctagtcatgacccttagtcaaactgaatcgattagagatgttattgcattccctaaaacgcaaactgcggcatgtttattaactgacgccccctcaagtgtatctaaagcacagcttaaagatttaaacattaaggtgactcttccgactaaagtttaataatgcaaaacattgaaatagaacaatcgattgaaaattcaattaaagatgcacttaaggaaaataacgcaactttggttgcccattactacgtaagctctgatcttcagaccttggctgaagaatcgggaggtattgtctcggactctcttgaaatggcaagatttggtcagaatagtgatgctgatacaattattgttgcaggggttaaatttatgggagaaactgctaagattttatctcctgaaaagcgtgttctcgttttagatactgaagcaaactgctcactagatttatcatgtccaatagacgaattttcaaaattttgtgatcaaaactctgatcatgtcgttgttgtctacgcaaacacttctgcagaagtaaaagccagagcggactgggttgtaacttctggtagcgcactaaaagtggtccaaaagttacacgatgaagggaaaaaagttctctgggccccagataaacacctaggtcactatgtgcaatcgatgacaggtgtggagatgctcatgtgggatggagcttgtattgttcatgaagaatttaaagcagaaggactcaaaaggcttatggagatacatccagaggctggtgtattggtccaccctgaatcacccaaagaggtgatcgcacttgctgatattgttggatcgacaactcagcttatcaatgccgctgcatcaaggcctgaaaacacctttatagttgcaactgataacggaattttccataaaatgaaagaggcagcacctcacaaaaaatttattgaagccccaactatgggagagggagctgattgtgaatcatgtgctcactgtggctggatggcaatgaataaccttgaaaaatgcttagatactttaaatactggtaataatgaaatcctcatcaataatcaaattattgataaagcaaaaaattcaattcagcgccttctggactttactaagtaactataggagaaactttaagaaaatggcaggacacagcaaatggcacaatattcagcatagaaaaggtgcgcaagatgctaagcgtggaaaaatcttcaccaagctcattaaagaaattgttgtagcggcaaaaatgggtggcggggtcctagaaaataatccctctcttcgtgctgtaatagacaaagctctagcagcaaatatgaaaagagataccattgaaaatgctgtaaagcgaggctcgggtgatttagatggtgaaaactatgaagaaattcgctacgaaggctatggccttggtggcactgctattatggtagattgtctgactgataacaaaaaccgtaccgtttctgatgttaggcatgcattcagtaaacatggtggaaaccttggaacagacggctcagtatcctacatgttctccaaacaaggttttataagctttggtnctggggatgaggacacaattatggaaattgcaattgaancaggagcagaagatattatctctaatgaagatgggtcaattgatgttgtgacgactccagagaatttttttccagtcaaagatgcattaattgctaaaaaccttatacctgatcattcacagatcactatggagccagctaatagaatcgaactcaatcttgaggatgcagataaatttatgaagctaattgatagacttgaagatcttgatgacactcaggaagtctatcataatgctgatatttcagacgaaatactgtctgaactatgatcgcttttcatactggaattcaagcgcttagaaattttaaagtaaaagcacttaataagaaaattagtgccctcatccctaacattgagctaatctcttctgaatatattcactttattgaatcaaaaaatgatctcaacacttcaaccagatcttctcttgataaactcttaaattatgctccaaaagcgaatctactaaactcaaac

SEQ ID NO: 1221 - DNA, 4000 bp, Escherichia coli
  misc_feature (2329)..(2329): n is a, c, g, or t
  misc_feature (3303)..(3303): n is a, c, g, or t
aaatgatcccttatcgtcttgaaataggtttcaatcaacaggtttcgatcgatgcgctaaagcaatttttagtcgatgaggccggcgttgaaagggataaaattgagattgttgagtttttagctaaccatacccgtgttaatttgccggagggtatgccgaatgatatttttcagcacttgaagtctgcttgtcttaatcgcagagcattgaaaataacctgtttaggggtcagtcaaggaaccggaaaatcatttaagagccgacctaacaggcgctctaagaaacactggaataagggtaaaggtaatcctgttaaggaagaacggtagaaccccctgagtgcttatctacgagcgaattatagatcataaaatataggatataaatgcaaatacaatatattaatacccctgagaaattagcggttctttgtcaagacttagccggtgccccttggctggctcttgatacggagttcttacgggagaagacctattattctaaattttgtttgttacagatagcaacgccttcattggtcgcttgtgttgatccgttggcattagagaccattgataatctcttagatattatttataaccctgaagtagttaaggtttttcattcagcgcggcaggatttagaaattttttatcatttgcgaggttcattacctacgccggtatttgatacgcaagttgctgcacccttgttagggtttcaggataatcccggatatgcgatgttagtgtcaagttggttaaatgttaatttaacgaaagaacatacccgtacagattggagtagtcggccactttccgaaggtcagattgcctatgctgcggatgatgtgatttatttggctgaaatttatcaacgaatgcttaaaaagttaaccgatttaggtcgtttgacttggttgaaagatgattttgatcatttgagtgacgtgactgtttatcaggcaaatcctgagctagcgtggttgaaaataagaggcttaaagaagttaactaaaaaacaattatcggtcgctcaaagtttagcgcagtggcgtgaacgtagtgctcagcaagagaacaggccgcgaaattggttattaagggatgatttgattattgatcttgccagattgcagcctaataagattggtgagttgattaaggtacgtaaccttcacgaacgtacagtcaagcgtcacggtcatgagttatgcgcattgatacagcaggctgttcaggaagagcctgttccgagggtggcgacggtaactaatgcagataaaaatcatcatcatgatgccattgtggatgttctgaatgcggtcgttcgtatcagagcgaaagaaaactctataagccccagtgtattagcaagtcgtaaacaattagatgaattgctgcaaaatgcttctgaaagttgtttattgcaggggtggcgcgctagtatggtgggtaatgaattattggctattatttcaggggagttgtgggtcggtgttgctgcagatactattcaaattgcttcccctgaagaaattagtaacaaccctggtcagtaatggttaaagcggaacagccctcaatagaaaatgcatttaatgtagcgcaggttcggttaattaataacagttatacgcgggttttaggcgaggcattgttattcggttatcaaaatgaaagagcgttggcagaggcgctctttgaggccccctttgtagttatttcccatgatgttgccagcgatccggtgtttaattacggtaatcaaatggcgctttcattatttgaagtgacttgggctgaactggtgagtttaccttcacgcttttcggctgagtcggtagttcaagaagagcgatcagacttattagagcgcgtaaaaaaagacgggtttattgctgattaccacggtattagagtgtctaaaacagggcgacgttttcatatagacagggctgttgtctggaatctttttaatgatcaaggcgcttatcaagggcaagcggcttgttttaaagaatggcgatttcttgattaaaatgatctgttaggcagtaaatggtagggccataaaaaagcccggtaagaaaccgggcttttctggggatgagtcggctgtcaaacgtgactatcgctcaccgctgaatgcggctaataattgtaataaactcatgaacaagttaaaaatagatacatataaggtaaccgttgcgagaatataattagtttcaccgccatgaatgatggcgctggtttgaaataaaatcatacctgacatgagtaaaatgaacatgccggatactgcaagagagagcgcaggtatngagaacaccatggctccgatgcccgctagaaaggcaaccagtacacctaccattaaaaatccagacataaagctgaagtcttttcgggtggttagagcataacctgataagccaataaagataacacctgttccgcccaaagcggtcataatcaattcgtggccattactgaatgcatttaaatacatgttcaggattggaccgagtgttaggcccataaatcccgttagggcgaaaacaaaaatgattccaaggccgctgttacaaaatttattggttaaaaaaagtaaaccaaaataaccgaccaaggttatgatcattccagggtgtggtaaattaagcgccatcgcagcacctgctgtgccggcactaaaaagcaatgtcagggacaataacatataggtattacgcaatattttattggtagacagaatgctttcttctgaacgggttagggttgaatttaatctcattgctgtaattcctcttaaataatagtattgggtacaaaaaaatttgacagtattatcctacaagagtttctttggatatgtaaggagcctgtgtaaaaaataaccggatcaaggatctataatggattatagtcgttttttaagggtttattaaatgatcagttaataacattttcagttttcaaccgatcaaaagcggtttttacggtttctgttgttgctgatatttcaagctggctgtgttgaacaggtgcttggctagcacagagacagatcagtcctgattggttaattaactgtgcataatatgcgttttgggcgctgtcaccttcaagtactgttgcggcatgaccggtatcaaaaagtcttctttctaattgataggccagattggcatgattgttaccggttatgttgatggtcatcgcttgttgagaaaagcgggccgctttttctgccatactcaccggttggagttgatcattactgtcaatactctcngtaatcatacccgcacccacagtcacattgctaagtcgatcaataatgacaaaagcaccggtgctttgattcgttttataggtgtcaaaaacgatcggtgcattgatggctaaactacaagtgccaatttcatttaaatttaattgctcggcttctatttgtgccagtgtgttgacatcggtacggtggtgtattgatgaaatggagccagaaacactgcgcgatgcacatttgaagatgtattgttttcccgggatcatggcggtttcggtcatccagacaatttcagctttgaaatggtcgctgatagaggggctttgatcagataatacaatcatgtcgccacggctgatgtcgatttcatccgttaaggtcatggtgacagccatcggtgggaatgctttttctagttcgccgtcataggtgactatcgatttaattgtgctggtctttccagaagggagtgcggttatttgatcaccggtgttaaaaataccagacgcgactgtcccgcaaaaaccgcggaaatcaaggttgggtctgttgacgtactgaacgggaaagcgggcatctgtgaaattacggtcattagcaatttcgacactttctagggttgccattaagggcaggcctgagaaccagggcatttcggtgctccgatgaacgacattatcgccctttaaggcagaaataggca

SEQ ID NO: 1222 - DNA, 4000 bp, Escherichia coli
  misc_feature (227)..(227): n is a, c, g, or t
  misc_feature (2255)..(2255): n is a, c, g, or t
accgatggacgacgacgccaagccgaaatcgctgtggaagaagcgaaaagagcgagcaaagattcgggccgaggcgcgggggacatcggaggcgccgcatgggtatcacgggggcgcgcgggtgttgctcgtgggcgacggaaacttgtcctttgggttggcgttggcgacgctcttcgggaacgacgcgtctggactcgtcgtgacgtgtaaagaggcggagcatntggcgaagagggtgtatccatcgtgttctgataacgcggagacgctcgaggcgtgcggggcgacggtggtgttcggggtggagtgcgaagcgctcgccggggcggcggctgagttgcagcgaagcgtcggcggcgcgttcgatcgagtcgtattcaactttcccgatgccggtgtgggtaaggtgggcacgctgagcgttggtgtgcagagagcgctcatagcaagcttttttgagcaaggaccaaagcttttaaagcagaatggtgagctgcacttggcgacgcaaacctttgcgccgtgcgcagcgtggaacgtggagggactcgcagccaaggctgggttggtttttaaagcgtgcgtagagtttgatccgagcgagtttccgggatacgagtactgtcacacccctggggaggatgagacggaagaaatggtgccgagagaggaggatatcaccgcgggcgaatgcgtgacgtacgtcttcgtcaagccgcagcgttgattgagcgcttcctcaaggagacgcagagaacgatgcgaggaaaacgtttattagtaacagagaaagtagttgtgagattgatcctatggaggctcggtgttgtaaattaaaaatacctgaagattcgaggtgtttgccaataatttttgtacaaatacgtcgtcattttttatcgcggggttggttcggagttcagctttattcgtcaaagtccgggtcaccgacgacgtagccagcgtattggagcatcggtacgacgaaggagatgacgagcaagccgatgacgacgttggcgaagacgtcgcgcttttcgttggtttcggcgcgcgtcttgaagttgctaccctttgccgcttggtacttctccggcggacccggatcagccttaccctccaaaacggcggagatacgcttcaccgaggacaccaacgcttcgttgtacttttcttgctcgaggttaaccccgtagttgctcgtcaacacgctatcgatgagcggatcaccgacggctttaagaaacttgggcccgcccacgatggcgccatccttggtagacttgaccaacaaaaggttacccttgttcgtcccttcctccaccgtcgggtaccagttctccagcgctttatccccgaacgcaaacggatccgtttcgaacacgagcttacgcacggtgatgacgttcaggtgataccccgtctcgtcctccagctgcttgagctccttgttgatggcgctcgccgaggatcggctcatcaacccggcgtcatcgacgatgtacccctctgtcggtttcggcgtcgccaaaatttcaatctcacccgcgttcgcggcaccaccgctcaggcccatcgtcgccgcgagcgcgagtccaacgcacgtctttttcgccgcatccatcaggtcagccgcgatcggcatcgccggtttacgaaccgcagtcatcttcgccgcgtcaccgcggcggcgcgtcgccggcgctctcaccgagaggttcgcctttgtcgtcgtcttcgtcgtcaacatctctgcttgcgtccgtcgtccgtcgtgcgtcgcgcgctgacgacacgccgttcgaagggccgaccgagtcacctgagtcagacggacagaatggcttcggttgacgagtcattactcaaacaagttacacagggtcgacgaaccaccccttgtggatacgatttgtcttgcaaaaacacgtgcgttttgataggaattaaagttttcttggatggcatgagaaactaagattacaggatacgaatgtccgataaatatttagtagtggtctatataaatattattcggacgttcgacacataataatctatgtatcaagtggattgttgtacatgttgtaccctatctgtatttttgtgaacgatggatcgattggaacgtccaacacctcagtcgccgacgacgcctttgaccaggacgcgatgacgacgccgggcgttgtcgtcgcgaacgcatcgtcgtcactctcggttcgatgcgtcggaggggctgggggacgcgngcatcgtcggtgtcgtgggggtaatcgtaagcatcagtttggacaacgtctcgatgacgcgcaacgacgacacgggttgttcgcgcgtcgcgtgcacggcggaacgacgacgacgcgttggaatgattgtccgacgcacgttactttttcgtcgtcgtacgcggattcgccgacggctaacgatggatcgaggaacggggctgtcgaagagagcgtcggcgaaaccgcggcggagcgcgtcgtcgcgttcgcgacggattggaccaaggagaaaatgtcgaggtgggaaccgccaaagtttttgtggagaaccgcggcgacggcgttgttgttcgggagcgtgctgtttcggatgattcgggaaccgaagcgggtgaactgggagcagacgattcaacaaattgcgagaatcggtccgcagacgctcggggtgtcgttgttgacgagctcattcgtcgggatggtgtttacgattcagttttgtaaagagtttgccaaggttgggttgaagaatgcgatcggtggtctgcttggattggcgtttgcgagagagttgacgccggtgatttgcgccatcgtgttgacgggtcggattggaagttccatcgcagccgaattgggtacgatgcaagtgacggaacaagtagatcagctcaccgtgctcgggacggatccggtggattatctcgtcatcccgcgcgtcatcgcgtgcgcgttgtcgcttccgattctcagcttgatttcttttgcgcagtcattggcggcgagcatttttctcgccgacttgcgttacggcgtgacgccaaacgtcatcatcgacagcgccgccaagtacctcgaaccgagtgatatcggcatcatgacggcgaaatccatcgctttcggcgccgtcatcgctgtcatctcctgcgggtggggcacgacgactactggaggcgccaagggcgtcggcgagagcacgacggcgtctgtagtcatttctctcaccgcaatcttcgtcgtagactttgtactcagtctcatcttcttcaacaagtgagcagcccgcgggatcaatccatgggtcaatggagaacggcgcagccatcacggcgttttgatagtagaaattgtaactctagtctcatcacaacttcacttgccggctgcgctcatgacgaccgaacctcacccgccggtatgtcgccattacgcccgtcgaggcgcgtgcgcctacggcgacgcgtgtaaattcgcccacaccctcaccgacggtcccgcaaccgcggatgcgccgtcgacgacgcgtcgaggggcgcgaaagtcgcgcactcgtgctgggcgtcaaaaagtaaaaattttcgtgcgctttctgtgtcgcgcattcacgcccgaacagcgcgcgcgcgtcgtcgacgtcgccgggggtaacggaaagctcagtttcgagctcctgaacgccggggaaggggcgtcgacggtaacggtggttgacccgaggaagatgcgaggaagacggttggcggagcgtttcgctcgtcggttaaaacttcaggatgttcgtgaagtgcgagcgccgacgcacgcgagggtgtactggactgcggcaatgtgggatttcaaagatgaaagcgcgtgggaggacgcggtgggggcgtcgcggagcgcggcattggcgacgaggtggtcgacgagtggactcgtcgtcgcgaatgggaaatcggcggcgtacgaagacggagataaatcgcggcgagttcaagtga

SEQ ID NO: 1223 - DNA, 4000 bp, Escherichia coli
  misc_feature (233)..(233): n is a, c, g, or t
  misc_feature (347)..(347): n is a, c, g, or t
  misc_feature (435)..(435): n is a, c, g, or t
  misc_feature (566)..(566): n is a, c, g, or t
  misc_feature (642)..(642): n is a, c, g, or t
  misc_feature (725)..(725): n is a, c, g, or t
  misc_feature (1993)..(1993): n is a, c, g, or t
  misc_feature (2013)..(2013): n is a, c, g, or t
  misc_feature (2023)..(2023): n is a, c, g, or t
  misc_feature (2727)..(2727): n is a, c, g, or t
  misc_feature (3160)..(3160): n is a, c, g, or t
  misc_feature (3684)..(3684): n is a, c, g, or t
  misc_feature (3714)..(3714): n is a, c, g, or t
  misc_feature (3750)..(3750): n is a, c, g, or t
  misc_feature (3832)..(3832): n is a, c, g, or t
  misc_feature (3856)..(3856): n is a, c, g, or t
  misc_feature (3861)..(3861): n is a, c, g, or t
  misc_feature (3903)..(3903): n is a, c, g, or t
  misc_feature (3937)..(3937): n is a, c, g, or t
  misc_feature (3990)..(3990): n is a, c, g, or t
ggagaaatgaaatgaaagaaaaagttcaaactgccatagataattatgtattagcttacacaaataacgataaagaattatttactagtctttgggctccagatgctatttttgaagatccagtgggagcagagccatgtgttggcatagaagctatatctgctttttgggattttggtcatgttgaaggaatgactattttacctgccgatgttcaaacagttgtctgtggnagcgagggcattttaaaggctgtcatgcaggtacgtaatacttcagataactcaggtatgaatatctctattgtcgatcattttattgttaatgagcagggagaaatcactagnggccgagctttttgggatgaaaactctatcactcaaccagataacattaactcaatagagataaatgtagatgactttaaagataggnggtagtttttatctacaatgaatctaagtgttaatttaaataaaatagcccttttaaggaattctagaggctcaaacacaccttccttagaagcctatgccaataaagctatctcacttggcgtagatggnctaactttgcacccaaggcctgatcaccgtcatgccactagcaatgatgctctaaatattagcagtctctgcaaanaaaaatcattagaatttaatctggaaggaaatccattttctcagcctaaaaatgagtttcttggtttttatgagctatgtctncaagctaagcctgatcaaataacccttgtaccagatggagagggtcaactaacgtctgatagcggttgggagcctggatttcaagactccgaactaaagtcttttattgcaaaggtaaatgagctcaattgtaggaccagtttatttataaatgccgacatccattctgttgaatatgcctcagatatgaactttgatcgcattgaaatatacactggaccttttgctcaagcatgcttgctagataaaaacgaattgcagattaattgcgataagattaaagaggttatcaatagagctcagcacttaggattgggggttaatgcagggcatgacctatcactcgataatattcaactcttaaaggaatgtggtctaatagatgaggtatcaataggacatgcaattatgactgactcattgaaatatgggttcgacgccaccataataaaatatataaatattattagagagaaataatgtccattgaagaaaaaataaatgcccaacttacagataatgacatcctcatttatatgaagggatcaccttatgagcctaaatgtgggttttcagcaaaaactgttcaagcattaatcgattgcggagcggagttttcgtacgttgatatccttgaaaatcaggacattagacaaactctcccaagcatttccgattggccaaccttcccacaagtttttttaaaaggagagttaattggcggttgtgatattgtctccgaaatgcacgaagcaggggacctgcaactagccatagacaaagccctagttaaatagatccaaagtcttttaacatagcctttaactctaaggagtgctgctcttcttctccaattaggccacgagcgtactcctctaaatatatcgaggcatctgcaacgctagcaagtaatttcttgtataaggacaaagcatgcaattcgtgttctaacgcttcttcaagaatatctttaatggtatgtcgattggtttcttcaatttttgcaattttttgacttgggtgaccatcaagcccaacaataagttctccggcttgttgagaatgtaaaagagattcacttgcttgctctttaagaaaattaactattggcaatctataaggaccagtaaccattaaagatgagtgcgtatagcgaacaacgccagctaattcatattccataattgaatttaatattgcgcaaacatcctcattgtttatctctttcatctccattatgtgctccgttatagttgtgaatagtagtnaatatatgtgatttaatatntattgtaaancactgatataaggtatttatttaatgataatcattatcactatggtaattacaatcatttatgaaatcatagatattatgcaagttattaggggtgatagttatcaatcctgggtttattccagcgcatcagaccttatagttgtggacccatggttaacaagaaaacaggtcttccctattcttgagtggttgttatacagagattcagatcaatcatcatacctagagcagcataatcagatagatgcagttacacatataattattacagcgcacttttcagatcacctagatttagaaagtttaaaaaaatttaaagctgatattcctattttcactactgcagaagcagcaaaagttcttattaaaaatcattttacaaatactgttatcgtaaaacctcatcataaataccagcttggttcatttgagcttgaggtatacgaagctggaagtccctaccattcaacaacatttgcatacaccctaagagatgtcacgtcgattatatttcatgagtctcatatggttgacgcaaacttaagttttaaaaatcttaacgcatgtatcttgacggtagatcaggtgaaggtgcttggattcataaaggtatcgatgggaattgagcaggccaaaaagatgcaacaaaaacttaatgctgaatatctcctggcaacagggattgcaccaaacaagacaaanggtcttattacctggcttttatctattaaagaaaattatagctcgttaaaaggtgtgaactcagcatgcaacgaaactggcgattcattaatgctctaagcatagaagattatatcgaaggcaattctagagatatttttctagttaacttgattcacttaagaccaaagaattttgcacagcatcaaatgtattaatgatactgcaaaaaacttctgctgttactttagcgtcatatgcagcgctatgcgcttcgtcgttatcatagtcaatctcaagttccttgcagattctagcaagaacagtttgttgagtcgctaatacaccaagactaacggtatcaataagtgagaagggatgaaaaggagattttcttatgttatttcttttacaagcttcaagaataaaactatgatcaaaaaaagcattatgnccaactaggatagctcgcgaacaatcataaaaatttttatgcttattaattatcttgaataaatcatttaatgctgttttttcgtcaacggaaacccttaatggatgattcaagtcaagctttaaaaaatccaacgactcttgatttaattcgagaccctcaaatggatcgatatgatgtctgtacgactctccaagaacatattgatcatcagagaaatcaattaattggatagctatttctaagattggatttttttcacaatcaaaaccaccagtctcaagatcgactacaactggcaggaattttctaaatctatcttttaacatttttgccccttatgatgcctctataataaacgataaatcagtgcttacatgaagtttttagatatcacagacactctttttaacggcgtacaagcctcttcgcacattgaatttgatcatgaaaaaatcttttattgtgaggatgatatttctggtctgaaatcaattattgctattcacagttcgaaatcaggnccggccataggtggttgcaggttccgtcantaccaaacctatgaagagggcttaacagatgttctncgcttatctagaggcatgaccgaaaagaataatgctgctgacataccctttggtggcggcaaagctattatctttagtgacnagcccaaatccactgaattgcttntagcntttgcatcatttttaaaccaactcgaaggaatttactattcngctgaagacatgggtatttcactcgaggacattnagctggttggcaaacatactccttatgtatttgataatgttgaccccggatcntatacggcaa

SEQ ID NO: 1224 - DNA, 4000 bp, Escherichia coli
  misc_feature (2316)..(2316): n is a, c, g, or t
  misc_feature (2601)..(2601): n is a, c, g, or t
  misc_feature (2729)..(2731): n is a, c, g, or t
  misc_feature (2861)..(2862): n is a, c, g, or t
  misc_feature (2864)..(2864): n is a, c, g, or t
  misc_feature (2866)..(2866): n is a, c, g, or t
  misc_feature (2868)..(2868): n is a, c, g, or t
  misc_feature (2872)..(2873): n is a, c, g, or t
  misc_feature (2877)..(2877): n is a, c, g, or t
  misc_feature (2879)..(2879): n is a, c, g, or t
  misc_feature (2881)..(2882): n is a, c, g, or t
  misc_feature (2888)..(2888): n is a, c, g, or t
  misc_feature (2891)..(2891): n is a, c, g, or t
  misc_feature (2895)..(2896): n is a, c, g, or t
  misc_feature (2899)..(2899): n is a, c, g, or t
  misc_feature (2901)..(2901): n is a, c, g, or t
  misc_feature (2903)..(2903): n is a, c, g, or t
  misc_feature (2906)..(2906): n is a, c, g, or t
  misc_feature (2908)..(2908): n is a, c, g, or t
  misc_feature (2915)..(2915): n is a, c, g, or t
  misc_feature (2917)..(2917): n is a, c, g, or t
  misc_feature (2921)..(2921): n is a, c, g, or t
  misc_feature (2924)..(2924): n is a, c, g, or t
  misc_feature (2926)..(2927): n is a, c, g, or t
  misc_feature (2931)..(2931): n is a, c, g, or t
  misc_feature (2936)..(2936): n is a, c, g, or t
  misc_feature (2938)..(2939): n is a, c, g, or t
  misc_feature (2941)..(2943): n is a, c, g, or t
  misc_feature (2945)..(2946): n is a, c, g, or t
  misc_feature (2949)..(2950): n is a, c, g, or t
  misc_feature (2955)..(2955): n is a, c, g, or t
  misc_feature (2957)..(2957): n is a, c, g, or t
  misc_feature (2960)..(2961): n is a, c, g, or t
  misc_feature (2964)..(2965): n is a, c, g, or t
  misc_feature (2967)..(2970): n is a, c, g, or t
  misc_feature (2972)..(2972): n is a, c, g, or t
  misc_feature (2976)..(2976): n is a, c, g, or t
  misc_feature (2983)..(2983): n is a, c, g, or t
  misc_feature (2985)..(2985): n is a, c, g, or t
  misc_feature (2989)..(2990): n is a, c, g, or t
  misc_feature (2992)..(2992): n is a, c, g, or t
  misc_feature (2997)..(2997): n is a, c, g, or t
  misc_feature (2999)..(3003): n is a, c, g, or t
  misc_feature (3005)..(3007): n is a, c, g, or t
  misc_feature (3009)..(3009): n is a, c, g, or t
  misc_feature (3012)..(3012): n is a, c, g, or t
  misc_feature (3014)..(3014): n is a, c, g, or t
  misc_feature (3017)..(3017): n is a, c, g, or t
  misc_feature (3019)..(3020): n is a, c, g, or t
  misc_feature (3022)..(3023): n is a, c, g, or t
  misc_feature (3026)..(3026): n is a, c, g, or t
  misc_feature (3028)..(3028): n is a, c, g, or t
  misc_feature (3033)..(3033): n is a, c, g, or t
  misc_feature (3035)..(3035): n is a, c, g, or t
  misc_feature (3038)..(3039): n is a, c, g, or t
  misc_feature (3042)..(3042): n is a, c, g, or t
  misc_feature (3044)..(3044): n is a, c, g, or t
  misc_feature (3046)..(3046): n is a, c, g, or t
  misc_feature (3050)..(3053): n is a, c, g, or t
  misc_feature (3056)..(3059): n is a, c, g, or t
  misc_feature (3063)..(3063): n is a, c, g, or t
  misc_feature (3068)..(3068): n is a, c, g, or t
  misc_feature (3070)..(3071): n is a, c, g, or t
  misc_feature (3075)..(3075): n is a, c, g, or t
  misc_feature (3079)..(3080): n is a, c, g, or t
  misc_feature (3083)..(3085): n is a, c, g, or t
  misc_feature (3087)..(3087): n is a, c, g, or t
  misc_feature (3091)..(3091): n is a, c, g, or t
  misc_feature (3099)..(3102): n is a, c, g, or t
  misc_feature (3104)..(3104): n is a, c, g, or t
  misc_feature (3107)..(3107): n is a, c, g, or t
  misc_feature (3109)..(3109): n is a, c, g, or t
  misc_feature (3111)..(3111): n is a, c, g, or t
  misc_feature (3118)..(3119): n is a, c, g, or t
  misc_feature (3121)..(3121): n is a, c, g, or t
  misc_feature (3124)..(3124): n is a, c, g, or t
  misc_feature (3131)..(3131): n is a, c, g, or t
  misc_feature (3133)..(3133): n is a, c, g, or t
  misc_feature (3138)..(3138): n is a, c, g, or t
  misc_feature (3141)..(3141): n is a, c, g, or t
  misc_feature (3146)..(3146): n is a, c, g, or t
  misc_feature (3148)..(3148): n is a, c, g, or t
  misc_feature (3153)..(3153): n is a, c, g, or t
  misc_feature (3158)..(3158): n is a, c, g, or t
  misc_feature (3163)..(3164): n is a, c, g, or t
  misc_feature (3168)..(3169): n is a, c, g, or t
  misc_feature (3174)..(3174): n is a, c, g, or t
  misc_feature (3176)..(3176): n is a, c, g, or t
  misc_feature (3178)..(3181): n is a, c, g, or t
  misc_feature (3183)..(3186): n is a, c, g, or t
  misc_feature (3189)..(3189): n is a, c, g, or t
  misc_feature (3193)..(3193): n is a, c, g, or t
  misc_feature (3195)..(3195): n is a, c, g, or t
  misc_feature (3197)..(3198): n is a, c, g, or t
  misc_feature (3200)..(3201): n is a, c, g, or t
  misc_feature (3206)..(3206): n is a, c, g, or t
  misc_feature (3208)..(3208): n is a, c, g, or t
  misc_feature (3211)..(3211): n is a, c, g, or t
  misc_feature (3213)..(3213): n is a, c, g, or t
  misc_feature (3215)..(3215): n is a, c, g, or t
  misc_feature (3223)..(3225): n is a, c, g, or t
  misc_feature (3227)..(3228): n is a, c, g, or t
  misc_feature (3230)..(3232): n is a, c, g, or t
  misc_feature (3234)..(3234): n is a, c, g, or t
  misc_feature (3236)..(3236): n is a, c, g, or t
  misc_feature (3238)..(3239): n is a, c, g, or t
  misc_feature (3241)..(3242): n is a, c, g, or t
  misc_feature (3245)..(3245): n is a, c, g, or t
  misc_feature (3249)..(3249): n is a, c, g, or t
  misc_feature (3251)..(3251): n is a, c, g, or t
  misc_feature (3253)..(3253): n is a, c, g, or t
  misc_feature (3255)..(3255): n is a, c, g, or t
  misc_feature (3257)..(3261): n is a, c, g, or t
  misc_feature (3264)..(3264): n is a, c, g, or t
  misc_feature (3266)..(3269): n is a, c, g, or t
  misc_feature (3273)..(3274): n is a, c, g, or t
  misc_feature (3276)..(3276): n is a, c, g, or t
  misc_feature (3279)..(3280): n is a, c, g, or t
  misc_feature (3282)..(3283): n is a, c, g, or t
  misc_feature (3286)..(3288): n is a, c, g, or t
  misc_feature (3290)..(3292): n is a, c, g, or t
  misc_feature (3295)..(3295): n is a, c, g, or t
  misc_feature (3304)..(3305): n is a, c, g, or t
  misc_feature (3309)..(3310): n is a, c, g, or t
  misc_feature (3312)..(3312): n is a, c, g, or t
  misc_feature (3317)..(3318): n is a, c, g, or t
  misc_feature (3321)..(3325): n is a, c, g, or t
  misc_feature (3328)..(3329): n is a, c, g, or t
  misc_feature (3332)..(3332): n is a, c, g, or t
  misc_feature (3334)..(3334): n is a, c, g, or t
  misc_feature (3338)..(3338): n is a, c, g, or t
  misc_feature (3340)..(3340): n is a, c, g, or t
  misc_feature (3342)..(3344): n is a, c, g, or t
  misc_feature (3346)..(3346): n is a, c, g, or t
  misc_feature (3348)..(3348): n is a, c, g, or t
  misc_feature (3350)..(3350): n is a, c, g, or t
  misc_feature (3352)..(3352): n is a, c, g, or t
  misc_feature (3354)..(3355): n is a, c, g, or t
  misc_feature (3357)..(3358): n is a, c, g, or t
  misc_feature (3360)..(3361): n is a, c, g, or t
  misc_feature (3363)..(3370): n is a, c, g, or t
  misc_feature (3374)..(3375): n is a, c, g, or t
  misc_feature (3379)..(3379): n is a, c, g, or t
  misc_feature (3381)..(3382): n is a, c, g, or t
  misc_feature (3384)..(3386): n is a, c, g, or t
  misc_feature (3388)..(3389): n is a, c, g, or t
  misc_feature (3394)..(3394): n is a, c, g, or t
  misc_feature (3396)..(3398): n is a, c, g, or t
  misc_feature (3400)..(3401): n is a, c, g, or t
  misc_feature (3403)..(3403): n is a, c, g, or t
  misc_feature (3406)..(3407): n is a, c, g, or t
  misc_feature (3411)..(3411): n is a, c, g, or t
  misc_feature (3413)..(3414): n is a, c, g, or t
  misc_feature (3416)..(3416): n is a, c, g, or t
  misc_feature (3418)..(3418): n is a, c, g, or t
  misc_feature (3422)..(3423): n is a, c, g, or t
  misc_feature (3428)..(3432): n is a, c, g, or t
  misc_feature (3434)..(3435): n is a, c, g, or t
  misc_feature (3438)..(3440): n is a, c, g, or t
  misc_feature (3442)..(3442): n is a, c, g, or t
  misc_feature (3447)..(3447): n is a, c, g, or t
  misc_feature (3449)..(3450): n is a, c, g, or t
  misc_feature (3452)..(3454): n is a, c, g, or t
  misc_feature (3460)..(3462): n is a, c, g, or t
  misc_feature (3465)..(3465): n is a, c, g, or t
  misc_feature (3467)..(3467): n is a, c, g, or t
  misc_feature (3474)..(3474): n is a, c, g, or t
  misc_feature (3476)..(3477): n is a, c, g, or t
  misc_feature (3481)..(3481): n is a, c, g, or t
  misc_feature (3483)..(3483): n is a, c, g, or t
  misc_feature (3485)..(3486): n is a, c, g, or t
  misc_feature (3490)..(3491): n is a, c, g, or t
  misc_feature (3495)..(3498): n is a, c, g, or t
  misc_feature (3500)..(3500): n is a, c, g, or t
  misc_feature (3502)..(3503): n is a, c, g, or t
  misc_feature (3507)..(3508): n is a, c, g, or t
  misc_feature (3511)..(3511): n is a, c, g, or t
  misc_feature (3514)..(3515): n is a, c, g, or t
  misc_feature (3517)..(3517): n is a, c, g, or t
  misc_feature (3521)..(3522): n is a, c, g, or t
  misc_feature (3527)..(3527): n is a, c, g, or t
  misc_feature (3529)..(3530): n is a, c, g, or t
  misc_feature (3535)..(3535): n is a, c, g, or t
  misc_feature (3537)..(3537): n is a, c, g, or t
  misc_feature (3539)..(3539): n is a, c, g, or t
  misc_feature (3541)..(3541): n is a, c, g, or t
  misc_feature (3543)..(3543): n is a, c, g, or t
  misc_feature (3547)..(3547): n is a, c, g, or t
  misc_feature (3550)..(3551): n is a, c, g, or t
  misc_feature (3553)..(3553): n is a, c, g, or t
  misc_feature (3556)..(3556): n is a, c, g, or t
  misc_feature (3560)..(3560): n is a, c, g, or t
  misc_feature (3562)..(3563): n is a, c, g, or t
  misc_feature (3568)..(3569): n is a, c, g, or t
  misc_feature (3571)..(3571): n is a, c, g, or t
  misc_feature (3575)..(3577): n is a, c, g, or t
  misc_feature (3584)..(3584): n is a, c, g, or t
  misc_feature (3586)..(3588): n is a, c, g, or t
  misc_feature (3591)..(3592): n is a, c, g, or t
  misc_feature (3596)..(3598): n is a, c, g, or t
  misc_feature (3604)..(3604): n is a, c, g, or t
  misc_feature (3606)..(3606): n is a, c, g, or t
  misc_feature (3608)..(3609): n is a, c, g, or t
  misc_feature (3611)..(3612): n is a, c, g, or t
  misc_feature (3615)..(3615): n is a, c, g, or t
  misc_feature (3620)..(3620): n is a, c, g, or t
  misc_feature (3622)..(3624): n is a, c, g, or t
  misc_feature (3626)..(3626): n is a, c, g, or t
  misc_feature (3628)..(3629): n is a, c, g, or t
  misc_feature (3631)..(3631): n is a, c, g, or t
  misc_feature (3633)..(3633): n is a, c, g, or t
  misc_feature (3635)..(3635): n is a, c, g, or t
  misc_feature (3638)..(3638): n is a, c, g, or t
  misc_feature (3641)..(3641): n is a, c, g, or t
  misc_feature (3819)..(3819): n is a, c, g, or t
  misc_feature (3828)..(3828): n is a, c, g, or t
agggaaggagatcggttatttatttgggcagtacaagcggctgaatcaggggaactttgagggagtgctgacaggaaagtcagcggattggggggggagcaacatgcgaccggaagctactggctatgggtgcgtttttttcgcggaagaggccatgaaagatttgaggaagaaggaattgaaggtgagtggagtggggtggagtcagcacattacacgagctggacctggacctaacccttaagctacgctacgctaaaccttcgccaatgcagggaatgaagtgcgcagtgagcggcagcggtaatgtcgcacagttcgccgcagagatgttgctcaaagagggggctaccgttttaaccttttcagatagttccgggactatctacgagcccgatggcttcagcaaggaccagttgaggattttgatgaaattaaagcagaagtcacgtggcgctcgagtgtcagattactgcatcagttcaccgtctgccaaatactttgagaagcgcaagccttggggaatcgttgaaagcttggatctcgctttcccatgcgcaacgcagaacgagatcggagagagcgacgctcaggatcttgttgacaggggttgtatcggtgtcttcgagggcgctaacatgccgactacaccagagggagtgcacgtgctcgagtctaacaaagtagtctttggtccagcaaaggcagctaatgcggggggcgtggcagtgagcggattggaaatggcccagaatgcacagcaagttacatggagcagcaatgaggtcgagacaatgctgaggaaaataatgaaagacatatataaacaatgtgctgagtgcgctaagacctactgggaagcagatgatttgaaaagtggagcaaacattgccggatttttgaaggttgcagcagccatgcgagagcagggagctgtttaatatattagagaagcactgaaacacttttctgtatgtatttgtggagtcgacccgtattttacttctttcgattcaacaaacaaacaaagttaaggtagcttttcttcaaaaaagaaggcgagtttttacctttaaatcgtgctcctcctctccattccattccatcattcgtaacagaaaagtcacattattgtacaaatgtcatccttcccgacaactttcccatcaacgacatctccggtcttcacaggctggcaatcagtgaacagcagcggcgtgtccttgtcgaactcagcgaatagccagatatcgtcgctggctgtcccggtagggacggctttaccgctcaggcgatcaatgtgtaaatgaatctgccaaagtgtgatatggtgtcagaaaggagaagaaaaaaaagaagctgcgtagtaccaccttcctcaccttggcaatgtccttcttgagcttatccttctctttctccctccccttgatctcctcctccaatcgccccttctcgctcttgacgagctcgcatcccagcaaaaggctcccgctgagctgtttcgcctgtgttttcttttctgggtcggcaatagggtaccacttgttaccgctttcgcccattttctgcagctggacagtgacacagccaacaaaatcgtcgttcccaaaactctctgcatccatgaggttaaaagtgacagttgaaggtagagaggtgagggaggggaaggaaaaggaagcattgaagattggatttctcgagttgggaattactttcgttctcagagtagaaggagggtttggagaactgagtgaaattagttgtgttagttagcgtaaccacgtatcttcttattgacatgttctcttgcctgaactcaccagtctgctggactaacgagaatctccacgtaaggatcacacttcccactgtaccaatccatcttgggcaaatcctttccctcttgtatcatgagttccaatctcgcggtgctctccccatcttttgtcctccctatcccagatttatcgacagtgtcgctcgttctttttcctagatcggactgcagatctttcaatgccgcctcgcagttactcaaggcagactccttacttgaaagtaaaagagaaagctttttaatttttccatctttgtgtgggtcttctgcttctgcctgttggtgtttcccgccttccgatgtagtgcttgtcgtagaacctgttgcaggaggaggggacttctcaggggagggagaaggaccatctgaatccttctccagcttctccttctctttgcctacggccccagtcttccctttttttcccattctccgatctgttcttacttagacggtgcaggtatcctttttangccgcttgcagaacttgtctatatctttcttaaaggatttttaaacttttttatttaattttcatcttaaatattaacttaatactctgttagtttctcttggtaaactgtctctccagtagtctcgtagtctctgagtagtggagaacatagccgtcttcttaaattaatcacagacctcctcaaaacttgtgcgctgcggccctttcgatcacttcagacatatttccttctgtgatggcgtaagttgtatatatgttcgtctctaatgagtggttgtggatncttcgactgtggtataaatgctggggatacatcgaatgtggactatctcttgcaagatgtaagttgcatcttgattaaatcctgccatcatccatcaaaacaaaacaaaacaaaacaaaacaaaacannncagtcattttaacaaggtatcctttcaacgtgcacttctttttcttggttattttttcttacgagtggttccgtcttcgcttatggcccgtcattcctccctttttccctcgctttccacttgctgcccnntncntncctnntttntnanntttttntcncttnnccncnanctnanccccctngncccnttngnncccnttctngnnannnanntannttttncnggnnttnntnnnntncgcnctgcccngncccnngngggcntnnnnnannncnttnanctngnnannttntntcatntntgnnttntngnccannnnttnnnntttnttctngnntgcnttgnnctnnncncttncccttttnnnntnccncncncgcgccnngnccncctttgnantgggnttngaggngngtgtntgganttgcnntttnnttttngngnnnngnnnnggngggncngnnanntgggntntanantngcgcgtcnnntnntnnncnancnngnnagncaantntngngnnnnnttntnnnngaanngnttnnanntgnnntnnnccngcgccttgnntttnntntttcnnaannnnnttnnccnangcgngngnnncntngngngnncnncnntnnnnnnnncctnntttncnntnnnannggtgngnnnannanagnngggnanngngncctnntcttnnnnngnnggnnntntttcnanncnnnccttcnnnttntncgtggcntnncccntnanncccnntttnnnntntnngcgnnccnccnncncccnnttccntnncttcncncncntncccnccnncnccncctngnnttttnncntccnnncctcctntnnnttnnccgnnntcttcncncnngnntcntctcncnnnananntncnanccnttnatctgactccttcgttttcttggctttttttcgctcgttcctgtcacgtgccttcaggcgcttctcgtggcgcttctgcttgtctgtttttggcatgctgtttaagatagcttcggggtcaattttctgttttttgctttctctgctttctgactctggcgatgtcgacgcgtcgtcntcgttatcnccgtcgtcgtcactgctgtcgttatcatcgctgctatttaattcatctttgccgccatcttcatcatcgtcatcatcatcatcatcactatcatctctcttgatttgatcaaacaaaggattgctgaaccacctctgcgcctttacacttctcgcgtcgcctgcctttgtca

SEQ ID NO: 1225 - DNA, 4000 bp, Escherichia coli
  misc_feature (834)..(834): n is a, c, g, or t
  misc_feature (837)..(837): n is a, c, g, or t
  misc_feature (1279)..(1279): n is a, c, g, or t
  misc_feature (1282)..(1282): n is a, c, g, or t
  misc_feature (1975)..(1975): n is a, c, g, or t
  misc_feature (1977)..(1977): n is a, c, g, or t
  misc_feature (1980)..(1980): n is a, c, g, or t
  misc_feature (1988)..(1988): n is a, c, g, or t
  misc_feature (2000)..(2000): n is a, c, g, or t
  misc_feature (2007)..(2007): n is a, c, g, or t
  misc_feature (2228)..(2228): n is a, c, g, or t
  misc_feature (2324)..(2324): n is a, c, g, or t
  misc_feature (2327)..(2327): n is a, c, g, or t
  misc_feature (2429)..(2429): n is a, c, g, or t
  misc_feature (2542)..(2542): n is a, c, g, or t
  misc_feature (2753)..(2753): n is a, c, g, or t
  misc_feature (3044)..(3044): n is a, c, g, or t
  misc_feature (3162)..(3162): n is a, c, g, or t
  misc_feature (3175)..(3175): n is a, c, g, or t
  misc_feature (3209)..(3209): n is a, c, g, or t
aagaaagaacttttcgaccttcgtttccaagctgcagcaggtcaacttgatcaaactgcccgtttgaacgaagtgaaaaaacaaattgcacgtgttaaaactgtgcaatctgaaatcaaataatagattgggaaaggagcaattctaataatggaacgtaatcaacgtaaaacccttgttggacgcgtagtatctgacaagatggataaaacaatcacagttgtagttgaaactaaacgtaaccacccagtctatggtaaacgtatcaactattctaaaaaatacaaagcacatgatgaaaacaacgttgctaaagaaggcgatatcgttcgtatcatggaaactcgcccactttcagctacaaaacgcttccgtcttgtagaagttgtggaagaagctgttattatctaataaaactaaaaggagacaattgaaatgattcaacaagaaagtcgcttaaaagttgctgataatagcggtgctcgtgaaatcttgactatcaaagttcttggtggttcaggacgtaaattcgctaacatcggcgacgttatcgttgcaactgttaaacaagctacaccaggtggagctgttaaaaaaggtgatgttgttaaagctgttatcgttcgtacaaaaactggtgctcgccgtccagacggttcatacatcaagtttgatgacaacgctgcagtaatcatccgcgatgacaaaactcctcgtggaactcgtatctttggccctgttgcacgtgaattgcgtgaaggtggatacatgcgtatcgtatctttggcgccagaagtactttaatctgaattaacacaaacttagtcccctganatnttcagggtgcccattagggcgtaagaaataataggagaaatactcaaatgtttgtaaaaaaaggcgataaagttcgcgttattgctggtaaagacaaaggaactgaagcagtagttcttaaagctcttccaaaagtaaacaaagttgttgttgaaggtgttgcaatcatcaaaaaacaccaaaaaccatcagctgaaaaccctcaaggtgctatcgtggaaaaagaagcaccaatccacgcttcaaacgttcaagttcttgacaagaacggtgtagctggacgtgtaggttacaaagttgttgacggcaaaaaagttcgttacaacaaaaaatcaggcgaagtgcttgactaatcacgaaggaaaggagaaagtattaaatggctaaccgtcttaaagaaaaatacactaacgaagtaattccagctttgactgaaaaattnaantattcttcagttatggctgtgccaaaagttgataaaatcgttatcaacatgggtgttggtgaagctgtaaacaacgctaaaactcttgaaaaagctgctgctgagttggcacttatttcaggtcaaaaaccattgattactaaagctaagaaatcaatcgctggcttccgtcttcgtgaaggtgtagcgatcggtgctaaagttacccttcgtggtgaacgcatgtacgaattcttggataaattggtatcagtatcacttccacgtgttcgtgacttccatggtgttccaactaaatcatttgatggacgtggtaactacacacttggtgttaaagaacaacttatcttcccagaaatcaacttcgacgatgttgataaagtacgtggtatggatatcgttatcgtaactactgctaacactgacgaagaaggtcgtgaattgcttaaaggccttggaatgccttttgcaaaataatctaggaggtaaataaattggctaaaaaatcaatgattgctaagaacaaacgccctgcgaagttctctacgcaagcttacactcgttgcgaacgttgtggacgtccacactcagtttatcgcaaatttaaactttgccgtgtttgcttccgtgaattggcttacaaaggtcaaattccaggtgttaccaaagcttcttggtaaaaacatggtacantnaanttagtttnacctaatttgantgtattnaacacaatctgagcctagctcaatcattaactagcaagtgaattattcaaactactagtaagaggagaaaatataaaatggttatgactgacccaattgcagatttcttgacacgtattcgtaacgctaaccaagctaaacacgaagtacttgaagtacctgcatcaaacattaaaaaaggtatcgctgaaatccttaaacgtgaaggtttcgtaaaaaangttgaagttatcgaagatgacaaacaaggtatcatccgcgtattcttgaaatacggacaaaacggtgaacgtgttatcactaacttgaaacgtatntcnaaaccaggtcttcgtgtttactctaaacgtgaagatgttcctaaagttcttaacggacttggaatcgcgatcatctctacttcagaaggtcttttgactganaaagaagctcgtcaaaagaacgttggtggagaagttatcgcttacgtttggtaagaagctgatactaagcacttatctcaaatgatttgtgcgagtttcgttgattatattcnatgaaactcatccccgtgaaaactagtcactttgtggcttgataatctaacaggagaattaaatactatgtcacgtattggtaataaagttattactttgcctgctggtgttgaagtaacaaacaacgataacgttgttactgttaaaggacctaaaggcgaactcactcgtgagtttaacaaaaacattgaaatcaaagttgaaggcaangaagttacacttcaccgtccaaacgactcaaaagaaaacaaaacaatccacggtacttcacgtgcaaacttgaacaacatggttgttggtgtttctgaaggtttcaaaaaagaacttgaaatgcgcggtgtcggatatcgtgcgcaactccaaggaacaaaacttgttctttcagttggtaaatctcaccaagacgaagttgaagctccagaaggtattacttttgaagtaccatctgcaacttcaatcgttgtaagtggtattaacaaagaagttgttggtcaaacagcngcttacatccgtagccttcgttcaccagaaccttacaaaggtaaaggtatccgttacgttggtgaatacgtacgtcgtaaagaaggtaaaactggtaaataataggattttatccttntggcaattctttntggattgtctctttaccaaaagctctcatgagcnagcattataattaagaggtgaaaattgtgatttcgaaaccagataaaaacaaactccgccaaaaacgccaccgtcgcgttcgcggaaaactctctggaactgctgatcgcccacgtttgaacattttccgttctaatacaggcatctacgctcaagttattgatgacgtagcgggtgtaacgctcgcaagtgcatcaactcttgataaagaagtttctaaaggaactaaaacagaacaagccgttgttgtcggtaaacttgttgctgaacgcgcagtagctaaaggtatttctgaagtggtgtttgaccgcggtggatatctctatcacggacgtgttaaagctttggctgactcagctcgtgaaaacggattgaaattctaatagggaggacacttaataatggcatttaaagataatgcagtagaacttgaagaacgcgtagttgctatcaaccgtgttactaaagttgtaaaaggtggacgcaacatgcgttttgctgctcttgttgttgttggtgaccgtaatggtcgcgtaggatttggtactggtaaatctcaagaggttccagaagctatccgtaaagcagttgaagcagctaagaaaaaccttatcgaagttcctatggttggtacaactattcctcacgaagttcgttcagaatttggtggagcgaaagtattgttgaaaccagctgttgaaggggctggggttgccgctggtggtgcagttcgtgccgtcatcgaattggctggtgttgctgatgtaacatctaaatcactcggttcaaac

SEQ ID NO: 1226 - DNA, 4000 bp, Escherichia coli
  misc_feature (3093)..(3093): n is a, c, g, or t
  misc_feature (3252)..(3253): n is a, c, g, or t
  misc_feature (3256)..(3257): n is a, c, g, or t
  misc_feature (3260)..(3263): n is a, c, g, or t
  misc_feature (3266)..(3267): n is a, c, g, or t
  misc_feature (3273)..(3276): n is a, c, g, or t
  misc_feature (3281)..(3281): n is a, c, g, or t
  misc_feature (3284)..(3287): n is a, c, g, or t
  misc_feature (3290)..(3291): n is a, c, g, or t
  misc_feature (3294)..(3295): n is a, c, g, or t
  misc_feature (3302)..(3302): n is a, c, g, or t
  misc_feature (3306)..(3306): n is a, c, g, or t
  misc_feature (3310)..(3315): n is a, c, g, or t
  misc_feature (3318)..(3319): n is a, c, g, or t
  misc_feature (3325)..(3331): n is a, c, g, or t
  misc_feature (3335)..(3335): n is a, c, g, or t
  misc_feature (3337)..(3340): n is a, c, g, or t
  misc_feature (3342)..(3343): n is a, c, g, or t
  misc_feature (3348)..(3349): n is a, c, g, or t
  misc_feature (3354)..(3356): n is a, c, g, or t
  misc_feature (3361)..(3361): n is a, c, g, or t
  misc_feature (3364)..(3364): n is a, c, g, or t
  misc_feature (3367)..(3374): n is a, c, g, or t
  misc_feature (3378)..(3378): n is a, c, g, or t
  misc_feature (3381)..(3381): n is a, c, g, or t
  misc_feature (3384)..(3386): n is a, c, g, or t
  misc_feature (3389)..(3390): n is a, c, g, or t
  misc_feature (3393)..(3393): n is a, c, g, or t
  misc_feature (3399)..(3400): n is a, c, g, or t
  misc_feature (3402)..(3404): n is a, c, g, or t
  misc_feature (3407)..(3407): n is a, c, g, or t
  misc_feature (3412)..(3413): n is a, c, g, or t
  misc_feature (3415)..(3421): n is a, c, g, or t
  misc_feature (3425)..(3425): n is a, c, g, or t
  misc_feature (3428)..(3432): n is a, c, g, or t
  misc_feature (3437)..(3437): n is a, c, g, or t
  misc_feature (3442)..(3443): n is a, c, g, or t
  misc_feature (3447)..(3449): n is a, c, g, or t
  misc_feature (3452)..(3453): n is a, c, g, or t
  misc_feature (3459)..(3460): n is a, c, g, or t
  misc_feature (3463)..(3463): n is a, c, g, or t
  misc_feature (3466)..(3470): n is a, c, g, or t
  misc_feature (3472)..(3473): n is a, c, g, or t
  misc_feature (3475)..(3477): n is a, c, g, or t
  misc_feature (3480)..(3480): n is a, c, g, or t
  misc_feature (3484)..(3485): n is a, c, g, or t
  misc_feature (3489)..(3490): n is a, c, g, or t
  misc_feature (3492)..(3492): n is a, c, g, or t
  misc_feature (3495)..(3495): n is a, c, g, or t
  misc_feature (3504)..(3504): n is a, c, g, or t
  misc_feature (3509)..(3509): n is a, c, g, or t
  misc_feature (3512)..(3513): n is a, c, g, or t
  misc_feature (3518)..(3520): n is a, c, g, or t
  misc_feature (3522)..(3534): n is a, c, g, or t
  misc_feature (3536)..(3542): n is a, c, g, or t
  misc_feature (3544)..(3545): n is a, c, g, or t
  misc_feature (3554)..(3554): n is a, c, g, or t
  misc_feature (3560)..(3560): n is a, c, g, or t
  misc_feature (3563)..(3564): n is a, c, g, or t
  misc_feature (3566)..(3566): n is a, c, g, or t
  misc_feature (3569)..(3569): n is a, c, g, or t
  misc_feature (3573)..(3574): n is a, c, g, or t
  misc_feature (3576)..(3576): n is a, c, g, or t
  misc_feature (3581)..(3583): n is a, c, g, or t
  misc_feature (3585)..(3586): n is a, c, g, or t
  misc_feature (3590)..(3591): n is a, c, g, or t
  misc_feature (3598)..(3600): n is a, c, g, or t
  misc_feature (3602)..(3602): n is a, c, g, or t
  misc_feature (3604)..(3604): n is a, c, g, or t
  misc_feature (3606)..(3607): n is a, c, g, or t
  misc_feature (3609)..(3613): n is a, c, g, or t
  misc_feature (3617)..(3617): n is a, c, g, or t
  misc_feature (3620)..(3620): n is a, c, g, or t
  misc_feature (3623)..(3623): n is a, c, g, or t
  misc_feature (3625)..(3625): n is a, c, g, or t
  misc_feature (3627)..(3627): n is a, c, g, or t
  misc_feature (3629)..(3629): n is a, c, g, or t
  misc_feature (3631)..(3631): n is a, c, g, or t
  misc_feature (3634)..(3635): n is a, c, g, or t
  misc_feature (3637)..(3638): n is a, c, g, or t
  misc_feature (3640)..(3641): n is a, c, g, or t
  misc_feature (3643)..(3648): n is a, c, g, or t
  misc_feature (3650)..(3650): n is a, c, g, or t
  misc_feature (3652)..(3652): n is a, c, g, or t
  misc_feature (3655)..(3660): n is a, c, g, or t
  misc_feature (3662)..(3662): n is a, c, g, or t
  misc_feature (3664)..(3665): n is a, c, g, or t
  misc_feature (3667)..(3667): n is a, c, g, or t
  misc_feature (3670)..(3672): n is a, c, g, or t
  misc_feature (3674)..(3674): n is a, c, g, or t
  misc_feature (3677)..(3677): n is a, c, g, or t
  misc_feature (3681)..(3685): n is a, c, g, or t
  misc_feature (3687)..(3687): n is a, c, g, or t
  misc_feature (3689)..(3689): n is a, c, g, or t
  misc_feature (3692)..(3692): n is a, c, g, or t
  misc_feature (3694)..(3696): n is a, c, g, or t
  misc_feature (3699)..(3699): n is a, c, g, or t
  misc_feature (3702)..(3703): n is a, c, g, or t
  misc_feature (3705)..(3705): n is a, c, g, or t
  misc_feature (3707)..(3707): n is a, c, g, or t
  misc_feature (3710)..(3710): n is a, c, g, or t
  misc_feature (3712)..(3713): n is a, c, g, or t
  misc_feature (3715)..(3715): n is a, c, g, or t
  misc_feature (3717)..(3718): n is a, c, g, or t
  misc_feature (3720)..(3721): n is a, c, g, or t
  misc_feature (3723)..(3723): n is a, c, g, or t
  misc_feature (3725)..(3729): n is a, c, g, or t
  misc_feature (3732)..(3732): n is a, c, g, or t
  misc_feature (3734)..(3734): n is a, c, g, or t
  misc_feature (3737)..(3737): n is a, c, g, or t
  misc_feature (3739)..(3740): n is a, c, g, or t
  misc_feature (3742)..(3742): n is a, c, g, or t
  misc_feature (3744)..(3744): n is a, c, g, or t
  misc_feature (3746)..(3746): n is a, c, g, or t
  misc_feature (3749)..(3751): n is a, c, g, or t
  misc_feature (3753)..(3754): n is a, c, g, or t
  misc_feature (3756)..(3758): n is a, c, g, or t
  misc_feature (3760)..(3760): n is a, c, g, or t
  misc_feature (3762)..(3762): n is a, c, g, or t
  misc_feature (3764)..(3770): n is a, c, g, or t
  misc_feature (3772)..(3772): n is a, c, g, or t
  misc_feature (3774)..(3774): n is a, c, g, or t
  misc_feature (3777)..(3777): n is a, c, g, or t
  misc_feature (3780)..(3780): n is a, c, g, or t
  misc_feature (3782)..(3783): n is a, c, g, or t
  misc_feature (3785)..(3785): n is a, c, g, or t
  misc_feature (3787)..(3787): n is a, c, g, or t
  misc_feature (3790)..(3794): n is a, c, g, or t
  misc_feature (3796)..(3796): n is a, c, g, or t
  misc_feature (3798)..(3799): n is a, c, g, or t
  misc_feature (3804)..(3811): n is a, c, g, or t
  misc_feature (3813)..(3816): n is a, c, g, or t
  misc_feature (3819)..(3824): n is a, c, g, or t
  misc_feature (3826)..(3828): n is a, c, g, or t
  misc_feature (3830)..(3833): n is a, c, g, or t
  misc_feature (3835)..(3836): n is a, c, g, or t
  misc_feature (3838)..(3838): n is a, c, g, or t
  misc_feature (3840)..(3843): n is a, c, g, or t
  misc_feature (3845)..(3845): n is a, c, g, or t
  misc_feature (3847)..(3848): n is a, c, g, or t
  misc_feature (3851)..(3851): n is a, c, g, or t
  misc_feature (3855)..(3857): n is a, c, g, or t
  misc_feature (3859)..(3860): n is a, c, g, or t
  misc_feature (3864)..(3865): n is a, c, g, or t
  misc_feature (3867)..(3867): n is a, c, g, or t
  misc_feature (3871)..(3876): n is a, c, g, or t
  misc_feature (3879)..(3879): n is a, c, g, or t
  misc_feature (3881)..(3883): n is a, c, g, or t
  misc_feature (3885)..(3887): n is a, c, g, or t
  misc_feature (3890)..(3892): n is a, c, g, or t
  misc_feature (3894)..(3898): n is a, c, g, or t
  misc_feature (3901)..(3901): n is a, c, g, or t
  misc_feature (3903)..(3905): n is a, c, g, or t
  misc_feature (3907)..(3907): n is a, c, g, or t
  misc_feature (3909)..(3909): n is a, c, g, or t
  misc_feature (3911)..(3911): n is a, c, g, or t
  misc_feature (3913)..(3913): n is a, c, g, or t
  misc_feature (3915)..(3915): n is a, c, g, or t
  misc_feature (3917)..(3919): n is a, c, g, or t
  misc_feature (3921)..(3923): n is a, c, g, or t
  misc_feature (3925)..(3926): n is a, c, g, or t
  misc_feature (3929)..(3929): n is a, c, g, or t
  misc_feature (3932)..(3935): n is a, c, g, or t
  misc_feature (3937)..(3939): n is a, c, g, or t
  misc_feature (3941)..(3941): n is a, c, g, or t
  misc_feature (3944)..(3945): n is a, c, g, or t
  misc_feature (3949)..(3949): n is a, c, g, or t
  misc_feature (3951)..(3954): n is a, c, g, or t
  misc_feature (3956)..(3959): n is a, c, g, or t
  misc_feature (3961)..(3961): n is a, c, g, or t
  misc_feature (3964)..(3964): n is a, c, g, or t
  misc_feature (3966)..(3966): n is a, c, g, or t
  misc_feature (3968)..(3972): n is a, c, g, or t
  misc_feature (3975)..(3977): n is a, c, g, or t
  misc_feature (3979)..(3980): n is a, c, g, or t
  misc_feature (3983)..(3984): n is a, c, g, or t
  misc_feature (3987)..(3990): n is a, c, g, or t
  misc_feature (3992)..(3994): n is a, c, g, or t
  misc_feature (3996)..(3996): n is a, c, g, or t
  misc_feature (3999)..(3999): n is a, c, g, or t
tgctggccccttacatccaggtgggcctgatagtggggaaactgctgactcacctggccgaaggccagttcgtgggcgtaactatccgctacgagggcgagattgcccagcacaatacggcgatgctcaagtcggcggtattggccggtttgctgggaccggttaccggcgatcaagtgaacttgatcaacgccccattcttggcccaacaacgcggtctcagcctgactgaacagagcaacgaagcggccgcggaatatgtcagtatgatcaccgccacgctggacaccaccggaggccctatcaccgtcgccggcacatcgatgcgggacgaggcccacgtggtaaaggtgaacgactactggctcgacatcacgccatccagcccatacctgctgttcgtggacaaccaggaccagcccggattgatcggggcggtgggcaccctggccggacgccacaatatcaacatcagctccatggacgtcggacggctcaacccaaggggcatggccatgatggtcatcggcctggacgacccggtgccgcctgcggtgctggaggagatcaaggccctgccccagatcatcaacgcccgattggtctcgctgtagcggacagggtctggacactcggcaaccccaccgtcgccatacttgcgagatctttgcctctccactagtattaaccggccagcccctatgggctcggcacgccgaataatcgccaacagtccgaggccgcccgccgccgcctctgggcaggagtattaaaatgggtgacaagattggcatcatgggagccggcgcggtaggtagctacgtgggcgcctacttcgtcaaagagggcgaggacgtaaccttcatcgacatgtggccagagcacgtggaaaccatgcggtccaagggattgcgggccagcggcagccagggcgacttcacggtgccggtcaacgccatgcacctgaccgacgcccagaacatctacgatctgttcgacatcgctataatcagcgtcaagtcctacgacaccgagtgggccacccatttcatcaagcggtacgtcaagcctgaaggcttcttcgtttccatacagaactgctggaacgacccgaccatcggcgagatcgtcggtccggaccgggccttgggctgcgtggcctcccacatcgaggtcgctctctgggaaccgggccacgtgaaccggggcggcgaacccggccgcgatcacggccacaccgtcttccgggtgggggagcacaacggcaagatcacccccaagtcggagaagatcgccggcatgctggaccgtatcgacgccgcttacgccagcgacaatctgtggggagagcgctggtcaaagctgtgccagaactccatgggcaacgccatctccgccatgtccaccatgggttcccaggacctggccaaagacccccggacccggctgttccgcatccacctggccaaggaaggcactcaagtaggcttggcccagggcctcaacgtggtggatgtgggcggtaagcccgcccagatgtggtccgaggccgacaaaggcgacgtcttcgaagagctggacgacttcctgagcagccgcggcggcaacgttaactggctggcctccatggcccaggacgtccataaaggccgccactcggagatcgactacatgaacggcctcatctgccaaaaaggccgggaagtaggcgtccccacccccttcaacgacgccatcgttgaagccatgcacggcatcgacgacggctccatcaagcccgacccgtcagtggtggaccagatcatgaaggacgttgggcggtagaccacccttaaacaaactcaggaggaacgcagggctggagaagaatagcaacctagcgcctggatgtgccggacaaaaaataaccgccctcgaaggcggttggcctggtcaccagatgcgatcggcaaaaaaatcgcctcaacaatttgttgagactgccgagcattatagcatatccggagtaagcccgtcaagtttttcagcctaaatcgataaaaaggtcctcccataggcaatgctgccggtcccgttcgtcctgagcttgtcgaaggacccacacactgaggaacaaccggctaaaaccagtcgcagataaggcggtgccaacgtgttcataaaagtcgaacccgccgacttcttaatgttccgggtcatcatgacctttgacctggaaaaccccgactcggaagatcagcaagtccgcgactacctgacggatcacgacctagagcccaggtacacgaaccagggcgagtttgaagaacgccagtgcgagttcatgcagttcggcggctgctacctgggcaaccacctgcaaaacatctcccagatacaacgagtggccgtggaagtcgagcttctcaccgcggagatccgtgtccacctgaacatctcacccgatgccaccacgcccctagccaaagaccagcagaccaccatcgcccaactggtaaaagacttccaccgggattcatccttccagaccaacgaaaacggggaacttatcgcggtgttggacggtgacgaggtccgggcagccgccagccaactggcaagcgtctcttcggacgactaagcttcggctataaggtccgttcttgaagtggagcgggcgatgggaatcgaacccacatggctagcttggaaggctagagctctgccactgagctacgcccgctggttgagactaaatcctggcatttttcggcccaaaacgccactttttgggtcacctttccaggcacgtttttggtcacctaaaaatttccaaaatgccacattgatatgataactcaactggtcactggatggtagcgggggaccgacaaaaaggggtgccggccggcgacagagcgacggccaaggtggcaaatgtggtgggcggtaatggactcgaaccactgacctcttgcgtgtcgagcaagtactctaaccaactgagctaaccgcccacatttgaacggatgtgccttataggtcggggaaagatggttaggtattatgaagttaggtgtgttgacatcaggccaggtacccagcacactaacncgacatgaattcggaagatcgcggaggagagatacgaatagaattgttcaggagcatttacgactggcgattcagagggaggagttcggaggattttcttcgttagttatgcgatagataacgaggcaccaatcaacactctaactaaaaagggggggnnccnngannnnaannggtttnnnnttccnttnnnngcnnttnntttaatntttnttgnnnnnnccnnccaaannnnnnnggcncnnnncnnttaannaaccnnnaactntanaannnnnnnnaatnttnaannnggnnacncctttnntnnnaanttcanngnnnnnnnaagnggnnnnnccaantgtgnnaatnnngcnnaagggnnttnaannnnngnntnnnaancccnnggcnntntcncctttcctnttaanccnnccaannncnnnnnnnnnnnnncnnnnnnngnnccaaccggntttacnccnngnccnggcnntnttcgnnncnnggcnnggggggnnntngntnncnnnnncccnccnccngnanangnggnnanngnnannnnnntntnccnnnnnnananngnggnnncnaanggannnnnancnccncnnnttnttnngngngtntnngngnncnngngnnnnntgngnccncnnancnanaannngnntnnngngncnnnnnnngngnttntcncnnananctnnnnncngnnccccnnnnnnnntnnnnttnnnnnngnnngnnnngnncntnnnngngnnaanggcnnngnnaacnntncccnnnnnnggnannncnnnggnnncnnnnnggngnnntngngngngnannntnnngnnaanggnnnngnnngngtnnacanannnnannnngngtntncnnnnnccnnngnnaannccnnnncnnncnccnc

SEQ ID NO: 1227 - DNA, 4000 bp, Escherichia coli
  misc_feature (188)..(188): n is a, c, g, or t
  misc_feature (1714)..(1714): n is a, c, g, or t
  misc_feature (1717)..(1717): n is a, c, g, or t
  misc_feature (1991)..(1991): n is a, c, g, or t
  misc_feature (3448)..(3448): n is a, c, g, or t
  misc_feature (3863)..(3863): n is a, c, g, or t
  misc_feature (3871)..(3873): n is a, c, g, or t
  misc_feature (3892)..(3892): n is a, c, g, or t
  misc_feature (3919)..(3919): n is a, c, g, or t
  misc_feature (3925)..(3925): n is a, c, g, or t
  misc_feature (3934)..(3934): n is a, c, g, or t
  misc_feature (3953)..(3953): n is a, c, g, or t
  misc_feature (3975)..(3975): n is a, c, g, or t
  misc_feature (3977)..(3977): n is a, c, g, or t
agaactatcgtgaacttttcacactcttggagccaaatggctcggcaccgtttaatgctctacttgcgatggctaattcagaaagcaccgacgacccggaatacaaaaattttcgggacgagatgcctgagcgcacgctcaaaattaataatagcggtggctataacacaactgcaactgctctcgtngtcgattcggacgccaatacgaggttcgttgtaattggcgctctgttgaccaacctcaccactggcgaagtgatgcgtgcttctgctaactccaaccctgctgttctgacagctatcactgtcgagcggaatattggcggcacttcgcactctattgctgatgatgctgatctagctattatcggcttcgcggccgaggaaggggcaacaagtccaatcgcagtatcgtttgacgctgttgtcgtcagtaactattgccagattttccgtacggcattcaaagtcaccaatacgctgaaatcaacctacctccgcactggagataaggaagatgaggtgacgacgaaaggcttacggatgcacatgatggatatcgaacgtgcaatgatctggggcaagaaacacgaaacaggcggtacaaccgctcaacctacccgctacactggtggcttgctcaattccatcacgaccgtcattgatggtagcgcaggcgctcccggatatgtgaatggcgttatcagcgaagatcagtttgatcgtgaactgattgagactatctttgcgtttggtagcaagcagaaggtcgccttcataggcgctcgcgttgcaagcaacctacagaagataggcaaacaacggtggagtcccacgcaggttgaaggctcttacggagtctccatgacccgctacgccacctttgctggtgacctgcttgtccatgtacacccgcagttccgcatgattccgggcatggaaaactcgatgctgattgtcgatttcccattcacccgttatcgctacctcgccaatcgcgacacccagttactcagggatcgtcaagcgaacgacgaagatgcggtgaagcatgagtacctgaccgaatgtggtctggaactcctgcaagacaaggttcacgcctacatcaaaaactggagtgccctaacctaatagggacgacagttctcccgtaaagggttaaaaagagggggctgaaatgccccctttttctatggagaacctgatgtcaaataaaaaacaaaaagccagcccgaaaaccaaaacagccccgaaagaagaggccgtattacctgatgaaatagagatcgaattcaagtacgtctctaaagaaaaggaggggatgttcaaagttctttaccccggcggagggtggagaccatcaatgatgggcgatggccgacttatgtggacgataagcgcatccgagaaggatcgctttgaagcacatcaccatttccagattggaaggatcatccctcatcatggctgatgcccgtatttccacgccgcatattaaggacggcaatgctcaacttgaatccctgatcttctcagcattaagaaggtttggtgatttcgcgccagacacatcagacggtcacctgatgagcatgatgcttgagttcgcgaacctcactgttgatgaggttcgcaaccacccctactgggatgatacccaactggattactacaccgccgtttctgaatcaggcgctgtaccagacaanatnatgatcgctggcttactcacccaatacgcccttcagcaagcgtcagacaaagcgcagatgttcacgatgctttattacaaaacgcttaatcaagaattatggaaccgtctcaacaccaccaacaccacggatggtggcggtaatcgaagcccagcccttcaggtaagaccgatggactcacccataaaccagtccattattacgggacaagagaaagccacaacctaacatggctagtaagaccagttcgcctactggcattaataatactagnacggcaatctatggtacgttttccggcttagatacgtctaggcacgaaacatctcttgataccagcaagtcattgcacatgacgaaactggaaaacggatactgtgatttccaggggcagattgtcagagagtccacagcgcatttcaggaaaggtagttaccctatcgtccaaatgcggttcttggataaagaccatctcgtatgggctgagcaacgtggcgggggcatctacctaaataacgataatgaagacgaactcgaagcctacgcatcgaactctctggtaagtagcactacattcaatcgaaaggtgcatttcacatctcgattacaaagatcattcaactacgacggtatcgtttgggttcgcaaccaatcgttcgccatgaacgagatcatgcgtcccgcttactttagcgctgtccaaagaaggatggtcgccgctggtgtttcaggtaatgagcaaactgtttatctatctcatgtagataatcatgaagtgtgggcggatgatgaagcgccagatagtgctgacgccctgcgaggcggcaaaataaatatctctaatatcgttggctcagccggacgaatcacaggtatagccccattcgagcaaaccaagctcgccatctttactgaagacagaaccttcatttacgatatagatccagatatagctaaatggcttctcgataacagggcatccattaacattggctgtgtctcccacaacaccattcagtcggctggctccgaccttctctattgctctcgttctggtatccacacagtccatcgctcagaagataacggcatcttgttgatgagccaatctttaagcgacaaggtagaaattctctatcgatcctttctttcccaagtggatgatccagaaaccatcaatgctgtttttgatagagacaataagcaataccatgtttactttccaatttctggcggtattacaacgcaacgacttaccttaaatctcaacacagaagtaaaggagggaaggattaagtggtctacaggcacttatctaaacgcaagatgcggagcgttttacggagggcaactcgttgttggaaccgggggtggcgctttcaatgtagacaagccagaggatataaacccagattcagtggccccagagatgacggctgtgactccaattctatggctcaaggatatcgagaacacgaaagaatctcagagcctcacaataattgcatccggccccggcgaaataaaagtcgaggcgctgaatgaggaaaacaaacaattagcctcttgggtcatggagatcgatggcgacacggacgacaaccgctatatcggcgtgccattatccaagcaatatcatcgtcaatttaacgccagattcagaggcttacgacttcgctttacagcgaagtccaaagggctggttcggatcgttggcttcatcgtaaaaangaggtaatcgcatggctcgccttcgccaacagtacccaaacaactacctaacttcgggcaacatcagcaccgaatttgagaacctagtcaggtatctcaatgttggggaactcggcaacaaaacactcggagaacttttaactgtcctatttgatagtgatggtgtattccaaggcccaatcgaaatgcgccttgattccacactcggccttcaatacagggtaggcacctacgctggcgctgaaaccggatgggtcaccttatcagatatcgcatccttgcgaggaacaccaggtgcggatcttggtacgattggcgctccgatcttgtattctcggcaagacacaacagcaatagcgaaccagaccattgttgattacgcacatgtatcgacagatgaacttcttgtttatangaacggcnnnctaaaacgagaaggtagtngtcatgattacactaaaagccacacancaggancaggaggcncaggcgcagtaaccttcancactgccttactcgtcaatgananggtatcaatctacaaaatccgcg

SEQ ID NO: 1228 - DNA, 4000 bp, Escherichia coli
  misc_feature (2158)..(2158): n is a, c, g, or t
  misc_feature (3166)..(3166): n is a, c, g, or t
  misc_feature (3712)..(3712): n is a, c, g, or t
  misc_feature (3718)..(3718): n is a, c, g, or t
  misc_feature (3724)..(3724): n is a, c, g, or t
  misc_feature (3757)..(3757): n is a, c, g, or t
  misc_feature (3889)..(3889): n is a, c, g, or t
  misc_feature (3910)..(3910): n is a, c, g, or t
tttgtaccacttgaggatctcttataacaacacctgcgtaagctagtatccttaatataacttctgtttgttctatattagataattcaaattgagttgacaagggtttattgtaaatatattgacctaaagttccagtggtaaaaccccatacaacattattaggttttcttatataacttacagtcacatcactagctgtagttatagattcaggataaacatatatatgttgctgacctgtgtcattaccactagttcctatagttgattgttcatatgtgtaaatagggaaagtttcggaaggttttgttattggcgaaaggtttaaataaagaagttcatttctatcaactctttgtatttctttatctttaaatataacagtaccaattctatgtgtgtttgatggaggaagaaaatataatgatgtgttgattgaactcactgtagctgtagctaatgatcctggaccagtaacacctataacgtctccaacactatatccactaccgccgttatttacacttatattttgtatagcacctatactaggtgagcttaattttattgtacactgtgtacctgtttgtcctgcttgtactatggttaatatttcattaccattagcataacctgtaccaggttggtttattgttataccagtgatattaccactaacaccaacactatttatatttacagtcaaaccagttccaccaccacctgttgttgtagctaaatttacgccatttgtatagttttgacccgcgtttataactgaaaatcctggaactacagtttcaatatcaacagttaaaccactaccagctcccacatctgtggttgctctatttgtagctcctgaataaccagatccagcattagttatacttagtgatcttactaatcccacaggaacacttgttgtcgtgccgaactgtttaaatatagatattgctgtgttataatttctttgtctattaacgtattctgtatctgtttgtggtattcttaatagttgattatagtcctcaaaatagttttcgaatatttctaactgtacttgtgtagctaatttattaaactcatcaggcgttatgtatcctctttgttctttatttaaaatagacaagacagtcgtgtatactgtatttacgttaattgccataagttattattgtattaatattaggtgaccacacaagtgatcacctattattataatcacttgttaatttatttttttatctatagatttatatatctctacaccttcatcagtctttaaatatgcagcaaaagctgaatatggattttcgtcaaaaggaacggtcattaattttttaccgttagaaccccatgtgaaagttctttgatctgcagataatttaattatgtttatttcagttgcttttatagcaaaatttctaagttgaacattttcatcgttagctaaagctaggaaggtgcttggattttgtttagcaaataaaagtaaatctcttttaatttctttagagttcattttacctacttgactaccaagttctactcttaatatagcttcttgatgttctatatccatttgtttagctgagtttaaagcatctatttctaattcaatattagctaactcatctattgcaacttcaactttatcatgttctctgtatataccatttaacaaagggtggtatagtgataacattttttgtaagttctgttgattttttttaacagttaaaacaccgtctttaaaagttatgtgacccatagtggcttcacctaattgttcatctacaaaaacagaggattgatttgttgcataacgcaactctctttgcattcctttttgttcgtcgtaaaataataaagcgtgtttttttgtatgcttactaggtatagttaatgttaacggacttttgttacccgttaaataataatgtctatcctttatttcccagcctttttcagagctaaggatttctttagtttttttcataatataatataattaaataattttaataagggtaataattacccccgtcagtacaacgagggtaagaattacatttgttgaatcaattagatccctttgaataatacaaagttgtttctagcttgagttactaaacatctttcagataagaantttacttccattgcatctaatgaagatgtgaatgcaccaccaactgaaccagttaaccatgatttcattcttctgtcatcagcttgagaagctctatatcttacatgtaagaaaggacgtctaatgtttgtacctaagatttggtcataaacagttgaagtacctgcaggaactaatacaccttcaatagaagaaggaccagtaagtgcaccacgcgttgaagcgtcgtttaagtatttccaatctgttttatagaaatcgtaagaccctctacggaatccagagaatcctaagtttaatgccatttcttcagagttttcgaataaaccgaaagctacaccacctgcaaaacctccagagataccagctaacatatcatcaaaatcaagagcagtagctctgtttaagaataacatgttttcttcaatagctccttgagtgtcaaggtttttaagaatgtcatcaaatgaatctaaaccagcagcagcagtgaaacctacttcaacgttaccaccattttgaatagcagcaaataaaccttcagttccaggattagcagctggtacaccagcagcgcctgcattaagttcaccttcaaccattgccatttctaagtaatcttcaaatcttagtcttgtttcagactcagcttttagataccataaataacctccagtaccatcttcagtagaaacttctacccaaccgatctgagctgtgtcagaaccattaattgtgtattggcttcttaagattattggagagttagaaaaagtagtaaatgcaggatcaacagtaaccatagggttagcagctgacgctccaacattagcaccttgaggcgcgtttaatgtactacttcctttttgaaagtcagaaccgtatacaaagatcttaactggattaccgttaacgataccgctagcagcaaggttagcaccttggtaaggttcaactattaatcttcctggattaccaccaccaccggcagcgcgtgtatcagaagangtaactaaacattttacttcgtttccgaagccatccattacaacaatagttgatagtggagaaataacgtttagtattggcacagcagcgttagcagctgtaacagggattgtgatagttgcagcagcaccggcagcaccagcaactgtacagttatcgtatgaaatgtgtagtctgttttgttcagaccaaataacttgatcagatgtcatcggcatttctgctccaaccatacgtaaaaatcctgataacgttctgttaccatatctttctacctcttgctcataaagctcaggtaagtattgttgtgcgaaatcgttcgtgccattgtcaaattgtagataattactcgcaagagtttgttgagcttgcgatggtattatcgaaccaaattgaggagttaaagccataatttgtaattttaattagttaaatttttttgttttaatttttaattttgatgaatccaaaccactaattgattttacttttaacccgtttataaaaacatttccgtcagcaacttgcctaggtccgtcttttganggattnttaganctactaataacatttttaatgccatcagctttnccttgttcataaaaatgatgagctagtttatcagcattcatcgcagcatacattgctttatgataccctttttgatctacaatttgaccttcatcattagaaaatctactaacaaagttttgtacatcagantgagtttcgccaaccttagcnggatcttttacgccatatctaaattttttatctcctacattaaaatcaaaacctttgaagtctgaagaaaataattttttagtattgtct

SEQ ID NO: 1229 - DNA, 4000 bp, Escherichia coli
tgcaaatacagagaggataagttgagtaagtactctatagactccacttttattatacataccaggaagctcaatattattatcgataaagtattcaatagaacttgctaagccgtgcatagattcagatgacattggaggacttactgtattttttaaaataattaattgagcagctttggaggatctaaaaaatttatacatcacctcaaccgtctttaaaacaattacagaaacttgattagtttcaagtggggttaattcctctctaaatacattttcacaatctttaaaataacccttaatcatcattgcttttaaagagtcagttgtaggaaaaaatttataagtagaggttctctttaggcctgaatattttgcaatatttgctatcgttatagcttcaagaccatctctaagaagaattgattcagcagtttgaagaataagctttactcttttcttactcctttcttgcttggcaattaattccattattagattatggacaaatgtttagaaaagtaaaatacatattagttattcgtctattttatcaaggacatctttaatagaaacaaatttaaaattttgttttctaattgatccttcgccatcattacttccatcttgaaccaccaacatgcctttaggaaataatggccccaggttgttgtttacaacatcaactccatctgtatccgtaacagcatcaatagatccatttccaacaatattaaagctatttataaaattatatgggtatcttcggttataaatgtttaaagtactattaccttgagaggaaaggataacgaatccttcattagtgtttgatttataaattgttactccttcaggatcgccaacaatattgcctgatctggtatcaataataattggagcactaaaatcaagatttttattgattttgtaagctcttaaaatccctctatcttgttcctcagaaataaataaagttgaattatcagaatcataaacacaaccttcagattgtgtagcatcttggttgttaaatgtatgcaataattttaagttatcacgatatgaccataattgaactcttgatccctcgtcttcagtaatgaatgcaatattaccaaaatactcgtgatgtcctgaacagaccccatatacaatcatgtctgcataaccttttagagttgatttaactggaagcttaaatgtattagattctatatctgagttcattttattgttatctaaaacccaaagatctaaggagctatcatttctattagagccaaatagcaaagtagtttttgaaatgtcgtcagaaattatgtctatgttattaatatttcccgcaggagaaaaatcaagtgtttctgcttttagattatatgtataaataccattatatttatccgttccaaatactagtgaattattaatatttatattattaatccatattgcaggatcatcagcatctccatttatcttaacttggtctgtttcgtatattgatataacagagaatgcattcaattggtatatagaaaaaaaacataaaagatacaaagagtagatttttttaagaattgaatttttattcatagcctattatatgttgtggtactaacatatatataattttactattattatttatggtagttcatatttaacgtaatgttacattctagtgtcactttagtaatttatgaaactttgaagttaatcttttgaaaagagtgttattcacactatgagtaattcatttatatatggaataattgcattttttaacattaatcatataaaaataagcatgaaaaaaaatttttacaaaactcaaaaaagaactactcaatcaattaataatttttctctactttctttattaatttgcatgagtacttttaacttaactgctgctgatactgcgatttatggaaaaataaatttagatgttcttactacagaagcagactctaaatcctcctcggaaactaatagcaatgcatcaaggcttggatataaggcaaagtttaagttatcaaataaagtaaattttctaattcaaattgaaaatgaaatagatgtcacagacggaaaggcagataaaaataaagtacttaaacaacgtaatacatttgtaggtatttcaggtggttttggaaaactttttattggaactcatgatactgctttcaagaaatcacaattgaaagttgatttatttaatgacactaaatcagatataaaaaacctttttgtaggtgaaaacagatcccaggacttagttggctatacatcagcagagataataaaagggttgaaggttactcttaataatattaaaacatctagcaaaagttatcagtcttattcatttgactataacgcaaataattttaaatcatcatttggaatagattcaggtcttaagggttatgaaagtaaaagatttgctatattaaaaccaattaagaacagcacgcttggttttctatatcaagaatccattaatgcagaaacatctaacaaagaatcaggttatgttgttagcttaaaacataaattatcatcaaaatcttctttaatgtttcaaacatccgagtctgatattaagcttattggtggaaagcagaatgctattggatactcataccaatttaattcaatattgaggttatttacaagttactcaaaaagatctcaatcagatagtttaaaaaacaaaaaaatgattagtgtaggatttgagctgaagttttagatcctaaatcatatttcttaaggctcctatagagccttatttaattaactttgatataaagtttactatgtcttcagccaagacttcaggcttttccatggcagcaaaatgaccaccatcatactcattccactgaactacattatagattttttcagcccaaatttttggagggatcatgatatcctttttaaatatagcacctgccattggttgagagactttattaaatgaaaagccaaactccccattttctttatataaccgagctgatgaaggcgctgattctgtaaaccaatacaatgaaataatacttaaaacttcatcattcgtaacaactaatttattagttctttcatcaaaccaaccataaaatttttctgcaatccatgccgccagaccaataggtgagtcattaagactataacctatagtttgtggctttgttcgttgtatttcatagtaaccgtatccttgatttttgtatttattaaaattttctaataactctaattcattttgtgtaacgccttgcataggatcttgattatcaggagggaatgcaattacaagatttaaatgaataccaatacaattattagggtaaagctctgccatccacttactcacagttgctccccagtcacctccttgcactacatatttatcataaccaagagcacccattaactcatgttgaattcttgcaattttctctgaatccatacctttctcagtgggcttatcagaaaatccgaaacctggcatagaagggcatattatatctattgggatttttgattttttatggattataggaataatttttaaaaactcttgaatgctgcctggccacccatgagtcataataagtggaacggctccttctttatcagatttagaatgaagaaaatgaattttaagcccagaattggatttaaatttataactaccaattttatttaactcttcttcatgatccctccagttaaaggagttcaaccactcatttgataagttttttaaaaaactcattcctgttccatgtgaccaatattcatcatttatctcatcgggccaccttgtaagtgctattttttggtgtaatttatttatttcttcgtcagaaatatggatattaaatttttctatcatttttcaaatagtgattcttgttgaacatactatatgcgaaactaataattaaagtaaaatactctatataacctctat

SEQ ID NO: 1230 - DNA, 4000 bp, Escherichia coli
  misc_feature (72)..(72): n is a, c, g, or t
  misc_feature (759)..(759): n is a, c, g, or t
  misc_feature (898)..(898): n is a, c, g, or t
  misc_feature (937)..(937): n is a, c, g, or t
  misc_feature (3091)..(3091): n is a, c, g, or t
  misc_feature (3105)..(3105): n is a, c, g, or t
ggggcccagccaccgctcgacactgggaaaggccgacgcgacatgcagctggccccttaatattgccgttanttgctgtgcattgttcaatattgaatcgcagagcgccgatggctcgtcgtggctggcgtctacagcggcaatgatattcggccgttgggtccagttgatgggtgtgactaacattaccgggcaggtgctgtggcgcaacaggtgccagtcgctgggtgtgcgaataaacccaagggttgagctcgccatggatttgataatcagatcggcatcgatttgttcagcgatggcgagaatcactggccaatcccgtgtttgccagacgactgagcaagacatgctcacggtcttgggcgcgtcggcctgccacgcggcgatcatctccaagacctcgtcctcggcgtcgcgcaagaccgcgctcttgagtgcctcgcgggtctccacttcgtgtagggttaagtcggcaaaggtctcatgcaccactcgcaccacatgcagcgcggcgtcgaggctgacggcgatgcgcgcggccttggccagggtgatctcgccgtcgtcggtgctgtgaatggccaccagcaattgattagagattggcataagttgagcctcgccctcgttataggggccaaaaccattaatctaacggtttcgcggttcggcacccttgacccgagtcaagagcggctggcgagggcttatgttcatgcccttgccagatgcagggctaaacgtggcatactcatnttgagacccatattgagacccatattgaggctcaaattgatacccaaaacgcaacagcgacatgaatccaacaactcaggcgatgactatgcgcacaggcactttatccactcgaatatgtgaagagtatggtatcaantatcccatattcggttttgcccacagtgttgacgcggtnatcgccatcaccaatgccggtgggctgggggtcttcggtggtactcgatcgacacccgaggaaattgaggaagccatggtcaagattcggcgcgcggtcggtagcaagcctttcggcattgacctggtcttgccgccgggtatgccgcaagtagataaccgggcggccatagaggccgaactgcctgccgaacatcgcgagtttgtgcagcagatctataccaaatatgccgtgccgccggctacgcgcccgggcatgcgttcgcggtttgtgcgctccaccgaaatggaagatcggcagttagccgcgattatggcatcagatgttgatctgtttgcctgtggtatcggcgcgccacccagagccatcgatcaggcgaaagcgacgggtaaaaaaacctgtgccttggtgggcagcccccatcatgtagagcgcgcggtcagaacggggattgatttgattgtcgcccaggggtacgacgctggtgcccataccggtcctatcggcaccttctccctggtgccgcaaattgtcgatgccgccggcgatctgccggtgctggcggctggtggcgtggccacgggacggcacatcgccgcctctctggcgctgggtgccgtgggtgtctggattggcaccgcctggttgacaacgcaggagcaccaagatcacttgtcgccccttgagcagcagaagctattagccgcaaccggtgctgatacagtgatttcgcgggccgacagcggcaaaaccctgcgccagattcgctccgcgtggagccaggagtgggacaacgacaaggcgccgcgcccattgaagatgccgttacaggatattctggtgggtgatcttttgggcgccattgatgagcatggcattgaagcgctggtgcacagtccggcggggcagggcattggttggtttaatcagatcaccagcgtcaaggcggtggttgaccagctcgtcaccgagaccgagcaagccttgagtgccatgggcattccccgcgcctagattgcaagcgtcttcgaagcgcgctaggatattgaggatacttctgttgtcattgttgaataccatgccaaaacaacaagccacctgcgccatgtgccaattgatacgcacctacctgttgattgcggtgccgttgattgcgctgttctggtttcagccagaaatgaatctgctgaagggcatcagcctgactaacttggcatcagcttttttcggtgtcgcgttcctagtaacggttggctggaaggcttaccacgaattttggaaagaccgagaccgtggctaagcaaggtcctgattgttggcgctgccagcacttctttatcacctgggacagtcgtcatccatacggctgccatgatatgggtttcaaatcgaagatactgccggcgatggaagtctttactgtgaacggtacccattgcctgtcatttaagcctaaaccgacggatccagcggctaaaaacacgactgccagcggtcaccgccgggttagcaaggcgaacaagcatctcggtcaacatatcaatatcaagggctagcacctaagttggccataagccgttaaggcgtctagccgtcacggtctagtaccaataagaacggtaactcggtgttccgcgcctgccggcagtacatcgtgccttgaaacagataagtcgagcagcgtaatgaatcgtggctccaggtttcgctggaggtccagtagttgttgacctcaatgcccttgaagacgttggggttgaccgatgggctttggcaggctgattgctgaatagacagcatctcttcgttgttcgcgatccgccaggctttacctgatttttcagcaaattcctgggcataagccatggcgtcgtcccaagcaagtttggtcgggtcgccttgacagcgggcgccgctaaatcgctggcccgccgcgcagcgataccacagcgtatcggtcgctgtttgttttgccaggccattatcatcggtgataaagccgctgcggtcaccaggttcgaagtagtccaggcaagagggggcggtagcataaaagtcgcagcccgccagacccaggctgataaggacaaggcccagcaggtggcgaggtctgatgattgaaatcggcataatggacgtctcctgcaccaaacngattgttaggcgcnagctgttggctagtgtttcaccctgggaatagtaagtcgcgcaggatagcggcgcaacctaataacgcggagccctttttcccaggtatttgctggttgccggttgcacttggtcggattgcggtcattaattactgaacttttcggcgtatgtgtcgatagaccaagtaatcaaagcgggccgataactgcaggctattgctgctggctaaaaaaagttcacagaggtattgtcgcgtctgaggattgaattgcgacaggtaaggagaaagaaggatggatttagcgacgattattggcctgttgggcgcgttcgggttgatttttgcctcgattagtcagcctgcggcgtttattgatgtcccgtcgatcatgatcgtcgtgttagggtccatcatggtggtgatgttgcggtcttctctgggagagtttctcggtgccatggccgtcatgggcaaaacctttaaaaacaagctcgataagcccgatgaattgattacgcaaatcgtcgaactggccaccatcgcccgtaaagacggcatgatagccctagaaggccaggaaatacccaacccgtttctcgccaaagccatcggtatgctggtagatggtactgatcccgatatcatcaaaaaatccctggaaaacgaaattgatgccacgaaattgcggcacaagatgggccagagcattttttcagcttggggtgaagtggcgccagccatgggcatgatcggcaccctgattgggctggtacagatgctcggcaacatgtcagatcctaagtcgattggcccggcgatggcggtggcgctactcaccaccatgtacggcgctattcttgccaatgtcatttgtttgcccatggcgatgaagttgggcaatcaggccgaac

SEQ ID NO: 1231 - DNA, 4000 bp, Escherichia coli
  misc_feature (223)..(223): n is a, c, g, or t
  misc_feature (293)..(293): n is a, c, g, or t
  misc_feature (379)..(379): n is a, c, g, or t
  misc_feature (421)..(421): n is a, c, g, or t
  misc_feature (436)..(436): n is a, c, g, or t
  misc_feature (523)..(523): n is a, c, g, or t
  misc_feature (547)..(547): n is a, c, g, or t
  misc_feature (559)..(559): n is a, c, g, or t
  misc_feature (887)..(887): n is a, c, g, or t
  misc_feature (911)..(911): n is a, c, g, or t
  misc_feature (1133)..(1133): n is a, c, g, or t
  misc_feature (1989)..(1989): n is a, c, g, or t
  misc_feature (2405)..(2405): n is a, c, g, or t
  misc_feature (2573)..(2574): n is a, c, g, or t
  misc_feature (2591)..(2591): n is a, c, g, or t
  misc_feature (2597)..(2597): n is a, c, g, or t
  misc_feature (2621)..(2621): n is a, c, g, or t
  misc_feature (2630)..(2630): n is a, c, g, or t
  misc_feature (2672)..(2672): n is a, c, g, or t
  misc_feature (2715)..(2715): n is a, c, g, or t
  misc_feature (3239)..(3239): n is a, c, g, or t
  misc_feature (3271)..(3271): n is a, c, g, or t
  misc_feature (3286)..(3286): n is a, c, g, or t
  misc_feature (3317)..(3317): n is a, c, g, or t
  misc_feature (3400)..(3400): n is a, c, g, or t
  misc_feature (3517)..(3517): n is a, c, g, or t
  misc_feature (3616)..(3616): n is a, c, g, or t
  misc_feature (3649)..(3649): n is a, c, g, or t
  misc_feature (3997)..(3997): n is a, c, g, or t
ttttttgtaggtgcggcgcgcggatcgccacaggtcagcgacggattcgctggggtcgcgggtgaagcgctggttggtgcgggtcacggagctcatgcggtcggcgcggtaggtgcggatctcgccgtcgggaacctttcgaaccagcacataccagtgtgtaccagcgaaaatgaggcccaatggctcgcagcgtcgcaccgccgcgcgacctttaccgggnctgtagtccacgtcaacgatgtagtcggcggcgatggccaataacaactcccgcagcaccggtggggtgnccaggggctctctccaccccgtggggacaataagcagtcgatcctgaagtaagcccaccttgcggctttgggtggggttgaggcgngcgtcaattttgtgctgtgcgcggcgaaaatgctgggccagncccagttcctgcgcnacgtactcaccacccggcatcatgaacgcgagcagttcgctgtcggtcagctgctccatcggcggcaaccagcccggcaggatgganaccccgccatttgcgccgcattcngtcctgatgggnacgccacggcgctgcagctcctgcaagtcccgaagaatggtgcgacgcgacacctgcaggcggtccgcgagtatcgacgccgtgacctgtgcatttccacgcagcatgcggacgatttcagctaaacggtgctccttcacatccccatctcctcatataactgtgacaggtcctgacaccgttgacgcatagccttcagggtacgtgcaatcaaccacgaaggagaagagaagatatgcgcgacctacggcaagaacttttcggtgcccaggactgggtggctgagctgatcagcaacacaaagcccgagcagtactccctgcccacnccctgctctgagttcactgtgaangatctgttggaccactacatgtgtgtctgcgacaagattgaaagcttccctgtggatagaacccccgccgagacgcggacagtggatgactaccttcaagaatggaacgcctcgtcacaacgcgcccgcgccgtgtggactgacgaagccatgcacagggactacaccatgtcctggggtgcagtgcacagtggtcctgagaccgttggcctatacctgttngaaatggtctgtcacggctacgaccttgcctacgctacgggccagcccctcgaaggcccagaggctgtggcgcaagccgcactcgaagcagccatcgaaatcgtctcaaactatccccgtgaggagacaccttatgacccagaaactcgtgcccccgaaaatgcgggtcccactgttgcattagctgcatttctgggaagagacgtttcttaacctacaaatgctgctaacgtagtgaatatgctaagcgtattgctgttggatagcgttgactggtctcggcaaatccatatgtatggaaaggcaacggacacgccaacgcatctgcgggcgcttttaggaaacgacaccgaagcaatacacaaagcactacagcacctcgatagcgcaccgctgcatcaaggaaccgtcgcgcctgcggcggtgacctgcgcacagttcattgtcaccgcgctcaatgaaaaggcgatatcacagcaatgtgctatcaatggggtgctggaatggttgggggagctgggatcgtctatagactatgacgtccctgaagaaaagccacgggtggataacacgctgcttgaagaactttttcagatgaacgatgacgagatggaagagtttttcgactttcttgacgataacggcatggaactcatggacagcctttatgttcaatctcttcaagaacttcatgcctacgcgcccaatgtcgtggatactttgacccgatttggtgccactcaggaggcgcgcgccggatgggaaaaatacgcgcattaacggtcagcagtcgcagttgtggcgtggtaggtattttacctgttgctgtctgctaggttacactctagctaatagnacagtgagtcggccaagggaatctggtgtgaatccagaactggcgcgcagcggtcaggagagtaccgcccgcaggtagagattaagaccactggcgtggatcgcgctgggaaggtttctgtgggatggaatgatcctccgagtccgaaaacctgtcgactcagcggttatcctcccgcgcttcgcgtccaagcagcgggactggcaagaagtgcgtacatggtaaagaagttagctgcgcccacattgtgtgtggtgctgatggcgctgacagctgtgagctttgtggcgtcacttaccttcggctcggtggactacaacaatgctcaagtgtgggaggtcgttcaggctcaccttcaaggtggcaaggggcctaaccaggccgtggattcgattgtgtgggagctgcgcgccccncgtggtgtgttggcgttgattgtcggtgcgggcctgtcgctggcgggcgtcgctatgcaaaccctggtgcggaacccgctggctgatccgtatttgctaggggtgtcgtccggtgcgagcgtgggagccaccgccgtcttgacgtttggccttttcagcagccttggnntgtatgccctttcgggnggtgcncttatcggcgcgctggtcgccacngccaccgtntacgccatcaccatggcgcagggtgggctgaccccgttgcgnctgatcctgtcgggtgtggtgctgtcctcggcgttttcggcgntggcgagttttttggtgttcaaaggtccagatgcgcgtgcggcccagggcgtgatgttctggatgctaggttccgtggctggcgggcagtggaataaactgctgctcccagccgtcgtggtagccattgctcttgtagttcttgttgcgctgagtcgcccgatggatgcgctggctgcggggccggatactgccgctgcgctgggtgttcgcgtggggttgctacggcaggtgctgtttttcattcaggcgctgctggtgggggcgatggtggccattgcgggtggtattggttttgtgggcttggtgattccgcatcttgcgcgaatgatggtggggtcactacacctgcgactactgccgatcgccgctgtgctcggcgcattgtttgtgctgtgggtggacgtgatcgcgcgtatttcggcaccgccgcaagaaattccactgggtgtggtcacaggtgtgctgggtgcgccgctgtttctgctgctcatggggcgtaaccgctaccggtttgggggtcangattaatgtttgttgttgattccgtagctgcnggcatcggcaaaaanacgctgctccgtggagtttccttcaccgtcnagcgcggcaccatgaccgccatcgtgggtatcaacggcgtgggaaaatcaactctcctgcgcgccctcgggggcatcgcgaanccccatgctggccaggtgcttatcgacgccgcgaatgtccacaccatcaagccacggcaccgcgccaccctgatgacgctggtggggcaggaggaaagcccgcccggcgacctcacngtcgcggaaatggtggcgttagggcgcctgccctacctgaaatcctggcagctgggcagctcgaaggaaaaggacattattgcccgttcactagctacngtgggtatttccggcctcgccgaccgtccatgngaccagctctctggtggtcagcgccgccgcgcattgctagcccgtggctttgcccaggaaacagacctggtgcttctggatgaaccaaccaaccatttggatgtgcatcaccagttgcacctattgggtgtgctgcgggattcgggccgcaccatcattgccaccattcatgaccttgacctggccatgtcctatttcgaccaggttgttgtgctgcaccagggcggcatgttgtgtgccggacatccacaggacgtgttgatacccgacaacctgcggaaagtgtttgatgttcaggcgcttatcgcgcaacttccagaggcaaccaacccccacctcatcattgantca

SEQ ID NO: 1232 - DNA, 4000 bp, Escherichia coli
  misc_feature (1)..(88): n is a, c, g, or t
  misc_feature (512)..(512): n is a, c, g, or t
  misc_feature (519)..(519): n is a, c, g, or t
  misc_feature (549)..(549): n is a, c, g, or t
  misc_feature (561)..(562): n is a, c, g, or t
  misc_feature (570)..(570): n is a, c, g, or t
  misc_feature (572)..(573): n is a, c, g, or t
  misc_feature (579)..(579): n is a, c, g, or t
  misc_feature (582)..(582): n is a, c, g, or t
  misc_feature (585)..(585): n is a, c, g, or t
  misc_feature (594)..(594): n is a, c, g, or t
  misc_feature (596)..(596): n is a, c, g, or t
  misc_feature (600)..(600): n is a, c, g, or t
  misc_feature (604)..(606): n is a, c, g, or t
  misc_feature (610)..(610): n is a, c, g, or t
  misc_feature (612)..(612): n is a, c, g, or t
  misc_feature (626)..(627): n is a, c, g, or t
  misc_feature (629)..(630): n is a, c, g, or t
  misc_feature (633)..(633): n is a, c, g, or t
  misc_feature (636)..(636): n is a, c, g, or t
  misc_feature (642)..(642): n is a, c, g, or t
  misc_feature (644)..(645): n is a, c, g, or t
  misc_feature (653)..(653): n is a, c, g, or t
  misc_feature (670)..(670): n is a, c, g, or t
  misc_feature (672)..(672): n is a, c, g, or t
  misc_feature (674)..(674): n is a, c, g, or t
  misc_feature (681)..(681): n is a, c, g, or t
  misc_feature (685)..(688): n is a, c, g, or t
  misc_feature (690)..(692): n is a, c, g, or t
  misc_feature (696)..(696): n is a, c, g, or t
  misc_feature (700)..(700): n is a, c, g, or t
  misc_feature (704)..(704): n is a, c, g, or t
  misc_feature (717)..(717): n is a, c, g, or t
  misc_feature (723)..(723): n is a, c, g, or t
  misc_feature (750)..(750): n is a, c, g, or t
  misc_feature (762)..(762): n is a, c, g, or t
  misc_feature (765)..(765): n is a, c, g, or t
  misc_feature (772)..(772): n is a, c, g, or t
  misc_feature (774)..(774): n is a, c, g, or t
  misc_feature (776)..(776): n is a, c, g, or t
  misc_feature (789)..(789): n is a, c, g, or t
  misc_feature (813)..(813): n is a, c, g, or t
  misc_feature (824)..(824): n is a, c, g, or t
  misc_feature (861)..(861): n is a, c, g, or t
  misc_feature (866)..(867): n is a, c, g, or t
  misc_feature (870)..(870): n is a, c, g, or t
  misc_feature (881)..(881): n is a, c, g, or t
  misc_feature (888)..(888): n is a, c, g, or t
  misc_feature (891)..(891): n is a, c, g, or t
  misc_feature (951)..(951): n is a, c, g, or t
  misc_feature (953)..(954): n is a, c, g, or t
  misc_feature (960)..(960): n is a, c, g, or t
  misc_feature (975)..(975): n is a, c, g, or t
  misc_feature (987)..(987): n is a, c, g, or t
  misc_feature (990)..(990): n is a, c, g, or t
  misc_feature (993)..(993): n is a, c, g, or t
  misc_feature (996)..(996): n is a, c, g, or t
  misc_feature (1002)..(1002): n is a, c, g, or t
  misc_feature (1005)..(1005): n is a, c, g, or t
  misc_feature (1007)..(1008): n is a, c, g, or t
  misc_feature (1013)..(1013): n is a, c, g, or t
  misc_feature (1017)..(1017): n is a, c, g, or t
  misc_feature (1019)..(1019): n is a, c, g, or t
  misc_feature (1023)..(1024): n is a, c, g, or t
  misc_feature (1026)..(1026): n is a, c, g, or t
  misc_feature (1044)..(1044): n is a, c, g, or t
  misc_feature (1053)..(1053): n is a, c, g, or t
  misc_feature (1071)..(1071): n is a, c, g, or t
  misc_feature (1074)..(1074): n is a, c, g, or t
  misc_feature (1080)..(1080): n is a, c, g, or t
  misc_feature (1083)..(1083): n is a, c, g, or t
  misc_feature (1092)..(1092): n is a, c, g, or t
  misc_feature (1158)..(1158): n is a, c, g, or t
  misc_feature (1182)..(1182): n is a, c, g, or t
  misc_feature (1184)..(1184): n is a, c, g, or t
  misc_feature (1188)..(1188): n is a, c, g, or t
  misc_feature (1190)..(1190): n is a, c, g, or t
  misc_feature (1197)..(1197): n is a, c, g, or t
  misc_feature (1209)..(1209): n is a, c, g, or t
  misc_feature (1211)..(1211): n is a, c, g, or t
  misc_feature (1218)..(1218): n is a, c, g, or t
  misc_feature (1224)..(1224): n is a, c, g, or t
  misc_feature (1227)..(1227): n is a, c, g, or t
  misc_feature (1236)..(1236): n is a, c, g, or t
  misc_feature (1239)..(1239): n is a, c, g, or t
  misc_feature (1254)..(1254): n is a, c, g, or t
  misc_feature (1275)..(1275): n is a, c, g, or t
  misc_feature (1284)..(1284): n is a, c, g, or t
  misc_feature (1317)..(1317): n is a, c, g, or t
  misc_feature (1337)..(1337): n is a, c, g, or t
  misc_feature (1344)..(1344): n is a, c, g, or t
  misc_feature (1356)..(1356): n is a, c, g, or t
  misc_feature (1365)..(1365): n is a, c, g, or t
  misc_feature (1368)..(1368): n is a, c, g, or t
  misc_feature (1380)..(1380): n is a, c, g, or t
nnnnnnnnnnnnnnnnnnnnnnnnnnnnnnnnnnnnnnnnnnnnnnnnnnnnnnnnnnnnnnnnnnnnnnnnnnnnnnnnnnnnnnnnccgcaattgcgggcctttttttatggaataaattcacctaagctaaagacaaaagagattcaataatgtttaaattaattgagatttaatgtcaacagtagagattcaataatcatttcaattaattaagatttaatttcaacaatcgcgaatcacttttcagataataataagggcgccaaaaacttttacccaaaccgtcatacttccaaacaacttctccttgaacagatacttcccaataaccatagtcaccctcacaaattaaagtattgccgttagggagcctctgaagaccggagattttatcaaaatacatgtctgtattcgtaaatgaccattgcttcacgggagcaatataattttgcatactattcgttgagaaagtgggtaacaccaattcataggcaatagactgttctangttgctnccattattataaattagaaaattcccattnccaggataattnncaggcacnanngaaggntgntgnttgttaaananaaantgtnnngcantngtgttttcaaatanngnnggnttnccaaancnntacactangtctcctcccctattanantngcctccntgannnntnnnagcntctncagnagaagtactgtgntcaatnacccaaacctcagaataaaaattaacnctcatatagatnagntcagtancngnatcatagaaaatnccattggcatgcatccaatccccnttctctaaatnactgtgattaaggtcaattttattggggaaatcaganagctnnccntataaatcatngtcagcngcngtattttggaccatatgatcccaactcctccactgccaaacaatttcgttggtttgaggntnnacctcnattaatttctctaanaaaatatcatgnccnggnaantgaccngcngnntctanttgnanttcnntnattctttcccaaaccatnatcatcacntggccattgggcaattgngtngcatcntgntgggcaatntcattttcggtattcacctcataacgccacaattcctttccagtataatccatgagagacacgacncctccaaaaccaccaaaagtaatnanaggntntgaaganttaaaacaagcnantaaatcnccaganggngttatttcnatntcatttccaaaacgntcttcaaaagcccactctttnagcttttcnccctcatgattcaccaaataagcatttttttgnccgttttccatcataaaaanatacccnctttgatctatnccttgctcnttntaaagtacaatnttctgttgagcaaagcgctctaatggtataaagaaagcaacaacctcaatattattgctcaaaacaagttgcttagacacttctaatcccgtcaaagcaccctcccaatgagaaaatttataattaggtgctgccacagcagtaatggtaatattctggccagtttcgtatggaggattatcgctaaagacaatttcaccaccttcaataggcacagaagtagaaataacattataaaaatcagcctcttgcaattgattggtagagcaagatatcattgtcaaagacaaaaggaaaagaaaagatattttcattacatcaagttttatataaaggtaagttgtttaagaataaaaatatattcaaaaatttcgtttatcatttaataaaattttacccagaaagcaaaacaaaaaaaaagaaaaaccaataaatactaattatacagtaagcattagtgaaatattaactcttttattaataataactatggaaaaagatcaaattatctaaaaaaattaattttaaattaaaattttaaagaattctttacattaagattaattatgttaattattaataataataattaataaataatgcatttataagtaaaataattataatattaaattatgtgtaacaaaatattgtattaattgaatatttagtggatatttacccacttaatttaaaataaaaccaataatgaaaacaactttaaatgggattttgacactattattagtgttcgttgtgcaaatatcttttgcgcaagagaaaacaatttcaggtactgtttcggatcaaaacaatgttgtattaggtggggtgaacattttagttcaaggcacctctaatggaacacaatcagattttgatggaaactttactattaacgctagtgtaggacaaacattagtatttacttacattggaatgaaacaaactactgcaatagttggttctagcaatgtaatcaacattcaaatgcaagaagacgcacaagctttagaagaagtagttgtttctgcacttggtattacaagagagaaaaaagcactaggttactcacagcaaactgttaaaggtgaaaacttagtacaaactaaagaggtagatttgaatacagcactttctggaaaagtcgcaggggttcaaatgataggtgctccctcctctacatttgaccaaggtcttcttagattaagaggtgaaaccggggttttatatgtagttgacggtgtaaaagtatactctcaatcagatatcaacacagacaacatcggaaacatatccgtactaaaaggtgccgctgcaacagcactttttggggtagatgctagaaacggggttgttttaattacatctaaaactgctaaaaacggtgttggctcaatttctattgatcatacaacatctatgacttctgtagctttattgccaaagtatcaaaacgaatacggtggtggctactatcaagagtgggatacttttgaatataatccagacacagatcctgcagaatgggctgcttttgaaggacaaaaaacaccatactacggtgcagatgaatcttggggaccaagattagatggaacattagtaagacactgggattcttggattccaggatcagacacatttggagaattaagaccatggtcagctaatcctaataatattagagacttctaccaagatgcaatcactaataacacttcattaaactggtcaaagggtggtgatgattataaaattgcagctactgtgagaaacataagcactgaattaattttacctaattcagctagaaatcaaattgatattaacttgaatgcatcttataagcaatctgaaaaattagacttatatacttcggtaaactaccaaactagagttactgaaaacgaaccattacagggttacggtggactaggtgcaaactttaaccaatggtggcaacgtcaaattgatatggatcgtttaaaaaacaattatttccaaaatggcgaatactactcttggaacattcgttctccaagaaactcaagaccacaatattgggatgcgcctcattttatggtagataacaacaacactttacagcgcaaggatgtattatttgggaacttcggtgctaactaccaattaacaagtaatattaaagctaatttagaagcaagaagaagggtaaactcatatttctataattcaagagtagcctttggaggtttagatgtaccaagttataatgaaagtagtagccattacgagcaaaatgaattgtttggttttttaaactttgctgatcgttatatggatgacgctttagatattgatgtaaaagctggattccagttacaacaaaacagatctcaatcaacttctgctggaacagtaggtggattatcagttcctgatttctactcaattgctacttctgttgaccgtccatcttattcgcacaatttaactcaatctaaagtgaattcattattctcttctgtttcagtaggctataatagtactttttatattgatgcttcatatagattagactggggttctaccgcaaatacagcaaataacagattagaaacatatggtgtctctggtg

SEQ ID NO: 1233 - DNA, 4000 bp, Escherichia coli
  misc_feature (212)..(212): n is a, c, g, or t
  misc_feature (1363)..(1363): n is a, c, g, or t
  misc_feature (1971)..(1971): n is a, c, g, or t
  misc_feature (1973)..(1973): n is a, c, g, or t
  misc_feature (1976)..(1976): n is a, c, g, or t
  misc_feature (1985)..(1985): n is a, c, g, or t
aagacactttggtgtcattgtagataaaggtatcccgggtgtgatactggatcaccacaggacagtgtcgcaatttatgcagcttccttgcataaaaacgcaaggcacggtcacgaggatttcgccgtggaaaaaatattttcaccgtgcgctcgataccggtaccgcgctcacgtaccaggtagacctcaccttcccatcctgcacccagnaaagtaaccacctggtattttccagccagacagtcgccacaatggagattaaaactccagattctcggctgtgatttcatcaacgctacgtcgtcaacatccttcgtggtgtggcaccatctacagttttagtgcccatagaccgcttggtaaaagatcaaattaacggggtgtggtcatttattcgacgactgcccgttttgagttcaggcctgctgatcattaaggtccggcccagactcggcctctttggtctccttggatttgattatgcgtgaacagtacaaacccgcttcaaacagcaaccaaaccggcacggccagcatagtttgtgaaaaaatatcgggcggcgtcatcaccatacccaccaaaaatgcacccacaatgatgtaaggccgcttgctggccaaactatccggtgtagtcataccgaccttgaccatcaacacggttgcaaccggcacctcgaacgccaggccaaaggcgaaaaatagcttcagcacaaaactgaggtaggcattgatgtcggtcatcaccaacaccccttcgggtgcggtactggtgaaaaaagcaaaaataatcgggaaaactgcgtagtaggcaaacaaaattccgaggtaaaacaagatactgctggataccagcaggggtactgtcaaccgtttttcgtgacgatagagccccggggccacaaacgcccacaactggtacaacagatagggcatagcgaccgccactgctaacgcaaaagcaaacttgaacggtacgaaaaacggaccgtggggctcggttgagatcatactgttcccttccggcaacgcgtccatcagtggggccgccaagtactcataaagatcgtttgcgaagggtgcagcgatcagaaacacgatcaaaatagagcccccaccacgcatgatgcgattacgcagctccagcaggtgggacataaacgtcgttgcctcatctccgggtcgtgtgctcggttcagccatggtctaatcggtcaggacgtggggatctgcttttctttggtctgtgaagtgtctgtcgtgtcatccacgggagactcgttttctgccgactgagccgaatcgtcggctgctgtgacatcgctcactgacgattgaatatcatcggctgatttcttgatngactcgacgacagactccacgccgctgtcatcggcaacctccccagcagcactctgaaattcattttttacgtcactgatttcatcgcccaacttacgaaggtcagccaactcgctctcacgcatctcccgatcaatgtcggacttgacgtcagctaccattctgcgggctttcccgacccagaaaccgagcgtgcgtgcgactttgggcagccgttcgggacccaatatcacgagggcgataatcgcaatgattacgacctcggaaaatccgacgtcaaacatgatgcggcctcagataacgatcagactttttccgtcttcacgtcctcagtcgcctctacatcggcaagatcgtcctgggacgcttcagcctgctgatccgccgtctcgggatcttcgctgtcactgtcgctgtcaccacccttgacctctttcattgaactacggaaccctttgattgcgccgcccaggtcaccacccatgttgcgtagcttcttggttccaaacaacaacagcacaatgaccaatacgatcagcagctgccaaatgcttatgcctccaacacccatgagattctcctctttttgatctaccctcttgacaggntnacnacccacccnaacccaccgatggaacgccccctgatagttgaataataaccctttttcccaaaatccacgtaaatgtactcgtcaaacatctgcgcaaaacaggcacagcgccctactcagggcccagtaacccggatttcatcggtttcctatcgtcatttaacctaagtacctgcaccagattaagtggatattcttcaacgcccaaccctgactcacgccgatcatttcgtcgtgagccacgttgatgccgcagagaaatttacgatgtgtgcacggctgcgtggggataccgaccgctcgagattcgctggatacgggcaccacactgggcgagtttttcttcgatgcagtcatacccacgatcaatatgatagatacgatccacaaccgtctggcctttagcggccagtccggccaggaccaaacaggcagatgctctaagatccgttgccatcacctgggcaccacttaagtttttcacaccgcgcaccagtgctgtattaccacgcaactctatatcggcacccatccgctgcaattcctggacatgcataaatcgactctcaaatatcgtctccgttactgctgctgtaccctgagcaatactgttgaggagaatgaactgtgcctgcagatctgttggaaacccgggaaatggctgagttgtcaggtcaactgcctttaatcgacgcccatccacagacagggctatggtgtcctgatcaaccctgatcgagacacccatggcatcgagtttcaccagtacagcatcaagcaaattcgtttctatgccactaagttgaatctggcccccggttgcagccgccgctgcaagataagtaccggcttcaattctgtcgggcgcaactctatggtatgcgccacttaaccttgccacaccctctatttcgatctgaccggtaccagcaccactgatccttgcacccatcgcgaccaagcatttagcgaggtctacgacttcgggttctctggctgcgttttccagtattgtccgaccgtcggccagtacagctgccatcatcaggttttcggtacccgtcacagtcaccgtgtcaaaaacaatccggcacccctgtaaacgacccgccggtatgctggcccggatgtagccaccttctaccgtgacttgcgcccccatcatctcgaacccctggatatgtagatcgactggccgtgagccgatcgcgcagccaccggggagcgacacctcggcttcaccgaagcgcgttagcagcggccccagaactaaaacggaggcacgcattgttctgaccagctcataaggcgcccgatgactggtcaattcagccgcattaacgtctatcgccagcttatcgtcgacctcaattcgtaccccaaggtgaccgagcagttccagtgttgtcgtgacgtcctgtagatgtggcacattgctaacaaccaaattctgatcagtcagcagcgacgcaatgagaaccggtagcgctgcattctttgcgcctgagattcgaatctcaccctctagcggaatgccgccactgatcagaagtttgtccacgtgctaaaacatttgagtgctgtttacgccttccgttgattctggttcgagtggttacgcctgtccagttgttccgaccacaatcaagcaaaaggcgcccgcaggcgcctttatcaactcacggactcaaccccgagctgtcagtttgcgactgtctccagtttggcctgaagttcaccactttcatacatttctgtcacgatatcactgccgcctacaaattctccgttgatatagagttgcgggatagtcggccagttcgaaaaatccttaattccctggcgaatttggtcatctgaaagtacgtcggctgaggcgaattgcgccccgcacgcctgcagaatctgcacaagcctgccggaaaaaccacactggggaaagtcgggacttcccttcataaacagcatgacactgttttcctcgacaatatttttgatttgttcctgcacgttcattagcgtcc

SEQ ID NO: 1234 - DNA, 4000 bp, Escherichia coli
  misc_feature (131)..(131): n is a, c, g, or t
  misc_feature (984)..(984): n is a, c, g, or t
  misc_feature (1988)..(1988): n is a, c, g, or t
  misc_feature (1991)..(1991): n is a, c, g, or t
  misc_feature (2479)..(2479): n is a, c, g, or t
  misc_feature (2863)..(2863): n is a, c, g, or t
  misc_feature (2951)..(2951): n is a, c, g, or t
  misc_feature (3321)..(3321): n is a, c, g, or t
  misc_feature (3571)..(3571): n is a, c, g, or t
  misc_feature (3605)..(3605): n is a, c, g, or t
  misc_feature (3624)..(3624): n is a, c, g, or t
  misc_feature (3921)..(3921): n is a, c, g, or t
  misc_feature (3953)..(3953): n is a, c, g, or t
catgcccgggaaccgccgtgcgctcgccgcacccgaccgcaatcgctacaatgcgtcggtttgcgccaccacaatccggagcccccatgagcgaccagcccttgtaccgccgcatcctgctcaagctctcnggcgaggcgctgatgggcgaggccgactacggcatcgacccgaaggtgatcgggcggctggccgaggagatcatcgaggtacgcaaggccggcgtggaagtgggcgtggtgatcggcggcggcaacatcttccgcggcgagggcctggccgcgtccggcatggaccgcgtcaccggcgaccacatgggcatgctggccaccgtgatgaacgcgctggcgatggccgacgcgatcgagaagcacggcggctacgcccgcgtgatgagcgcgatccagatccacgacgtggccgaggacttcatccgccgccgcgcgatccgccacatcgagaagggccgcatcgcgctgttcgcggccggcaccggcaacccgttcttcaccaccgactcggccgccgcgctgcgcgcggtggagatcggcgcggacctgctgctcaaggccaccaaggtcgacggcgtgtacaccgccgatcccgcccgccatccggacgccacccgctacgaccagctcacctacgacgaggtgatccaacgcaacctcaaggtgatggacaccgccgcgatcgcgctgtgccgcgaccacaacacgccgctgcgcatctacgacatgacggtgccgggcaacctgctgcgcatcatgcgcggcgaaccggtgggcaccctggtgcgcaactgacgcgcccggggcgcgccgccggccgccacggccggcgctgctatactcgccggctagccagatccaccgggacacgcccatgatcaacgacatcaagaccgatgcccagacccgcatgggcaagagcatcgatgcgctcaagcacgagctcacccgcctgcgcaccggccgcgccagnaccgcgctggtggacggcatcaaggtgcccgcctacggttcggagatgccgctgaaccaggtggcctcggtcgccctgggcgattcgcgctccatcatcatcacgccgttcgacaagagcctggtcggcccggtcgagaaggcgatcctcgcctcggacatcggcatcacgccgaccaccgccggcaccgtgatccgcctcaacatgccgccgctcaccgaggagcgccgcaaggaattggccaagcacgtgtcgcacgagggcgagagcgcgaagatcgcgatccgcaacgtgcgccgtgacgcgttgcagaagctgaaggatctgctcaaggacaagcagatcagcgaggacgaggagcgccgcgccgacgacgagatccagaaactgaccgaccgtttcgtgaaggacgtcgacggcgtggtgaaggccaaggaagacgaattgatgtccatgtaatgggcgtcgcgacgaagccgcccagcaccgcgccagttcatctgccaactcccggaacgttgcgatgacgtcattcccgcgaaagcgggaatccatccgcttcgagcctctcaagccaacatggatgcccgctcgcgcgggcatgacggcccgaaagtccgaagcactgccttctcgccaaggggagaaggaaccagccacaggcactcatgaccatcccccgccacatcgccatcgtgatggacggcaacggccgttgggcgaaggcgcgccaccggccgcgcagcttcggccacaacgccggccgcaaggcggtgcgcgaggtggtggaaggctgcctgcgcgaaggcgtcgcggcgctcaccctgttcgcgttctccagcgagaactggaagcggcccgaggaggaagtcggcgcgctgatggcgctgttcgtgcgtgcgctggacaaggaaaccgacgagctgcatgcccagggcgtgcggctgcgcttcgtgggcgacctggccgcgttcgacgcgccgctgcgcgagcgcatgcaggcngcnatggcgcgcaccgcgggcaaccgcaagttgcagctcaatatcgcggtgaactacggcggccgctgggagatcgcccacgctgcgcgcgaggccgccgccgcggtggcacgcggcgagctgaccgtcgcggccatcgacgaatccgcgctcgaccgcttcatgtgcctggccgagttgccaccgctggacctgttcatccgcaccggcggcgaatgccggctcagcaacttcctgctgtggcaggcggcctatgccgaactgcatttcaccgataccctgtggccggacttcgaccaggcctgcctgcaccgggcgatcgaggactatggccgacgcgaacgccgctacggccgcaccggcgatcagatcgccacggactcccaggggtaagcatgctgttccagcgcgtcatcaccgccttgctgctcgcgccgctggcgatcctgatcatcctgctgctgcccacgccgtggctcgccgtggtcggngccgcgctgttcctgggcgcgctggaggaatgggcgcgcctcgccggcgtgcacaaggcatccatgcgcatcgccctgctggtggtcgccgccgcgctgttcgtgctgctgtggttcgcgcatgccggcgcgctggtgccgctgctgctggtgctgggcgtggcgtggtggctgctggcctgcgtatggctggcgcgtttcgcgttcggcgcggcgccgacgccggaaaaccgcgcgctgaagctcgcggccggcgccttcgtgatgttccccgcctggatcgccgtgatcgccctgcacggccgcgagccgcacggccacgggtggatgctgttggcgctgctcatcgtgtgggccgccgacatcggcgcgtatttcagcggncgccggttcggcaagcgcaagctggcgccgcagatcagccccggcaagacccgcgccggcgcctacggcgcgctggtggccggcaccntggtctgcctcgtcggcggctggctgctgggcgtgcgcggcggcgccctgctcggcctcgccgtgctggccgtgctcacggtggccgcctcgatcgtgggcgatctgctggaaagcctgatgaagcgccatgcgcaggtgaaggattcgggcacgatcttccccggccacggcggcctgctggatcgcatggacagcgtgttcgccgcattgccggtgttcgccctgggcctgtggctgctggggatatgaaaggccgggaatcggaaacagggagcagggaatcgaaccgcggtgcgcggctcgtgccgcgcgccagcaaactcgccaataatccgcttttcctgttccccattcccgactcccgattnccccgcaagagacacaggccatgaaacgcgtcgccgtcatgggcgccaccggctcgatcggcgccagcacgctggacgtgatcgcgcggcatccggaccgcttccgcgccagcgtgctcagcgcgcaccgcaacgtggatgcgctggcggcgctgtgcgccacgcatcgccccgaactggcggtgatcgccgagcccgcgctggaaggcgagctggcgcgccggctcgccgcagccggcgtgcgctgcgnggtggccagcggccatgacgcgctcaccgccgcngcatccggcacgttgtgcnacaccgtggtggccgcgatcgtcggcgccgcggggctggactccacgctggccgccgcgcgggcaggcaagcgcctgctgctggcgaacaaggaatccatcgtgctcggtggcccgctgctgctggaggcgctgcgcgccggtggcggcgaactgatcccggtcgactccgaacacaacgcgatcttccagtgcctgcccggcggtcgtccggagctggcgaagagcggcgtgcgccggctgatcctcaccgcctccggtggcccgttccgtggccgcacacgcgccgaactggcgncggtgacgccggaccaggcctgcaagcatccnaagtggtcgatgggccgcaagatctcggtggattcggccaccctgat

SEQ ID NO: 1235 - DNA, 4000 bp, Escherichia coli
  misc_feature (97)..(97): n is a, c, g, or t
  misc_feature (964)..(964): n is a, c, g, or t
  misc_feature (967)..(967): n is a, c, g, or t
  misc_feature (976)..(976): n is a, c, g, or t
  misc_feature (979)..(979): n is a, c, g, or t
  misc_feature (1156)..(1156): n is a, c, g, or t
  misc_feature (1168)..(1168): n is a, c, g, or t
  misc_feature (1174)..(1174): n is a, c, g, or t
  misc_feature (2725)..(2725): n is a, c, g, or t
  misc_feature (2916)..(2917): n is a, c, g, or t
  misc_feature (2919)..(2919): n is a, c, g, or t
  misc_feature (3034)..(3034): n is a, c, g, or t
  misc_feature (3716)..(3716): n is a, c, g, or t
  misc_feature (3795)..(3795): n is a, c, g, or t
atcgtaatgaatagatctaacctctgatacaaatttatcccctacgtactcagcgttcttggcaacataatcattaagttctttgattttgcttttnacatttttaaaaaactcttttttttgctcaacatctttttcagcgacagaagttttagaagtggcaacacttggggccattatgctctttttaacagtctttgagcgaccacagacgtaacaattaattaaattcttttttaataacttttcatattcattggaattttgaaaccagctctcaaaagtttcaccacaagaacattcgagattatatttaatcatacccttaatgtagtaacgttcgtcttaatttcaatacgttagtttttattgaagaacagaataaccttaccaagcgttattccaaattttgacatggttgcaatgttcactaagtaattattatcctgcaaaaacatccaatcatcgaaacttactttgtatttgctagagccaattggaagatcaaaatcatacttccagttaaacgcatttccagaagttgaacctgaagcaagacctataactccatctgcataaccttgatattggttggtaccaattttttcaagcttccactctctatactctttagttccatcatcataaataaagttttccttcataatgagatattttccgtcccaagtcccatcaatatcaactttgaaactctttttaacgtttccaaaacgatcttcaaatactcctcgtgcaacggttttacctttaaaatattcttctaatttaaattcaggcttattatttttaaattgttctaatttcatagacgaagaacactgtgttacactaaaaaaaataaaaaatataaataatattttaagatttttatttaaaaaatttgtaataattttcataaattctatcaaaaaccatctgacttcctggtaagaaattaaactgnttngtttgcttnctntttatccagtttaattgttgtttttctttaagtttaatctttccagaccaatattctaccagataaatcatcataacgattatattttttttataacgatgtgtaattaaatctatattttttaaatcttctttatttatattaactcctatttcctcatataactctctaacagcncaatcttcaaangactcnttattaaaaagttttccccctggaagctcccaaaatccacttaaaaatttacccttaggtctactggtaattaaaaccttattagattttttaagcaaacatgatgaaacgtaaattattttcatgaaaagaatttaacaaatttttaatattaacaaaattgacattcttgcctatgctacctatataacacttcaatctaattaaaacatatgccgacaatctttgataatttaaaaataggcaacctaacacttccaaatagaattattatggcgccgcttactcgtatgcgaagcaagcaacctggtaatattccttgggaattaaatgcaacttattattctcaaagatcatctgctggttttattataactgaggcgacacagatatcgcagcaaggtcaaggttatcctggaacccctggaattcacagcaaagaacaagtgcaaggatggaaattaattactgacgctgtacataaaaatggtggtcatatttttttacaattatggcatgttggaagaatttctcattcatctcatcaaccaaataatagtttgccggttgcaccttcagctattgctgcaaaaaattctggaacatttactgctgattggaaaccgactcctattttaaccccaagggcattagaggtatcagaacttcctggaattattcaagattatgtaaacgctgcaaaaaatgcaaaagaagctggctttgatggcgttgaagttcatatggcgaatggatatttactcgatgaatttttacaagatgaaagcaataaaagaaccgatgaatttggtggcactataaagaatagagttaaatttcctatgcaggtactagatgctgtcattggtgtttttggaaaagatagagttggcgtgagactttctccttatggaacgttcaatgatatgagcgactctaatcctgtagaattattcacttatgtaatagatcaattaaatcaaagacaaattgcatttcttgatatgattgaacctagagcaacatcagctggtggtggcgatgctgtagatactaacgctccttctactacaaaattatttagaaaaaaatttaaaggaatatttatttctgccggcggttatacacctgaagatgcaaaaaaagctattgagtcaaatgatgtagatgctgtagcatttggtagaatttttattgcaaacccagatttaccaaaacgtattaaaataaatgcacctttaaatccctatgaccgtgcaacgttttatggtggtaatgaaaaaggttatacggattatccagctttaagctaaattttaaacaggatcaatgtgagtcattaggtttaaaaccctagaactacgcatgactctatttcttgcctcaactgcaatatcatgaccttctgcaactgttaaagttcctttaactccaatatggacatctgcaataatgctatcaccaacttttcttgttcttaaatcatgaacattaacaacgcctggcgtttctaatattatttttttaattttttcaacttcatcagtatcngcggctttatctgttagagcatgaattgcttcataactaaaagtccatcccatttttaaaatcattacacctacaatgatcgcagcaattaaatcaaagctatgataaccgagaagattaaaaataattccaattgcaacaattaaggatgacgctgcatcagagcgcgcgtgccaagcattggccattannanacttgatttagctctttttgcaatatttaaaagataacgaaataataattctttaactactaaacaaatgattgaggcatataaagccataacatgtactgctacgatctgatcngaattttcaagcttcttacctgcgctccaaatcatcgcacatccaacaaacaataatagaactcctaagaataaacctacggcattttcatatctatgatgaccataattatgatcgtcatctggtggatttaaagatttcttgcttgtaattaaaacaattaaatctgaaagcatgtcagctaaggtatgaaagccgtctgctatcagtcctgatgatttagaaaaaaatccaacaactatctgaaaaataactagaaaaaaattaacaactacacttgtccatgtgctcttattcgcaatttttctttttctaatataattggttaaagaatctgacattcgttctgctgtataaaatatagaatatgtataagctattttatttagttgattaaataaagttcacctatatggtcttttttttattaatatttgaatgccaacaataattgattacgttttactgactgttatcacgatatttccagttttgagtcttggaataatgttatttttttcttttgtaattgcaccaactgttcacaaattcttacctactgcacaatctggtccatatattagaagactttttcctatttattatatcattaatgcagctcttgctttgggttctctaatcgcaattgcctctcttggcgtgtttaatataattttctacncaaatacaattattttggttttgtttgcgctttgttatttttatttaatgccagcaatcaataaacaaaaagtaaaaantaatcgcgcgtttaaaatcctgcacggaagttctattgcaataaattttgtccaaataattctgttaatactgattactgttattctgctagacttttaaaatccctttacttagcccttcgataaataatatcaaaaaccattggtgaaaaagttgcaagtaaaaaagaccaaaaaagcaaagaattggtaaaaatttcattaa

SEQ ID NO: 1236 - DNA, 4000 bp, Escherichia coli
  misc_feature (268)..(268): n is a, c, g, or t
  misc_feature (271)..(272): n is a, c, g, or t
  misc_feature (274)..(274): n is a, c, g, or t
  misc_feature (276)..(277): n is a, c, g, or t
  misc_feature (280)..(281): n is a, c, g, or t
  misc_feature (283)..(285): n is a, c, g, or t
  misc_feature (287)..(289): n is a, c, g, or t
  misc_feature (291)..(292): n is a, c, g, or t
  misc_feature (295)..(298): n is a, c, g, or t
  misc_feature (300)..(301): n is a, c, g, or t
  misc_feature (303)..(303): n is a, c, g, or t
  misc_feature (305)..(308): n is a, c, g, or t
  misc_feature (310)..(310): n is a, c, g, or t
  misc_feature (312)..(313): n is a, c, g, or t
  misc_feature (315)..(316): n is a, c, g, or t
  misc_feature (318)..(322): n is a, c, g, or t
  misc_feature (324)..(332): n is a, c, g, or t
  misc_feature (335)..(335): n is a, c, g, or t
  misc_feature (337)..(338): n is a, c, g, or t
  misc_feature (340)..(341): n is a, c, g, or t
  misc_feature (343)..(343): n is a, c, g, or t
  misc_feature (345)..(345): n is a, c, g, or t
  misc_feature (347)..(348): n is a, c, g, or t
  misc_feature (351)..(351): n is a, c, g, or t
  misc_feature (353)..(355): n is a, c, g, or t
  misc_feature (357)..(360): n is a, c, g, or t
  misc_feature (362)..(363): n is a, c, g, or t
  misc_feature (365)..(367): n is a, c, g, or t
  misc_feature (369)..(370): n is a, c, g, or t
  misc_feature (372)..(378): n is a, c, g, or t
  misc_feature (380)..(384): n is a, c, g, or t
  misc_feature (386)..(387): n is a, c, g, or t
  misc_feature (389)..(392): n is a, c, g, or t
  misc_feature (394)..(395): n is a, c, g, or t
  misc_feature (397)..(399): n is a, c, g, or t
  misc_feature (401)..(401): n is a, c, g, or t
  misc_feature (403)..(405): n is a, c, g, or t
  misc_feature (407)..(411): n is a, c, g, or t
  misc_feature (413)..(415): n is a, c, g, or t
  misc_feature (418)..(418): n is a, c, g, or t
  misc_feature (420)..(423): n is a, c, g, or t
  misc_feature (1506)..(1506): n is a, c, g, or t
  misc_feature (1992)..(1992): n is a, c, g, or t
agggatgacattttcgcgttgaccagggaagccgctgatgtttcagggatcaattatattatggattgggaaaatgagacatcagaagcaatactggacgcataactcttctaattaatagtacctgcaaattaagtataatataattttaaaggctgtataaggtattaaaaacctcatacagcctttttttataaactaagggttgctggccgagataaacagttaagtgtaaaacagaatttctatttcctttattataacttgnaannangnnaannannntnnnannttnnnntnntngnnnnantnnannannnnnannnnnnnnnaangnnanntnangnnttngnnnannnncnntnnngnnannnnnnnannnnngnnannnnannannntngnnntnnnnncnnnaancnnnncccatattgatattaactttgcccgcgtggctcaatggcagagcacgtcactcgtaatgatgagattgggggttcgactccccccgcgggcttcattaaatgttgagagtgtataaaccaaaagagacaaaagcctgttgaagtcgatactgacaggcaaagggagtttggaccggactaaaaatggataaaatggtaattgaaggtggtaatcccttgcagggaagggtcaggatcaacggtgcaaaaaacgctgcgttgcctattatggctgcatgcttgttgactaaaggtacgtcgaaattaaagggaataccaaaccttactgatgtaaaaaccctctgcaatatccttaatgagcttggtgtagatacaagaaaatgtccggatggttcacttgaaataactgttaaggaagagaaaaatataacagccccgtacgatcttgtcagaactatgagggcatcaatatgcgtccttggccctttgcttggaaagcggggtatggcaaaggtatctattccgggaggatgttccattggttccaggccaatagatattcatgtcagaggtattgaatcgcttggcgctcaggttgccgtaaaggatggatatgtcattgcaacagggaaaaaactgagagggagcgtagttgatctgggaggtccgtatggttctacagttttgggtacctgtaatgttatgatggccgccgttcttggagaaggaaggactattatagaaaatgctgcctgtgaaccggaagtgcaggatctggctaactttctcaataaagctggagccgacataagcggaatcggcgaaaagaaccttattatagaaggtgttgatgagttgaatgggattgaatacgagataattccggacagaatcgaagccggaaccttcatgattgcaggagccataacaggaggcagcatagtattggagaatggtatgtccagtcatatggctgcagttgtaaataaattacaggaaatgggtgttgatattcaggcttctgacggtaagcaagaatttaatggggtaaaaaatggagagtgtacagttaaaagtgatggncacatcaaacctgcaaatattacgacaatgccgtatcccggtatgcctactgacatgcaggcgcaattcactgcattaatgagtgttgcaaatggtacaagtattataacggagcggatatttccacacaggtttatgcatgtcgcagaacttaacagaatgggtgcaaatatcaggaatgacgatgctattgcatttattaagggtgtatcctcgctttccgggacaactgtgatggcctccgatttaagagcaagtgcctcactggtagttgccggactggttgccaaagggattacagagattagaaggctttatcatattgatagagggtacgaaaagctggaagatcgcctgaccaggctgggcgcaaagatatggcgggaaaaggagtaggggggggcgaaacggcacgggcaggcatgattaaacccctgaaaccgtcgtgggatatttaaattgaatatttgttcaatttgtattatnttacagtgtttgaataaatgcagggatatttgcctgataatgttccgccaatgagccggtcgggacgttatggctggaaaacagattgaaggattaacgaaaaggtaagaaatgtttgaatcgattacggacagtttcgaaacaatatttaataaattaagcggaaggggaagactgacagagcaaaacataaatgatggtttgcgtgaagtcagggttgcactcctcgaagcagatacaaactacaaggtcgtaaaggattttatacagagagtgacagagaaagctgttggagaggaagttcttaaaagtgtcaaaccaggacaacaaatagtaaagattgtacaaaccgagatggagcatcttatgggtccggttgattccaccataaagtataaggacggagatgttacagtaattatgcttgcgggattacagggaagcggaaagactacaacggctggtaagcttgctagcatgattttatcaaagggaaaaagccctatgcttgtagccgccgatgtgcagaggccggcggcaattgaacaattgcaggttatcgggaaacagcttaatgtccctgtctattctgaaaaagattctaatcccgttaagatatgtaaatgggcagtaaaacgtgccttccttgacaatcataatgtggttattattgatactgcgggcagacttcacgttgatgaagagttgatgctggagttggatcagataaagaagaagataaagccgacccagatattctttgtttgtgattcaatgaccggtcaggatgctgttaacagtgctaaggaattcaactcgcaactggattttgacggtgtgatcttaacaaaattagatggtgacactaggggaggggctgcattatcaattaaggcagttaccggtaagcctataaagtttgtaggagtcggtgagaaactagataaacttgaagaatttcacccggatagaatggcctccaggatcttgggaatgggggatgtcgtatctctggttgaaaaggctcaagatgttatcgacgaggacgaggctgtaaaattagaaaaaaagattagagcaaatacactgacgcttgaagatttcctttctcaattacaacaggtaagaaagatgggcccgatgaaagatattcttggtatgatacctggagtgggcaaaaagatgaagggaatggatgttgatgaaaatcaaatgaaaagagttgaggctattattcgttcgatgactcttgaagagcgaatgaacccggaaaaaattgaaggcagcaggaggcatagaatatctcgtggaagcggcactaactctcaggatgtcagccagttactgaaacagtttaaacaaatgaagaggatgttcaggtctctaagtggtacagaccccaaaagctttccaacagaagcgatgacaccagaggcaatgaagcttcccggaaccggaaagatcaggagtaagcgtaaaaaagtaaaaagaaaaaagaaaagataagctcagacagttaaacaagaatattaatacttaaattaagttaaggagaatgttttatggtaaaaattagattaaagaggatgggacggaaaaacagggcttttttcaggatttgtgcatttgattcacgggaagagcgcgatggaagaagtatcgaacagttgggaacgtatgatccaagggaaaaagatgaatcaaaaaaggtagtattaaagagagagaggatagagtactggcttagcgtaggcgctcaaccaaccgaaacagtagccagcattctaaaaaataataaaatagctgtaaaaaaataaattagcttactttagccacttgcttgttacgtcttaatcctgaaacggatttggaatcctcccgaaagggaggtaaccttgcttccccggacaaaaggcgccgaggacttttcgcaaggaatccaggatttatatataaattatgagaatagatatattaacactgtttcctgagatgtttcacaatgtat

SEQ ID NO: 1237 - DNA, 4000 bp, Escherichia coli
  misc_feature (1)..(3): n is a, c, g, or t
  misc_feature (12)..(12): n is a, c, g, or t
  misc_feature (28)..(29): n is a, c, g, or t
  misc_feature (34)..(34): n is a, c, g, or t
  misc_feature (41)..(45): n is a, c, g, or t
  misc_feature (49)..(49): n is a, c, g, or t
  misc_feature (51)..(53): n is a, c, g, or t
  misc_feature (66)..(67): n is a, c, g, or t
  misc_feature (70)..(70): n is a, c, g, or t
  misc_feature (75)..(75): n is a, c, g, or t
  misc_feature (84)..(84): n is a, c, g, or t
  misc_feature (87)..(87): n is a, c, g, or t
  misc_feature (91)..(91): n is a, c, g, or t
  misc_feature (108)..(108): n is a, c, g, or t
  misc_feature (110)..(110): n is a, c, g, or t
  misc_feature (117)..(117): n is a, c, g, or t
  misc_feature (120)..(120): n is a, c, g, or t
  misc_feature (123)..(123): n is a, c, g, or t
  misc_feature (128)..(128): n is a, c, g, or t
  misc_feature (136)..(153): n is a, c, g, or t
  misc_feature (157)..(157): n is a, c, g, or t
  misc_feature (159)..(160): n is a, c, g, or t
  misc_feature (162)..(162): n is a, c, g, or t
  misc_feature (165)..(167): n is a, c, g, or t
  misc_feature (174)..(174): n is a, c, g, or t
  misc_feature (176)..(176): n is a, c, g, or t
  misc_feature (178)..(178): n is a, c, g, or t
  misc_feature (189)..(190): n is a, c, g, or t
  misc_feature (194)..(194): n is a, c, g, or t
  misc_feature (198)..(199): n is a, c, g, or t
  misc_feature (203)..(203): n is a, c, g, or t
  misc_feature (207)..(207): n is a, c, g, or t
  misc_feature (209)..(209): n is a, c, g, or t
  misc_feature (215)..(219): n is a, c, g, or t
  misc_feature (223)..(223): n is a, c, g, or t
  misc_feature (240)..(240): n is a, c, g, or t
  misc_feature (249)..(249): n is a, c, g, or t
  misc_feature (267)..(267): n is a, c, g, or t
  misc_feature (305)..(305): n is a, c, g, or t
  misc_feature (318)..(318): n is a, c, g, or t
  misc_feature (327)..(327): n is a, c, g, or t
  misc_feature (350)..(350): n is a, c, g, or t
  misc_feature (354)..(354): n is a, c, g, or t
  misc_feature (393)..(393): n is a, c, g, or t
  misc_feature (413)..(413): n is a, c, g, or t
  misc_feature (431)..(431): n is a, c, g, or t
  misc_feature (441)..(441): n is a, c, g, or t
  misc_feature (462)..(462): n is a, c, g, or t
  misc_feature (470)..(470): n is a, c, g, or t
  misc_feature (506)..(506): n is a, c, g, or t
  misc_feature (525)..(525): n is a, c, g, or t
  misc_feature (541)..(541): n is a, c, g, or t
  misc_feature (543)..(543): n is a, c, g, or t
  misc_feature (561)..(561): n is a, c, g, or t
  misc_feature (606)..(606): n is a, c, g, or t
  misc_feature (612)..(612): n is a, c, g, or t
  misc_feature (618)..(618): n is a, c, g, or t
  misc_feature (636)..(636): n is a, c, g, or t
  misc_feature (645)..(645): n is a, c, g, or t
  misc_feature (857)..(857): n is a, c, g, or t
  misc_feature (1622)..(1622): n is a, c, g, or t
  misc_feature (1628)..(1628): n is a, c, g, or t
  misc_feature (1631)..(1631): n is a, c, g, or t
  misc_feature (1634)..(1634): n is a, c, g, or t
nnnggtagattntttttataatattttnnttttnttcttcnnnnnccangnnnaataatttttttnntantgtcnatcctcttnttnttanatttgataatgattatnantatcaanaanagnatatnttttttannnnnnnnnnnnnnnnnntttntnnanttnnntaatttngnangaatttataannaaanccannaaantcangnaaaatnnnnnttanaaaatatgaaactaacntcaaaaggnagatatgcagtaatggcnatggctgatttagcaaaaaataatgttaaagaaccaancagtcttacaganatttcattncgacaaggaatatccatatcttntttngaacaactttttttaaaactaagaaaaaataatttagtncaaagtgcaagaggtccttnaggtggatacgtattaancaaacctccngaggaaataaaattgttaagnataattantgcggttgatgaaaaaataaaaactgttaaatgtanaaaagaatcaaaaaaaggntgtaatggtaaatcantnaaatgtattactcacaanttgtgggatgatcttgaaactcatattaacaaattttttgaaganaatacncttaangatattctttttaaagangttaggaanaattcagaagaactaaaacaatgaaacaacaagagctagaaaaaagtaaagaatataaatacggttttacaaccgatatagaaagcgttagggcacccaaaggtcttaatgaagaagttattcgatttatatcaaaaataaaaaaagaaccagaatggatgttaagttggagacttaaggcctacagtagacttaaaaatgttaaagaaccnaattggcaaaaaccaaaatatcctaaaattgactatcaaaacttatattattattctgctcctaaaagtgctcaagacaaaccaaaaagtcttgatgaggttgatcctaaattattagaaacttatgcaaaattaggtatttctctaaaggaacaagaaaaactaagtggagtagctgtagatgctgtttttgattcagtatcggtagcaacaacattcaaagataaattaacggaaaaaggaattattttttgtccaatttcagaggcaatacagaaacatcctgatttggtaaaaaaatatattggttctgtaattccaattacagatcattattttgctacacttaattcagcagtttttaccgacggttcatttgtttatattcctgagggagttagatgtcctatggagctatccacatattttagaattaatgcttccgaaacaggacaatttgaaagaacattaattatcgcagacaaaggtagctatgttagttatcttgagggatgtacagctccaatgcgagatgaaaaccaacttcatgccgctaatgttgagttgatagccttagatgatgctgaaataaaatattctactatacaaaattggtatcctggagatgaaaatggtaaaggaggaatttacaattttgtaacaaaaagaggtgcttgcagaggaaaaaattctaaaatttcttggacacaagtggagactggttcagcaataacttggaaatatccaagttgtattttacaaggngataantcngtnggtgaattttattcagtagccattaccaataattatcagaaagccgatacagggactaaaatgattcatcttggaaaaaataccaaaagcaagattatatctaaaggtatatcagccgggcatggagataacacttataggggcctagttagaataagttctaaagcaaaaaattctcgaaattatacacaatgcgattctttattgatgggtaataaatgtggagcacatacggtaccctatatagaaaataaaaattcttcatccattattgaacacgaagcaacaacttcaaaaataaatgaagaacaacttttttattgtaatcaaagaggtttgaatcaagaagaggcgattagcttgatcgtaaatggtttttgcaaagaagtacttcaacaattacccatggaatttgctgtggaagcacaaaagttggttggaattagtttagaaggcagcgttggttaaatgttggatattaaaagtcttagtgcctcaatagatggcaaaaaaatattaaacggatttaacctaaaaattaaacctggcgaagtgcatgctatcatgggcccaaatggctcggggaaaagtaccttagccaatgtattaactggaaaaaatggctatgaaattaaaggacaagttctctatcaaggtaaagatctattagatttacctatagaggagagagctcaaaagggtttatttatggctttccaataccccctagagatagccggagttaacaccaataattttcttaagacttcattaaacactattcgtaaagttagaggtcagaaagaagtagactctttagattttttaaaactagtaaaaacaaaaacaaaaaatcttaaaatcgatgaaaaaatacttagtagacaattaaacgttggtttttctggaggcgaaaaaaagaaaaatgaaattttgcaaatgacaattttagaacccaaacttgcaattttagatgagactgactccggattagatattgatgctttaaggatagtttcagatggtgtgaatgctttaagaagcaaggagagatcttttttaattattacacattaccaacgtttgttggattatatcaaaccagattttgttcatgtattggttgatggaaaaatagcaaaaactggatgcggagaactagctgtagagcttgaaaaagttggctatgaaaaaatgggagcaaacaagtaagcagcagtatgattttaaattttgatgaatttcaaaaagccaatcaaagcggaagtgaactaaataatattagaattaaaaatttaaatatttttaaagaaaagggctttccatctaaaagagaagaaaattggaaatacacagatttaaaaacaatattatctaataatctaagcacactagaaatcccaaataataaaagaacttctcaatataatagcgaatggttattaaaagattttaaacacaatcaaatagtcttggtaaatggtgattttgttagttcagattttagttttgaagataaagaaaaaataaagataaaaccattaaaaattgttttaaatggtgaaaaagattttgaaaaaatcagagattattttactgatcaacaaaactctcttacctcattaaatcatgctttagtcaatgatggcatattcctagaaatagaagacaattattcatttaataaaccattaattatctacaattttttcaataaattttcagaaaacaaaataataaataataaaagttttatttcacttggaaaaaattccaagttaaatttattggaatactataaagctgaagacagtattaagtattttaataacactattcacaattattcaattcagaaaaatgccatgttgaaaaaatttagtatagatagcaatttggataattcttacggctatcatttaactaatgttaaaagttattctaatagcatatttgaaaattttttattttcctcaggatcaagttttgtgaaaaatgaaattcattgtaatttgttagaatcttttagttcatgttttgtgaatgcactaatgtttttgagtaatcaacaacaccatgagttaaaaaccaacattaatcataaaaacgaacattgtaaaagttcccaattagttaaaagtgttttgttggataagagtaatggcacttatcagggaaaaatttatgtcacaaaggatgctcagaagactgatggatatcaacttagcaaggcgttagtattgtcagaaaattctgcctttaattcaaaacctgaattagaaatttatgcagatgatgttaagtgctcacacggatcaacaactggtaatattgatcaaaattctatcttttatttgatgtcccga

SEQ ID NO: 1238 - DNA, 4000 bp, Escherichia coli
  misc_feature (1)..(1116): n is a, c, g, or t
  misc_feature (1463)..(1463): n is a, c, g, or t
  misc_feature (1465)..(1465): n is a, c, g, or t
  misc_feature (1467)..(1467): n is a, c, g, or t
  misc_feature (1469)..(1477): n is a, c, g, or t
  misc_feature (1479)..(1487): n is a, c, g, or t
  misc_feature (1490)..(1490): n is a, c, g, or t
  misc_feature (1492)..(1494): n is a, c, g, or t
  misc_feature (1496)..(1498): n is a, c, g, or t
  misc_feature (1751)..(1751): n is a, c, g, or t
  misc_feature (1775)..(1775): n is a, c, g, or t
  misc_feature (1851)..(1852): n is a, c, g, or t
  misc_feature (1856)..(1856): n is a, c, g, or t
  misc_feature (1991)..(1991): n is a, c, g, or t
  misc_feature (2533)..(2533): n is a, c, g, or t
  misc_feature (3638)..(3638): n is a, c, g, or t
nnnnnnnnnnnnnnnnnnnnnnnnnnnnnnnnnnnnnnnnnnnnnnnnnnnnnnnnnnnnnnnnnnnnnnnnnnnnnnnnnnnnnnnnnnnnnnnnnnnnnnnnnnnnnnnnnnnnnnnnnnnnnnnnnnnnnnnnnnnnnnnnnnnnnnnnnnnnnnnnnnnnnnnnnnnnnnnnnnnnnnnnnnnnnnnnnnnnnnnnnnnnnnnnnnnnnnnnnnnnnnnnnnnnnnnnnnnnnnnnnnnnnnnnnnnnnnnnnnnnnnnnnnnnnnnnnnnnnnnnnnnnnnnnnnnnnnnnnnnnnnnnnnnnnnnnnnnnnnnnnnnnnnnnnnnnnnnnnnnnnnnnnnnnnnnnnnnnnnnnnnnnnnnnnnnnnnnnnnnnnnnnnnnnnnnnnnnnnnnnnnnnnnnnnnnnnnnnnnnnnnnnnnnnnnnnnnnnnnnnnnnnnnnnnnnnnnnnnnnnnnnnnnnnnnnnnnnnnnnnnnnnnnnnnnnnnnnnnnnnnnnnnnnnnnnnnnnnnnnnnnnnnnnnnnnnnnnnnnnnnnnnnnnnnnnnnnnnnnnnnnnnnnnnnnnnnnnnnnnnnnnnnnnnnnnnnnnnnnnnnnnnnnnnnnnnnnnnnnnnnnnnnnnnnnnnnnnnnnnnnnnnnnnnnnnnnnnnnnnnnnnnnnnnnnnnnnnnnnnnnnnnnnnnnnnnnnnnnnnnnnnnnnnnnnnnnnnnnnnnnnnnnnnnnnnnnnnnnnnnnnnnnnnnnnnnnnnnnnnnnnnnnnnnnnnnnnnnnnnnnnnnnnnnnnnnnnnnnnnnnnnnnnnnnnnnnnnnnnnnnnnnnnnnnnnnnnnnnnnnnnnnnnnnnnnnnnnnnnnnnnnnnnnnnnnnnnnnnnnnnnnnnnnnnnnnnnnnnnnnnnnnnnnnnnnnnnnnnnnnnnnnnnnnnnnnnnnnnnnnnnnnnnnnnnnnnnnnnnnnnnnnnnnnnnnnnnnnnnnnnnnnnnnnnnnnnnnnnnnnnnnnnnnnnnnnnnnnnnnnnnnnnnnnnnnnnnnnnnnnnnnnnnnnnnnnnnnnnnnnnnnnnnnnnnnnnnnnnnnnnnnnnnnnnnnnnnnnnnnnnnnnnnnnnnnnnnnnccctgcaccataagcaagagtgcgccaagaattgaagcaatagcagggatgactactgcatatctagtggcagctaagatgcgattcatagcgataatggtagtgcctgagtgctagggagtggctgaactcttaggcacggtgattactagatcagtaagttattcaaaacttccaacttctccttccccgcaaccctccccaccaccaacacactcccattagggatttcatcccaaccatcttgattccaaccgctagatgccaccacaacctggccattacgtttggtgtatttaaggtggtagtaatcagtatcctctttaaacttttgtgggattttatcntngntnnnnnnnnnannnnnnnnnaangnnntnnngttaataatcatcatgtttatggatgagaatgcgcaattagcctttatataagaaaggcctgcctgaacaccttcgataaaaccatgtttttctatttgagttagtaggtagaggaagtaacgctctgaatctgtgtttccttttgctagttctaggtacttcttatcaattaaaggatcaagacaattaaaaggtgagatagagccgttatggataaaagtaatatcttcatatgtgaaggggtgggtgttnttctcattaacagccatgccctcngttgcccacctaaggtgaagaagtgctgcatttgatttatgagttgctagctcctcttttaaatgagcgctcttannagcngcaactggctctttatataaagaagcttttttgttttgggtagttgcaataccccaaccatcacagtgatcagtagataggtttataaactcatcaaaattagcacccactacctcagtgaaggtggtggcattnggggcggtgtaaccaagtaggcggcacatggtggtaagtctaattatttttctaccccacgcctgaaacgggtgattttcttaaaaaaaactggcaaaaaagggggttaaatccttccctactgctcagttcaggcgcaaaatagcggatgtgatctaaggcattacctggttttccccaccagctatttaaaagaagggtaataaatgagtctcaataacgattcagaatcacgcttactcgaatctcttggatataaacaagagtttaatagacgttggagtggattctctaacttcgcagtctccttctccatcatctctgttctctcaggttgcttcaccacctttggacaggcttggaataatggtggaccagtagcaatctcaattggctggccaattattgcaatgtttattttagttattggattttgtatgtcagagctggtctctgcgatgccaaccgctggtggtatttactactgggcatttaagttaggaaaacctgtccatggttggattactggctggcttaacctngttggtcaatttgcagttacagccggtgttacttacggctttgctaccttctttgtgacgacggcaaatctgtggagtgatttctgggatccaacagatcttaatcaggtatttatggtcttcttagtcgcaatctttcttgcaattgccctaaatgtttggggtgcaaagattattaacctgctacaaaacgttaacgtttactggcatgtgtttggtgtgacagctgtagttttgatcttggtatttatcccaactaagcatcagaccttagagtggatgtttaccaccacaaataacaactctggcttctctactggaatgtattggtggtatgtactacctctaggtttcttgcttactcaatacacaatcactggatttgatgcctctgctcacgtttctgaagagacctcaggtgcttcaaatgcagcagctaaaggtatttggcaatcaatcttgttctcagctattggtggctggttactactacttgccttcctatatgccgcaactgatgtggatgcaattaataaggcaggtggattctcaccagcaatcttcttaagctcattacctcttggctgggtgaaggtgctgttggtaattacttgcgtaggacagttcctatgcggaatgtcttgtattactgcaggctctcgtatgttgtttgccttctctcgcgataaggcagtaccaggacataagtactggacaaagttagacaagaatagaaacccatctaatgctgcatttggtattggaattcttgctgcgatcttaactctgcctgctctttgggcacctgagggaactgttgttccagtcgcattctttgccgttacctcagtaacagttattggtctcttcttatcgttcttaattccaatctacttaagatggagaatgggcgataagttcaagcaaggttcatggaatcttggcaataagtggaagtggatggcaccgattgcaatcgttgagattgttttcatcacgattgtattgtgtttgccaactacaccagctggtgtgccaggaaacgaagccttcacatggaaagctgtgcaatacgctccacttgcaatcttgtttgtaattggtncagcgatgttgtggtggcagttaagtgctaaaaagtggtttaccggtcctaagatcgtaaactaaaaaggcgcttaaactaaaataagtaaactcaaactagccctgttgcttgcaacagggctagtatttatttatggatcaggaatttaactatgagtaagggcagagttgcagaccgggtagcaattgttactggtgccggtagtggaattggtagagcaagtgcaattagattggctcaagagggcgccaaggttgtctgtgttgatattaatgaaagcgccgctaaagagtgcgctgatgagattaataaatcatccggtagtgcatatgcggttaagtgcgatatctcagattcca

SEQ ID NO: 1239 - DNA, 4000 bp, Escherichia coli
  misc_feature (414)..(415): n is a, c, g, or t
  misc_feature (1042)..(1042): n is a, c, g, or t
  misc_feature (1500)..(1500): n is a, c, g, or t
  misc_feature (1746)..(1746): n is a, c, g, or t
  misc_feature (1750)..(1750): n is a, c, g, or t
  misc_feature (1812)..(1812): n is a, c, g, or t
  misc_feature (2570)..(2570): n is a, c, g, or t
agttcggcgatctgccgttcgtccaggccaagagcgtcccgcaggacctcctgcgtatgctgccccaccgccggggccgccaccggatcggccatgggcgtggcggcgtagcggatcggcaagcgcacgttcggaacccagccgagcaccggatgggggatgcgggtgacgagttcgtggtcgcgcgcctcgggcgagcggatcgcctcgcccaccgtgcgcaccaatccgtagggcacgccggcggcgcgcatgcgagcctgccagtgcgcccagtcgtgccgcgcgaacgcttcgtcgaggaaggcgaacaggcgctcccgatgccggatgcgcaggggacccgtggcgtaatccgcatcggcggccacgtccggacgttccagcacctgccccatgagccgctggaagatnntgtcgttgccgctgttgatgtagaaggtgcggtcgctggcgcggaaggcgcccgaggggcaggtgtcgggggcggtgttgccgctgcgttgcggctccttgccggtgaacagcgactgcatggtcgcatagcccgtcatcaggacggccgtgtcgaacagggacacctccacccgctggccgcggcccaggcgctcccgggccagcaacgcgccgagcacggcgttgcccaccatcatggcggtgctgatgtccatcaccggcgagagcgcccgcacgccttcgcggtcgggataaccgttcatggaaacgaagccgctttcggcctgcgcgatgggatcgaagccgaagcggtcggcgaaggcgccttcgcggctgtaggcggccaccgagcagtagaccaggcgcgggttcagggcaaggcaggtctcgtggtccagccccaggcgacgcatcacgcccgaggagaagttctcgaccagcacgtcggcgcggcagacgaggtcgcgcgccagcgccagcccctgcggggacttcaggtccagcgcgatgctcttcttgttgcggttgctccagacgaagggtgcgccctggtccagttgcgggtgcatgggcggatagcggcgcncgtcgtcgccgcggaccggcgcctcgaccttgatcacctcggcgcccatgtcggccaggatcatggtcgccagcggccccgcgatgaagtgcgagaagtccaccacccggatgccgtccagcgcatggggtgcgccggaggcccgtcgcttgtgctccggaaagtcggcttcgaggttctccaacatgtcctggccgcctgcctgcatcggagaaccgctcacggcgtgtacccgaagcccttgccgagctccgccttcatgtagtcgcgtcccagttccatccagtcggaaccggcggggatggtgacggagatggcccgcatcatgaaggaagacggcttcgcggcggagaccggctcggcgccctccgccagcttcttcgcgctctccaggagcagccggcgcacgcgcacgatgcctgcatcggtggagcccaggtgctcctgcgaacggtcgnagatggtcgccacgcccgactggcacgcggcatcctccagccacaggccgggcatgccggtctggtagtcgtagttgtaggcgttgccccggttgaaccggctccagtaccggtgataaggcaccgtcaccggcctggcctcataggcgccatgcgaatggtggccggtctcgcggcccttgtagccgtccttgaacagcttgcgcgacttctcgtagaagggctggtccggcgtgtacgagaacntgantgccagggtgtggtggtcgtcgatgggcacccaggcatggccgctcagctcggggtactgcntctgcggcggcaccaaggtccagaacggcatcaggaactggttgacccgcacgtagttgtgctcggtgccgtccttgcgccgcgccgcgatgctgatgccggcatcgtgcggctggacctcgaacttgggcgacaggtcctggccctgccgccactgcgcgatcgtgctgccgttgcggcggccatgcaggatggcggcatgcgcggagtcgatttcaccttccagtgcctgcagccagttgcactcctgcacccggacggtgacgacggagtgcgactcgggcaccatgttccattcgagctcaggcagcggcggcggcgtctcgcgcttcgggcccatgtaggtccacagcacgccgttgcgctcgcgcacgggataggacttgatggtcatgcggctggtcatggcactgcccgggggttccgccggggtctcctggcactgccccgtcacgtcgaacttccagccgtggtagatgcagcggatgccgccctcctcgttgcgggcgaacaccatgggcgcgccgcggtgcgggcaggcctggtccaccaggccgacctggccctcgctgtcgcggaacgcgaccaggtcctcgcccagcaggcgcacccgatgcggctggccgtcgcgctcgacatcggcggacgcgaggaaggggatccagtacagccgcatgagctggcccatcgcggtaccggggccgacgcgaacgagcgtctcgttgtcttgggaattcagcatggccttttagggtgantggttgaaccgaacatcgattcgcccgattctaggcagtgccggccggcgcgtgattcgaaaggccgccgcggtattgagaaaccggaattgagctggccccacagtggtggcagcggccttcaggtccagtagggctcgatgagcgactgccggctcgcgtcggcgccaatgccggcggaagccaccgtcagcagttcgaggaaccgctgctgggcccgcgtgaggcgccagctcttgcgcatcgtggcgccgaccgtcggcctgcttcccgccagcggtgcgccgatgcagctgagcaggccggtgcgcacctgcagcgccacctggtccggcatggcgagcgtcagcaggtcgctggcggtcagcaggcggccgatgatcatgatcgagccgcactccaccggcgcctcggggcggcgatcggcgaagaggcgctcccattcggcacgcagcggcgagttctccggcgcgatgatccaggggtaggaagccagcatctgcggcgtgcaactgcgccgcgtcgcgagcggatgctgccgccccgccaccaccaccggggcttcctcgtaaagcgggtgcgtggccaggtccggcgctgcgtcgtcggggatctcgccgacgatgatgtcgatcacaccgtccctgagcgcctccaccagttcgccccagctgccttcgtgcacgcggaaccccgcgggaaaccgttccgccaccatcagcgccatggcctcgggcacgaggaagccacgtgccaggggggtcgtgccgagagcgatggtggggttgtgcgggtcgcgcccgagctcggagaacgccgcctggagttcggccagcgcgagcctgcaactgcgggcaaaacgccgaccggcaaagttgacgtgcactccgcggccgcggcgctccaccagcttgcgtcccagcgcctcctcgagttcgcgcacggcccggtgcactgccggctgagacagcccaaggtctgcggctgcagcggagatgctgccggcccgcaccagcgccacgaaggcgcgcagttgcgtcatgctgagccggcgatccggttcgaacgccgtgccgcccacctggcgggtgcccgttgccaggtgggccaggcaggcccgcgcccggtccaccaccagttccccggccgccgtgggcacgatcccgtccgggcgccgctcgaacagcacctctcccatcagcttctccagcttcaggatgccctgcgtcagcgccggctggctgagccccaccgcgccagcggccgcactgatgctgccgtgctcgtgcacggccgtcaggccgcgcaagtggcgcaggttcagctggaaggccgcctgtgccgcgccgggctgcgcgtccggcggagactgcgcgtggttcatggtcgccaaggaagaggaagctggccaggcaccactataaagcgca

SEQ ID NO: 1240 - DNA, 4000 bp, Escherichia coli
  misc_feature (1613)..(1613): n is a, c, g, or t
  misc_feature (2037)..(2037): n is a, c, g, or t
  misc_feature (2058)..(2058): n is a, c, g, or t
  misc_feature (2070)..(2070): n is a, c, g, or t
gagcaggacttttatgacttgacttgggcatatttattaaagtgtaaagaacaaaatgttttacatgttgagcctttctttgaccctcaaacacacacagatagaggtgttccatttaaagttgtaattaacggcatttcagacgctcttgcggacgctgaagagcgacttggaattacatctaagctcattatgtgcttcttgaggcatttggatgagacgagcgcaattgaaactttaaaaacttcatcagaatatactgactacatatatggtgtcggcctagatagctctgaaaagggtaacccacctgaaaaattttcaaatgtttttaatgctgcaaaagatatgggctataagttagtagctcatgcaggtgaagagggcccagcaagctacatatggagttcactggatattcttaaaatagaaagaattgatcatggaataagagctattgatgatccagagctaatgctgcgattaatcaataatcaaataccactgactgtttgcccgctatcgaatgtcaaattaaaggtctttgaggagatgtcaagccacactattctagagatgttagagcaaggggtatgcgtaactgttaattcagatgacccttcctattttggtggctatatgactgaaaattttatttcgctttatgacaatcttggcctttcaaaaggccaggcattaaggcttgtcaaaaatagtattgatgctagttttgcgccaaagaaaagaaagaaagggctctatagcatattggatgaatttgcagctgagtagctaaaaaggtttctatttattttttatcctgtttcccaacaacactttcgttcatttcatcttctatttggtccatcatttcattgtgagatttactcccccagtcttttggtttgtcagaaggggtctgagatacaggtttttggttattacgaatcttaaaaaaaccagaaaagactaggccagcttcaaatagaagccagataggaatagcgataaggaattgtgatatgacgtctggaggcgttaatatcattccaagaacaaacgaaccaataatgatatacgagcgattctttttaagtttttcagctgtggtaatgccaaagataataagaagaattgtcacaactggaacctcgaaggcgacaccaaaagcgaaagacactttaagaataaaatctaaataatattgaatatcaggcgcaaaattaacagactcagggccgactccagctaaaaaaccaaagatgactgggaaaacaacatagaaagagaataccagccccacataaaataggattgttgaagaaatgacaaggggcagtatcagcctcttttcatgtcgataaagtgctggcgccacaaacatccagagctgataaagtaggaagggcattgcaatatagatggctaatatcaaggacattttcaaaggcgttaaaaagggggagataaccccaattgcaatcaaattagagcctggtattgcttggacaataggtgcagcaataaagttatagatttcatctgcaaaaggaaatagtatcaaaaagaaaatagcaatcgctattaccgatctaagtagtgatcttctaagntcaatcagatgctgaacgagtggaagtttttcagaaggatttttttgctgagacatttatttttttaagtcttctttcgagagaaaattatcttcttcaagagaatgaatgctggaatgcacttcctccgctacttctgaaagcgatattttttcttgatccatggagagttgctctttgagctcatccacttttagctcttcattgatgtcagatttaattttatttaaaaacttattaaatttaccaaagtagagacctgcttttcgagcaagtgagggcattttctctggacctacaacaattagagtgatgatcccaattattgcaatttcccagaagccaaaatcaaacatcctagtttaatacttcagaaaacgtttattttttatcagacgagtcatcttcagcttctacctttgcntcaatgatgtcttctttgtcntctttttcagantctttcatagatgatttgaagcctttaatagcgcctccaagttcgttaccaatattttttagccttttaccaccaaaaataagaagcacaatgactagaataataatgagttcgaatggtcctggcatacccatgatatttatctcctataaatgaatattgccattttacactttaatagattatttttttcagaaggtgatattgttgaatttactatgttttttttgacaagtttcatataatggaacaaggtactaatagttggacaaatatattcacatgtattcatatttatgtatactaactattgatttgtcatatttaggtgaatttcatcacaacaagtatgtaatcaataagaagtttacttttttaaataataggagataaaaagtgaaaaaaatttttaaaaatcaaatagctttagcgctagctggaatcctggctggtacttctgctgttgctggaacactcgtcatcaatggtgacacgtcagatccagcaccaaaagctgctttccaggctgttattgatggatttgaagctgaaaacccggacgtagatgttgtttataacctttttgatcatgaaggttacaaggctgcaatacgtaacttccttagtgctgatgcacctgatattgctttctggtatgcaggaaatagaatggctccatttgttgaagctggtctttttgctccaattgatgatgtatgggctgaccaaggtctatattcattgatggcttcttcagctccaggtatgactatggatggccagaaatggggtatcccttacacttactacaactggggagtttactaccgtcaagatatctttgaagatttaggtattgctgttccaactaattgggacgagtttatagctgctggtgaaactttaaaagctaacggcattacaccaattactattggttctaaatatttatggactgctggcggtgtatttgactacttaaaccttcgtacaaatggatatgaatttcatatggcattaacgagtggtgacattgcttggactgatgatagagtgcgcgctactatggcaaactaccaacagctgattgatggtgattttttcctcgaaaaccatgctgcacttagctggcaggaagctttagctccaatggctagtggcgaggctgcaatgtatattatgggtaactttgctgttgctccattaaaagagttaggcttagatgatagttctctaggtttgttccagttccctgcaattactccgggagttccaatggctgaggaagcacctactgatacgattcatctaactgctggcgctaaaaacccagttgatgctaagcgtttcctagcatatgctgcacgtcctgatgttcagacggcttggaataaagcgttaggtcagctgcctacaaatgctggcgcaggtgtgactgatgacaagttcctaaaccaagcgttcaatatgcttaataatgacgcacctggtggtgttgctcagttctatgatcgtgacacaaaagcagaaatggcttcaattggtatggaagcttttcaagagttcatggttaagccagagcgtttagagaaaattctagagcgtctagaaaaagctcgtcaaaaactttattaatcaataaggttttactatgtcccgtgttcaagtattcttgacacgggacttttttttaatatttttaatattgaatctgcatgtattcttactggaaaaataaccaactgaagatagcgccttggatttttttagctccagggatattcatgttttctctgtatgttattttcccaattttccaatcaatcagtttaagcttctatcaatggaatggccttggaacaaagacctatattggtgttgaaaactatattgagttgatggatgatgagtacttttttgtttcattaaa

SEQ ID NO: 1241 - DNA, 4000 bp, Escherichia coli
  misc_feature (81)..(81): n is a, c, g, or t
  misc_feature (320)..(320): n is a, c, g, or t
  misc_feature (1057)..(1057): n is a, c, g, or t
  misc_feature (1988)..(1988): n is a, c, g, or t
  misc_feature (2587)..(2587): n is a, c, g, or t
  misc_feature (3466)..(3466): n is a, c, g, or t
  misc_feature (3807)..(3807): n is a, c, g, or t
tgattctgccgtgctgcgtctcgggggtgagcgcggtggcgttgtcccacatcgtcacggctggctgcgcgtttgcgtggngacgcagcaggtcatcaagttcggtacgcggcatggctgagccagtagtgccaaacggcgatgtcggccagggtgcggtgacggagccgccgaagccgtggagtttcaacccacgtgacgtgtagcgagaggtgatgtcgtgggcgacacccagagcggcaagttcgtgcatggcacggggagtgagaccatcgccgcaggttttgtcgcggggaaaggtggcggcgtcgataagcagnacgtcgtagccacggttggcggcgtgaaacgctgcggcggaaccggcgggaccagcgccgactatgaggacgtcacaggctgtatatggggctgcgggtggaggagtcacagtgttcattgttgtctattggtaccgattgtgtcgcagactaggtgaaaagtgggctacggtaataccctagcgaggaaaacaactgtaaccatgaattgagagaaacgacgtatgagccacggcgagacttctaccacgccgactccccaggtggatctaggcgacccacagctcaccgccacaatcaacgacggattgagccaggtcgagcagctgctgcgtgctgaactgtctggaggcgaggactttattaccgataaagtccagcacttggctgtcgcgggcggtaaacgattccgccccatgtttgccctgcttgcgtcgcaattcgggccacattggcagtccgataaggtagtgcaggcggctgtggtggtggaaatgattcacctggctaccctgtaccacgatgatgtgatggatgaggcagacaagcgccggggtgtgcccagcgccaacgcccgctgggataattccatggcgattctcgctggcgattttcttcttgctcaggcatcccggatcatggctgagctggggacggatacagtgtcgcattttgcggatacctttggcaccttggtcacgggtcagatgcgggaaaccgtgggggctggcgacggngatccggtagagcactacatgaacgttattcgtgagaaaaccggtgtgcttatcgcctctgctgggtatttagggtcgttgcatgccggtgctgatgccgcgactgtggaggcgctgcgccgctatggttacgccatcggcatggtgttccaaatcgtcgatgacatcattgatattttctccgacgcgacgcaatcagggaagaccccaggtaccgacctgcgggaaggtgtgtttaccctcccagttttgtatgcgctggccgaggacagtgccgtcggcgaacagctgcgtgccttgctgaccggaccactcactgaggatgctgaggtggagcaggcactggatttgctcgcgcagtccacgggcaagcagaaagcgcttgacgacgtccatcactacctcgccgaggccgaagcgcagctggatctcctcccggacggtaaggcgactcaggcgctacgcagtttgtccggtttcacggttagtcgcgtgggctaatcacgttcctatgctgcggatttgcctttgttattggtgttcgtagtaaagtgtgtaacgcaccatgacgtgtggtgcacgccaggttgcccgagcggccaaagggagcggattgtaaatccgtcgcgcaagctacgttggttcgaatccatcacctggcactctttttgtttcttatataagaccccgccggaggcactgcttccggcggggtctttttcttgttaaaaacaccattgacctgctgatttgtgttaggtagtggcttcgggttaatctttgtgaggcttcaacggcgcaggaccttatagaaggtgctgataatgacgaggctgtgcccccttagctcagtcggcagagcgtttccatggtaaggaaaaggtcgacagttcgattctgtcagggggctctgttgtttttctccgttgtncggggaagagcaacataatttggcggtgtagctcagtggtagagcaaacgactcataatcgttgtgtcgcgagttcaattctcgccatcgctactgagatttgtgatgaaatctctggttcacgccatggttgggtagaactgttacggaagttggatctgataacttttctgctaatatggtccagtgttgtgccagcccggcggtatttccggatgtggcgcgatgcgcataggggcgtagctcaattggcagagcagcggtctccaaaaccgcaggttgcaggttcaagtcctgtcgcccctgcaaaacaaccttcaacgtgatctcaaggagcactgtgaccgagcacaagagaccggataatgcagtagccactgcacgcccaaccggtaaacgccaggtgacgggggccgccacaaacagtgaggcgtacaaggctaagcaggccaggggtaaggaatcctctgatgaacagcacggcggcggtgttgccgcgtttttccctgaagttgtgcaggagatgcgtaaagtcatttggcccaccgcgcgccagatggtggtatacaccagtatcgtgtttgcgtttttgattatcnccaccgcacttgttgctggtgtggatttccttgcaggcatgggagttgagaaggtgctcacgcgctgagtaaactaaagtccgcgcttttcccgccgaatccgcccaggaatcggcgggttgttttgtgaaaccaggtagcatggtgaacatagcgtggtgaacaggctcaacatagtcacatggagtagaaaacatgagtgaagaaaccagttctgaagttattgaagaaaccgccgtcgttgaggaagctgccgcagcgttgggtgacacggagctgtccgaggaagaggcggccctggccgaatacaaaacccgcctgcgtacctacattcgcgagctgaaaaaactccccggcgactggtacatcatccagtgctactccggctacgaaaataaagtgaaaactaacctggatatgcgcgcccagaccttggaggtggaggactccatctacgacgttgtggtgcccattgaagaggttgtggaaatccgcgaaggtaagcgcaaactggtgaagcgcaaactgctcccggggtacgtgttggtgcgcatggacatcaacgatcgctcctggtctgtggtgcgtgacacccccggtgtgacttcctttgtgggaaacgaggggcatccgacgccggtgaagcaccgcgacgtcgccaagttccttatgccgccagagactgctgcggaaaccagcgaggcagagaaggctgttgttgctgatggggagaaggttgtggccagcccgacacccagcaccgcgaacaccattgaggtggattaccaggttgatgaagtggtgaccatcctcaccgggccgtttgcgtccatttccgccaccatttccgagattgatgcccagggcgggaaactgacnggaatgatttccttcatgggtcgtgaaatgccggtggagctcaccttcgatcaggtggaaaaaatcaactaggtattcgtgagggtgttcgtgtaggattgtcactcgcgtgttttcacgcagatacgacaatcatccccggtggccgggttacacgaacatcctcattgttgtgagatagtggggcccggcatccggacggcgctggttggggcacatcgaacccgccagccgccggtaacaaggaagcaggtatatcgatgcccccgaagaagaaggtctccggcctcatcaaactgcaaatccaggctggtcaggctaacccggctccgccggttggncccgccctgggtgcccatggtgtgaacatcatggaattctgcaaggcatacaacgctgctactgaacagcagcgcggcaatgtcatcccggtggaaatcaccgtgtacgaagaccgctccttcaccttcaagctgaagacgcctccggcagccaagctgctgctgaaggccgctggcctgcagaaaggatccg

SEQ ID NO: 1242 - DNA, 4000 bp, Escherichia coli
  misc_feature (274)..(274): n is a, c, g, or t
  misc_feature (286)..(286): n is a, c, g, or t
  misc_feature (289)..(289): n is a, c, g, or t
  misc_feature (358)..(358): n is a, c, g, or t
  misc_feature (898)..(898): n is a, c, g, or t
  misc_feature (1687)..(1687): n is a, c, g, or t
  misc_feature (1725)..(1725): n is a, c, g, or t
  misc_feature (1995)..(1995): n is a, c, g, or t
  misc_feature (1997)..(1997): n is a, c, g, or t
  misc_feature (2001)..(2001): n is a, c, g, or t
  misc_feature (2006)..(2006): n is a, c, g, or t
  misc_feature (2049)..(2049): n is a, c, g, or t
  misc_feature (2160)..(2160): n is a, c, g, or t
  misc_feature (2192)..(2192): n is a, c, g, or t
  misc_feature (2202)..(2202): n is a, c, g, or t
  misc_feature (2238)..(2238): n is a, c, g, or t
  misc_feature (2266)..(2266): n is a, c, g, or t
  misc_feature (2330)..(2331): n is a, c, g, or t
  misc_feature (2557)..(2557): n is a, c, g, or t
  misc_feature (3298)..(3298): n is a, c, g, or t
  misc_feature (3820)..(4000): n is a, c, g, or t
gttgttcgggaagctggtgggaagatcggccacatcggcgaggtgcccccgggcgttccaccagaactctatggtctggatctgatcgttggggcacctgcgatctttgacgagatgcaacaggtgttgcgctctgcctgatcaggcgaagcagctgtacatcttctgaaccagcgcctggttgtaaccatgagaggtcatgttggccaccacccgaccacgcagtggatagcccagcaggaacaggtcaccaatcagatcaaggatcttgtgncggacaaactcntcngtaaagcgtagttcggtgttgatcaccttgccgtcatagatgatgatgtgcgagttgagatagccgctnccgaccttgcccatcttctgagccatgtcgatgttctgaaaggtgttgaaggagcgggctggcgcaatttcattcaggaaggaatcctgctctgcgttgaaggtcagttgttgttccaggatcggtggtgggtagttgacccgcatcgtcacttcgaaaccatcatagggttccacgtagagatacttctggtccgggtcttcttcaccgatgctgagtttttcgcaaatcaccgcttctgtcacctcggcgtcctgatccacggttccggcttcgtcaagcaatcgggcaaaatcgagagccgagccatccacatttgggatctcctcgtcggccttgatcaacacgttgtccagcccagccatcgacaaagcagccatcaggtgctccaccgtgcggacacgtcgattctcccgggccagcaccgtagagttggcggtaaaactctgctggctctgtgcatgctggtaatcttccaggctggtgatccggccaggaatggagatgccgtcgagggtttgaaactgaatcccactgttnggaggagctggactgagaatgatgcccgtgttgcgaccactgagcagacccgtgccattgaggaccacgttgtcgccaagagtacactggggacgtccggacttgcgtagctccacggattgccggttggttgcaggctggtagggtgctgtctcgatccgggtgtcggaaggcagaatcgcttcctcgtctggttgagcggcccgcaaggcaccagtgatcttgtccaacaacacatccaggtgcagtggcttttccagaaagtctcgggctcccagcttgatcgcactgacggcagcttcaatcccggcgtgtccgctcatcatgatcacgggtagctcgggctgttcgttgcgtaggttcttgaggatcgccatgccgtcttctccgggaagccagatgtcgaggagtaccagggacattggctgctctttcagagcgtcgtagagttctcgtgcatgtgcgcagcagcgtacggggtagccttcatcttcgagtacggcggccagactactacgaatcgccggttcatcatcaacgaccacgattggattcatgcgactcctgcaggaaaggataacaaggcggatggaattgtcggctagtgtgcactcatcataccgggctttggcagaaatagggcaagaaaatctgcaaatcttgatcatttgctggaaccaccacgcatgagcgagaattgtccttcacaagatgctactgtgcttcaagtggatcaactgacgcttgaatttggcggattgcgtgccctggacaacctgagctttcagntccagtcccaggaaattctagcgctgattggtcccaanggtgctggcaagactacctgctttcagtgcataacaggctttcttcctccaaagcttggtgaaatccacctatatcctccccatcatcaaacacaacaactgaatggactcaagccctaccagatcgctcagttgggtgtcgctcgtacctttcagagcatccgcctatacgaaaaacagagtgtgctggagaacgtgatgatggggcgtcagatccgcaccaaaactagtatgttgggtgtgctcctgcgagatcgacgcacccgcgcngnagancagcngattcgtgaggattcctttcaactgctaaagcgtatggaactngagcagtatgctgaggcaactgcagacagcctaccctatgcagcccaacggcgtttggagattgctcgggcgctggctaccgagccctttctattattgcttgatgaaccngcagctggtttgaatcggcaggagacagaagnactggacganctgctggtagagcttcggaaagaatttcagctgacnatcctgctgatcgagcatgacatgcagntggtgatgaagatttcagaccgaatcatcgtgctggaccatggacgcaagatcgcagaaggtcnnccgcaggaggttcgccagcaccctgaggtgattcgagcttatcttggggaacagaccgtctcatgatgctggatctacgcaacttggtgagtgcttacggcaacatcctcgctctgcagggcatctctcttcatgtgaagccgagtgagatcgtaaccatcctgggcagcaatggcgctggcaaaaccaccctgttgatggccatcgccgggctggtgcctccccnccagggagaagttctgtgggaaggaagaccaattcagcaactgactccagatcagatcaaagcgctgggcattgggctggttcctgaaggacgacgcatcttcccagaattcaccgtgctggaaaatctgcgaatgggagcctacctgcgtcgcgatcgggaacacatccgagaggatttggagcgaatgatggagctctttccgattctgcaccaacgacagtcacagctcggaggaaccctcagcggtggtgagcaacaaatgctggcgatcgctcgggccctgatgggaaacccccggctactgctgcttgatgaaccatctctcggactggccccgatgattgtccagcaaatctttgagatcctgcgtcaaatccaccagcaacaacaaacgaccatcctgctggtcgagcagaacgcccgcctggctctccaactcgcagatcgaggctatctcctagaaaatggcaaaattcaattgaccgatacagcggcaaacttgctggataatgaggctgttcagcgggtctatcttggtgggtgaggataacccaaaagatcaaatgaatcgttgactgtttcaaggaagacttccaaaaatctcctcaaagaaccccaattcctctacaagcccaggaatcctgtttgttcttctcccccagagagaaagtagccaaaggccggatgagggaattcccgcaagttcctaattttttctaaacttcatcactgtctctngcggttccctgtcaaagaattcagcttacaaaaaaagagcatctgacatcgaaatggggcctatttgattgatcatctaaaaaattatgggcatctttatgaagaaaaccaattcttgatgacctgatattggatttagccatgaatgttgccgtacatcaactcaaagccaatctgtctcgactgttagcgagggcgcaatctggagaagtgattgaggtgacctcacatcggaaacccatcgcccgcattgtcggtgtccccgaaccaactggagtacccctcgattctctgaggtcttctggagcgctgagttggaatggcaaaaaacctgtgcttgaagagcctcttaccttgactggcgctggcaaatccatcagcagtttgatcttggaaaatcgccggtgatcctgttttgtgacacttctgcgctgatcaagctctatgttcaggaggagtggagttcggcaatgcgaggagctgtcaacgaagcctcggtggttgcggtttgtcgggttgccnnnnnnnnnnnnnnnnnnnnnnnnnnnnnnnnnnnnnnnnnnnnnnnnnnnnnnnnnnnnnnnnnnnnnnnnnnnnnnnnnnnnnnnnnnnnnnnnnnnnnnnnnnnnnnnnnnnnnnnnnnnnnnnnnnnnnnnnnnnnnnnnnnnnnnnnnnnnnnnnnnnnnnnnnnnnnnnnnnnnn

SEQ ID NO: 1243 - DNA, 4000 bp, Escherichia coli
  misc_feature (556)..(556): n is a, c, g, or t
  misc_feature (885)..(885): n is a, c, g, or t
  misc_feature (887)..(887): n is a, c, g, or t
  misc_feature (983)..(983): n is a, c, g, or t
  misc_feature (998)..(998): n is a, c, g, or t
  misc_feature (1155)..(1155): n is a, c, g, or t
  misc_feature (1223)..(1223): n is a, c, g, or t
  misc_feature (1622)..(1622): n is a, c, g, or t
  misc_feature (1991)..(1991): n is a, c, g, or t
  misc_feature (2435)..(2435): n is a, c, g, or t
  misc_feature (3559)..(3559): n is a, c, g, or t
  misc_feature (3580)..(3580): n is a, c, g, or t
tcatgggcgcgtctacgcggcgtaaaattaatagaataccaaaataatacaataattagaggtttaacgaacagagacatctggtcaactgaacgagataattttttgtccaagcccactttaaagaagccatatataagacctattgatgcggagctttctgaaatttcaactaagatgaaatttaaaggcagtactgttttaaaaaataaacaaataggtggttcagaaaatggctggagatatttggaaagttttttggagggacgaggaaatcattacagagttgaaatgtcttctcctcttttagctgagagagcctgctcaagaatttcaccctatctagcctatggaaatttatcagttagagaaatttttcagtttttacatgaaaatcatcctaaaataaaacaaatgtctccctcaataaaatcgtttaaatcgcgtctggcttggaaagatcatttcagtcaaaagcttgaagatgatttttcaattgaaacaacatgtttacataagtcctttgaaaatttgcggccattagttccagatcatnttctcttatctgcttgggagaacggagaaactgggtttccattcttagacgcatgtatgcgttatttgagagcaaccggctggatcaattttagaatgcgagctatgcttatgtcttttgcttcttatcatctttggttggactggcgggcatctggtcaaattcttgcgaaattttttacggactatgatccaggcattcattggcctcaagtccaaatgcagtcgggaactaccggcataaacacggtcaggatgtataatccaataaaacaaggaattgaccaagaccccaatgcaacttttatccgtaaatgggttcctgagctngntcatctttcaactgccgaaatacataaagttggcaccgaaaattttaatgcagttaattttgaaacacattaccctagacccgttgtggacttagntaaggcaggaagggnggctcgagaaaaagtatgggcagtcagaagattgcatggtttcaaaagtcaagcaaaacagatagtcaaaaaacacggtagtcggcaaaataggtcaaaggatttcgtaaacgatcgcctagaaataaaacctaaagccagggttaacattcagaanagctttgaattctgatggcaaaaatgcaaaagaaatcggatctaccaaaaaaaatatgtaaaatatgnggcctaccattcgcctggaggaaaaagtgggagagagactggacagaaattaaattctgcagtgagagatgtaagagagcaagccgtttaaaaaaaattggtaaaaataaataaccaattattgactttcctaatttagcgtttaactgaacagtagcagtataccgaggtagacagatgattcagttggctgaaaaattaggaatgaaaatttcgacaaattttgttgactttattgagaaagaagttttgccaaatactaacgtcacagctgagaagttttggcacggccttgcaacattggttaatgagttgactccgcaaaacaaagcgttgcttgacaagcgaagatatttacaaaaacaaattaatgagtggcatgagctaaatagcaataangatcttgatttagctgaatataaggagtttttatactcaatcggatatctcgtacccaaaggcgaatccttttccatcgatacagataaagttgatccagaagtttctcaggtcgcggggcctcagctagttgttcccgtcatgaacgctcgtttcgctttaaatgcagcaaatgctagatggggttcgctttatgacgctctttatgggacagattcaataagtggcgaaaataaaacaacttcttacgatacggaaagaggaaaaagggtaattgaatggggccgaaatttccttgatgaaacgtttcctcttaatggtatttcctggaaagatgctactcttttaacaataaacaacggcacgctntgcgtctcaggcaataatttgaaaaatgaaaaaagctttgtcggttattctggaaaagtcgaagagccaaattgcattgtattacggaacaacaatttgcacgtacgtttagaaattgacccaatcagtgaggtcgggtcgtctgacttggccggaatatcggatattatacttgagtccgcgatttctacgataatggactgtgaagacagtatcgctgcagttgatgcgtctgataagattgttgcttatagaaactggctcggtttgatgaagggtgacctttctgaacaagtaacaaaaaaaggtaaaacgtttataaggaccttgaacgaagacttctcttataaaactccaagtggcgaagtgagcactctcaaaggaaagagtttgatgttggtaagaaatgttggccatttaatgactacaccgacagtccttgancaaaatgacgaagaggtatttgaggggcttcttgatgcgctgtgtacggttacaattgcattgcatgatgtgagtcgtgagggaggaaattcctcctgtggttcaatttatgtagtgaagcccaaaatgcatgggccagaggaagtggaatttgcgtgcagaacctttagtcttgtggaggaaatacttggtctgcccttaaatactgtaaaaatagggataatggatgaggaaaggcggacttctgtaaacctttttgagtgtattcgtgctgctaaatcacgggtcgccttcattaatacggggtttttagatcgaactggcgatgaaattcacacaagcatgaaagctggggtgatgctttgtaaaagtgaaatgaaaacctctaaatggatcgaagcctatgagaatggaaatgtcgatataggcctagagtgtggattgcaaggaaaagctcaaatagggaagggtatgtgggctatgcccgatcaaatgtcagatatgcttgaacaaaaaatacagcacccaatggcaggcgcaaattgtgcctgggttccctcaccaactgctgcaactttgcacgcaacgcattatcacaaaatcaacgttcaaaaacgccaacaagaaattaaagcccttggctctagaagttgtttggacgatttattgcaggttccacttcaatcaagcgatgcactaactgaaagtgaaaaagaacgagaaattgataacaactgtcaagggattttggggtatgttgttcgctgggtagatcaaggtatcggatgttcaaaagttccagatattgataatattcagttaatggaggacagagcaacttgtagaatatcttctcaaagtttaagtaactggctttgtcacaattacgtaaaacacgatcaggttttgaggtctttgaaaaaaatggctgctgttgttgatgcgcaaaacgccgatgatgaaaattacagagccatgtctcctgattttaatactgaggcctttctagcagcctatgatttaattttcgatggcgaagctcagccttcaggttacacagagcctattcttcataaacggcgattagaaattaaaaataaagtttaagcgatattatttcagtngcctaattttttgtcgctttnttttattagatgattatttttctaaaataaaagtagtgctccgtttacggacaacttcaaatgtgtatatctatcatcatagggggctctggtgatgtcacgtccagttattggtataatgggaaattattacctgattaatgatcagtatcctgcacatgctgctggaacaatgaattgtgaggcaatcgttgatctctgcgatgctactcctctaatcataccaggcgatccaaattttgtgaaagtagatgagcttatgaggatctgtgatggttttttattcaccggtggtcggccaaatgttcatccatcagaatatggaattcaggcaacagaagctcatggggaatttgacagagcacgtgatgctgtaagtttatcactcataagatcttgtgtaaaattaggacagcctat

SEQ ID NO: 1244 - DNA, 4000 bp, Escherichia coli
  misc_feature (59)..(59): n is a, c, g, or t
  misc_feature (61)..(62): n is a, c, g, or t
  misc_feature (67)..(67): n is a, c, g, or t
  misc_feature (69)..(77): n is a, c, g, or t
  misc_feature (79)..(84): n is a, c, g, or t
  misc_feature (86)..(89): n is a, c, g, or t
  misc_feature (91)..(94): n is a, c, g, or t
  misc_feature (96)..(97): n is a, c, g, or t
  misc_feature (99)..(99): n is a, c, g, or t
  misc_feature (101)..(101): n is a, c, g, or t
  misc_feature (103)..(105): n is a, c, g, or t
  misc_feature (108)..(108): n is a, c, g, or t
  misc_feature (110)..(112): n is a, c, g, or t
  misc_feature (114)..(123): n is a, c, g, or t
  misc_feature (126)..(134): n is a, c, g, or t
  misc_feature (136)..(137): n is a, c, g, or t
  misc_feature (140)..(141): n is a, c, g, or t
  misc_feature (143)..(149): n is a, c, g, or t
  misc_feature (151)..(152): n is a, c, g, or t
  misc_feature (155)..(156): n is a, c, g, or t
  misc_feature (158)..(159): n is a, c, g, or t
  misc_feature (161)..(164): n is a, c, g, or t
  misc_feature (166)..(170): n is a, c, g, or t
  misc_feature (172)..(176): n is a, c, g, or t
  misc_feature (182)..(183): n is a, c, g, or t
  misc_feature (185)..(187): n is a, c, g, or t
  misc_feature (190)..(193): n is a, c, g, or t
  misc_feature (197)..(198): n is a, c, g, or t
  misc_feature (201)..(202): n is a, c, g, or t
  misc_feature (204)..(221): n is a, c, g, or t
  misc_feature (223)..(229): n is a, c, g, or t
  misc_feature (231)..(232): n is a, c, g, or t
  misc_feature (234)..(237): n is a, c, g, or t
  misc_feature (239)..(241): n is a, c, g, or t
  misc_feature (245)..(249): n is a, c, g, or t
  misc_feature (252)..(253): n is a, c, g, or t
  misc_feature (255)..(255): n is a, c, g, or t
  misc_feature (259)..(259): n is a, c, g, or t
  misc_feature (261)..(271): n is a, c, g, or t
  misc_feature (273)..(281): n is a, c, g, or t
  misc_feature (283)..(292): n is a, c, g, or t
  misc_feature (295)..(297): n is a, c, g, or t
  misc_feature (301)..(305): n is a, c, g, or t
  misc_feature (308)..(314): n is a, c, g, or t
  misc_feature (316)..(322): n is a, c, g, or t
  misc_feature (325)..(326): n is a, c, g, or t
  misc_feature (328)..(330): n is a, c, g, or t
  misc_feature (333)..(342): n is a, c, g, or t
  misc_feature (344)..(345): n is a, c, g, or t
  misc_feature (347)..(350): n is a, c, g, or t
  misc_feature (352)..(358): n is a, c, g, or t
  misc_feature (360)..(362): n is a, c, g, or t
  misc_feature (364)..(364): n is a, c, g, or t
  misc_feature (366)..(366): n is a, c, g, or t
  misc_feature (368)..(368): n is a, c, g, or t
  misc_feature (371)..(380): n is a, c, g, or t
  misc_feature (383)..(385): n is a, c, g, or t
  misc_feature (387)..(387): n is a, c, g, or t
  misc_feature (389)..(392): n is a, c, g, or t
  misc_feature (395)..(395): n is a, c, g, or t
  misc_feature (398)..(407): n is a, c, g, or t
  misc_feature (409)..(410): n is a, c, g, or t
  misc_feature (415)..(416): n is a, c, g, or t
  misc_feature (418)..(418): n is a, c, g, or t
  misc_feature (422)..(423): n is a, c, g, or t
  misc_feature (425)..(430): n is a, c, g, or t
  misc_feature (432)..(433): n is a, c, g, or t
  misc_feature (437)..(444): n is a, c, g, or t
  misc_feature (446)..(446): n is a, c, g, or t
  misc_feature (449)..(458): n is a, c, g, or t
  misc_feature (461)..(461): n is a, c, g, or t
  misc_feature (463)..(463): n is a, c, g, or t
  misc_feature (465)..(466): n is a, c, g, or t
  misc_feature (469)..(469): n is a, c, g, or t
  misc_feature (471)..(474): n is a, c, g, or t
  misc_feature (477)..(477): n is a, c, g, or t
  misc_feature (479)..(481): n is a, c, g, or t
  misc_feature (485)..(485): n is a, c, g, or t
  misc_feature (487)..(487): n is a, c, g, or t
  misc_feature (489)..(498): n is a, c, g, or t
  misc_feature (501)..(502): n is a, c, g, or t
  misc_feature (505)..(511): n is a, c, g, or t
  misc_feature (514)..(515): n is a, c, g, or t
  misc_feature (519)..(519): n is a, c, g, or t
  misc_feature (521)..(526): n is a, c, g, or t
  misc_feature (529)..(532): n is a, c, g, or t
  misc_feature (537)..(538): n is a, c, g, or t
  misc_feature (540)..(542): n is a, c, g, or t
  misc_feature (545)..(551): n is a, c, g, or t
  misc_feature (553)..(556): n is a, c, g, or t
  misc_feature (558)..(558): n is a, c, g, or t
  misc_feature (562)..(562): n is a, c, g, or t
  misc_feature (564)..(565): n is a, c, g, or t
  misc_feature (567)..(569): n is a, c, g, or t
  misc_feature (571)..(576): n is a, c, g, or t
  misc_feature (580)..(581): n is a, c, g, or t
  misc_feature (583)..(586): n is a, c, g, or t
  misc_feature (588)..(590): n is a, c, g, or t
  misc_feature (596)..(598): n is a, c, g, or t
  misc_feature (601)..(604): n is a, c, g, or t
  misc_feature (606)..(607): n is a, c, g, or t
  misc_feature (609)..(612): n is a, c, g, or t
  misc_feature (616)..(616): n is a, c, g, or t
  misc_feature (618)..(624): n is a, c, g, or t
  misc_feature (627)..(628): n is a, c, g, or t
  misc_feature (630)..(632): n is a, c, g, or t
  misc_feature (634)..(634): n is a, c, g, or t
  misc_feature (637)..(638): n is a, c, g, or t
  misc_feature (644)..(645): n is a, c, g, or t
  misc_feature (647)..(647): n is a, c, g, or t
  misc_feature (650)..(650): n is a, c, g, or t
  misc_feature (652)..(653): n is a, c, g, or t
  misc_feature (656)..(659): n is a, c, g, or t
  misc_feature (663)..(663): n is a, c, g, or t
  misc_feature (665)..(665): n is a, c, g, or t
  misc_feature (667)..(667): n is a, c, g, or t
  misc_feature (671)..(675): n is a, c, g, or t
  misc_feature (678)..(680): n is a, c, g, or t
  misc_feature (682)..(689): n is a, c, g, or t
  misc_feature (691)..(692): n is a, c, g, or t
  misc_feature (694)..(696): n is a, c, g, or t
  misc_feature (698)..(713): n is a, c, g, or t
  misc_feature (716)..(717): n is a, c, g, or t
  misc_feature (721)..(722): n is a, c, g, or t
  misc_feature (724)..(725): n is a, c, g, or t
  misc_feature (727)..(728): n is a, c, g, or t
  misc_feature (731)..(732): n is a, c, g, or t
  misc_feature (734)..(734): n is a, c, g, or t
  misc_feature (737)..(738): n is a, c, g, or t
  misc_feature (741)..(741): n is a, c, g, or t
  misc_feature (743)..(746): n is a, c, g, or t
  misc_feature (748)..(749): n is a, c, g, or t
  misc_feature (751)..(751): n is a, c, g, or t
  misc_feature (753)..(754): n is a, c, g, or t
  misc_feature (758)..(760): n is a, c, g, or t
  misc_feature (763)..(768): n is a, c, g, or t
  misc_feature (770)..(770): n is a, c, g, or t
  misc_feature (773)..(779): n is a, c, g, or t
  misc_feature (781)..(783): n is a, c, g, or t
  misc_feature (786)..(788): n is a, c, g, or t
  misc_feature (793)..(797): n is a, c, g, or t
  misc_feature (799)..(800): n is a, c, g, or t
  misc_feature (803)..(804): n is a, c, g, or t
  misc_feature (807)..(808): n is a, c, g, or t
  misc_feature (810)..(810): n is a, c, g, or t
  misc_feature (813)..(814): n is a, c, g, or t
  misc_feature (816)..(822): n is a, c, g, or t
  misc_feature (824)..(824): n is a, c, g, or t
  misc_feature (827)..(829): n is a, c, g, or t
  misc_feature (831)..(832): n is a, c, g, or t
  misc_feature (834)..(837): n is a, c, g, or t
  misc_feature (840)..(843): n is a, c, g, or t
  misc_feature (846)..(850): n is a, c, g, or t
  misc_feature (852)..(857): n is a, c, g, or t
  misc_feature (860)..(863): n is a, c, g, or t
  misc_feature (867)..(877): n is a, c, g, or t
  misc_feature (879)..(883): n is a, c, g, or t
  misc_feature (887)..(888): n is a, c, g, or t
  misc_feature (890)..(892): n is a, c, g, or t
  misc_feature (894)..(896): n is a, c, g, or t
  misc_feature (898)..(900): n is a, c, g, or t
  misc_feature (902)..(902): n is a, c, g, or t
  misc_feature (904)..(907): n is a, c, g, or t
  misc_feature (909)..(910): n is a, c, g, or t
  misc_feature (912)..(912): n is a, c, g, or t
  misc_feature (914)..(914): n is a, c, g, or t
  misc_feature (918)..(922): n is a, c, g, or t
  misc_feature (925)..(925): n is a, c, g, or t
  misc_feature (930)..(931): n is a, c, g, or t
  misc_feature (933)..(935): n is a, c, g, or t
  misc_feature (938)..(943): n is a, c, g, or t
  misc_feature (946)..(953): n is a, c, g, or t
  misc_feature (955)..(957): n is a, c, g, or t
  misc_feature (959)..(961): n is a, c, g, or t
  misc_feature (963)..(967): n is a, c, g, or t
  misc_feature (971)..(971): n is a, c, g, or t
  misc_feature (974)..(974): n is a, c, g, or t
  misc_feature (977)..(979): n is a, c, g, or t
  misc_feature (981)..(981): n is a, c, g, or t
  misc_feature (983)..(989): n is a, c, g, or t
  misc_feature (993)..(994): n is a, c, g, or t
  misc_feature (996)..(997): n is a, c, g, or t
  misc_feature (999)..(1002): n is a, c, g, or t
  misc_feature (1005)..(1012): n is a, c, g, or t
  misc_feature (1015)..(1015): n is a, c, g, or t
  misc_feature (1017)..(1019): n is a, c, g, or t
  misc_feature (1021)..(1028): n is a, c, g, or t
  misc_feature (1032)..(1032): n is a, c, g, or t
  misc_feature (1035)..(1041): n is a, c, g, or t
  misc_feature (1044)..(1044): n is a, c, g, or t
  misc_feature (1046)..(1046): n is a, c, g, or t
  misc_feature (1048)..(1048): n is a, c, g, or t
  misc_feature (1054)..(1054): n is a, c, g, or t
  misc_feature (1056)..(1061): n is a, c, g, or t
  misc_feature (1064)..(1066): n is a, c, g, or t
  misc_feature (1068)..(1071): n is a, c, g, or t
  misc_feature (1073)..(1073): n is a, c, g, or t
  misc_feature (1076)..(1078): n is a, c, g, or t
  misc_feature (1080)..(1080): n is a, c, g, or t
  misc_feature (1082)..(1082): n is a, c, g, or t
  misc_feature (1084)..(1087): n is a, c, g, or t
  misc_feature (1089)..(1090): n is a, c, g, or t
  misc_feature (1092)..(1099): n is a, c, g, or t
  misc_feature (1104)..(1108): n is a, c, g, or t
  misc_feature (1110)..(1114): n is a, c, g, or t
  misc_feature (1117)..(1121): n is a, c, g, or t
  misc_feature (1124)..(1126): n is a, c, g, or t
  misc_feature (1129)..(1134): n is a, c, g, or t
  misc_feature (1136)..(1136): n is a, c, g, or t
  misc_feature (1139)..(1140): n is a, c, g, or t
  misc_feature (1142)..(1150): n is a, c, g, or t
  misc_feature (1154)..(1154): n is a, c, g, or t
  misc_feature (1156)..(1157): n is a, c, g, or t
  misc_feature (1167)..(1168): n is a, c, g, or t
  misc_feature (1171)..(1171): n is a, c, g, or t
  misc_feature (1292)..(1292): n is a, c, g, or t
  misc_feature (1705)..(1705): n is a, c, g, or t
  misc_feature (1742)..(1742): n is a, c, g, or t
  misc_feature (1745)..(1745): n is a, c, g, or t
  misc_feature (1758)..(1758): n is a, c, g, or t
  misc_feature (1760)..(1760): n is a, c, g, or t
  misc_feature (1787)..(1787): n is a, c, g, or t
  misc_feature (1794)..(1794): n is a, c, g, or t
  misc_feature (1797)..(1797): n is a, c, g, or t
  misc_feature (1813)..(1813): n is a, c, g, or t
  misc_feature (1817)..(1817): n is a, c, g, or t
  misc_feature (1825)..(1825): n is a, c, g, or t
  misc_feature (1839)..(1839): n is a, c, g, or t
  misc_feature (1849)..(1849): n is a, c, g, or t
  misc_feature (1852)..(1852): n is a, c, g, or t
  misc_feature (1963)..(1964): n is a, c, g, or t
  misc_feature (1995)..(1996): n is a, c, g, or t
  misc_feature (2003)..(2003): n is a, c, g, or t
  misc_feature (3557)..(3557): n is a, c, g, or t
  misc_feature (3577)..(3577): n is a, c, g, or t
  misc_feature (3756)..(3756): n is a, c, g, or t
  misc_feature (3789)..(3789): n is a, c, g, or t
  misc_feature (3807)..(3807): n is a, c, g, or t
  misc_feature (3823)..(3823): n is a, c, g, or t
  misc_feature (3974)..(3974): n is a, c, g, or t
atcaaccggaataattcctttatatttacccttaggggatttttccagtaattctctancnntattnannnnnnnnnannnnnnannnngnnnnanntnanannncantnnntnnnnnnnnnnatnnnnnnnnnannttnnannnnnnncnnaannannannnntnnnnntnnnnntatctnntnnnttnnnncctnnagnnannnnnnnnnnnnnnnnnncnnnnnnncnntnnnnannngaannnnnatnntnactncnnnnnnnnnnngnnnnnnnnntnnnnnnnnnnagnnntttnnnnnctnnnnnnnannnnnnnganntnnnaannnnnnnnnnannannnntnnnnnnntnnntnanantannnnnnnnnnaannnanannnntanaannnnnnnnnnannatttnntnaaanntnnnnnntnnaaannnnnnnntnccnnnnnnnnnnatngnannatnannnnttntnnntaananannnnnnnnnnaannttnnnnnnnttnntttntnnnnnnttnnnnctttnntnnnaannnnnnnannnncntttnanncnnnannnnnnaaanncnnnngnnnaaaaannnagnnnngnncnnnnaaantnnnnnnnccnnannntnaannaaaaanngnaantnnttnnnnaggngntnttgnnnnnttnnntnnnnnnnnannannncnnnnnnnnnnnnnnnnggnnaaanntnntnnaanncnttnnaantnnnntnntncnnaaannnaannnnnnanggnnnnnnntnnnttnnnaaaannnnnannaannaannanttnngnnnnnnngnaannngnncnnnnccnnnnaannnnncnnnnnnttnnnnaaannnnnnnnnnnannnnncttnntnnncnnngnnncnannnnanntnanaaannnnnttnctttnnannnccnnnnnnttnnnnnnnnannngnnntnnnnntttnccnaannnantnnnnnnnaaannanntnnnnaannnnnnnnagnannnannnnnnnntttnggnnnnnnnccnantnttttcntnnnnnnttnnngnnnnanttnnnancnannnncnntnnnnnnnnacccnnnnntnnnnnaannnnnttnnnttnnnnnntnaannannnnnnnnnaatngnntatggaaaannctnttttaaaatttgaatgacttctttatctaccactccaacagtgacatatttatcggttttttgctgattaatatcaatgtaaacgccgctttctataaatctgagctgtgatggtttaagngctaatagatcagaaaccctctggcctacataaagcccaatcagtatccattttctagcattttcaagagtggaaggtaaatttctaatcgcttttatcttttttatttcttcaaatgaaatggtttgtaaaacgcgatctttacttttttgagtaaacgattctatgtgtctggtatatggatttacattaatactcattctttcagcttctttacaaatcatttttagaagctttaattgaaggccagcgttattaagtgaatattcttttttagttaaaagccactctttaaacgcattaactaacatgtgatctattgtatctaacatgatcgattgaccaaaatcagattcaaattcctgaattaaatcataaaatcgttttagattcctgatagaattattggacanaccaagtgagccacttcttttaagtcttcttagaggngcntgttttatatagntngagatctgagtgagtaataccccttgntctctancantagcaactattttatngttntaatcacncattttttattgtntaattttcanatnatttgtgaatattataactaacttcaaagttcatttaacattttaaataaaatattctaacgtaaatttgcttaaaatttacatttaaatatacgttattttttatgttanntaacatataaagtcaataaatacagggcctnncaaagantagttttgaaataactacgggctgtagtcaaaataaaaatcttttaatacaaacagaaaaccttcttatctttaaaaaaatttacacatgaaagccattctccttgccggcggcacaggatccagactcttcccagtcacactaggtgtttctaagcagttattacctgtctatgataaacctatggtgtattatcccttgtcggtacttttgcaggcagggattcgagaagttttagtgattagtactccagaagatttggggcagtatgaacggttattgggcgatggaagtcaatggggaattagtttgcaatataaagctcaaccaaagcccaacggattggcagaggcctttctgttgggagaagaatttattggagaggaagcggtttgtctgatattaggagataatattttttatggtgtagatttttcaaaacaactagaagcggtcaaacaaagaacaagtcttggttcgaaggcgactatttttggatatactgtcaatgatccccaacgttatggagttattgaatatgatgatcaagggaaagccacctctattgaagaaaaacctgaaaatccaaaaagtaatgaagccgtggtaggcttgtacttttatcctaattctgtcattgaaattgcaaaacaaagcacaccttcagagcggggtgaactagaaatttcggctgtaaatcaaaaatatttggaagatggaaatcttcaggtagaagttttgggtaaaggtttcgcttggctggatacaggaacacatgagtctttattggaagcgggacaatttattcataccattgaaaaacggcaaggtcttaaagtaggatgtcttgaagaaatagcttttgaaaaagggtttgtcacaaaagagcaacttttggaaggtgcagaaaaaatgaaacaaacagaatacggaatctatttattaaaaaaatacagcgataaatcataactttaagcttcaattaaacgatccatcatgaatatcaaaactactcctttcaaggaggtttttattttaaagcccacccttcacttagatgaacgaggctcttttatggaaagttttaatgaacgagaagttgaaaaagttttagggaaaaaaacaatgttttgtcaagacaatcttacccattccaaaaaaggagttttaaggggcttacattatcaattacccccctttagtcaaacaaaattagttagtgtgattcaaggaagcgtattggatgtggttgtggatatacgtaaaggatctcccacctttggacagtattttagttttgaattaagcgcagaaaatcagttacaactttttatccccagaggatttgctcatggatttataacgttaagtgagacgtctatttttatgtataaagtagatcaatattataattttgccagtgaaggaagcattaccccagatgatcctgctttagggatagattggcaaataccccaatcacaatggattcaatctgagaaagataaaaagcatcctacccttgcagaggctaccctttttgattataatttngacctttatgcctagttatntagtaacaggtgggtcaggtcaactgggacaatgctttcatgcggttgctaaagaatcacctgcgataaatttattttttacttctagaaacgaagtagacattacacgatcggaaacccttgcaaatttttatagcaaaaatccttttgatggcattatcaattgcgctgcctacatnaatgttgatcaggcggagaaagaggaagaaagngcgtttaaaatcaatacngaaggacttcaaaatntaattgactttgcagaggagaaaaaactttcgattatccatttttctacagattacgtttttgatggaaattcttctgaaccttatcctgaggaggcggcaacaaatccaatagggatttatggaaactcaaaattgaaaggggaagtacntctttcaaaaagcagttgtaagaatg

SEQ ID NO: 1245 - DNA, 4000 bp, Escherichia coli
  misc_feature (62)..(62): n is a, c, g, or t
  misc_feature (131)..(131): n is a, c, g, or t
  misc_feature (140)..(140): n is a, c, g, or t
  misc_feature (377)..(377): n is a, c, g, or t
  misc_feature (639)..(639): n is a, c, g, or t
  misc_feature (785)..(785): n is a, c, g, or t
  misc_feature (877)..(877): n is a, c, g, or t
  misc_feature (934)..(934): n is a, c, g, or t
  misc_feature (956)..(956): n is a, c, g, or t
  misc_feature (1156)..(1156): n is a, c, g, or t
  misc_feature (1210)..(1210): n is a, c, g, or t
  misc_feature (1249)..(1249): n is a, c, g, or t
  misc_feature (1435)..(1435): n is a, c, g, or t
  misc_feature (1438)..(1438): n is a, c, g, or t
  misc_feature (1525)..(1525): n is a, c, g, or t
  misc_feature (1643)..(1643): n is a, c, g, or t
  misc_feature (1752)..(1753): n is a, c, g, or t
  misc_feature (1847)..(1847): n is a, c, g, or t
  misc_feature (1860)..(1860): n is a, c, g, or t
  misc_feature (1883)..(1883): n is a, c, g, or t
  misc_feature (1937)..(1937): n is a, c, g, or t
  misc_feature (1979)..(1979): n is a, c, g, or t
  misc_feature (1991)..(1992): n is a, c, g, or t
  misc_feature (1994)..(1994): n is a, c, g, or t
  misc_feature (2021)..(2021): n is a, c, g, or t
  misc_feature (2046)..(2046): n is a, c, g, or t
  misc_feature (2051)..(2051): n is a, c, g, or t
  misc_feature (2750)..(2750): n is a, c, g, or t
  misc_feature (2753)..(2753): n is a, c, g, or t
  misc_feature (3264)..(3264): n is a, c, g, or t
  misc_feature (3266)..(3266): n is a, c, g, or t
  misc_feature (3338)..(3338): n is a, c, g, or t
  misc_feature (3405)..(3405): n is a, c, g, or t
  misc_feature (3410)..(3410): n is a, c, g, or t
  misc_feature (3431)..(3431): n is a, c, g, or t
  misc_feature (3510)..(3510): n is a, c, g, or t
  misc_feature (3560)..(3560): n is a, c, g, or t
  misc_feature (3587)..(3587): n is a, c, g, or t
  misc_feature (3983)..(3983): n is a, c, g, or t
gtcagcttaatatgctcgtagacaccatattggcttcttttttacctacgggtagcccaacntggttgtatgtttctgacaggttaatgcagttaccgcttgggatttttgctattgccataggtactgtnttacttccncggctttcttctttgcatcaaactgatgataaggaaggattctcgagaacaatggactggtctataagattagttttgttaattggggttccttcaattataggtttagttctcttatcagaaccaatcattcttaccttatttgagcgaggggagtttattgcatcagacacgagacaggcgtcttttagcctcatagcacttgcattaggcttgattgccttcatgctgattaangtgttgacccctggcttttttgctcgtcagaaccctaaaacgcccttgaaagttgctgcagcctctatggtagttaacgctgttttagcttggttactcgccttttatttaggtttcaatcatgttggtttagcaatagctagttctattgccgcgtattttagtattactatattgctctttattctcttaaaaaataagatttatcaagttcaaaaaggatggatcatttttttaggaagaatatttgttgcttcttttnttatgactgtaatagttaatctaatgaatgtagagacatttgcatggagagagttagatcaagtggtccgttttatgcagcttttgcttataacctttagtggcatagcttcctatcttgctgtgttgtggatttcaggacttagnttaagagatttaaaaggttaactatgtatttgattcgaggaacaaataatatagaacttttcagatccaattttcctgagatctctactgtngcaaccatcggaaactttgatggccttcatcttggtcatcagcagatattaaaaacnatgcaggaagaagcggatattnacgggcttaaaaggctaataatctttactgagccacacgctcaagaatttttttctgaagcagcaggtttggagacttcaaagcctcctcgaatttttccatggcaagaaaaagtgaggaagatgagggagttcggtgttgaatttgcttttttcttgaaattcaataatcaattgagatctatgacgcctgaagacttnttaaataaaattttgttaaggcttcacattaaaaaattagtaataggagatgantttagatttggggccaaccgagaaggagatttcagtctncttaaaaactggggaactcagaattcgatagaagtttctaacaccgagacttatgaaattgatggggaaagagtaagcagtaccagaataagggaggctctaacagaaaacaattttgaaaaggccaataaatttttgggcaggcctttcacttattctggaaaagtagtttatgggaaccagttnggnggtcaacttgggattcctactgcaaatttatggctacctaagaataaattacctatttctggtgtttacattgttaaagctttgctngataaaaagaaattaagaggcatagccaatatgggaataaggcccactgtggggggagagtcgcctgttttagaagtacatctattaaatttttccaaaaaaatttatggcaaaaggntaactgtagaatttttgaaaaaagtaagagatgaaaaaaaatttgaaaatttaaatgctttaaaagaccaaatttttaaagatatttctacagctgagagttatttcgnntaaagtgcaaaaaattaacatgaaagactataaagaaactcttaatctgcctaaaacagagtttgcaatgaaggcaaatcttcctaataaagancctgagttattgnaatattgggaagaaatagagctntataaaaagttaaaaaagaaagggaaagggaaggataaatttgtacttcatganggtcctccctatgcaaatggggctattcatattggccacgcngtaaataaaacnntnaaagatattgttgttaaatctcaaacnctaagtggtaaatactccccttacnttccnggttgggattgtcatggcctccccattgaattaaatgttgaaaagaagttaggcaaggtaggcgataaagtaaccgcaaaagtgtttagagaagcttgtcgaaattatgctaaagaccaaatagaaatacaaaaagaggagtttaaaagactgggggttttgggagattggaaaaatccctacctgacaatggatagtcaatttgaagcaggtatagttcgttctttgggtcaaataatctcaaaagggtatgtaaatagaggagataagcctgtccactggtgtgttgattgtggctctgcactggcggaagcagaagttgaatatcaagacaagatttcaccctccatagattttggattccctattgagattgaaaaaataaactctattttcaatctagacttggatatgtctatttatgtttcaagttggactaccactccttggaccgtaccagggaatgtagcacttacagttaatgccgaatttgattattgtttagttcaaataaaagaaagctcaaaggattatggccttcttataggtaagaagttaatagaacctacacttgaacggattggtgtaaaaaacttcgaagttttagcttcttgtaaaggtataaaattagagggattagaagccaagcatccttacttaaataggccttcaaaattagtattaggcgatcatgtaacnacngaggttggaactggaatcgtccatacctcgccagggcatggtcttgaagactacttagtagccaaagagtatgatttagatgtactaagtccggttaagaacaacggaacttttaattctgatgaagaacatgtagggggtctattcgcttttaaggctaatgaaaagatcattgaagtactaaaagaagagggtactctttttgcactagctgactatgaacatagttatccgcattgttggaggcataaaacaccactaatgtttagagccactcctcaatggtttataggtatggataaaggttctttgcttgcaaatgctaataaggccatcaaggaagtaaactgggagccttcttggggtgaaaccaggatgtccagcatgttggatagacctgattggtgtatatcgcgtcagagagcatggggtgttcctatcccccttctaattcataaggaaacaagagagttacatccggacaccaatcaattaattgaggagattgctnanaagatagaaaagcagggaatagagtcctggcacgaagtcaagatagaagaccttattaaagattcatcaaantatgaaaaaataactgatatcctggatgtgtggtttgattcgggtgttacgcatgcttgcgtcttgnccgangaagaattgcagttcccggcngacctttatctggagggctcagatcagcaccgagggtggtttcagtcatcgttacttacgagcatggccataaatgacncacctccttataaaggagttttgacacatggttttgttgtcgacgctganggaaaaaagatgtccaagtcccttggnaataccatttcacctcaagaaatatggaattctcgaggagcagatgtcttaagggcatggatagcttcaaccgattataggaatgaaatggttatatctgataccagattacagggagtttcagatacatacagaagaatcagaaataccataagatttttattgggaaatgttcatgatttcgattcggcgagccgtgtaaaagaaaatgaattaacagaaatagatagattcatggagattaaaactcaaaacctccaaaaagaattaatagaagattatcaaaattatcaatttcacctagccttcaacaaaatacacaatttttgttccaatgatttaggcgggttttatttagacattctcaaagatcgtctttatacctgtggcaaagantctttagccagaagatc

SEQ ID NO: 1246 - DNA, 4000 bp, Escherichia coli
  misc_feature (1)..(1): n is a, c, g, or t
  misc_feature (3)..(5): n is a, c, g, or t
  misc_feature (7)..(8): n is a, c, g, or t
  misc_feature (10)..(10): n is a, c, g, or t
  misc_feature (12)..(14): n is a, c, g, or t
  misc_feature (17)..(21): n is a, c, g, or t
  misc_feature (23)..(24): n is a, c, g, or t
  misc_feature (27)..(27): n is a, c, g, or t
  misc_feature (34)..(35): n is a, c, g, or t
  misc_feature (37)..(39): n is a, c, g, or t
  misc_feature (45)..(46): n is a, c, g, or t
  misc_feature (48)..(51): n is a, c, g, or t
  misc_feature (57)..(59): n is a, c, g, or t
  misc_feature (61)..(63): n is a, c, g, or t
  misc_feature (66)..(66): n is a, c, g, or t
  misc_feature (68)..(69): n is a, c, g, or t
  misc_feature (71)..(71): n is a, c, g, or t
  misc_feature (73)..(74): n is a, c, g, or t
  misc_feature (76)..(76): n is a, c, g, or t
  misc_feature (229)..(229): n is a, c, g, or t
  misc_feature (247)..(247): n is a, c, g, or t
  misc_feature (305)..(305): n is a, c, g, or t
  misc_feature (314)..(314): n is a, c, g, or t
  misc_feature (334)..(334): n is a, c, g, or t
  misc_feature (337)..(337): n is a, c, g, or t
  misc_feature (350)..(350): n is a, c, g, or t
  misc_feature (446)..(446): n is a, c, g, or t
  misc_feature (500)..(500): n is a, c, g, or t
  misc_feature (502)..(502): n is a, c, g, or t
  misc_feature (599)..(599): n is a, c, g, or t
  misc_feature (694)..(694): n is a, c, g, or t
  misc_feature (1987)..(1987): n is a, c, g, or t
  misc_feature (2679)..(2679): n is a, c, g, or t
  misc_feature (3733)..(3733): n is a, c, g, or t
  misc_feature (3739)..(3739): n is a, c, g, or t
  misc_feature (3741)..(3741): n is a, c, g, or t
  misc_feature (3744)..(3744): n is a, c, g, or t
  misc_feature (3748)..(3748): n is a, c, g, or t
  misc_feature (3753)..(3753): n is a, c, g, or t
  misc_feature (3757)..(3757): n is a, c, g, or t
  misc_feature (3759)..(3759): n is a, c, g, or t
  misc_feature (3762)..(3763): n is a, c, g, or t
  misc_feature (3766)..(3767): n is a, c, g, or t
  misc_feature (3769)..(3772): n is a, c, g, or t
  misc_feature (3781)..(3781): n is a, c, g, or t
  misc_feature (3783)..(3783): n is a, c, g, or t
  misc_feature (3785)..(3787): n is a, c, g, or t
  misc_feature (3789)..(3790): n is a, c, g, or t
  misc_feature (3792)..(3793): n is a, c, g, or t
  misc_feature (3797)..(3799): n is a, c, g, or t
  misc_feature (3802)..(3805): n is a, c, g, or t
  misc_feature (3811)..(3811): n is a, c, g, or t
  misc_feature (3813)..(3819): n is a, c, g, or t
  misc_feature (3821)..(3823): n is a, c, g, or t
  misc_feature (3825)..(3828): n is a, c, g, or t
  misc_feature (3830)..(3837): n is a, c, g, or t
  misc_feature (3839)..(3839): n is a, c, g, or t
  misc_feature (3841)..(3841): n is a, c, g, or t
  misc_feature (3843)..(3843): n is a, c, g, or t
  misc_feature (3845)..(3852): n is a, c, g, or t
  misc_feature (3855)..(3855): n is a, c, g, or t
  misc_feature (3857)..(3857): n is a, c, g, or t
  misc_feature (3859)..(3868): n is a, c, g, or t
  misc_feature (3871)..(3874): n is a, c, g, or t
  misc_feature (3876)..(3876): n is a, c, g, or t
  misc_feature (3878)..(3883): n is a, c, g, or t
  misc_feature (3885)..(3885): n is a, c, g, or t
  misc_feature (3887)..(3887): n is a, c, g, or t
  misc_feature (3889)..(3889): n is a, c, g, or t
  misc_feature (3891)..(3891): n is a, c, g, or t
  misc_feature (3893)..(3893): n is a, c, g, or t
  misc_feature (3899)..(3900): n is a, c, g, or t
  misc_feature (3905)..(3905): n is a, c, g, or t
  misc_feature (3907)..(3908): n is a, c, g, or t
  misc_feature (3913)..(3914): n is a, c, g, or t
  misc_feature (3920)..(3921): n is a, c, g, or t
  misc_feature (3926)..(3926): n is a, c, g, or t
  misc_feature (3928)..(3943): n is a, c, g, or t
  misc_feature (3945)..(3947): n is a, c, g, or t
  misc_feature (3949)..(3949): n is a, c, g, or t
  misc_feature (3951)..(3952): n is a, c, g, or t
  misc_feature (3954)..(3957): n is a, c, g, or t
  misc_feature (3959)..(3959): n is a, c, g, or t
  misc_feature (3961)..(3966): n is a, c, g, or t
  misc_feature (3968)..(3968): n is a, c, g, or t
  misc_feature (3970)..(3970): n is a, c, g, or t
  misc_feature (3972)..(3978): n is a, c, g, or t
  misc_feature (3980)..(3992): n is a, c, g, or t
  misc_feature (3995)..(4000): n is a, c, g, or t
nannntnncngnnnaannnnngnnttnaaaaaannannntttttnncnnnntttttnnngnnnaancnnantnnanctattattgatgcgagccatccatttgacaaatacacaacagaaatttgtgtaaagattgctgagctagaaaatataaaatttagaaagtttatccgaccttcttggaagccaaaacctaatgataattggataacattaccgactttgaatnaggcagagaaaataattncgaatggatccaatgtgttcatagctactgggcgaagtggcttggaaaaattttctanacttactanttgtaaattttacataagangantgggtgacagaanagaacagtgttcgctaaaaaacggcgaattcatttatggagaccctccattttcaattgaacatgagataagtttatttgaatgccttaatatagntgttttgattataaaaaatgttgggggcaacggaagttttgcaaaagttgaagnancgcgcgcgatgaatattttagttttgatgatagataggccgcaaaggtctaatgcacttgtaatttcgtcagttttcgaaatattgaagtgggtggntactaatcaatgacggataaaattcttatagagactgatgagatactggtacaagcaattgatgcccttactttgcttgaaccccggtttgcacntgtcatagaacacactggcctgcccaagctacgttcaaggccagatggattcaaaactttactacaagcaattataagtcagcaggtttcagttgcagccgcaaatgccatttggtcccgattggacgttgagaatctgacagatcctaataaaatcctcaaagccactgaggatcgtctgaaaaaggctgggctcagcaggcaaaaaattaggtattcaaaagccttggccgcagcgaatttagattatgtagatctgagacaaaaaagtgatgatgaagttattaatatcttaactgaagtgcctggtattggagtttggacggctgaaatttatgcaatgtttagtttgaaaagggccgatatttttgcagcgggcgatcttgcattgaaggaaggggcaagactattattttcctttgacgaacggcccactgaggctgagctgagaaatctttcaaaaaagtggtcgccatggcggtctgttggggcacttctcctatggaattactatggttttaaaaaaaatagggaaggcgttgtatgacacgtgtattaaaatctaagcgtaccgaaccaaagtcaggtgatatacgctcagtcttggtttttctccatggatatggagcaaatggggatgatttattgggattagcagagcctttatctgagcatcttcctgacacactgtttgtttctccagatgctccagaaaattgtgcgggcagtccgatgggatttcaatggtttccaatcccttggatagatggatctagtgaggaggagagcaaaaagggcatgatctctgcagtggatgatttgaatgcgtttctcgacgccctaatggtcgatgaagacatattgccggaacaactcgctttgtttgggttctctcagggaacaatgatggctttgcatgtcgcgcctcggcgagaagatcctattgctggtgttgtcgcaatttcaggcagactgttagaaccagaacttcttgttgatgaggcagtaagtcacatgccagttatgtttgtgcatggggacgaggatgatgtcgtcccgccacaatcaatgccacagggagtggaaggattacaggccgcaggcttcaaagatgtttatgctcatattcaaaaaggtactgggcatggtattgcacctgatggattaggtgtttctttggcctttttgcgtgatcagttaggcttttaaatggtggaaatatatttttgaattttaaataacgtgccacaaaatgggggttgtcacgagctcaactcaatatatagttataanagactgataatgattgcttgagggacactggtatggaggcagactttaggaatgaatttgtaagacatcctacatctaccaaaaacaacccggcattggttctgaacgctgattatagaccgctttcatactatccactttcattgtggtgttggcaggatgcagtaaaagccgcgtttatggatagggttgatattgtggcagagtacgatgattatgtgcatagtccctcaataagtttaaaaatcccttcagtagtagtcttgaaagactacgtaagacctcaaaaaaaagttgctttcactcgtttcaatctttttttgagggatgagttttcatgccaatattgcggttccaagggtgatttgacgtttgatcacgtggttccaagatctcaagggggtacaactaattgggctaatgttgttgcggcgtgtagcccatgtaatttaaagaagggatcaaaaagccttcaaaattcgggcttgcatttaaggcgtaagccggtacgccctgagcctcatcaaatgatgaatgtcggaagaaagttcccgccgaattttttgcatgaaagttggatggactttttgtactgggacgctgagttggatgcataacaagttttattttctccttgctataagataggttaattaaaaactaatacggtaatatattaccattattgtaanctattgtttttattaatttatatttattcaaatactcttgacctcagtaatattggcgatataagcctttaattaagtttagaaaaataatgaaatcaggtggtattttaatgaagacatatactgcgacccctgcagatatcgaaaaaaaatggatattagtcgacgcagacggaatagtactaggccgattagcttcgatcatagcaatgcgtctgcgcggcaaacataaaccctcttttacacctcacatggactgtggggataatgttatagtcataaatgctgaaaaaattcagatgactggaaaaaagagagaagaaaacttctattggcacactggccatccgggcggtataaaatccagaactaaacaacaaattttagatggcgcccacccagagcgtgttattactcaggctgtcaagcgtatgctaccgggtaataaattgagccggcagataatgacaaatctcagggtatatgctggatctaatcatccccacgaagcacaagatccaagtgttttggacgttaaatcaatgaattctaaaaatacacgggtgacaaactaatgagcgaagatttaaaatcattaagcgatctggatgtaagtccatctgacgatactacggctgttgaaattgcagcccctagagttgctattcgtgatgatctgggtaggtcttacgccactggtaagagaaaagacgcagtcgcgcgcgtatggataaagccggggtccggtaagattgtggtgaatgacaaagagatgaatagttatttcgccagacctgtgcttcaaatgatccttaggcaaccttttcaggttgcaggagttgaagaccagtttgacgtaagtgcaactgtgaaaggtggcggcttatctggccaagctggtgcggtaaagcatggtatctcaaaggcattgcaattgtatgagccatccttaagggctgcactaaaatctgctggatttcttacacgcgatagtcgcgttgtggagcgcaaaaagtttggtaagcgaaaagcgcgccgctcctttcagttctcnaagcgntnatntttnacatncacntntannaannannnnaaaaaaaanancnnntnncnnaaannnagnnnntttttntnnnnnnncnnntnnnntnnnnnnnntntntntnnnnnnnngtntntnnnnnnnnnngcnnnntntnnnnnngngnananantatatnnttttntnnaaaanngtgtgnnatatntnnnnnnnnnnnnnnnntnnnananntnnnntntnnnnnntntntnnnnnnngnnnnnnnnnnnnnacnnnnnn

SEQ ID NO: 1247 - DNA, 4000 bp, Escherichia coli
  misc_feature (701)..(701): n is a, c, g, or t
  misc_feature (830)..(830): n is a, c, g, or t
  misc_feature (854)..(854): n is a, c, g, or t
  misc_feature (1302)..(1302): n is a, c, g, or t
ttgatgaaaaattccaagatcaggtcaaaaaaggatacatagaaaagattgacattaaaaaagaaaatatttatcgaaaggacagttactttctcagttattttccagtagtcaatagaacgaaagacacctcaagtcttagaattgtatttgatgcaaaagctaaagacaagagtggaagttctatgaatggagcaattgagaaaggtccaaatagattaaatgacttgtttgcaattctgttaaggttcagaagatttcattatgcttttacagctgacatcagtgaaatgtttcttaggatcagattaactgaagctgataaaagataccatagattctggtggaatgaaaacttctggcaatggaacagaattttatttgggaacagggctagcccagatattagccaaaaagtcattacaactcatgctttaaaaatgaaagagagttatcctgaagcgagtagagctctaatcgaagacacatatatggatgacacaattgtcagccgtcctagcgaggaggaatgtgttaagattgtagagacactgccaaaggttacagaaggaatggatatgaaaatccagaaattctattctaactcgagattagctcttaaatctcttcctgaaaatttgttgagcacaaaagtccactttagcgataaagaggaaatttttgattcaaacaaagttttnggaatggtttgggatgctaatacagatctgataacttataatgccaagtataagaatgcagatcagtttatagaagcaatgagtttgaaaaaagtctctaaaggagattggactaagagattaattttncggcttagtgcaaccgtgtacgancctttgggtctaatctcaccattcaccattagagctagaacaattttgcaagctttatggggagaaaatttagaatgggacactccagttccagaaaaatttatatctctatggaaagcttggctagaagaattgtttgaactaccaaattttatcaagatacccaggcatttaggattcggaatcaataataagattgaattgcatgtgtttgttgacgctagcactaaagtgtttgcggctacagtctatgcaagaatcttagagatgcgagaacctaatgatcttgataatggtgtcactgcaaggggggaaaatcagaatcattgtattgcagtaacactcattacggcaaaagccagagttgcacctaccaagacagagtctgttagccgccttgagttagcagcatgtgtcattggtacaagattaggattgacagttgctnatgctttggacttagataaaagcactatcacattttggacagattccacaaattgtttgtattggataaattccccatccagcaatttaaaaacatttgtttcaaatagagtaggtgaagtccatacgcatagcaatcctaatcaatggaagcatattccaactgatataaatccagctgatattccaactagactaccaaagatctcagacttagctgataattcactttggtggaatgggccacgcttcttgtctgattccatgacaagttggcctaagccatttgttccaccaactgaagtggacgatgaagcaaagaatgagttcaaaaaactgttcattggcaatatagacatagctcaactaggtctattagatccatgcagatacagtgtaggaaaagtttggaatggctttgatcaacttataagtttggcatcagaaatatttaagctagcaaacccaaggagagattttcctagggccaataagttagcattacaatttctgataaggagatcacaagctaatagtttggatttacaagaaattatgcatcaattaaggactgagaaacagatttctaaaccgtatagaagtttcttgccattcatagataaagcaggtattctaaggtcaaaaagtaggctagcaaatgttgactacttagactacgaggttaggtttcctgcaatccttgatagacaagatccttttactagactcatgattcgctcttttcatttcaagtttgcacatacagtagggaatgactgttgcaaagcagaaataagcaaaggctatgtcatgataggtttagaaaactatcttaaaacagtaaaatcaaaatgtctcgtctgtcagagatatttagcaattccactaagacaacaaatgtcagcgctgcctagttggcgctttcagaagcctttacgggcgtttgcaaagtgtggcttagattttgctggtccttttgaattaaaagcaataggtagaggtaaagctagaccgaaaacttaccttttactatttacttgtctgcagactcgagcagtacatttggagttgactgaggcaatgtccatgtcagctactcttaatgcgatatcacggtttgtcgatattaggggtatgccaacatccattctctcagacaatttctctactttcgtttctaaggataaggatttagaaaattgggtaagaacaatacagttagatgatctaatctctactactaaagccaaagttcaatggcactttatccctcccaggggacctcatcatgggggtgtgtatgaacgtatggtaggggtagctaaaagagctctggaaagtctgtgccactattcagacctaactgtggatgagtttcggactatggcttataaagtggcaaatttagttaacagtagaccactgagtagactttcacttagtgagggggatctcatccttaccccaaatcactttctttttggaaatcttggtggtagtgtaactgttgaaaatattacctcacattcccaaaggtggcataagatttgcgaacttttagaccaattttggagtatcttcttggaaaagactttattggaacttaggaataccaaaaagtggcaagtagaacagactcaattggcagaaggagatctagttgtagaaattgattctacccagccaagaggttgctggaagctagctgttgttgagcaggtccatccttctgatgactctaaagtacgcaaagtcacaatacgtaacagtaagggtcagtacatcagacccattgtgaacttaataccacttaaacaaaaagttatttaggggctctgctgaagtagctaattgtaacccgctaaatagcgctagatagaacataaagttcctaattcttgttttatctagataagcaaatttcatctttgcattttttaatttactttaaattactgcaaagctagaactcaggcgttcgcgccgtaggctgggttttagcttgctaagcttctgtgtgatcatttcaattttttgtctcttgacaataaactgacatgacataacagaaggagatgaaactttgcattcagccaaaaatctgtgacattaatttagaataagttagagaagttgccaagctacaatggcaactacgggaagcttattctcagaaaattaattttggctttatatttgcagatgtcggatcagcagtcctctccgcaagaggggccaggatcaaggcgaaagccgtggacctatgggcgtccatggacctaccacccaggttactggggtcctacggaaccctggaaggcaccttattatgagccttacggcccacaatggggacctcctcccagagttccaccccctaattacaattaccaatattatcagggtaatcaagctcagagcgctagtcatgggaagcctcaaacacagatcgctcctaagagctcagctcagtctgggcctaagaagcgaaaagtggctgaagttgctttggtgtcacagcctaaagcaggttcagcaaagacttccagccgtcctatcaagtctggcaagcaaaatcctccgccacaggctgtacaagtacaggctgcaaagaggatggagtcttttgccaaacttaatcggaaggctcaactttaccaagcagctatggaacgctttcggcgaagtctggtttacca

SEQ ID NO: 1248 - DNA, 4000 bp, Escherichia coli
  misc_feature (525)..(525): n is a, c, g, or t
  misc_feature (3909)..(3909): n is a, c, g, or t
actgtctcttttaggccgtgatcaaagcactacgtgcttcatcgagcatcgcccgaggttcacacagacattgtttgatgaatcgtgctttgaaactgcaccggtcgtcaccgttacaaaactgggcttggcgcaagaatggagtgtctctatcgccttccggctggcatggtcactgcaccaaagtccacttttagaggaagccattccatcattgaaagtcttcgatgaaggccaagatcttggtgttggactttcaaaactcaccgttttttcatggaatacttcctatgcacttgaattgaaaccccttgttttcgaggacctgaccttgccaattggctcaaccgaggggcatcatttctgggttcatcgcaacgatgtccttcacctgagtgttgaactcgttcacgccggaacaaacatcgcggcagaatacacgccgaatcaaatttccattgacatcgtgctttccgatggggaacggtccatttcatcgagcgtcacagtggaccagtctggcantggacaccaatccattcagctcaatgaaacgatcgttaagcacaacttgggcttcattgatgtgattgttgacaatgattttattcagcacgatgaacggtttaattttacaatcgatcggtattcacctcaactcactgtgcctccgggaacgttggccattgttgactctgacatgctgagcgctcaagacatcattgttatcctcagtgatcaagagggtctcggtcagcatccagtcacaatgcactggacctttttgcggctggggcaacccattgaaggcagtgaaggaagcgcagaagttcctctatccgcaggcactgggaccaccaacacttactcaggaacagtggatatgcgtccaaatggttcagttgcccttgaacgaactgaccggttatcggtttggttttcagcttcagatctcgcaggaagggatgtttccgggtttggaacgagcagtattccattatcacccgccttccgttgggtcgctttcgagccacggtttgacaacattgtcgtgactccttacaggccgattgttggggaaaacatctcaatttttgttcgagtggccaatgaaggtcttgtcaatgggagcgtgacagttcatcttgtagacgcagacggtcgaattttggaatcaaacacatctgaactcgtaccaggttcctgggcggaacacacatggagtctagaaccatggacgacagggcggttaggactgagtgttgttcttgttgatgtgacaggaaatattcctttaccaatgggtgaggttcaggctcaaccagattcgcgcaggggtggcctagacagccttggatttgcagtgctggtcgtcattcttgccgctggcgtcttggcctttagcgtataccgccgccaagaaaagatggcagactacacccgaaaacaggtggatgccgttctattcgctcagaatctccccccgccaaggcccaaagatcttgaccactttgatgaagagcaatagtcaagaacaggaggtccgagcgtgggacacaagccggggttcccgagcggtcaaagggggtggactcaagatcctctgcgtaaagcttcgcaggttcgaatcctgcccccggcactctcttctctaaacgtcacactgcgttggataatattcaacaatgagggtccttttacgagattcttttttcgaaacaaagactgccaattaacctgcttcagcgattcacaagggcgttttgatccccattgcccgtacgacacaccagcctgcgcgggcttcaaagattgagaaagcgcctcctgcgagagcaccaacagaagcaatccaccaaaatgaaccgcttattgttccacttgctacgacgccgagcaacaatgctcctccagcaacggcggctataccgcctgtgaggcgggctacttttcctttagcgtcaatgttgcattcgagtgccatgacaacaactcaatcctgtggatatatcaagggatgttttttcaaatgggcaagaaacccttacttttttgctaaaatcgcatcaacgagaggagtgaatgttgcaccatgcggatggggcgaaaccacgtctgcggcctccttgacttgttcaaaagcgccacccaccgcaaccgaccagtgggcgaattcaaacataggaagatcgtttggggcatcaccaacgcacaacacatcttcagcagcccagcccatcttttcgaacatgacctccaaaccggttccttttgacaagtgtggctccatgaggtgaattgcaaatccagtgcgaactacagacaaatgggaccattgacttccagcaatacattgttgaaccgcttcgaggtcttcatcaggaaacagacaccactcactttcccgccaagtgttggtttcaattcctgcaggatcaaggccttcgatttgggtcgagagccattctgccgccatcttggcttcttttccatcagctctcacaattggtcccccccaggctttgtgccacagaacaccaccgttttcgcagcatataggtccagagagtttgagaaacctccacaaaccgtaggtgatggctcgaacgtttcccgtcgctaaaacaacaggtattccagcgtcttctaacctccgtagcgctttgattgccccagtgtcgagttgtttatttccatcggtaagggttccatcaatgtcgacggccacgaccttaggacgccaaccttgggggagccactgcataaccttgcgaagaaggaagttggcgtaaagattggcgttcttcgtgaatatggctgagcatattgtaggtctcaaagggcaggcattatttgtgtagggcttaacccattcatatggtcgaaggggcggaagacgaattctttctctcccttgaggaagatgaacccgcagccaaggttgtgaaatcaaaaccaacccctcaaaaaaagaaaaaaccaaagaaaagcgctccaaaagcggaagtcgccccccccactcttacagccgaacttgtcgacacctctgtggtcgaacaagcgacggggacctacgaactcggctggccattgcttggaatggactgtcctgattgcgccagcaaggccacgcgggctttggacaccttacaccaagcgaacgacatccatgtctctgcaacagcagggacggtccgtttcaaaattgaccttgagtacggccatgtggccgaggtctcttccgttcttcgttcccttggtcacgcaccagacgttgattaccttgaattggcgggagcgaaagcaacaaccatcgctcgccgaaatggaatcgatcgccgaaaattaaccaaattgtttcgccaacagccgggtgttcttgatgtggaaatcagcgacgatgaccggattatcctccagttggctccagatgccacgcctgaattgtttgataagcgcaatcgggcattggaacatatatcgggaatgaaggtcaatctcgttccgactcaatccaatcgaattcgtcccgaccagtggcgtttgatcggtggaggcattgcattacctcttctcgcccttgtgattattggggagcttttaggatggcctcattatgttcttggtatcattgccttacctggtttgctgattggaggcatgcagatgttcaaagaagcattagcaagtcttgccaatcggcaaatgggattccaagtgctgacaagtcttgccgtcattggcgctgccatcttaggcatgtgggaagaagcgttgattgtcgctattttggtagcgttcaccgcccatctcgaaggggatgcgctcttgcaagcgcgcaaagctatgcaaggcggacttgaccgcttaccgcgcaaggctcgaaaactcacaggtgcttcaactccntcagtaacaggcattgaatcagccgtcaaagccggagcattttcgctcacaatggcggcccctgccccactcataggtgcagatggctgtg

SEQ ID NO: 1249 - DNA, 4000 bp, Escherichia coli
  misc_feature (1985)..(1985): n is a, c, g, or t
  misc_feature (1989)..(1989): n is a, c, g, or t
  misc_feature (2011)..(2011): n is a, c, g, or t
ctgcttatgggcaatggctatctgaaaacaacaaagggcccttaactgtcgtcactggtcgtgatgcccgcatttctggacctatggtacattccttggtcaatcaaactctactagggatgggaataaatgtgattgatttgggtctttctaccacaccaaccgttgctgttgctgttccctgggaaaaagctaatggtggcattatactaactgcaagtcacaatccaaaagaatggaacgcgttaaaactcttgaacgctgatggtgaatttattaatgcgactgcaggagctaaagttctagaatacgcagaaaaagaagctttcaattatgctgaagtggatcatttgggcacactcaaagaacgctcagattatattgaaaaacatattgaggctacgttggcaatagatcatgtaaatcttgagggaataagaaagcagaaatttaaagtagtagttgatggtgttaattcctctggaggtattgccattccagagctgttaaatgcgcttaacattgaagtagttaagatacattgcgaacccaacggacatttcccacacaacccggaacccttaaaagaaaacttaactgacttatgcaatgctgttattgagcacaagtcaaattttggaattgcagtagatcctgatgtagatcgtttggtgtttgttgatgagaaaggggagttgtttggagaagaatatacccttgtggcttgtgccgattatattttaagtaaaacccctggagctaccgtctcaaatctatcttcgacacgcgctttagccgatataacgcaaaaacatggatgtagctatactgccagtgctgtaggggaagtaaatgttgtcactgaaatgaaagcggttcaagccgttattggaggagaaggaaatggtggtattatttatcctcctctgcattatggaagggatgctttggtgggggttgttttgtttctatctcttttagtagaaagaaaagtaaccgtttctaaacttcgagctgcctacccaagttattttatgagtaaaaataaaattaaactgaaagagggcatggatgtagacctactgttagatcaaataagagagcgttatgcaaaagaacgtatatcaacaattgatggagtaaaaattgattttgatgcagcctgggtacatctacgaaaatcaaatacagagccgattattcgaatatacacagaggctaaatccgaactgaaagctgttgaattagcaaatcgatttgtaaaagaaattaacagtttgctttaagaattttttgcgtgcttaaaccttttatgagtccaaaaatattgagagggatcttcttttatttgagattctaaccactctgtataagtatcagttatggcgttaggtggcaattggttgggagtatctgtcaataatttaaattccacttcatagtatcctcgtttaattctattcatttttccaaaaacaacaggaatatcaaactctcttgccatccgttctgcaccagtataaacagggacatgaacccccatgaaagaacgccaataggctaggggttttgggcgtggggattgatcactggcaaaaccaaatacaccacgctcattattatcctccatctgttttatctttttcgaagcagttctttgtgagatcataaaagcatcgtgtctgcttcttatttttcggattaaatcatcaaaatatggattactaataggagtataaattccataacccttatgcttcatatgatatcctaaagacatcatccattcccaacttgcgtaatgaccgcacattagaaatacggaacgattttggctttcaaattgcgttagcacttctatgttttttacatgaaagcgttttatcatttcatctttagacattcccattgattttatgatttctaaaaacaaatcacataaatgggaataaaacttacgttcaataaacatcaattcagagtcngtanaagaaggaaaagctcgttttanatttgaacgaactactgattttctgtacccaaaaacacggtacaaaataaaacaaaccaaatcagacaacttataaaatagaggaaatggcaatcttgaaatcaagaaaagaatagggtaggctaaataatatattaatgcattcacagtattatttaattattgatcaaaattacttttttctatttaaatctgttgataaatacctttaaaaagaaattcatttcatttatatatataacaaaattgaatacttttgttatatatataacataataatcttaaactttaatttaatgaaaaatattttagtcctcggaatggggaaggtgggaagcctggtaggcgttttactaagcaggaattttgaagttacagcattagatcaaaaaaaaccacattatgattacaacttgccttttgaatgtatcgaaggcgatgtaaccgatataggattcatgaaaaatctaatgaaagattacgatgccgtagtttccgctttaccttactttttaaataaagaaatagccattttagcacatgaattagaattacattattttgatttaacggaagatgttcctaccactcattttattcaagccctcagtgaaacttcaaaaaaagtaatggctcctcaatgtggattagctccgggactgattggtattgtaggtaaagatttaacgtcaaattttgacacgttacgggatatagaattacgagtgggtgcgttaccccgctatcctaatggacagttagcttattcattcacatggtctccccatggtgttattaatgaatatttgaatgacgcagaagcaattcataatggacaaagaaaaaacgttccttcattagaagggtttgaatacatcaatattgaaggacaagaatttgaagcctttacaacctctggaggacttggaactctttgtgaaacttttgatggaaaagtagataccttaaactataaaaccattcgctatcctggtcatggaaaattaatgaagtttttgatgtacgagcttattttaaaagatgacaaagaacaattagaacaaatattgagtaatgccaaaccgcctgtagaagaagacgtggtatatgtatatgctgttgtagagggctggcaaaacaaaactctgtcacgtaaggaatattacaaagctttttaccctattgaaattgaaggtaaacaatggagagcaatatcctggactacggcagcatctctggttgcagttgttgaaatggtcgccgcagggacgctattacaaaaaggttttttgaaacaagaggaaattccatttgataaattcttaaaaactcaaacaggaagcttatttttatgacaaataatttacaatgaaatttaatacctcaacaacaatgacgaaaattttggacgcgctcttcactgtttattcagagcgtgtgccagatgtaaaaaaaatcacttctgagatggttaataaaggtatggttaaggatcaaagtgagatcatcaatgaccacattgcttttaggactatgggggttaaaaatttaggtattgcttcttttgaaaaaatatttttagcccatggttacgaaaagaaggattactttcattttgaggttaaaaaacttgatgcgcactggtatgcaccgcctacacctgatttacctaggatttttataagtgaacttaacgttagtttactctcaaataagactcaggaaattatcagaaaatataccgacaccgtaagttctgaccctgttgatcaactaaatttaaatgatgtagaagtagtttcaaaattctttcaaacccctctttggccattacctaacattgaagattacgaagccttactgactgagagtgagtatgctgcatgggttatttacaatcgatattatctaaaccattacaccatcagtgtccatgatcttcccgacgcttatgcaaaactggaaccgtttaatgactttttaaagtct

SEQ ID NO: 1250 - DNA, 4000 bp, Escherichia coli
  misc_feature (3549)..(3549): n is a, c, g, or t
  misc_feature (3579)..(3579): n is a, c, g, or t
  misc_feature (3789)..(3789): n is a, c, g, or t
  misc_feature (3826)..(3826): n is a, c, g, or t
  misc_feature (3910)..(3910): n is a, c, g, or t
cattggtattagcctctgcctcctctttgctctgaaaccggggagtgcccttgtaacacacctgggtgaattaggaatcatgcgaatcattacgatctatatcatcctaatccgtctgtgtgcatgctctcttgattgggcaaaatgaattagaattagtcaaatattaatccagacagctttatctcaaagccaactacttttgttcttatcctaaaattttcaagaaccttagaatctaactctccgatataaccaactgtctttttgttagcaacaatttctgcaactctgccttgagaaaaaagcgtatgctttgagagtgtcttcgtttcacacttgatgttaaaaccaattcgcaagagcgattgtaacactgccttcatttctgaaaagtttgtctcctccgaggcggtgacgcacgcaagacttgttgtttccttgattggtgaaccttttgaaaaagctatacctgactcgaaaaatttttggggatatgtttcatgtatgttttttgacaggttctccaacagaccaggcagtatagagtctctaaggattgtatgctcctgacttttcgaacttgtgacagaaattatctgtgacgaatccctgtttgtcatttcgtgtaaaattcgttggcttgttaacgtgtaatttagagtttccataaaaccaaaaccagtcattagtctgctaatggagtcaagtttctcagacgttgcatttttctcaccaatgtgcacagatgctggccatgctggttttagattatcaattccataacccagtgcaacctcctcaacaatgtccattccaccaaagatatcaaacctgtatcttggaattgtacactgtatttttttgcctttcattactgcatccagcctgcattttttgagacacgatacaagcatcgagccggagatgctcagtccaagaattttattcacagggtcggcatcaaacgcaatggttcttgtcgcaaagcttggcgtcgagttcttcgagccagaaactttcatctgtgagaattggaatcctgcgccttggagtatcataacaacaactgataacatatcctcagctgactgcttgtctatgccagtgacttcgactagaatgtttttggtttttgttgttaccgttgtcaacgaagcgttgatgattggaggaaatgatattgtttgtccctttgcatcaataattataggaaccttggtagattgtccaagtattgatccatagtcccttccaacttctgaatcctgaagaatttctgagattgagctctctttagtagagtttaacggaacaaacctatggtcacgagaagttgttgtatacttgagcgggaatgatattctgtctaggtcatgaattccaattgatgatttttttctcttcctacctaatccaaaatgcaaatcctcctgcatgttaataatctgcttaactgcttcatcgtcaagcgagccatttcttgcaattatcccggtaacaaacggcctaatcttgctcgttgaactgtcaaccttgatttcataatttcccttctttcttatgttcaatcgtagcattcccttgcttactcccaagatgccttgtaatcctaatgcaatgccaaagtcagtggaatagtctggtctgttgggactgtattcaactcttacaatgttgcgtcccaacgattctatatcaagaccaagaaatggcaggctgtcaagtatttgcttcttgtttgtattttttcctataagtttctgaagcctgctaagactcagctcaactactggcatttcgtagcagtcctcaaccaacttagattgttattgtaaaattcccttacgtcgtctaatccaaattttaacattgcaattctttcaatgccaccaccccaagctagaacgggttttgtaattcccaatggttttgtaacttctggtctaaatattcccatgccaaagagttcaatccattttccaagcttctcattgtaaaccatagattgcaacgagggctcagtataaggaaaaaatgtaggccaaaactttactttagtgagaccaatcttgcgataaaattccttttgtattcccatcaagtctcgtagtgttatgtgctttcctacaaccacgccctcaacctgattgaattcagctaaatgcttgaaacttaatttttcattgcggaaaactcgtcccaatgaaaatatcctagcctcatctggttttttgtctgcaagatgttttatggtaacacaagtagtatgtgttcgcaggaccattttttttgcttcctgtatatcccaatagtatctccacccctttttgtgggcatttgatacattcttaatttgagttggtgttgcaagctgttttgcattaagatctttaagataaaatgtgtcttgtagttctcgagcaggatgatcctgtggagtaaataatgcatcgaagttccaaaaacttgactgtgacaagtttccagtaatttctgtgaatcctagatggacaaaagtatccctgatctcatttattgtgtcctttagtggatgtatccttgcggcatgtacatgaggtacgtcagcctcaacatcgattgctccactatctaatttttcaagatcaatatgtttaccagtttcagaaagagagactgtttttgtcttttcttcgtgcttaattatgaagtctggcctttctatcagggagttgattgttccggtatagtgcagacgttctgcctcttcagcagagacttttttttcgccaataaaatcgattgtatttgggaaagtattccaagtagaatttcctataggattttgctttaatgaaatctttgatccagtgtccgttttttctatatttatccagtcattcttttttgcattggcaattgccgcgttaaagtcaagtccatgcaaactgcttcgtatctcatcaaatgtttttggaccatcctgaacaagtgtcacaagtcttcgttcaggtaagccatttttcagagaatctaagccattttttccaaggctgtaagaaatgttagtagtgtcagttacatctgcaagttttttctgacgaagccactctactccacgcctaatttgatccattgagagtgtagctttctgggataactgttcctcagtcaaatttggagttgactgcaaaagcttgacaatttgtttttcaatgtcatgtagaacatgggacaatagttcatcattccaaaaagacttaattaaattagtaggacaattgttgcagtttttttgattagaaagtgatcataagaatgagataagactttttaacattaaatcaaagtcaactttgaatgccagcggatgattttgttgtcacaccttggaacgttgagggtgatattgattatgacaaattgatcaaaagatttgggacacaaaaaatcactccagctcttttatcaaaaattgaaaaattcaccaacgaatcacatttcatgctaagaaggggaatttttttctcacatagagatttgaacaggcttttggatgactatganaaaggcaagcaattctttctatacactggnagagggccttctggtcatacgcatattggccatctagtcccatgggtttttgcaaaatggcttcaagacaagtttggagcaaaaatgtattttcagcttacagatgacgaaaaattttggtcaaaaaaagacatgacgttagaaaaaacatcccagtttgcgcttgaaaacgcacttgatttcatagcattgggtttcaagccagaaaanactaaaatcattattgatacaaaaaacataaagacgntatatccaattgcggcagaagttgcaaagagaataaatttttcaaatacaaaagcagtttttggatttgaaaatgaaactaatnttggaatgatattttacacttccttacaatctgctccatgctttatagaagatatgcctgttttgattccgtttggagttgatcaagatc

SEQ ID NO: 1251 - DNA, 4000 bp, Escherichia coli
  misc_feature (1)..(1): n is a, c, g, or t
  misc_feature (3)..(4): n is a, c, g, or t
  misc_feature (9)..(9): n is a, c, g, or t
  misc_feature (11)..(12): n is a, c, g, or t
  misc_feature (15)..(16): n is a, c, g, or t
  misc_feature (20)..(22): n is a, c, g, or t
  misc_feature (24)..(28): n is a, c, g, or t
  misc_feature (33)..(35): n is a, c, g, or t
  misc_feature (37)..(41): n is a, c, g, or t
  misc_feature (43)..(43): n is a, c, g, or t
  misc_feature (45)..(52): n is a, c, g, or t
  misc_feature (54)..(57): n is a, c, g, or t
  misc_feature (59)..(59): n is a, c, g, or t
  misc_feature (61)..(64): n is a, c, g, or t
  misc_feature (66)..(74): n is a, c, g, or t
  misc_feature (76)..(76): n is a, c, g, or t
  misc_feature (79)..(79): n is a, c, g, or t
  misc_feature (82)..(82): n is a, c, g, or t
  misc_feature (84)..(90): n is a, c, g, or t
  misc_feature (94)..(95): n is a, c, g, or t
  misc_feature (98)..(100): n is a, c, g, or t
  misc_feature (103)..(106): n is a, c, g, or t
  misc_feature (108)..(109): n is a, c, g, or t
  misc_feature (111)..(111): n is a, c, g, or t
  misc_feature (116)..(116): n is a, c, g, or t
  misc_feature (118)..(119): n is a, c, g, or t
  misc_feature (121)..(123): n is a, c, g, or t
  misc_feature (125)..(125): n is a, c, g, or t
  misc_feature (127)..(127): n is a, c, g, or t
  misc_feature (129)..(129): n is a, c, g, or t
  misc_feature (131)..(136): n is a, c, g, or t
  misc_feature (138)..(139): n is a, c, g, or t
  misc_feature (141)..(141): n is a, c, g, or t
  misc_feature (144)..(151): n is a, c, g, or t
  misc_feature (157)..(157): n is a, c, g, or t
  misc_feature (159)..(159): n is a, c, g, or t
  misc_feature (162)..(165): n is a, c, g, or t
  misc_feature (168)..(169): n is a, c, g, or t
  misc_feature (171)..(172): n is a, c, g, or t
  misc_feature (177)..(177): n is a, c, g, or t
  misc_feature (179)..(181): n is a, c, g, or t
  misc_feature (185)..(186): n is a, c, g, or t
  misc_feature (189)..(194): n is a, c, g, or t
  misc_feature (196)..(196): n is a, c, g, or t
  misc_feature (198)..(198): n is a, c, g, or t
  misc_feature (201)..(204): n is a, c, g, or t
  misc_feature (206)..(212): n is a, c, g, or t
  misc_feature (214)..(217): n is a, c, g, or t
  misc_feature (219)..(220): n is a, c, g, or t
  misc_feature (222)..(231): n is a, c, g, or t
  misc_feature (234)..(242): n is a, c, g, or t
  misc_feature (244)..(244): n is a, c, g, or t
  misc_feature (247)..(251): n is a, c, g, or t
  misc_feature (253)..(256): n is a, c, g, or t
  misc_feature (260)..(262): n is a, c, g, or t
  misc_feature (265)..(265): n is a, c, g, or t
  misc_feature (268)..(271): n is a, c, g, or t
  misc_feature (273)..(274): n is a, c, g, or t
  misc_feature (276)..(277): n is a, c, g, or t
  misc_feature (280)..(282): n is a, c, g, or t
  misc_feature (284)..(284): n is a, c, g, or t
  misc_feature (286)..(286): n is a, c, g, or t
  misc_feature (288)..(288): n is a, c, g, or t
  misc_feature (292)..(294): n is a, c, g, or t
  misc_feature (299)..(299): n is a, c, g, or t
  misc_feature (302)..(302): n is a, c, g, or t
  misc_feature (306)..(309): n is a, c, g, or t
  misc_feature (312)..(312): n is a, c, g, or t
  misc_feature (314)..(317): n is a, c, g, or t
  misc_feature (320)..(321): n is a, c, g, or t
  misc_feature (323)..(323): n is a, c, g, or t
  misc_feature (325)..(325): n is a, c, g, or t
  misc_feature (329)..(329): n is a, c, g, or t
  misc_feature (334)..(335): n is a, c, g, or t
  misc_feature (337)..(341): n is a, c, g, or t
  misc_feature (343)..(344): n is a, c, g, or t
  misc_feature (349)..(350): n is a, c, g, or t
  misc_feature (354)..(355): n is a, c, g, or t
  misc_feature (357)..(365): n is a, c, g, or t
  misc_feature (367)..(369): n is a, c, g, or t
  misc_feature (371)..(372): n is a, c, g, or t
  misc_feature (375)..(375): n is a, c, g, or t
  misc_feature (377)..(378): n is a, c, g, or t
  misc_feature (380)..(385): n is a, c, g, or t
  misc_feature (388)..(390): n is a, c, g, or t
  misc_feature (392)..(393): n is a, c, g, or t
  misc_feature (396)..(398): n is a, c, g, or t
  misc_feature (400)..(400): n is a, c, g, or t
  misc_feature (402)..(403): n is a, c, g, or t
  misc_feature (405)..(407): n is a, c, g, or t
  misc_feature (409)..(409): n is a, c, g, or t
  misc_feature (411)..(413): n is a, c, g, or t
  misc_feature (415)..(416): n is a, c, g, or t
  misc_feature (419)..(421): n is a, c, g, or t
  misc_feature (423)..(424): n is a, c, g, or t
  misc_feature (426)..(430): n is a, c, g, or t
  misc_feature (432)..(432): n is a, c, g, or t
  misc_feature (434)..(434): n is a, c, g, or t
  misc_feature (439)..(439): n is a, c, g, or t
  misc_feature (441)..(445): n is a, c, g, or t
  misc_feature (448)..(448): n is a, c, g, or t
  misc_feature (450)..(455): n is a, c, g, or t
  misc_feature (457)..(461): n is a, c, g, or t
  misc_feature (463)..(469): n is a, c, g, or t
  misc_feature (471)..(477): n is a, c, g, or t
  misc_feature (479)..(481): n is a, c, g, or t
  misc_feature (483)..(484): n is a, c, g, or t
  misc_feature (486)..(486): n is a, c, g, or t
  misc_feature (488)..(490): n is a, c, g, or t
  misc_feature (492)..(492): n is a, c, g, or t
  misc_feature (494)..(499): n is a, c, g, or t
  misc_feature (501)..(502): n is a, c, g, or t
  misc_feature (504)..(508): n is a, c, g, or t
  misc_feature (510)..(521): n is a, c, g, or t
  misc_feature (524)..(530): n is a, c, g, or t
  misc_feature (532)..(532): n is a, c, g, or t
  misc_feature (535)..(536): n is a, c, g, or t
  misc_feature (538)..(539): n is a, c, g, or t
  misc_feature (541)..(541): n is a, c, g, or t
  misc_feature (543)..(547): n is a, c, g, or t
  misc_feature (550)..(553): n is a, c, g, or t
  misc_feature (555)..(558): n is a, c, g, or t
  misc_feature (560)..(562): n is a, c, g, or t
  misc_feature (564)..(564): n is a, c, g, or t
  misc_feature (566)..(568): n is a, c, g, or t
  misc_feature (571)..(571): n is a, c, g, or t
  misc_feature (573)..(573): n is a, c, g, or t
  misc_feature (576)..(585): n is a, c, g, or t
  misc_feature (587)..(588): n is a, c, g, or t
  misc_feature (590)..(593): n is a, c, g, or t
  misc_feature (595)..(595): n is a, c, g, or t
  misc_feature (597)..(604): n is a, c, g, or t
  misc_feature (606)..(606): n is a, c, g, or t
  misc_feature (609)..(613): n is a, c, g, or t
  misc_feature (615)..(615): n is a, c, g, or t
  misc_feature (617)..(618): n is a, c, g, or t
  misc_feature (621)..(622): n is a, c, g, or t
  misc_feature (625)..(625): n is a, c, g, or t
  misc_feature (627)..(627): n is a, c, g, or t
  misc_feature (632)..(637): n is a, c, g, or t
  misc_feature (639)..(640): n is a, c, g, or t
  misc_feature (643)..(649): n is a, c, g, or t
  misc_feature (651)..(653): n is a, c, g, or t
  misc_feature (657)..(664): n is a, c, g, or t
  misc_feature (666)..(673): n is a, c, g, or t
  misc_feature (675)..(676): n is a, c, g, or t
  misc_feature (678)..(679): n is a, c, g, or t
  misc_feature (681)..(687): n is a, c, g, or t
  misc_feature (690)..(695): n is a, c, g, or t
  misc_feature (697)..(698): n is a, c, g, or t
  misc_feature (701)..(701): n is a, c, g, or t
  misc_feature (705)..(706): n is a, c, g, or t
  misc_feature (708)..(712): n is a, c, g, or t
  misc_feature (714)..(726): n is a, c, g, or t
  misc_feature (728)..(730): n is a, c, g, or t
  misc_feature (732)..(733): n is a, c, g, or t
  misc_feature (735)..(735): n is a, c, g, or t
  misc_feature (737)..(738): n is a, c, g, or t
  misc_feature (740)..(748): n is a, c, g, or t
  misc_feature (751)..(755): n is a, c, g, or t
  misc_feature (757)..(757): n is a, c, g, or t
  misc_feature (760)..(763): n is a, c, g, or t
  misc_feature (765)..(772): n is a, c, g, or t
  misc_feature (774)..(775): n is a, c, g, or t
  misc_feature (777)..(782): n is a, c, g, or t
  misc_feature (784)..(788): n is a, c, g, or t
  misc_feature (791)..(792): n is a, c, g, or t
  misc_feature (794)..(801): n is a, c, g, or t
  misc_feature (803)..(815): n is a, c, g, or t
  misc_feature (818)..(819): n is a, c, g, or t
  misc_feature (821)..(821): n is a, c, g, or t
  misc_feature (823)..(823): n is a, c, g, or t
  misc_feature (825)..(841): n is a, c, g, or t
  misc_feature (843)..(843): n is a, c, g, or t
  misc_feature (846)..(850): n is a, c, g, or t
  misc_feature (856)..(856): n is a, c, g, or t
  misc_feature (860)..(865): n is a, c, g, or t
  misc_feature (867)..(867): n is a, c, g, or t
  misc_feature (869)..(870): n is a, c, g, or t
  misc_feature (873)..(874): n is a, c, g, or t
  misc_feature (876)..(880): n is a, c, g, or t
  misc_feature (882)..(883): n is a, c, g, or t
  misc_feature (885)..(891): n is a, c, g, or t
  misc_feature (893)..(893): n is a, c, g, or t
  misc_feature (895)..(898): n is a, c, g, or t
  misc_feature (900)..(903): n is a, c, g, or t
  misc_feature (906)..(908): n is a, c, g, or t
  misc_feature (910)..(911): n is a, c, g, or t
  misc_feature (913)..(917): n is a, c, g, or t
  misc_feature (921)..(927): n is a, c, g, or t
  misc_feature (930)..(931): n is a, c, g, or t
  misc_feature (933)..(933): n is a, c, g, or t
  misc_feature (935)..(937): n is a, c, g, or t
  misc_feature (939)..(939): n is a, c, g, or t
  misc_feature (942)..(943): n is a, c, g, or t
  misc_feature (947)..(954): n is a, c, g, or t
  misc_feature (956)..(957): n is a, c, g, or t
  misc_feature (960)..(960): n is a, c, g, or t
  misc_feature (963)..(967): n is a, c, g, or t
  misc_feature (971)..(976): n is a, c, g, or t
  misc_feature (979)..(979): n is a, c, g, or t
  misc_feature (982)..(987): n is a, c, g, or t
  misc_feature (989)..(992): n is a, c, g, or t
  misc_feature (995)..(995): n is a, c, g, or t
  misc_feature (997)..(997): n is a, c, g, or t
  misc_feature (999)..(999): n is a, c, g, or t
  misc_feature (1002)..(1003): n is a, c, g, or t
  misc_feature (1005)..(1006): n is a, c, g, or t
  misc_feature (1009)..(1019): n is a, c, g, or t
  misc_feature (1021)..(1027): n is a, c, g, or t
  misc_feature (1029)..(1029): n is a, c, g, or t
  misc_feature (1031)..(1032): n is a, c, g, or t
  misc_feature (1034)..(1035): n is a, c, g, or t
  misc_feature (1037)..(1037): n is a, c, g, or t
  misc_feature (1039)..(1040): n is a, c, g, or t
  misc_feature (1043)..(1046): n is a, c, g, or t
  misc_feature (1048)..(1048): n is a, c, g, or t
  misc_feature (1051)..(1053): n is a, c, g, or t
  misc_feature (1055)..(1060): n is a, c, g, or t
  misc_feature (1063)..(1073): n is a, c, g, or t
  misc_feature (1075)..(1085): n is a, c, g, or t
  misc_feature (1087)..(1087): n is a, c, g, or t
  misc_feature (1089)..(1091): n is a, c, g, or t
  misc_feature (1093)..(1096): n is a, c, g, or t
  misc_feature (1098)..(1103): n is a, c, g, or t
  misc_feature (1105)..(1111): n is a, c, g, or t
  misc_feature (1113)..(1121): n is a, c, g, or t
  misc_feature (1123)..(1125): n is a, c, g, or t
  misc_feature (1128)..(1133): n is a, c, g, or t
  misc_feature (1135)..(1138): n is a, c, g, or t
  misc_feature (1140)..(1143): n is a, c, g, or t
  misc_feature (1146)..(1148): n is a, c, g, or t
  misc_feature (1150)..(1155): n is a, c, g, or t
  misc_feature (1158)..(1159): n is a, c, g, or t
  misc_feature (1161)..(1161): n is a, c, g, or t
  misc_feature (1163)..(1175): n is a, c, g, or t
  misc_feature (1177)..(1178): n is a, c, g, or t
  misc_feature (1180)..(1181): n is a, c, g, or t
  misc_feature (1183)..(1184): n is a, c, g, or t
  misc_feature (1186)..(1189): n is a, c, g, or t
  misc_feature (1191)..(1192): n is a, c, g, or t
  misc_feature (1196)..(1196): n is a, c, g, or t
  misc_feature (1198)..(1201): n is a, c, g, or t
  misc_feature (1203)..(1205): n is a, c, g, or t
  misc_feature (1207)..(1208): n is a, c, g, or t
  misc_feature (1210)..(1219): n is a, c, g, or t
  misc_feature (1221)..(1224): n is a, c, g, or t
  misc_feature (1229)..(1237): n is a, c, g, or t
  misc_feature (1239)..(1247): n is a, c, g, or t
  misc_feature (1249)..(1268): n is a, c, g, or t
  misc_feature (1270)..(1270): n is a, c, g, or t
  misc_feature (1273)..(1276): n is a, c, g, or t
  misc_feature (1278)..(1284): n is a, c, g, or t
  misc_feature (1286)..(1286): n is a, c, g, or t
  misc_feature (1289)..(1298): n is a, c, g, or t
  misc_feature (1300)..(1300): n is a, c, g, or t
  misc_feature (1303)..(1312): n is a, c, g, or t
  misc_feature (1314)..(1314): n is a, c, g, or t
  misc_feature (1316)..(1322): n is a, c, g, or t
  misc_feature (1324)..(1325): n is a, c, g, or t
  misc_feature (1327)..(1331): n is a, c, g, or t
  misc_feature (1334)..(1336): n is a, c, g, or t
  misc_feature (1339)..(1346): n is a, c, g, or t
  misc_feature (1350)..(1366): n is a, c, g, or t
  misc_feature (1369)..(1370): n is a, c, g, or t
  misc_feature (1372)..(1382): n is a, c, g, or t
  misc_feature (1384)..(1388): n is a, c, g, or t
  misc_feature (1390)..(1390): n is a, c, g, or t
  misc_feature (1393)..(1393): n is a, c, g, or t
  misc_feature (1395)..(1395): n is a, c, g, or t
  misc_feature (1398)..(1400): n is a, c, g, or t
  misc_feature (1403)..(1408): n is a, c, g, or t
  misc_feature (1411)..(1411): n is a, c, g, or t
  misc_feature (1413)..(1413): n is a, c, g, or t
  misc_feature (1416)..(1422): n is a, c, g, or t
  misc_feature (1424)..(1424): n is a, c, g, or t
  misc_feature (1426)..(1430): n is a, c, g, or t
  misc_feature (1432)..(1438): n is a, c, g, or t
  misc_feature (1440)..(1440): n is a, c, g, or t
  misc_feature (1442)..(1442): n is a, c, g, or t
  misc_feature (1444)..(1444): n is a, c, g, or t
  misc_feature (1446)..(1449): n is a, c, g, or t
  misc_feature (1452)..(1453): n is a, c, g, or t
  misc_feature (1455)..(1455): n is a, c, g, or t
  misc_feature (1459)..(1459): n is a, c, g, or t
  misc_feature (1463)..(1470): n is a, c, g, or t
  misc_feature (1472)..(1472): n is a, c, g, or t
  misc_feature (1474)..(1474): n is a, c, g, or t
  misc_feature (1476)..(1477): n is a, c, g, or t
  misc_feature (1480)..(1485): n is a, c, g, or t
  misc_feature (1487)..(1487): n is a, c, g, or t
  misc_feature (1490)..(1491): n is a, c, g, or t
  misc_feature (1493)..(1495): n is a, c, g, or t
  misc_feature (1498)..(1498): n is a, c, g, or t
  misc_feature (1501)..(1503): n is a, c, g, or t
  misc_feature (1505)..(1506): n is a, c, g, or t
  misc_feature (1509)..(1509): n is a, c, g, or t
  misc_feature (1511)..(1512): n is a, c, g, or t
  misc_feature (1514)..(1514): n is a, c, g, or t
  misc_feature (1517)..(1522): n is a, c, g, or t
  misc_feature (1524)..(1528): n is a, c, g, or t
  misc_feature (1531)..(1531): n is a, c, g, or t
  misc_feature (1534)..(1543): n is a, c, g, or t
  misc_feature (1545)..(1549): n is a, c, g, or t
  misc_feature (1552)..(1555): n is a, c, g, or t
  misc_feature (1557)..(1558): n is a, c, g, or t
  misc_feature (1560)..(1561): n is a, c, g, or t
  misc_feature (1564)..(1565): n is a, c, g, or t
  misc_feature (1568)..(1568): n is a, c, g, or t
  misc_feature (1570)..(1572): n is a, c, g, or t
  misc_feature (1575)..(1575): n is a, c, g, or t
  misc_feature (1577)..(1580): n is a, c, g, or t
  misc_feature (1582)..(1587): n is a, c, g, or t
  misc_feature (1589)..(1591): n is a, c, g, or t
  misc_feature (1593)..(1593): n is a, c, g, or t
  misc_feature (1597)..(1598): n is a, c, g, or t
  misc_feature (1600)..(1600): n is a, c, g, or t
  misc_feature (1603)..(1603): n is a, c, g, or t
  misc_feature (1605)..(1615): n is a, c, g, or t
  misc_feature (1617)..(1617): n is a, c, g, or t
  misc_feature (1619)..(1619): n is a, c, g, or t
  misc_feature (1621)..(1623): n is a, c, g, or t
  misc_feature (1625)..(1625): n is a, c, g, or t
  misc_feature (1627)..(1629): n is a, c, g, or t
  misc_feature (1631)..(1631): n is a, c, g, or t
  misc_feature (1633)..(1638): n is a, c, g, or t
  misc_feature (1644)..(1650): n is a, c, g, or t
  misc_feature (1652)..(1652): n is a, c, g, or t
  misc_feature (1655)..(1655): n is a, c, g, or t
  misc_feature (1658)..(1661): n is a, c, g, or t
  misc_feature (1663)..(1669): n is a, c, g, or t
  misc_feature (1671)..(1672): n is a, c, g, or t
  misc_feature (1674)..(1674): n is a, c, g, or t
  misc_feature (1677)..(1677): n is a, c, g, or t
  misc_feature (1679)..(1681): n is a, c, g, or t
  misc_feature (1683)..(1687): n is a, c, g, or t
  misc_feature (1690)..(1696): n is a, c, g, or t
  misc_feature (1699)..(1701): n is a, c, g, or t
  misc_feature (1707)..(1710): n is a, c, g, or t
  misc_feature (1717)..(1720): n is a, c, g, or t
  misc_feature (1723)..(1730): n is a, c, g, or t
  misc_feature (1733)..(1738): n is a, c, g, or t
  misc_feature (1742)..(1744): n is a, c, g, or t
  misc_feature (1747)..(1755): n is a, c, g, or t
  misc_feature (1758)..(1758): n is a, c, g, or t
  misc_feature (1761)..(1762): n is a, c, g, or t
  misc_feature (1765)..(1768): n is a, c, g, or t
  misc_feature (1834)..(1835): n is a, c, g, or t
  misc_feature (1839)..(1839): n is a, c, g, or t
  misc_feature (1865)..(1865): n is a, c, g, or t
  misc_feature (1987)..(1987): n is a, c, g, or t
  misc_feature (2008)..(2008): n is a, c, g, or t
  misc_feature (3035)..(3035): n is a, c, g, or t
  misc_feature (3037)..(3043): n is a, c, g, or t
  misc_feature (3046)..(3047): n is a, c, g, or t
  misc_feature (3053)..(3055): n is a, c, g, or t
  misc_feature (3057)..(3063): n is a, c, g, or t
  misc_feature (3065)..(3076): n is a, c, g, or t
  misc_feature (3079)..(3080): n is a, c, g, or t
  misc_feature (3082)..(3084): n is a, c, g, or t
  misc_feature (3086)..(3088): n is a, c, g, or t
  misc_feature (3090)..(3093): n is a, c, g, or t
  misc_feature (3095)..(3095): n is a, c, g, or t
  misc_feature (3097)..(3099): n is a, c, g, or t
  misc_feature (3101)..(3101): n is a, c, g, or t
  misc_feature (3103)..(3109): n is a, c, g, or t
  misc_feature (3112)..(3118): n is a, c, g, or t
  misc_feature (3120)..(3121): n is a, c, g, or t
  misc_feature (3124)..(3128): n is a, c, g, or t
  misc_feature (3130)..(3130): n is a, c, g, or t
  misc_feature (3132)..(3133): n is a, c, g, or t
  misc_feature (3136)..(3137): n is a, c, g, or t
  misc_feature (3142)..(3142): n is a, c, g, or t
  misc_feature (3144)..(3150): n is a, c, g, or t
  misc_feature (3153)..(3153): n is a, c, g, or t
  misc_feature (3156)..(3157): n is a, c, g, or t
  misc_feature (3159)..(3163): n is a, c, g, or t
  misc_feature (3165)..(3166): n is a, c, g, or t
  misc_feature (3168)..(3175): n is a, c, g, or t
  misc_feature (3177)..(3178): n is a, c, g, or t
  misc_feature (3180)..(3186): n is a, c, g, or t
  misc_feature (3189)..(3189): n is a, c, g, or t
  misc_feature (3191)..(3192): n is a, c, g, or t
  misc_feature (3194)..(3196): n is a, c, g, or t
  misc_feature (3198)..(3198): n is a, c, g, or t
  misc_feature (3200)..(3202): n is a, c, g, or t
  misc_feature (3205)..(3207): n is a, c, g, or t
  misc_feature (3209)..(3212): n is a, c, g, or t
  misc_feature (3214)..(3214): n is a, c, g, or t
  misc_feature (3216)..(3216): n is a, c, g, or t
  misc_feature (3220)..(3229): n is a, c, g, or t
  misc_feature (3231)..(3231): n is a, c, g, or t
  misc_feature (3235)..(3235): n is a, c, g, or t
  misc_feature (3238)..(3238): n is a, c, g, or t
  misc_feature (3240)..(3241): n is a, c, g, or t
  misc_feature (3243)..(3243): n is a, c, g, or t
  misc_feature (3245)..(3245): n is a, c, g, or t
  misc_feature (3248)..(3250): n is a, c, g, or t
  misc_feature (3252)..(3253): n is a, c, g, or t
  misc_feature (3257)..(3259): n is a, c, g, or t
  misc_feature (3261)..(3261): n is a, c, g, or t
  misc_feature (3263)..(3267): n is a, c, g, or t
  misc_feature (3269)..(3271): n is a, c, g, or t
  misc_feature (3273)..(3274): n is a, c, g, or t
  misc_feature (3276)..(3278): n is a, c, g, or t
  misc_feature (3282)..(3283): n is a, c, g, or t
  misc_feature (3288)..(3288): n is a, c, g, or t
  misc_feature (3291)..(3291): n is a, c, g, or t
  misc_feature (3294)..(3294): n is a, c, g, or t
  misc_feature (3296)..(3300): n is a, c, g, or t
  misc_feature (3302)..(3303): n is a, c, g, or t
  misc_feature (3305)..(3305): n is a, c, g, or t
  misc_feature (3308)..(3308): n is a, c, g, or t
  misc_feature (3310)..(3310): n is a, c, g, or t
  misc_feature (3313)..(3316): n is a, c, g, or t
  misc_feature (3318)..(3321): n is a, c, g, or t
  misc_feature (3324)..(3325): n is a, c, g, or t
  misc_feature (3327)..(3328): n is a, c, g, or t
  misc_feature (3331)..(3334): n is a, c, g, or t
  misc_feature (3336)..(3337): n is a, c, g, or t
  misc_feature (3339)..(3340): n is a, c, g, or t
  misc_feature (3346)..(3352): n is a, c, g, or t
  misc_feature (3354)..(3355): n is a, c, g, or t
  misc_feature (3357)..(3360): n is a, c, g, or t
  misc_feature (3364)..(3365): n is a, c, g, or t
  misc_feature (3367)..(3371): n is a, c, g, or t
  misc_feature (3373)..(3374): n is a, c, g, or t
  misc_feature (3376)..(3377): n is a, c, g, or t
  misc_feature (3379)..(3380): n is a, c, g, or t
  misc_feature (3384)..(3384): n is a, c, g, or t
  misc_feature (3386)..(3390): n is a, c, g, or t
  misc_feature (3395)..(3395): n is a, c, g, or t
  misc_feature (3398)..(3398): n is a, c, g, or t
  misc_feature (3400)..(3401): n is a, c, g, or t
  misc_feature (3403)..(3404): n is a, c, g, or t
  misc_feature (3406)..(3408): n is a, c, g, or t
  misc_feature (3410)..(3410): n is a, c, g, or t
  misc_feature (3412)..(3419): n is a, c, g, or t
  misc_feature (3421)..(3421): n is a, c, g, or t
  misc_feature (3425)..(3425): n is a, c, g, or t
  misc_feature (3427)..(3427): n is a, c, g, or t
  misc_feature (3430)..(3432): n is a, c, g, or t
  misc_feature (3435)..(3435): n is a, c, g, or t
  misc_feature (3438)..(3438): n is a, c, g, or t
  misc_feature (3440)..(3440): n is a, c, g, or t
  misc_feature (3442)..(3443): n is a, c, g, or t
  misc_feature (3447)..(3450): n is a, c, g, or t
  misc_feature (3453)..(3454): n is a, c, g, or t
  misc_feature (3456)..(3461): n is a, c, g, or t
  misc_feature (3466)..(3469): n is a, c, g, or t
  misc_feature (3471)..(3473): n is a, c, g, or t
  misc_feature (3475)..(3475): n is a, c, g, or t
  misc_feature (3480)..(3484): n is a, c, g, or t
  misc_feature (3489)..(3489): n is a, c, g, or t
  misc_feature (3493)..(3493): n is a, c, g, or t
  misc_feature (3496)..(3498): n is a, c, g, or t
  misc_feature (3502)..(3504): n is a, c, g, or t
  misc_feature (3506)..(3506): n is a, c, g, or t
  misc_feature (3509)..(3509): n is a, c, g, or t
  misc_feature (3513)..(3514): n is a, c, g, or t
  misc_feature (3517)..(3517): n is a, c, g, or t
  misc_feature (3521)..(3522): n is a, c, g, or t
  misc_feature (3525)..(3528): n is a, c, g, or t
  misc_feature (3537)..(3538): n is a, c, g, or t
  misc_feature (3540)..(3540): n is a, c, g, or t
  misc_feature (3542)..(3542): n is a, c, g, or t
  misc_feature (3544)..(3544): n is a, c, g, or t
  misc_feature (3546)..(3547): n is a, c, g, or t
  misc_feature (3549)..(3549): n is a, c, g, or t
  misc_feature (3552)..(3552): n is a, c, g, or t
  misc_feature (3554)..(3555): n is a, c, g, or t
  misc_feature (3557)..(3558): n is a, c, g, or t
  misc_feature (3563)..(3569): n is a, c, g, or t
  misc_feature (3573)..(3574): n is a, c, g, or t
  misc_feature (3578)..(3583): n is a, c, g, or t
  misc_feature (3586)..(3588): n is a, c, g, or t
  misc_feature (3590)..(3592): n is a, c, g, or t
  misc_feature (3594)..(3595): n is a, c, g, or t
  misc_feature (3601)..(3609): n is a, c, g, or t
  misc_feature (3612)..(3614): n is a, c, g, or t
  misc_feature (3616)..(3623): n is a, c, g, or t
  misc_feature (3626)..(3627): n is a, c, g, or t
  misc_feature (3629)..(3632): n is a, c, g, or t
  misc_feature (3634)..(3637): n is a, c, g, or t
  misc_feature (3639)..(3641): n is a, c, g, or t
  misc_feature (3643)..(3643): n is a, c, g, or t
  misc_feature (3645)..(3645): n is a, c, g, or t
  misc_feature (3647)..(3648): n is a, c, g, or t
  misc_feature (3651)..(3653): n is a, c, g, or t
  misc_feature (3655)..(3656): n is a, c, g, or t
  misc_feature (3658)..(3658): n is a, c, g, or t
  misc_feature (3660)..(3660): n is a, c, g, or t
  misc_feature (3663)..(3665): n is a, c, g, or t
  misc_feature (3669)..(3671): n is a, c, g, or t
  misc_feature (3674)..(3678): n is a, c, g, or t
  misc_feature (3680)..(3682): n is a, c, g, or t
  misc_feature (3684)..(3684): n is a, c, g, or t
  misc_feature (3686)..(3690): n is a, c, g, or t
  misc_feature (3692)..(3695): n is a, c, g, or t
  misc_feature (3698)..(3700): n is a, c, g, or t
  misc_feature (3702)..(3702): n is a, c, g, or t
  misc_feature (3705)..(3710): n is a, c, g, or t
  misc_feature (3712)..(3712): n is a, c, g, or t
  misc_feature (3714)..(3714): n is a, c, g, or t
  misc_feature (3716)..(3719): n is a, c, g, or t
  misc_feature (3722)..(3723): n is a, c, g, or t
  misc_feature (3726)..(3727): n is a, c, g, or t
  misc_feature (3730)..(3731): n is a, c, g, or t
  misc_feature (3733)..(3736): n is a, c, g, or t
  misc_feature (3738)..(3740): n is a, c, g, or t
  misc_feature (3742)..(3744): n is a, c, g, or t
  misc_feature (3746)..(3747): n is a, c, g, or t
  misc_feature (3749)..(3750): n is a, c, g, or t
  misc_feature (3752)..(3753): n is a, c, g, or t
  misc_feature (3757)..(3759): n is a, c, g, or t
  misc_feature (3761)..(3772): n is a, c, g, or t
  misc_feature (3774)..(3775): n is a, c, g, or t
  misc_feature (3778)..(3779): n is a, c, g, or t
  misc_feature (3782)..(3784): n is a, c, g, or t
  misc_feature (3786)..(3796): n is a, c, g, or t
  misc_feature (3800)..(3800): n is a, c, g, or t
  misc_feature (3804)..(3814): n is a, c, g, or t
  misc_feature (3816)..(3816): n is a, c, g, or t
  misc_feature (3818)..(3818): n is a, c, g, or t
  misc_feature (3820)..(3822): n is a, c, g, or t
  misc_feature (3824)..(3825): n is a, c, g, or t
  misc_feature (3827)..(3827): n is a, c, g, or t
  misc_feature (3829)..(3837): n is a, c, g, or t
  misc_feature (3839)..(3839): n is a, c, g, or t
  misc_feature (3841)..(3843): n is a, c, g, or t
  misc_feature (3845)..(3847): n is a, c, g, or t
  misc_feature (3849)..(3854): n is a, c, g, or t
  misc_feature (3856)..(3864): n is a, c, g, or t
  misc_feature (3866)..(3876): n is a, c, g, or t
  misc_feature (3879)..(3879): n is a, c, g, or t
  misc_feature (3881)..(3884): n is a, c, g, or t
  misc_feature (3886)..(3887): n is a, c, g, or t
  misc_feature (3889)..(3891): n is a, c, g, or t
  misc_feature (3893)..(3894): n is a, c, g, or t
  misc_feature (3896)..(3899): n is a, c, g, or t
  misc_feature (3901)..(3913): n is a, c, g, or t
  misc_feature (3915)..(3925): n is a, c, g, or t
  misc_feature (3927)..(3928): n is a, c, g, or t
  misc_feature (3931)..(3932): n is a, c, g, or t
  misc_feature (3934)..(3935): n is a, c, g, or t
  misc_feature (3938)..(3949): n is a, c, g, or t
  misc_feature (3951)..(3956): n is a, c, g, or t
  misc_feature (3958)..(3971): n is a, c, g, or t
  misc_feature (3974)..(3975): n is a, c, g, or t
  misc_feature (3977)..(3981): n is a, c, g, or t
  misc_feature (3985)..(3987): n is a, c, g, or t
  misc_feature (3989)..(3995): n is a, c, g, or t
  misc_feature (3997)..(3999): n is a, c, g, or t
ngnnggcgntnnccnngccnnngnnnnnggggnnngnnnnngngnnnnnnnngnnnnancnnnngnnnnnnnnncncgnccncnnnnnnngggnnggnnngcnnnngnncnccggncnncnnncngncncnnnnnngnncnccnnnnnnnngggcgngngcnnnntcnncnnccccngnnncctnnggnnnnnngngnggnnnngnnnnnnngnnnncnncnnnnnnnnnnccnnnnnnnnngnccnnnnntnnnngggnnnggnggnnnncnncnncgnnngngngngggnnntcttntgngggnnnngcngnnnnggnncncngggngggcnncnnnnngnnggcgnngggnncnnnnnnnnngnnncnngcncnncnnnnnncgnnngnnggnnngngnncnnngncnnngnngtnnncnncnnnnncncnccccncnnnnncgncnnnnnngnnnnncnnnnnnncnnnnnnngnnncnncncnnncntnnnnnncnncnnnnncnnnnnnnnnnnnccnnnnnnncnccnncnncncnnnnnccnnnncnnnngnnncncnnnccncntcnnnnnnnnnntnntnnnncncnnnnnnnncncgnnnnncncnnggnnccncnccccnnnnnncnnccnnnnnnncnnngcgnnnnnnnngnnnnnnnncnncnngnnnnnnnccnnnnnncnnggncccnncnnnnncnnnnnnnnnnnnncnnncnncncnncnnnnnnnnnccnnnnncnccnnnngnnnnnnnncnncnnnnnncnnnnnccnncnnnnnnnncnnnnnnnnnnnnnccnncncncnnnnnnnnnnnnnnnnncnccnnnnnccccgngccnnnnnncncnnggnngnnnnngnncnnnnnnngncnnnngnnnnccnnngnngnnnnngcgnnnnnnnccnngngnnngncgnnggcnnnnnnnngnncgnggnnnnncggnnnnnncgnggnnnnnntnnnnggngncncgnngnnggnnnnnnnnnnngnnnnnnncngnngnncngnnggnnnncnggnnncnnnnnncgnnnnnnnnnnncnnnnnnnnnnngngnnngnnnncnnnnnncnnnnnnngnnnnnnnnngnnnccnnnnnngnnnncnnnnccnnngnnnnnnccnncncnnnnnnnnnnnnncnngnngnncnnnncnngggngnnnncnnncnngnnnnnnnnnncnnnncgggnnnnnnnnncnnnnnnnnngnnnnnnnnnnnnnnnnnnnncnggnnnncnnnnnnncnccnnnnnnnnnncncgnnnnnnnnnngncnnnnnnngnngnnnnnggnnnccnnnnnnnncccnnnnnnnnnnnnnnnnnccnngnnnnnnnnnnncnnnnncnggngngcnnncgnnnnnngcncngcnnnnnnngngnnnnngnnnnnnncncncncnnnncgnngncgcnccgnnnnnnnngngncnnctnnnnnngnganngnnncgncgnnncnncgncnncnccnnnnnngnnnnnccnggnnnnnnnnnncnnnnnggnnnncnncnngcnnccncnnnccncnnnngnnnnnngnnncngggnnanggngnnnnnnnnnnncncncnnngncnnncngnnnnnngggggnnnnnnngnaanggnnnncnnnnnnncnncngcncnnntnnnnntcnnnnnnnccnnngggccnnnnggaaccnnnnccnnnnnnnnttnnnnnngggnnnggnnnnnnnnnggnggnnccnnnnggcctcccacaggcgtggaagcaaggcgtcggcgatgtcgtggaactgatataagcttgcctgcannatgnccgcgccggccatgggcagcgcgccncccgcgcgcacatcgaaggcgcgcacgtcgacgccgcgccggcgggcgcgacgagggcgtggcgcggaccgtagtccgtcccgtagccgacgcgcatcgcgagccggtagaggatggggaancggtagatggtcggcatgacnagcgacagtatggtgtccgtcgtcgtcccgctctgcaacgaggaggcgaacctccccgagctacgcgcccggctcaccgcggcgctcgcgcatcacgagttcgagtgcatcctggtggacgacggctcgaccgacgccacgtccgccatgatccgcgacgtcgcgcgcgaggatccgcgcttcaaggtcgtgagcctctcgcgcaacttcggccaccaggcggcgatcttcgccggtctcacctttgcccgcggcgcgtgcgtcgtcgtgatggacggcgacctgcaggacccgcccgaggtgatccccgagatggtgcgcgcgtggcggaagggcgccgaggtggtctacggcgtccgcaccgcgcggaaggaaggttggttcacccgcgcgacggcagcggccttctaccgcatccaggcgcgcctcacgcggaccaggatgccgctcgacaccggggacttcgcggcgatggaccggcgggtcgtggacctgatcgtcgcgatcagcgagcgccacccctacgtgcgcggcctcaggagctgggtcggctttcgccaggtcgcgttcccctacgagcgcgaccggcgtcaccggggcaggcccaagtacacggtctggaagctcctcgatctggccgtctcggggatcgtgccgttctcggtcgtcccgctgcgactcgtggccctctcgggcgccgcgatctcggcgctcgcgctcgcggcgggactcggcgtgctcctcggatggatgccgttcgtcgccggcgtggtggcggcgctcgcgttcctcttcggtctccagctcctcatcatcggcctactcggcgagtacgtcggtcgcgtcctcgaggaggtgcagaaccgcccgatcttcgtcgtcgacgaggtcgtcggggtggatccggcccaggcgacgggcgaccggaggcgcggcgccccgcgcacgagctagccagggatttcccgcccggcaatcctgtaatcacccgatggtcacccgcggtcgaacgacgcgaccatgggcncnnnnnnnccnngggggnnncnnnnnnncnnnnnnnnnnnnggnngnnncnnncnnnncngnnncngnnnnnnnccnnnnnnngnnggnnnnntngnnggnngattncnnnnnnntgntgnncnnnnngnngnnnnnnnncnngnnnnnnntcngnncnnncncnnnccnnncnnnntncnccgnnnnnnnnnngngggncangnncngngcnnngnncttnnncntnnnnncnnngnngnnntccnngctcncgnggngnnnnngnngnggntnggnnnngnnnnggnngnnggnnnncnngnngggggnnnnnnncnncnnnngctnnannnnngnntnnanngccngnnnnnccccnggnanntnntnnncntnnnnnnnntnggcntncgnnnggnccncngnntcgnnnnccnnannnnnntcggnnnngnnncncgcgnnnnncccgngggnttnnngggnnngntcnttcnnggnccgnnccnnnnccggccccnngncngncnncnggncnncnnccccnnnnnnncccnngggnnnnnnccnnngnnngnngggggnnnnnnnnnggnnngnnnnnnnnggnntnnnnannnncnnncngncnnggnnntnncngnccnnntccnnnccnnnnncnnngnannnnntnnnnttnnngnaannnnnntncngnnnnggnnttnnccnngnnnncnnncnnngnngnntnngggnnncnnnnnnnnnnnngnngcnnggnnngnnnnnnnnnnngcgngggnnnnnnnnnnncngncnnngnngncnnnnnnnnngncnnngnnngnnnnnngnnnnnnnnngnnnnnnnnnnnccngnnnncnnannncnngnnnngnnnnnnnnnnnnngnnnnnnnnnnngnnaanngnnccnnnnnnnnnnnngnnnnnngnnnnnnnnnnnnnnggnngnnnnngggnnngnnnnnnnannnc

SEQ ID NO: 1252 - DNA, 4000 bp, Escherichia coli
  misc_feature (891)..(891): n is a, c, g, or t
  misc_feature (984)..(984): n is a, c, g, or t
  misc_feature (1074)..(1074): n is a, c, g, or t
  misc_feature (1551)..(1551): n is a, c, g, or t
  misc_feature (1795)..(1795): n is a, c, g, or t
  misc_feature (3024)..(3024): n is a, c, g, or t
  misc_feature (3556)..(3556): n is a, c, g, or t
aggtcgccccggctccgaagccggccccagccaagaaggtcgccccagccaagaaggtcgccccggctccgaagccggctccggccaagaaggcggctctctctgtccctcctgcgccaaagaggccgacggtaggtccctatgccaaggagcccaagtttctcgatgagcagcgggtgttgctaatcgaagagcgcatcgtttgccagggtcaggctgaggatttgcgagccgaagccgactcgctggctcaggaacgtgagcccggcgacgtacagtttgatgccgagggtggcgaagggggaacggcagctgtcgaccgcgagcgcgacctggccctctcggcccaggcccaggccgcagtggaagagatcgatgatgcacttgggcgaatcacccgaaagacctatggcacctgcgagcgctgttaccagtccgttcccaaggctcgactccgtgcgcttccctatgcccggctgtgtgtggcctgcaagagcggggggctgtcgcgacgctgaccggcactaccgaatcgaacacggttcgacgggttgtgctggctggcacaaccctccgattagtgagtgccgtgtcagttgccgctctggcggtgctggtggatcagttgaccaagtggtgggctctcgaccgcttgtctcgtgggccgatccatgtgatcgggaccctcgatctcgggctgacccggaacagcggttcggcgttcagcctgtttcaggggtttgccgcggtgctggtggcggtggcggtggtcctggtgggcgcgttgctggtgatggtctatcgagcgccgtcactgtcccgcgctgcagtgtgcgggttgatcatcggaggagccatcggcaacttgtccgatcgcatgtttcgtaacgnacacggcgccgtggtcgacttcatcgatctccacttctggccgacgttcaacgtggctgatgcatgcattgtgattggttgtctgctgctggngctctctctcctacgcaggactcccggatcgtgagtgatctgtccctatcggtgcccccgtctctcgacggagtccgagtggatcgagcngtggcgttactggcagatatctcccgttccgccgtcgacggcctgatagagggtggttgggtgcaggtggatggtgtgaccgtccatgctcggagccgcccacttcgggagggcgagctcctggccgtggagcttggtgaggaggaagtggttcctcctcctcaagccgatgagtcagtggtgttcggcgtggtgtacgccgacgccgacatcgtcgttgtggacaaacctgccggcttggttgttcaccccggagccgggcatcgaaccggcaccctggtaaatggggtactttcccaattccccgacctggctacgttggctgatgaggtgggcgccgatcctgaacgccccggcatcgtgcaccgcctcgatcgcggcacgtcgggtctgctggtggtggcgcggaatgccggtgcctaccgctcgttggtggcccagctgggtgaacgcacggtgtcccgtcgataccgtgcnttggtgttgggtgaggtcgatggtgagtcgggggtcgtggacgcccccatcggtcggtcgatcacgtcgcctactcgaatggcggtctcgcgcaagggaaaagaggcccggacccgctaccgggttgaacagagattcaccgagccggtcccggccaccctgctggaggcgacgctcgaaacaggccggacccaccaaatccgcgttcacctatcggcgatcggccatccggtggtgggtgacngggtctacagccgaggtcgaacgttgcccggggtcacagtgagccggccgtttctccatgcctacgccctggcgttcgaccacccggtgaccggggagcggatggagtggtcgtcgccgctccctgctgatctcagggcagaactcgaacgcctgtcgcattgacgggtaccggcgaattcttctcgccggtacccgtcaccgtcaggctgcttcgtgagccgcctcgagagcctcgctgtcggccaggatccccagagcctcggcttcggcttggcgtacctttcggacacccacccctagccgttccgctgtcgtctggagcgatgcggggtcagagccatcgaatccaaaccgattgcggatgaccgctcgttgcaagtcggtgagccggtccagggcgttgcgcaccatcccgaacgtgagctcggaggcgacctcgtcctcgaactcgttgctgtcggtcgacaccaaatcacccagcgtggaggtcgagtcggcggtggccggctggtcgaggctggccaccacccgggcgacccgggtgaggtcatcccgcacgtcggcggtggtattggtggcatcatccagctcggcgtcagtaggcggacgctgtagttgatgggtgagttcccaggtggccgcctcgacttgctgattgcgctcggctacctccatcggaaggcggatggtccgaccatgctgttggacggctcgctgtaaggcctggcggatccaccaggtggcataggtggagaaccggaagccgcgttcccagtcgaacttgtcgacagcccgcatcagaccgaaggtgccctcttggatgagatcgggaaggtcgaccccgcggtcctgataccgccgggcccagtggatgaccaggcgcaagttggccgccgccatctcccggcgggcatcctcgtcaccggccgccacccgtttggccaattcggtctgtgcttcatggtcgggaagcgggtgatggtcgagatcgcggaggaagaggcccaggctgtctgcatcggctccgcggctgcgcgccgcggtcggcgaggtggcggcgcgccccttccccgtgccggtcggggcgttcgtcttattctgaccgttgctggtggtcaacgtgcgggttgtcatgcctggtttcacccttctcatgtgggttgcactactctcaacgcccggggagcgccggacattcctgcagtggcatggcgcatgcgattctcncggttgaataactacccgtttcccggccggtttgcacatctacgtccgaaatggtcggtcagcacaatgaattaccaggataatcggtgtttcgtggtacgtcacggtgaaacggagtggagcctccatcaccggcataccgggcagaccgacctgcccctcttgcccacggggacggttcaggccgaagcgctgcagacaccgctgtcctcccatgagttccactcggtcctgaccagcccattggcccgggccagggaaacctgccggcttgccggactcgggaacaaggcggaaatcgaacctgatcttgccgagtgggactacggctccttggaagggctgacgacggctgagatcttgagggaaaggccacaatgggatctcttcaccgatggcgctccgggtggcgagacgattcaggaggtggcggcccgggttgaccgggtcatcgagcggatccgggccaccgatggcgatgtggtgtgtttcgcccacggccacgtacttcgggtgttggccgcccgctggnttggcctcgacccgagggaagggaggtgcttcgccctcgatccggcttccatcagcatcctgggctgggagcgtgccagtccagtggtcgtgcgctggaacctcaattgatctcgcgagccgcccctccgggccggcggtcgattgggcgatcgggtgaaagcgactctccgcggaacatccggcgtgggcccgaccagcgggcgggaggggcatcgaggatggccgccagggcgtaggccacgctctcatagttgacccgccacccccggaaatgggcccaggcatcgtcgacctcacgtgagatcgggtacccgatttcgtggaggcgcatgtaggcggcgtcgaattcctggcgcggcagcgcgatgtcgtcatccgggtttggatcggggttaaacgggatgccgatcacctgggcgatgtcacggagacaggtgaagcc

SEQ ID NO: 1253 - DNA, 4000 bp, Escherichia coli
  misc_feature (216)..(216): n is a, c, g, or t
  misc_feature (405)..(405): n is a, c, g, or t
  misc_feature (422)..(422): n is a, c, g, or t
  misc_feature (425)..(425): n is a, c, g, or t
  misc_feature (545)..(545): n is a, c, g, or t
  misc_feature (1118)..(1118): n is a, c, g, or t
  misc_feature (1253)..(1253): n is a, c, g, or t
  misc_feature (1826)..(1826): n is a, c, g, or t
  misc_feature (1991)..(1991): n is a, c, g, or t
  misc_feature (2120)..(2120): n is a, c, g, or t
  misc_feature (2385)..(2385): n is a, c, g, or t
  misc_feature (2444)..(2444): n is a, c, g, or t
  misc_feature (2453)..(2453): n is a, c, g, or t
  misc_feature (2492)..(2492): n is a, c, g, or t
  misc_feature (2789)..(2789): n is a, c, g, or t
  misc_feature (2841)..(2841): n is a, c, g, or t
  misc_feature (3011)..(3011): n is a, c, g, or t
  misc_feature (3036)..(3036): n is a, c, g, or t
  misc_feature (3062)..(3062): n is a, c, g, or t
  misc_feature (3113)..(3113): n is a, c, g, or t
  misc_feature (3133)..(3133): n is a, c, g, or t
  misc_feature (3175)..(3175): n is a, c, g, or t
  misc_feature (3188)..(3188): n is a, c, g, or t
  misc_feature (3384)..(3384): n is a, c, g, or t
  misc_feature (3513)..(3513): n is a, c, g, or t
  misc_feature (3516)..(3516): n is a, c, g, or t
  misc_feature (3599)..(3599): n is a, c, g, or t
aattgttaaatagtaaatatttatcaattctattattaatttttttaaccacagttactgttaatgcagaagacgaaccaattgatatatggaatattgatcaaaataaaattgaagaaaactcatcaagtaataatctaaataatttagagaccaattctggtgatgctgagattacacaacctagtatttttgaacttcaatcagaaaaagaanttgaaacagtccaagttagttcagacttaaattcacaagaaataaaaattatcgggctttacgatcctgaagattatgatcttaaaattgatttgtggtcaaattcaaatggcgaccaattgaagtatcttttttcaaatattaataaaatgcaattatctaaagatgcatcagaattattaaacatanttttattaacaaatgcntanaatccagaacaaaatattaccaatgaagagtttttaaaaattagatctaattggcttattaaaaacaatgatagagaattaattgaggaatatttaataaaaaaccaaattttaaatttncacccagatttaagtaaatatttaattgatgaatatttatcagaagcgaatattgaaaaagcttgcgaattatttttaaagaattcagaagttatcagtgacgattatctttcaaaatttaatctatattgtttaattaatgcaggtagagctgaggaagctcaattaattttagacctaaaaaaagagctaggttttaaagatgaatattttgagaaaaagctcaattatttgtttgggtacacaaaagatccagaacaagcaatttctgaggcttccatattagattttcaccttgcacaccgaactaatccagattttatttttgaacctaaaaaaaatacagataaaaaaatatggaaatatttatcagcatcaaatttattatataacattgaggagattgatattgctgaagaagaaaaaatttctttaattgaaaaagcaacacatgacaaaaattattctgagaaagatttattttctttatataaaagatttcagttcaatattaatcaattattaaatgcatccgagtcttataaatctctatcgaacatagaagctagagcnctagtttatcaaagatctttattagagtctgatactgaaaaaaaattagaatttataaaacttttgaaagatctatttactaaggatggatattcaaatgcatttgatgctgagctaaaagaaatgttagaaaanattgaacctaacgatgtaccatctaactttactactttttattcaaataatttaaaagaagagaagcaagagttaaatgatattaagttcaataatgatattttacatcaatcaagactagtaaattattttaatggagattttgcaaaatctaaagttgaaaaagatttagataattttttaaaaaaaattaagaaagacaagaaatattatctatccaaaaaagatataatgttaatcgagtcaattaaatctgatggtatcgagatttcaaaaaaatatgaagacctctatgaaattaatgagtctgaaatgccaacagatattcaggttatgataaataataatgaaattggatcagttgtattaagaattattgaagttattggacaagatgatcttaacaatttggatgaggatacgttatattttgtaattagcgcgttaaatcaactagatatcgattacattcgaaataaaattttattaaaagttctgcctttaaaagtctaaaaaattaattaaaatatacctatcatggcagtaaaacctattcttacagagcccaacaanttattaagacaagtttctaaaccagttgaaaaagtcacaaaagacgagcaaaaattaatggatgatatgctggatactatgtatgcagctaatggtatagggcttgctgctattcaaataggtgtacccaaaagaataatagtaatggacataggtagagacccngagaagaaagaaccaagatattttgtaaatccagtaatcaaaaataaagatccagaaaaagcaacttacgaagaaggttgcctgtctgttcctaaccagtttgctgaaatcgatcgacctagtcaatgngatgtagaatatttagattataatggagagaaacaaattttacatgcaagcggattgttagcaacatgcattcaacatgagatggatcatttagaagggattttatttattgattacttgtccaaattaaaaaaatcaatgattataaaaaaactatcaaagcaaaagtctaatcagatagttatttaattaatgcaaaaaaaaattgtgtttatgggaacacctgagttttcagttcctattcttaaatcaatttatgaaaacngtttttctattgaggctgtttatactcagccaccccaaaaatcgcagagaggacaaaangttaataantctccaattaatgatttagctgataagcttggaattaantgcagaactccagctagtttaaaaaacaataaagaggaattagaatttctaaaaaaagttgatccagatattgtaattgtagttgcatatggtcaaattattccaaaagaatttttaaatatttgtaaattaggttttatcaatatccatggatctattcttccaaagtggcgtggggcagcacctatccagcgatcaataatgaatttagacaatgaaacaggaataagtattatgaagattgaagaacaattagattcaggtcctgtttgtgcagtttataaaattaatttaaanccaaataataatgctgatgagatctcaaaaaaactatcattattagcatcanaaaaaataataattgaaattaataatattttagatggaaaagcaaagtttattgaccaaaaacatgaattagcaacctatgcagcaaagataaataaatctgaaggacttataaactggaacgatgatgcaaaaaaaattcttggaaaagtgaatggattatttccaatnccaggtgcattttttatttataaanatgagagatacaaagtattgaaagcngaaatagtaaaaaatcaagggaatataggagaagttttgacaaacgatttngaagttggctgtggagatantcaatctttgaaaatattagaaatacaaagacagggaaaaangcctcaaaagatngaagaatttattcttggctctcaaattaaaaagggtgctagtttaataaatgcataaatatcaaatcttaattgagtatgttggtacaaattatagaggctggcaaatacaaaaaaaaggtcaaacaattcaaggtgttcttcaagataaattgtcaaaacttttaaaagaaaaaataattattattggttcaggnagaaccgatgcaggtgtgcatgcaattgctcaatctgctcattttgaaagtaaaaatataattgaagataaagataaatttttaaaatctattaatcattttttaaaaaataaaatgatagctattctnaangttagaaagagaaatcaaaattttcatgctcgatattcagcaaaactaagagtttatgagtatgttatttataatagagttgncccgtcggtaattaaccaagatagaggatggcatataatgaaaaaacttgatcttaaagagatgaagagaggagcaaaaaaattaattggaactaaagatttttcaacatttagagcctcaagttgtaatgctaaaagtccgataagaacaattaagtcagttaagataaaaaatcaaaataataaaattacaattgaatttaaatctcaatcttttctacaacaacaagtgagatcaatggttggttgtttaaaatatttaggtgaaaaaaagtgggatctaaaaaaatttgaaaaaattattaaattaaaaaaaagagagaattgtgcaccaccagcacctgctaatggtctttttttatctagagttttttattagattttctttattactcattgca

SEQ ID NO: 1254 - DNA, 4000 bp, Escherichia coli
  misc_feature (1517)..(1517): n is a, c, g, or t
  misc_feature (1957)..(1957): n is a, c, g, or t
  misc_feature (1989)..(1989): n is a, c, g, or t
  misc_feature (1992)..(1993): n is a, c, g, or t
  misc_feature (2745)..(2745): n is a, c, g, or t
  misc_feature (3972)..(3972): n is a, c, g, or t
  misc_feature (3989)..(3989): n is a, c, g, or t
agttttttatagtcattcgccatcactggcaagaaaaaagtcccctccattctattacaaatacttaattatgtttgaaaagctagaagaagtagaaaaaagatatgactatttgaatggccaaatgagtgaccccaagatcattgctaggcagcacgaatttcaacaatatgctcgcgaacaatccgaattagctccagttatagccgagtatcgtgcgtacaaaaaaaatcaagatgaactgaaagaaaatcaggaaattttggaggaggaggcggacgaggaaattttagttatggtacgtgaggaaatcacaggtctacagacaaagatgacagggttggagcaaaagataaaaataatgcttttgccaaaagattccagagacgaacgaagtgttattatggagattcgcgctggtacggggggtgaggaagcttcattgttcgctctggacttatttcgaatgtatacccgctatgccgaagcaaagaaatggaaatctgaaattctgagccagagtgaaacgggtaaaggtgggtttaaggaagttatcttcaatattcaaggcaagggagtatatagtaaattaaaatatgagggaggaactcaccgagttcagcgagttccagaaacagagacccaagggagagtgcatacctcggcggtaaccgtagctattatgccacaggttgacgatgtcgatatcaaaatcaatccgtctgatttgaagatagatgtgtttcgatcctcagggccaggtggtcaaagcgtcaatacaacggactcggcagttcgtattacccatgtgccgagtgatttgacggttacttgccaagatgagaagtcgcaacacaaaaataaagataaagccatgaaagttcttcgtgcacggctatatgatcttgaacaaagtaaacaacaagatgaactcgctcgtgagagaaaacagcaggtcgggtcaggagaccggagtgaacgtatccgaacttataatttttctcaagagcgaatcacagaccaccgcattggtttgaccttacataaactgacgctagttctccagggtgaacttaatgaaattattgatgcgcttacggtttattaccaagcggaagctctaaagaagggtaattaaccttccctccgagttaattataagtgatatagactgaagtagataatcaatgaaagaatttcttaactggtcaataggtcgcttaaaccaggcaggaattgattctccacgcatggaggccgaagtgctttttgccggagccttaaaattatgccgtgaagaaatttatcgtaggccagatcggattctcactgaacctgaaaaagctattatatgtgattttgtagatcggcgggttctccgggaacctgtagcctatattatagagcgaaaagagttttggtctttagattttaaaatcacaccggacgttctaatcccgcgaccagaaacagaaacccttattgaaactctgcttttactaaacagtaaaaacccngataagttgccgctacgtttgctggagatcggaactggatcaggagctatcgccgtggtcgcagcgcaggaaattcctggttgtcgagtgacagcgaccgactattttttaggggcgttagctgtggctaggttaaatgctgaaaaccacgtagtcgctgacaagattgattttgttaagagcgatatttttttagatctaccgatagttctttatgactgtatcgtgtccaatccaccttatatacaaacttcaagtttaaataaacttatggcagatgtgattaattttgaacccagaagtgcactcgatgggggtaatgacgggttaagtttttataagcgaataattccagaggctctgggctatctaaaaaaaggtggtacggttgttcttgaaattggagaaacacaagcaaaggcggtaactaggttatttgntcaggaaggtcagtacaaagaaattaaagttnttnnggactatagtggttatgaccgcgtcgtatccgcgagaaaaaaaatatatggataaaatagttatagaaggaggaggacgtcttgaaggcgaggtagagattagtggagccaagaatgcagctctgccgattatggcggcaatgattttaaccacagggaaaaacaggcttgatggtgttcctcaagttcgggatgtaaccaccatgcttcacctattaaatgacttgggtggctgcactgaagaatttaattcgggtcgtatcttttttgatgcaaccggtataaataattttgaggcaccctatgagcttgtttctacaatgcgagcatcttgtcttgtgttgggtccgcttctagcgagattgggtcgagctaaagtatcgcttccaggagggtgtgctataggagcacgaccactagaccttcacataagaggtttggaaggtatgggagcaaagatacgtttagagcagggatatatttatgcggaagctaagcgtcttcatggggtaagatattatttcgatacagttacagtaacaggaactgctaacttgataatggccgcgaccttggctgatggagaaacagttcttgaaaatgttgctaaggagcctgaagtagtgtttctagcagatgtattgaataaaagtggggcaaaaataaaaggtcaagggacagaccttgttacaattcaaggggttcagtcactaaaaccaattaattgcaatattttcccggatagaataganacgggtacctacatgattgcttctgcgatcacgaggggtgatgtcaagataaccaactgtataccaaaacaagtagagtccttaactttaaaactcaggcagtctggattgatcgtagaagaaggtgaggcaagccttcgtgtaatttgtgatagccaattgaacggagttaatataaagacacaacctcacccaggttttgccacagatttgcaagctcaattcatggctttaatgacacttgctcaagggaaaagcattattctggaaacagtgtttgaaaacaggtttatgcatgtggctgaactgaagcgtatgggcgcagatataactatacaaggcagaacagctgttgtgagtggagtcaaagaattaagtggggcacccctcatggcgactgacttgcgggcaagtgcttctctcgtgttagctgccttggcggcaaaaggaaagtctgtcatatctcgtgtctaccatattgaccgagggtattctgatatagaacaaaaacttaatagattgggtgcgaaaattcgtcgggaaaaataatgaatttgatttatccaaatcataaaaatttatgcaagacaaagctatatttaataaaaaagaaattttccatattgtagtgtggatgcctagttggattggtgatgtggtgctagctcttcctgcactgcaggctttacgtgatatttatccaaagactaggatcactgtcataacaaaatttcctactggtcaattattatctaatcacaaggcggtcatagataccgttttacagtttccgaaaaataaagaagatggttacattaagcaatatagttatgcgctaggattaagaaaatacaaatttgatcttggaattgtttttcctaattcgtttcatgctgcatttatgttgatgctcacgggagcaagggttcgtattggatatcgaacagatgggcgccaacagttgctaacgcactctattcctgttactaaagaagaaaaaaaaactctatatcgtgtcaactattttcacaaaattctttctccaataaattcagaattagcccccgatcactacgattctaaatggactaacagtcgtatggtttcgaagaatattctccgcgtagtggggctggatagagaagatttatttataactattcacccgggggcatcaaaaattgagcgtgcttggcatgctgagcgcttcggtatactttgccaaancctcatcaaaacttacncggtaaaaatt

SEQ ID NO: 1255 - DNA, 4000 bp, Escherichia coli
  misc_feature (1189)..(1189): n is a, c, g, or t
  misc_feature (1192)..(1193): n is a, c, g, or t
  misc_feature (1196)..(1196): n is a, c, g, or t
  misc_feature (1202)..(1203): n is a, c, g, or t
  misc_feature (1206)..(1208): n is a, c, g, or t
  misc_feature (1211)..(1211): n is a, c, g, or t
  misc_feature (1214)..(1214): n is a, c, g, or t
  misc_feature (1221)..(1222): n is a, c, g, or t
  misc_feature (1229)..(1229): n is a, c, g, or t
  misc_feature (1374)..(1374): n is a, c, g, or t
  misc_feature (1455)..(1455): n is a, c, g, or t
  misc_feature (1458)..(1458): n is a, c, g, or t
  misc_feature (1468)..(1470): n is a, c, g, or t
  misc_feature (1488)..(1488): n is a, c, g, or t
  misc_feature (1493)..(1495): n is a, c, g, or t
  misc_feature (1503)..(1503): n is a, c, g, or t
  misc_feature (1507)..(1508): n is a, c, g, or t
  misc_feature (1520)..(1520): n is a, c, g, or t
  misc_feature (1523)..(1524): n is a, c, g, or t
  misc_feature (1529)..(1530): n is a, c, g, or t
  misc_feature (1533)..(1533): n is a, c, g, or t
  misc_feature (1537)..(1537): n is a, c, g, or t
  misc_feature (1544)..(1544): n is a, c, g, or t
  misc_feature (1550)..(1551): n is a, c, g, or t
  misc_feature (1570)..(1570): n is a, c, g, or t
  misc_feature (1573)..(1573): n is a, c, g, or t
  misc_feature (1582)..(1582): n is a, c, g, or t
  misc_feature (1585)..(1585): n is a, c, g, or t
  misc_feature (1593)..(1593): n is a, c, g, or t
  misc_feature (1598)..(1598): n is a, c, g, or t
  misc_feature (1603)..(1603): n is a, c, g, or t
  misc_feature (1605)..(1605): n is a, c, g, or t
  misc_feature (1607)..(1608): n is a, c, g, or t
  misc_feature (1611)..(1612): n is a, c, g, or t
  misc_feature (1619)..(1619): n is a, c, g, or t
  misc_feature (1624)..(1624): n is a, c, g, or t
  misc_feature (1626)..(1626): n is a, c, g, or t
  misc_feature (1629)..(1630): n is a, c, g, or t
  misc_feature (1634)..(1634): n is a, c, g, or t
  misc_feature (1637)..(1637): n is a, c, g, or t
  misc_feature (1641)..(1642): n is a, c, g, or t
  misc_feature (1644)..(1644): n is a, c, g, or t
  misc_feature (1650)..(1650): n is a, c, g, or t
  misc_feature (1801)..(1801): n is a, c, g, or t
  misc_feature (2012)..(2012): n is a, c, g, or t
  misc_feature (2759)..(2759): n is a, c, g, or t
  misc_feature (3680)..(3680): n is a, c, g, or t
  misc_feature (3713)..(3713): n is a, c, g, or t
  misc_feature (3722)..(3722): n is a, c, g, or t
aaaaaatgtcagcagagttattcgtagtaagagagtcgtttccgttggtgttgatctctctctctctcaacacgcaattcaaagaacattaccgcgcgcttcttcttgcgtataaatatacacacacatcgagaacaagaacaacaacagcacatcacgctttcgcacgcgcgcgataaaaaggagagagagagagagagagttaaagagagagttcagagttcaaaagtatgcgtacccgtccgtaataatcgtactggcaatcgtgaatctgatccccgtgtccggtgtcgaactgtttttgtggtggttgattcgtttgatgggaggaaggagaagaatactgttgttgttgttgttgttgttgcgccatcatcgttattctctcttcttatcgcaaataaagggggtttaaatgtcttctgaaaagagtcgttaaacacttacgctttaaacgtcttttctgaggacgaaatttgggacgaaaattgcgccgagaaaaactcacacgcggtctgtgtcgttacaaaatttttgcccttggaaccctaaatatgaaagggcaaaacccaagcgaaaaaaaaatgtgaagaaagataagctcacccccctttggacttcacttatttctttgaaaagacacacgtcacacaacacactcttatatactaaaaatgttttctgtcactcaaactgttactcaatccgttcgcttgaacgcgactgtttccaagagagacgtcacccgcaggtacgaagaagttcttcttcttaaagtgttttctgcgtgtgttggatcgttcatccattttgttcttttttcctcttttcggtacacgtcattttttccattattaaacgcgcgaatgctttcgggcgcgcgcgcgcgcgaaggagaacgacgtcttcattcctctcgactacaaacaccattcgccgtgaaagcttcttttgttccctcctttcgtcgaaaagagagcgtaaataaagtatggtatctttcgcgacgagatatggataattggaaagagtgaaagagagatatcgcgcgagtgctcaactgtccaataactgtgaacacgtttttgctccaaaaaaggacacgtcaacaaccatcgcacgcgaagaggacaaaaaacaacaaacacttttgaagaagaagaagaagagaaaagagaggaaaaaaaanttnnttntttttnnaannngtngtnttttttnntcttttntgtactcactctgtcgcgctctcttttgttctattctttttaaacagatctggcggcaacttctccgcccctcccagagatgattcggaaacgttcaaaacgtccgtcgcgggccaatcgaactggaacgcctacgaaggttccngcgagaaagaactcacgccggaggagaagaaggccaaggccaaggcggaggaggacgcgtccaacgccagaagagccgccnccncggcgaagannnaagccgaaagagaaaaanccggnnncaaagggnccannttctaatttccnatnnttttnnatngtgngagaaanatctcnngagagagagagagagaganaanaagagaganaanaagagagngtgtnttttngncnntcnngaagtantatancnaannaaanttntttnnanaaaacnttctccttcataaaaaaaaaatcgacacttttgtacaccctaaatactcgtccttttctccctctaaaaatggcggcagaaatcaccacaaaacgaagaagagagaagaagaagaagacaaaggaagagaacaagagagaagaagaagaanaacgaccgagaatcacccgagatttgaactggtggttttggttctttttgtccccgtgagtttatttaaaaagatgtccgaagaggaaccgaaaacggagaagcaactgattcgccaagcggagaaggagcggaaaaagaaggaaaagttggagaaagaactgaagaagaagagagaaggtttagcgtcgtcatcgggaggaggaggctcngttgtaacggtgcacgcgtcgcaaacgcctccggttcacttggatgccgtctccggcacgcgagacttcttccccgaggagtttcgattgcaaacgtggttgtttgagaaattccggaaatgtggtctcagagcagggttcgaggagtacgacgcgccggtgttggaacggcaagagttatacaaacggaaagccggggaggagatcacgcaacagatgtattcgttcgtggataaagacggggtggaagtgacgctgagaccggagatgacgccgacgttagcgaggatggtgttgtcgagaggcgcgtcgatgattttgccgctgaagtggttttcgataccgcagtgttggaggtttgaagccacgcagagaggaaggaaaagagagcattatcagtggaacatggatattattgggtgcaaggaaataaccgcggaggtggagttgttgagcgcggcggtggagttttttaagagctgcgggattacgagcgcggacgtcgggattaaagtgaattcgaggaaagtcatgcaatcgatgttgacgattaacgacgtgccggacgagattttcgcgccgacgtgcgtgatattggacaagctagataagattggcgccgaggcggtggtaaaggagttgacggagacgttggggttaccgagagaaaccgcggagaacgtggtgaagacgttgagttgtaaaacggtcgaggagttggaggaaatggccagagaggcgatcgangtaagtagcggtggtgatgatggtgataatactaatagcaatacgaaagccgtggacgattcatccatacgcgagttgaaagaattgttcaaactggcggaggagtacggtttcggcgactggctccaattcgacgcttccgtcgtgagaggattagcgtattacaccggcgtcgtctttgaagcgttcgataaagccggcgagttgagagcgatcgccggtggtggtagatacgataagttgttatctttgtacggagcgacgacgccggtaccggcgtgcgggtttggtttcggcgattgcgtcatcgtcgaacttttgaaggagaaaaatttactcccaaacgtccaaaaaagggttgatttctgcgtctgcgcgtataacaaagacatgcaaggcaaggcgatgaaagcggcgggtttgttgaggcagacttctcctccttcgaatggtagtggtggtggtggtggtggtagtagtagtaacgatgatgacggagatggaaacattaatagcgccgacgaaaacaaaagactcgtcgtcgtcgacgtcctcctcgaaccgaaaaaaaaagtcgcgcaaaccttcgattacgccaaccgcatcggcgcaagatacgtcgtcttcgtcgccccttcggagtgggaaaacggatgcgtccgcataaaagatttacgagcggaagagtacgccgaagacgacgccgataaacaagtcgacgtgaaaatcgaagacttatggaacgctttagagcagatgcgagagaatgaaaatcgcgtgcgagcgaggagagggttcgcttccctttagcagagagagagagagagattcctgatcgatcgatcgaacgcgctttttacagcagacttttcttcataattttaactgttttcttcattcattcacgaacgaacgaacaanaatactaagcatcaccgaacaatcgcttcattnataacactnttcccataataatggcgagaatcagagacacctcgtacgacaaatccgtcgtctacgagccgagcgaagactccttcctcctcgccgatgccgtcgcggaggagatttggtctcgggaaaagaggaaggaatcgaacgcgttgagacgactcgatgacgacgatgaaaacgattttgatgatgaaaacgacgaggaggaagaagaatttgtcagcgtggaaatcggcgtcggttccgggtacgtgctgtgttcgcacgcgatgcggttttgcgaagaa

SEQ ID NO: 1256 - DNA, 4000 bp, Escherichia coli
  misc_feature (1)..(4): n is a, c, g, or t
  misc_feature (6)..(6): n is a, c, g, or t
  misc_feature (8)..(8): n is a, c, g, or t
  misc_feature (10)..(11): n is a, c, g, or t
  misc_feature (13)..(19): n is a, c, g, or t
  misc_feature (22)..(22): n is a, c, g, or t
  misc_feature (24)..(24): n is a, c, g, or t
  misc_feature (27)..(27): n is a, c, g, or t
  misc_feature (30)..(33): n is a, c, g, or t
  misc_feature (35)..(35): n is a, c, g, or t
  misc_feature (39)..(39): n is a, c, g, or t
  misc_feature (41)..(41): n is a, c, g, or t
  misc_feature (44)..(44): n is a, c, g, or t
  misc_feature (47)..(47): n is a, c, g, or t
  misc_feature (49)..(49): n is a, c, g, or t
  misc_feature (52)..(52): n is a, c, g, or t
  misc_feature (54)..(55): n is a, c, g, or t
  misc_feature (57)..(57): n is a, c, g, or t
  misc_feature (61)..(61): n is a, c, g, or t
  misc_feature (65)..(66): n is a, c, g, or t
  misc_feature (68)..(68): n is a, c, g, or t
  misc_feature (71)..(71): n is a, c, g, or t
  misc_feature (73)..(74): n is a, c, g, or t
  misc_feature (78)..(79): n is a, c, g, or t
  misc_feature (83)..(83): n is a, c, g, or t
  misc_feature (86)..(86): n is a, c, g, or t
  misc_feature (92)..(92): n is a, c, g, or t
  misc_feature (95)..(95): n is a, c, g, or t
  misc_feature (99)..(102): n is a, c, g, or t
  misc_feature (104)..(104): n is a, c, g, or t
  misc_feature (107)..(107): n is a, c, g, or t
  misc_feature (110)..(110): n is a, c, g, or t
  misc_feature (112)..(112): n is a, c, g, or t
  misc_feature (114)..(116): n is a, c, g, or t
  misc_feature (119)..(119): n is a, c, g, or t
  misc_feature (122)..(123): n is a, c, g, or t
  misc_feature (125)..(125): n is a, c, g, or t
  misc_feature (127)..(127): n is a, c, g, or t
  misc_feature (129)..(129): n is a, c, g, or t
  misc_feature (131)..(134): n is a, c, g, or t
  misc_feature (136)..(136): n is a, c, g, or t
  misc_feature (138)..(139): n is a, c, g, or t
  misc_feature (142)..(147): n is a, c, g, or t
  misc_feature (151)..(154): n is a, c, g, or t
  misc_feature (156)..(156): n is a, c, g, or t
  misc_feature (158)..(159): n is a, c, g, or t
  misc_feature (162)..(162): n is a, c, g, or t
  misc_feature (164)..(166): n is a, c, g, or t
  misc_feature (171)..(171): n is a, c, g, or t
  misc_feature (173)..(173): n is a, c, g, or t
  misc_feature (175)..(175): n is a, c, g, or t
  misc_feature (178)..(178): n is a, c, g, or t
  misc_feature (180)..(180): n is a, c, g, or t
  misc_feature (183)..(183): n is a, c, g, or t
  misc_feature (188)..(189): n is a, c, g, or t
  misc_feature (191)..(191): n is a, c, g, or t
  misc_feature (193)..(193): n is a, c, g, or t
  misc_feature (195)..(202): n is a, c, g, or t
  misc_feature (204)..(204): n is a, c, g, or t
  misc_feature (206)..(208): n is a, c, g, or t
  misc_feature (211)..(212): n is a, c, g, or t
  misc_feature (214)..(215): n is a, c, g, or t
  misc_feature (217)..(217): n is a, c, g, or t
  misc_feature (219)..(222): n is a, c, g, or t
  misc_feature (224)..(224): n is a, c, g, or t
  misc_feature (226)..(228): n is a, c, g, or t
  misc_feature (230)..(230): n is a, c, g, or t
  misc_feature (232)..(234): n is a, c, g, or t
  misc_feature (236)..(239): n is a, c, g, or t
  misc_feature (241)..(241): n is a, c, g, or t
  misc_feature (244)..(244): n is a, c, g, or t
  misc_feature (246)..(246): n is a, c, g, or t
  misc_feature (251)..(251): n is a, c, g, or t
  misc_feature (253)..(253): n is a, c, g, or t
  misc_feature (256)..(257): n is a, c, g, or t
  misc_feature (259)..(259): n is a, c, g, or t
  misc_feature (261)..(262): n is a, c, g, or t
  misc_feature (265)..(265): n is a, c, g, or t
  misc_feature (273)..(273): n is a, c, g, or t
  misc_feature (275)..(275): n is a, c, g, or t
  misc_feature (278)..(278): n is a, c, g, or t
  misc_feature (281)..(282): n is a, c, g, or t
  misc_feature (284)..(285): n is a, c, g, or t
  misc_feature (287)..(287): n is a, c, g, or t
  misc_feature (291)..(292): n is a, c, g, or t
  misc_feature (295)..(295): n is a, c, g, or t
  misc_feature (297)..(298): n is a, c, g, or t
  misc_feature (301)..(302): n is a, c, g, or t
  misc_feature (305)..(305): n is a, c, g, or t
  misc_feature (310)..(310): n is a, c, g, or t
  misc_feature (312)..(312): n is a, c, g, or t
  misc_feature (316)..(316): n is a, c, g, or t
  misc_feature (319)..(319): n is a, c, g, or t
  misc_feature (321)..(321): n is a, c, g, or t
  misc_feature (324)..(324): n is a, c, g, or t
  misc_feature (326)..(326): n is a, c, g, or t
  misc_feature (329)..(331): n is a, c, g, or t
  misc_feature (335)..(335): n is a, c, g, or t
  misc_feature (339)..(339): n is a, c, g, or t
  misc_feature (341)..(341): n is a, c, g, or t
  misc_feature (344)..(344): n is a, c, g, or t
  misc_feature (347)..(347): n is a, c, g, or t
  misc_feature (350)..(353): n is a, c, g, or t
  misc_feature (355)..(355): n is a, c, g, or t
  misc_feature (358)..(358): n is a, c, g, or t
  misc_feature (360)..(360): n is a, c, g, or t
  misc_feature (365)..(365): n is a, c, g, or t
  misc_feature (369)..(370): n is a, c, g, or t
  misc_feature (374)..(374): n is a, c, g, or t
  misc_feature (382)..(382): n is a, c, g, or t
  misc_feature (1981)..(1981): n is a, c, g, or t
  misc_feature (1986)..(1987): n is a, c, g, or t
  misc_feature (1995)..(1995): n is a, c, g, or t
  misc_feature (2465)..(2465): n is a, c, g, or t
  misc_feature (2645)..(2646): n is a, c, g, or t
  misc_feature (2648)..(2650): n is a, c, g, or t
  misc_feature (2723)..(2723): n is a, c, g, or t
nnnnangntnncnnnnnnnttngnaanaannnnanaaananttnttnanaananncnaaanaaanncnttngnntttnngaanttnaaaaanaanattnnnntnggnaanantnnnttnttnnantncncnnnntntnnccnnnnnngaannnntngnncanannngaaangnanaantnaanttttnnantncnnnnnnnnangnnncanngnntntnnnntngnnntngnnntnnnntnttngngtttngnaanngntnnaanaaaaaaananttntanntnncncaannggntnnggnnaanagagncnaaanaantntananaannngggngttngngtnaanaannnnanaananatttntaanntttnttcttctntccagacctaccctctcccctatagttactacttttttacttttacattttaagggatataggagattcatatgagaagtgccagagagatagttagccttattcgtaccgttcttatggaacacgaagaatactatgagcattgcagaccagaattaaaaaaatataaaaattcttatgagaataagttttgggaagataatttatataatgatggaatgattcgtgttgagacagcggattgtttttcttatgttgaaggatttatagcttcccttttttcgcgttctcctgctgttgtggtaggtaaagaccctgctatgacttcgggtaattctgacatggctagagaggttgtaaatcgttttttatttgagaagcgtgagcagatagagatagcttctagacttgctcttatttatccaaattcttttttaaaaatatctccaaaggaatctgaggatatgttggaaaaggttgacatccgtgcgatacctccttgggagattatttgtgatatggatgctacttcttgggattctcagagattttgcggtcatgtttattatttaacaatggctgaagccaaagctaaatttggtgctaaagatttttctcctattgcaaagcaagattattttgatacagaaagaaataattattatggtggaaagattgatgatttgcctgatgattatctttacattcaggttgtggaattttacgatttaagttatgataagttatatttctggacaccgaattggaaagacggtgagcagctattggaaaaaattcaaatacctctcaggacttatgatgatagacctttatctcctatttgtcctttatattttgctcgtaaacccgagcgtccaatgcaaggtttgtcggctgtcgcccgtgtatatgatcagttttatgaaaaaaatattcttagaacttattgggctaatgctgtgcgtcgtgattctcgtcagtatttatacaaagaaggtgcgttggacgaagaagccttagctaaagtttctgcaggtattgatggtgcaatggtagctgttgatgctcaatctttggaaggaataattaaacctttagatgttcctgctatatcttctaattttgatagatatcttggtcagattgaagctgatataaacagaggttctattttggctccattctctcgtggtgaagccacaaaggctaccgctacagagattacagccttagctcaatattctgcatctgagataggtaagatggcaagagaaaaagattcttctttagaattattggcaaaagtttatttaagagctatatctttgatggctgaagataatgaaaaagcaaccatagagattgatggttatcctcgtgtaattacagtaaaagatttggatgcaaagtttaaaattgtagctttagatcaagcctcaacacctctttcagattctataaagaaaaataacttggttcaaatggctggtacacttatacagcttggtgttcctcaaaagaaaattaaagatgaaattattcgtttatttgattttccaaaagattttgttgaggaagttgagcaaccacctcaacctnaagcnnaacaaggnatacctcaaacacctgaaggtgatgtgggacagcctgctggcgatatagggccatctggagagctacctgctgaacaactagctcagaatctattgcaaagacgtggagggtctatataatgcctatttatgaattcaaatgtggtcattgtaatcacaaacaatctggcttattttcttcttttgtttcatttgatgatagaaaactggaagattcatgtgaaagttgtcaaagttgtgattggcagccagcaatttctttgcctcaaaagcattcttcttgggaatccacaggaaaatggggtgtaaacggttatttttctggttctttgggtagatttgtagataatcctgccaaagaacgtgccattatggaaaaaaagggttttattgctgaatctgatttgccaaaaaactggtggagcgataaaactaaccaacaaaaagaaaaaattcaaaaacaagaccanttagccgaccaatatttggaaaaagttaagtctggtaagacaaaagaagaggctgtggccgaaacctggacagcaaaagatgctgtttctggtgaattagacaaaatttacgatacatcaataagtaaggagaattaaatgcctgataaaaaaataaatgctggaatgaaagaatttgannannnaagaatggaagacgaaatggccttttctgaagatatggctatgggaatgcctactggacagcctgaagaaacngaagttatgattatgatggccgaaggtgagcaatctgatgatgaaatgttcgctcaaatggctccaactggagacttttcaaagaatgctatgaatagattggtagatgcaacaaataaattgcttcctcttttcgaccaaacccctgattatccttcatttcctgatggtgtgcagcaattccctacagattttgttcgtgttttgggaatgtttcaaggagctattaacatggctgttgatgcaggcgagattcctgaagagatggatttcaacatggaagatatccaagatgacagaagcataatgatgcttgctggaaagatttctgctcttgcaaaaaataaagattttaaaagattcttggaaaatcctccaatggaagaagaagatcagatggaagaggaaatgactgaagaagaagaaatgggcgatgatgaaatggatgctctttttgcttctagggtttaattatgccaataaggatttctggcgctcagacaaccgttcctggagagattcttggttatgttataggagaccctaacacggtatccacacataacgtaacgacttcatatacggattttttgaatgaagtaacttttactgctgatagacgagctgcaattgttcaggctcagttttggattgaaaaaacttcttctggtgtcgaagaaataattatgaaattaaaagaagatggaacagatgtttctggatcggaaagaatgtttcatctttttcctgatccttcatattctggtcaggtaattacagcgcagtggattgttcagatgactgatggtgaagaatattcttttaaaatacaaattaagaaaacccaaaacgaaactgttagggtaagagctggacaaagttatcctccttatattttgcagataataggattataaaatgacaccaaatttattaacgcttttttttggagggtgcggacccgaaggttgcaagccaaaagataaaaaaagaaaagaaaaacccgaacctatgatgtctcgttccgaatttaaggaaacccaaaaatatacgcttgaaggacctcaagagcatgacatagcttatgagcagtataggtctaattggctgcgtagaaataaagaatacgagcaggaacaaagtcaaatggaagaagatgagacttatagaaggtctcaggaaagaaaacaagagcttgatgctttggagattccaagtttgcccacatccttaacaaaagaagattttaattctccaagatttaattctaagattct

SEQ ID NO: 1257 - DNA, 4000 bp, Escherichia coli
  misc_feature (66)..(66): n is a, c, g, or t
  misc_feature (270)..(270): n is a, c, g, or t
  misc_feature (408)..(408): n is a, c, g, or t
  misc_feature (672)..(672): n is a, c, g, or t
  misc_feature (692)..(692): n is a, c, g, or t
  misc_feature (741)..(741): n is a, c, g, or t
  misc_feature (769)..(769): n is a, c, g, or t
  misc_feature (783)..(783): n is a, c, g, or t
  misc_feature (809)..(809): n is a, c, g, or t
  misc_feature (979)..(979): n is a, c, g, or t
  misc_feature (1094)..(1095): n is a, c, g, or t
  misc_feature (3989)..(3989): n is a, c, g, or t
ggccgagcgcccgcgattgcgaccggcgtaaagctttcgaaccctgaattagatgtatgggtggtnaccggggatggagatggtctgagcattggcggcaatcacatgctgcatgtcttgcgccggaatgtggatctacaaattttgttgtttaacaacgaaatctacgggttgaccaaaggtcaatactcgccgacctcccaggttggcacacgctcaccgtcgacgccggatggatcggttgatttgccactgcggccctgcaccttngccttgggtgctggcgcaagatttgtcgcccgaacgatcgataccgaggccaagcatatgacgcccgtgctcaagcgagcgcacgcacataaaggcgcctcttttgtcgagatttatcaaaattgcccggtctataangacggcatcttcgactatattaaggataagaagtccgccgcggattcaagattggtgttggcgcatggcgagcccatgttatttggggttgataaccaaaaaggcctgcgattgaacacggccaccttgcaattagaggtcgtaacgctcggagaagcggacgtaaccgttgatgatattatggtgcacgatgagaccaatttggtcttggcccagatgttggcagcgctttcgacgccggactttccagaggccgttggcgtnctgtattgcaagcaagaagngtcttatgaaagttcagtttatgagcagattaaaacggttcgtgcaaanaagggtgtggtcgactttaatgaggtgntgcgtcggggtcanacttggacggtaagctgagcaaatgntttgagtcaataaaggccagcgcaagctggctttttattgtctcgaaattcgatctgtaaagggttgccagacagccggatactggaatgataggggttctaaatgactgattttaaagcagaagataatactggtaccgtgcctgtacaagcccgtcactatgtcgatntagaggcgctcaccgcgtttatgatggcatcggttgcgggctttcaaggccccatgagtattgaagaatttgcaggtgggcaatcaaacccaacgtatctgctaacaacccctgnncggcgatatgtgttgcggcgcaagcccccaggggagttgctcaaatcagcccatgcggtggatcgtgagtacaaagtgctcacgggtcttgcggatgcggatgtcccaacggccaggacttttgccttgtgcaccgatgattcggttatcggaacctggttttacgtaatggaatatttggatggacgggtgatatgggatgcaacgcacggtccttacgccccgcaagaacggtttgaaatctgggacgcggccaaccttgctgtcgccaaattgcacagcgttgattataagcaagtcggcttgagcgactttgggaaggaatctgattatatagcgcgacaattatcgcgatggggtggtcagtacgagtatacgaaaaccgttgataatccttacatggataacctgcttgcgtatttgccggccaatataccaagcagtaatgattgcaccatcgttcatggtgaccttcagattgcgaacatgatgatgcataaagatcgcaacgaagtgatcggtattctggattgggaactcagtaccctagggtgcccgatcgccgattttgcgtacctgtgccggccttatcgagatgctttgcggggcgtcgatgtcgcggccttggggatcccgtccgaggaggccttcgttgaggcttattgtgcgcggaccgggcgcgctgggatagccgaatgggattattatcttgcctttaacatgttcaaaatggcggcaatactacaaggcatcgccaagcgcgtgctggacggcacagcggccagtcagcatgccgaagctgccggcgctggggcgtttaatatggcgaaattggcctgggcgcaaattgactcgtctgtgaacctcgatgacctcgactaagcccgtctcattacttcatgacgggcaggtctggatccaactgaacgccaaaggtatttaaggccatcgacaccagctggtattgcccgaccgtaaagacgagatccatgagttgctgctgagagtagtggctggccagggcctgccaagttcggtcggtgacaaaggcgtcggctctgagttcgtccgcggcggtcaacagccaggcatcctgtggtccccagcttgggtcagttgggccgactttgatggcctcgatctccaaatcgctgagtccggctttctgcccgatgagcacgtgttgcccccactcgtagccagattggcatagccaaccgactctcaggatcagaatttctcgatcgcgcggggacaattttgacttgtggaggatgtggtttgcaaaaaccatccaacgtttggccaatgcttcatgattggccagggtcaaaaaaatattttggacgcgtccgcgcatgacctgaggcgccagcaacgctctctgggactcggtccagtcagattcctcaacaggattgattctcggttcggttaaacgcatgctaggtccttcttttgatgtgcgctctatactagcgcgaaagtgtcaaggtgtggcgcgcgacggcgccaccgtttactcaggagttgttatgccagattttattctccatcaatatgcgggatcgccgttctcagagaaagtaagactattgatgggctatcttgatttgcccagtcaacaggtcgaaatacccgtgattatgccgcgtcctcagttgatgcccctgacgggcggttatcggcgaacgcctgtcttacaacgcgggcgcgagatgtattgtgacacggcgctgattgcgaaaattctgatcgcccaaggcgaggggcaggcattgttgccccaagcgcaacgcgcggtgattgaaacggttgcctattgggcagacacatttttatttcgcgttgtcgtcgcggtggccttccagccgaaagcgctttccggtaatccgcttttcgaaagcgacgccgaggcggctgcttttatggcagatcgcgcagaattctcaaaggggtcaacggccttgcagatggatttggccgttgcgttgtcgcatttcgatctttggttacatcaaatgaacagtcagctgggggcccaagcctttttgtttgggcaggccccaacccttgcggacttctcggtttaccattgtctttggtttattgcggaacgcccggcgcttgttgccgacctggcggtctttccagaggtgatgcggtggttcgctcagatgacggcctttggccatggccgggttcagccaatgggcgcagaggatgctttgcagcttgcggcatcagaaccgtttttggcgaaacaaaaagtgctgtcgcccagcgtttcggtttgtccaatcgattacggcttgcaaccggttacgggggcgttggtcgaagccgagcatgtgcccgatgcctattctgttttaagagatgagccggggctgggtgaggtattggtgcatttcccgcggttagggtttcggtgcgtagatctttaatcccaacgctggataaattggttaatcacccttttaagacgatggggttgctcctcccaaatcgcgtggctggcgtctgggatttcatggaatacgccctgaggcagtcgcttggcgtatcgtgcgccggtttttggcgtggcctcgtcgtgctcaccgcaaacaatcaaggttgggcaatggacgtcttgaagacgatgggtttgatcaaagtcggcgagggtgccggttgctgagaattcgctgctaccccacatatgttgatagatggcggcgccccgaggattttttcgagccagcatcgcttttagcttcttgggtcgtctgaggacatggcggctgtaatacaaagcaagcgcctcttggtagaccaacgcatcggttgcgccaacggcttggcaggcttgaatcacgcgttgcgtgtctttgggtaaggctttgatcaancggttggcatc

SEQ ID NO: 1258 - DNA, 4000 bp, Escherichia coli
  misc_feature (604)..(604): n is a, c, g, or t
  misc_feature (883)..(883): n is a, c, g, or t
  misc_feature (937)..(937): n is a, c, g, or t
  misc_feature (1832)..(1832): n is a, c, g, or t
  misc_feature (1991)..(1991): n is a, c, g, or t
  misc_feature (2543)..(2543): n is a, c, g, or t
  misc_feature (3194)..(3194): n is a, c, g, or t
  misc_feature (3284)..(3284): n is a, c, g, or t
  misc_feature (3353)..(3353): n is a, c, g, or t
  misc_feature (3605)..(3605): n is a, c, g, or t
  misc_feature (3608)..(3608): n is a, c, g, or t
  misc_feature (3779)..(3779): n is a, c, g, or t
  misc_feature (3803)..(3803): n is a, c, g, or t
  misc_feature (3908)..(3908): n is a, c, g, or t
catttgtttgattttattttttctcatgatctatatttttaatcccatgtgtgtgtatttgacattcaagtaatctttaattgcacccgatccaccttcacgtccataaccagtttgttttattccaccaaaaggtgcctctgcaacagcaactgctccagtattgacagcaacacaacctgactctaacatttcagatcctctattagcctggtccattgaatttgtataaagataactgcataaacctaaatcgttatcgttagctctttctataacttcgtcaaaagttttaaatgttaaaactggaactagcggtccgaagggctcttctttcatgatagtaaaattatctttaacatcatcaaatacagttggttcgtaataatatcctttattgaaaccagaaggtctttttccacccattaaaactttagctccttcacttttagttgtttcaactagcttttctatttcttccagtctctttgcggtagaaagaggtcctaattctacaccttcgtccataccattacctatttttaatttttttgctctttccataaaagcacctacaaattcatcttttctactttcttgtatntaaaatctattaggagaaatacaaacttgtccattatttctaaatttagctgtaattgctatatcagctactttattcatatccacatcatcacaaacaataaatggtgagtggccacttaattccatagtcactctttgaactttatcagcagctttttttaaaattattttaccaactctagttgatcctgtaattgatacttttttaattatatcagactccattaattcatttgaaatttcagctggatctccagataaaagattaactactccntcaggtataccggcttctttacaaatatttactaactccataacagcaccaggngtaattacatctggtttacaaattacagaacatcctgcagctaatgctgtagaaatttttctagcagctaaaatgattggaaaattccaagggactaatgccgcaactacacctacaggctgataatagatatgagcccttgtatcaggaaatcttgtttgaacagtttgtccataaattctttttgtctcttctgcattccactcaaaaatatctgctccgccaccaacttctccgacaccttctgctaagggttttccaacttcaagcgttaaccattttgcaagaacatcttttctctctctcattaaatccgcaacttttcttattttgtaagatctctcccatggagttgtgtttttccagatctccaaacctttttcagcagattttaaagctttttgaacatctaacgaagatgcttttgatgcttttccaatcacttcctcagttgcaggattgattacgtcatatgtttcttttttttctgcttgttgccatttaccatcaatgaattgtccaaatttttcgtacatagattttttatttttaagtttacttaattaggttttttaatttataaatatatttatatataaacattacacacaatcaaagttaaacttaatttatgaaaaaaattacccttacatgtgcgcacgcgatagttaaatatttaatttctcaaaaaatattaattgatggcaagaaagaacctttgtttccaggtgtatttgggatatttggccacggaaacgtagcatgtctaggacaagcattagaagaaaatcaaaatgaacttccaacatatagaggtcatcatgaacaaaatatggctcttaccggaattggctatgcaagagcaaaacgaagacaacaaatttttgtagccacntcatcagttggacctggtgcaacgaatatggtgacagcagctggagttgctatgagtaatagactgccgattttatttttacctggtgacacttatgcaaatagaatgccagatccagtgcttcagcaagtagaacattttaataaccctggcattacngcaaacgatgcatttaaacccgttacaaggtattttgatcgtatcactagacctgagcaaattattcaatcatttccagcagcagttcaaacaatgttagatcctgctgattgcgggccagcatgtattgctttatgtcaagatattcaaggtcaaactttcgattatcctgaagaattcttcaaagaaagagttcacacaattagaagacctaggccagatgaatttcaagttaaagaagcagctgagaaaattaaatcttcaaaaaatccaataattatttctggtggaggagtattttattcagacgcaatggatgaattaagtaagtttgcaatcaaacataatatacctgtaacccaaacagttatgggttactcaacaatgaaaagagatcattcacattatgcaggccaaataggtgggttaggtggcaaaaatactaattcactcgctaagcaaacggatcttgccattgctgttggtactaagcttgcagattttaccactggttcttgggcaaattttgaaaatgaaaattttaaacttgtntcaataaatgtttcaagatttgatgcaaacaaacatttagcacaagcagtaattggagatgcaaaagtttctttagctgaattatctcaagctttgggtgattggaaagctggtgaagagtggaataaaaaatctcaaactgaacttaaagcttggaatgaagaagttgataaagcaagtgctccttcaaatcaggagataccaagttatgttcaggtaataggtgctgtctataaaaattctgatccctcagatatagcagtaacagctgcaggtggacttgtaggagaggttgttcaggtttggagacctagagaacttaacacacatgagacagaatggggctttagctgtatgagttatgaaatttcaggtgctcttggaattaaaatggcaaacccagataaagaagtcatttcatttataggagatggatcatacttgatgaataatactgatatctattcttcagttataactaacaacaagcttataattgttgtttgtgataatggaggttttgcagttattaataggcttcaattatttaagggtggtaaagaatataataatctactcaaaagttctaaaacaccaggtcttgttgacgttgattttgcaaaacatgcagaaagtatgggcgctaaatcngaacatgtaaactctatatctgaactggaagaagcatttaaaagagcaaaaaaatctgatgttacttatgtgatatcaattaagacacangcatatcaatggttggaaggttctgcattttgggatagcccaaccctagaaattccaacaacagaaganaataaagaagctataaaactttatcaagaaggtaagagcaaacaaagacaaggcgtataactttttatgaacaaaatatttaaagttggccttattggatgtggtcatatttcagaaacttatttcagagctgaaaaatattttaacaatattaaaatcattaagtgtgcagatatcaaccacagtaatgcagttagatgtgcaaaaacttataaaattaaggcattaactgtaaaagagcttttaaaaganaangaggttgaaatcattcttaatttaaccattcctaaagcacattatcaggttgcaaaacaagctttgataaatggaaaacatgtttactctgaaaaaccattggcaattaattttaacgatggaaaagatcttcttaaaatagcaaaaaagaaaaaactttatattggaaangctcctgatacttttttaggtggnggtattcagaaatcaaaagaattagtcgataaaaaaataataggaaaaataaatttaggaaatgcaatttttgcttttcctggagttcaatcttaccatccaaanccagaaccatggtttgctaaaaaagaaggtgggccagtaattgatatgggtccatactacttaaccgctttagttaatctattaggaccagc

SEQ ID NO: 1259 - DNA, 4000 bp, Escherichia coli
  misc_feature (234)..(234): n is a, c, g, or t
  misc_feature (301)..(301): n is a, c, g, or t
  misc_feature (326)..(326): n is a, c, g, or t
  misc_feature (358)..(358): n is a, c, g, or t
  misc_feature (373)..(373): n is a, c, g, or t
  misc_feature (381)..(381): n is a, c, g, or t
  misc_feature (1649)..(1649): n is a, c, g, or t
  misc_feature (2017)..(2017): n is a, c, g, or t
  misc_feature (2723)..(2723): n is a, c, g, or t
  misc_feature (2744)..(2744): n is a, c, g, or t
  misc_feature (2829)..(2829): n is a, c, g, or t
  misc_feature (2859)..(2859): n is a, c, g, or t
  misc_feature (2862)..(2862): n is a, c, g, or t
  misc_feature (2891)..(2891): n is a, c, g, or t
  misc_feature (2898)..(2898): n is a, c, g, or t
  misc_feature (2902)..(2902): n is a, c, g, or t
  misc_feature (2939)..(2939): n is a, c, g, or t
  misc_feature (3066)..(3066): n is a, c, g, or t
  misc_feature (3114)..(3114): n is a, c, g, or t
  misc_feature (3237)..(3237): n is a, c, g, or t
  misc_feature (3563)..(3563): n is a, c, g, or t
  misc_feature (3570)..(3570): n is a, c, g, or t
  misc_feature (3598)..(3598): n is a, c, g, or t
  misc_feature (3855)..(3855): n is a, c, g, or t
  misc_feature (3942)..(3942): n is a, c, g, or t
ttgggcgcgcggccacggcatcggtcgccgcatcgtcagcgaaatcgagcaattggcgcgcgagctcggtctcctcgtcctcaatctcgacctgcgcgatacccagcgcgcggcgacccatctctatgagacgctcggctaccgccgctggggcagccacccgttttacgcgctggtcgagggcgagttcgtgcccggccattattattataagcgcctcgacgaggcctctancgggcgccccgcctgacctcaatgtgaattctggtggaacagcgctgtgcgtccttcgactgctcgntgcgctcgcgctcaggatgaggcgncgcctctgatgccattaataatgtacttcatnctgagcagcgcccgnggcgcagnccgcgcgcgtgtcgaaggacgctggttggttatgccggcgagcctcgtccggtgatcctgtaccccgcgatcgatctgaaaggcggcgcctgcgtccgcctggtgcgcggcgagatggcgagcgcgaccgtcttcaacaccgatccggccgcgcaggcccggcatttcgccgaggcggggttttcctggctgcatgtcgtcgatctcgacggcgccttcgccggccattcggtgaatggcgaggcggtgcgtgcgatccgccaggcaatcgatctgaagatccagctcggcggcggcatccgcgaccgcgccgcgatcgacaattggctcgagctcggcatcgaccgggtcgtgctcggcaccgcggccttgcgcgatccgacactcgtgcgcgaagccggcgcggcctatcccggccaggtcgccgtcgcgatcgatgcgcgggacggccatgtcgccgtcgaaggctgggccaagacgagcgatatcggcgcgatcgctttggcccagcgcttcgccgatgctggggtcgccgcgctcgtctacaccgatatcgggcgcgacggcgccctgaccggcgtcgatgccgcggcgatcgccggcttcgcccgcttcgccggcctgccggtcatcgcctcaggcggcgtcgctgggctcgccgatatagaggcattgcgggaatacgagagagacggcgtcgccggggtgatctgcggccgcgcgctttacgacggccgcctcgacgcgcgcgccgcgttgcgcctggttgaagagggcgccaaaggggcatcagcatgctgaagatgcgcgtcattccttgcctcgacgtcaaggacggacgcgtcgtcaagggcgtcaactttgtcgatctgaccgatgccggcgatcccgtcgagcaggcgcgcatctacgatcgcgaaggcgcagacgaactctgctttctcgacatcactgcgagccacgaaggtcgcgacacgctctacgacgtcgtgcgccgcaccgccgagcaatgctttatgccgctgaccgtcggcggcggcgtgcgcacggtcgaggacatccgcaaattgctgctcgctggcagcgacaaggtatcgatcaacaccgccgcggtcgcgcaccccgaattcgtgcgcgaggcggccgagaaattcggcagccaatgcatcgtcgcggcgatcgacgcaaaggcggttgcgcccggtaaatgggaagttttcacccatggtggtcgccggccgaccggtatcgacgctgtcgaatgggcntgccgcctcactggttacggggccggcgagatcctgctgacctcgatggaccgagacggcaccaaatccggcttcgacatcgcactgacccgcgccgttgccgatgcggtgcgcgtgccggtcatcgcgtcgggcggagtcggcacactcgagcatcttgccgaggggattcgcgacggccacgccaccgcggttctcgccgcctcgatttttcacttcggcacattccgcatcggcgatgcgaagtcttatctcgccgcgcatcgaattccggtgcgcatgtgacgcgctgagcttgcgattctttgagattcgcgcttcgttgctaccggcggtctcgccagaaatgtgttctcttttaggttcgngcatttaagccgcgttaataattctgtgccgaatatctgagcgaattgacacttatgcagatgccgcccagactgatttcggctctgctcctgtaaaggtattgaggacgatggtggctgatcgccggattattgagtccgatcggcggcgtgccgccaaagcctcgctcggcgacagcctagagcagctgtggcgcatcatcgattcccgccgcaatgccgatcccgacacctcctacacggccaagctgctgatgcgcggccgccgcaaggcggcgcagaaactcggggaggaggcggtcgaggcggtcatcgaggcggtgcgccacgacaatgccgcgctgatcggcgaaagcgccgatctgctgtttcacctctttgtgctgtgggcctcatgcggcgtcacaccctctgaggtcgccgccgagctgatgcgccgcgaagggacttccggtcttgacgagaagcgcaaccgcaagaaataaccgccggcgccgcctcagacagacagcgcgtaattgacgagcttcttcgtcaaggtcgggaacgcaaatttcttgaacgcttccggccgcgcccagatgccgtccggcggcacattcgtccgcccggtcataagcgccagttcaagacggaaatgcgtaaagccgtgctgcacggtgccgggcaacgctgtccattccgttgcggccggtgccgcctcgancgcctccgcgtcgccccacgncaactcgcgccacggtgtcgagggtagttcgatcatgccgccgaggaggcccctctccgggcgtcgccgcaacatgaccgcgccntcctcgcgctcgagccagaacacgacgccntancgcagcggccgctccggtttctccacccncgccggnaggntctcctggatcccggtcgccgcggcggcgcaatcgcngcgccacgggcacaggacgcaacgcggtcgccgcggtgtgcacagcaccgcgcccagatccatcatcgcttgcgcaaaatcgccagcgcgctcctgcggcacgagcgccatcgcgagcgcccgcaanctcggcttcgcctgcggcaagggctcatcgaccgcgaatagccgcgcnacgacccgctcgacattgccgtcgacggccgcgctgcggtgatcaaaggcaatcgccgcgattgccgccgctgtatagtcgccaatccccggcaacttgcgcagcgccgccggatcctccggnaaatccccgccatgccgttcgacgacaaggcgggcgcaggcatgcaggttgcgggcccgggcgtaataaccgagcccctgccattcgtgcagcacctcatcgagattcgccgcagcgagcgagcgaacatcgggccagcgcgccacaaatcgggcaaaatagggagccaccgtgacgacggtcgtctgctgcagcatgatctcgctgagccagacgcggtacggatcggcggtctcgcccggtaatgcccgccagggcaattcgcggcggtggcggtcgtaccaggcgagcagtgctgccgcgtctgggagcgccgcgaatcgctnctgcgangatggttttgttatcggtgtgctggttnggatcggcgacatgaacgaggaacaggagaaagccgacgccaccctacccgcgagggacagccaagacgagcgccgcccagacgagagacgccccgacgagagacgccccgacgaacgccgccccggattgcgcgcggtcggccctctcgcctcgcggctcgccgccccggtcgtcgcgcggcatggcggcggcatcctcgcccggctgaaggcggattggccggccgtcatcggcgccgatatcgccgccgcgacntggccgcaggcgttgggccgcgatggcgtcctgaaattgcgggtcgccgccgcgacagcgctcgaactgcagcaccgcgcgccgctnctgatcgagcggatcaatgtctatctcggccggccggcaatatcgcggctcgtctttg

SEQ ID NO: 1260 - DNA, 4000 bp, Escherichia coli
  misc_feature (691)..(691): n is a, c, g, or t
  misc_feature (1684)..(1684): n is a, c, g, or t
  misc_feature (2636)..(2636): n is a, c, g, or t
  misc_feature (2803)..(2803): n is a, c, g, or t
aatcgcgtccattcttcgtaaagcgcactcgcgcgttctcacaatcgagcaagcaccccacgacgtcacctttcgtgaatgtttcgccgtaattttcaaaacttttattatgactcttcttcccggtgccaccgtagccgtacgaatgcgcatccgcgcctaaaccgtcgagcgccgcgaaccgactgccgaacccgacgcgacacaacccctcgtcccgcacttcaatctcataacacaccttaacgcgcgcgttctcgcccgacgagtctcgcacgcgcacaccgtacgtcccacgcacgcctgcccacgcgtgcgcggcgcgcgattgcatgaccccggtcgaaacgtcgcacgccgccgacgccgaccgcgccgtcgagctccacgcgcacctcttcccgagcgcctcatcgtcgttcgccacctcgcgcgcggcaaccacgcgcccgcggcgactctccacaatgctctcgtgcacgagctgcagcacgggcgcgccgaacgcgaacgttttccccgaaccagtctccgcgctcgccaatacgtcgccgccagtgagcaccagcggcacggcttcgctttgtatcggcgtcggaagcgtgaacgacgcgcggtcggcggcggcgatgagttcagggcataacccgagttcttcaaacgccgccatgtcgaccgcgcggcagtcagncagtcaggcgacagtcgcgcactgaagatagtcgacggcgttgagcgtgtttcagttcatcagtttcaactacaacctacgagcgccgacgcgaacgtctcgcttcttgtgctatgcgtgtgtgtgagtataaaatctacgtcaaatatcgtcatcaaccttgacgttggattcgttaaggatcgaggacgacgcgttcgatgacgtcagccgcctcgtccccgacgttcgcgcccttcccaaacgtcaaccgcatgttatacgcatcttcaccatccgcgtaatacttagcctcagtatccacgcactcgtactctaaaacatccctatacaaatgtatcgccgcttcgttgctcacgcgcacgtgtaaactcacgcacgtcgcgccgtagcattcgtccagggctttatgcgccgcgcgcatcaacgtcgccgccaacccaagcttacgatgcgtgcgcacgaccgcgagcgaggtaatatgcccccgcacctcatccgtgcactcctcatcgagcttggccaacacgtaccccaccaccgcgccgtccacgtccgcgacttgtaacaacgatggccagctcaacgcgtggtacaagtagtacttcatctgatagttttccggtaaacacagcaagttgcatcgctgcatggcccacaagtcatccaccgtagccgcgcgcacgcacacccccatcgttcgtcgtcgtgtgtcggcggcggcgtcgcacagtgccgcacatcgaggcgcaccgcccattcgcatcgccatccggtgctccatgcgtgcgtcgtgaacgcgccgcgcgtgtgcacagagctcgcgatgccgccgcacccgccgtcattgtcgtcgtccacgtcgcgcgcgtggcacacgctcgccgcggcgtgcgtcgtcgtcgtcctatgcgcgctgagttacgcgagcgatgatgggagcgcgcgcgtcgtcgtctcggtgctcgcgaaacctccacccgtggcggtgcncgcgtcgccgatctcgtgtgcgtccacggtggttgcgatcgatccgtcgtcggtgacgtcgccgtcgcgattcgacgtcgtcatcggtggatacgagttcttgactcgcgacgacgtggcgaaacatcacgcgtgggacttgaacttaccgctcgcgacgattgtgttctatcgtcgaacgcgggcagaggtgaaggcgagggcgtggcgatgcgcgagcggtatgacggcgatcgagcggttgatgtttccgaattacgggcgagatgcgtcggcgttctgggattgggcgatgtttcgttacgacgcgccgcctcgagcggtggcgtatttgcacgggcacggcgcgttggcgtggcatacgtcgtgtgagacggtgtttacgcgcataaagacgtattatgacgatatgttgcgcgtgcatggcgacgacgatggtggtgcgtatagtcgtaggattggtgggaataacgtcacggatgtagacgcggccgacgacgtcggctacgcgccagagtccatggtgacgctgtcgttcgcccgcgggcgacgagagacgccgttcgcgccgctagaatggaacggcggtcgtcggcgattgctgacggcgcgcacgaatagcgatgactcgtacgatgccgtggagacggcgaagtgcgtggatgtcttgcgaagcgtcaacgtgacgttaaagcccgccacggtgcggtcgtgttgtgggacgttcatcatgcctgggagattcattcgcggttacgcactcgaggtatacaaagcgttgtatgactccatcatggaccagtccatggatgacagcatttccgcgcgcgcgtgttttgagttcatcgtctacggcatgttctctgcgaataatctccccgcgcacgtcaaagcgccggatgtaaacctcaccgcgctctcgacgtggttcgaccgcgcgcacgcgcgcacncgagagttgaaaccggcgatgaaatcgtgcgaacgcaattataagtcgagcatgtttccatttctgccttatttgggagacgcccatcgacgcgtcttctttaacaaaatttggtttccagcccggcgatacgtgcaaggcgacgtgccgccgtgatgaaacgaaangaacactgtacaccatagcaccattcgcacgagcgccggtagtagcgatagcccatagcccgtagcccgatgcctcgttgaaatattcttctgttcaaatttcacccactcagcccacactctcccacgcgcacgcgcacgcatgcgcgccgccacgtcctcggcgcgttgcgacaccttcaccgcgctcgcgtcgacatcacgcgcgtcgtgctcgagccgacgccgcgcgcatcgtccgcgcgctcgccgtccgctcgcgtcctcagcctcgagtcctggatatgacgctcaagacgttgtcgacgctgacgacgacgtcacgcgcgacacgacggagatgactcgcgcgacgacgtgtgcgaggctgagtaatttcatatataagggcgcgtccacgccggcgtggttcaatggggatgggtttgaagttttagggagcggggtcaccggcgccacggcgtggtgcgcgtgcgagcgacggaacgaaagatacatcgttatacgcggcgcagcgtggagtcagcccgacacggataggaataagttgagttggcagattgccaaggtgtggccgatggcgctgaaacgaggcgtgcccgtggtggcgcatcaaggggtgatagagatggtggatgagttttggagagatgtggcgccgttcatcgaggatgagacttttacggggaagttttcatttacggggcattctttaggaggatctatggcgcttattatcgccgcgcgatgtcgtttagagctcggtattgcggaagaacgtatcatgcccgtgcgcacgtttgggtcgccaccagtattggcgtacgaccgcttgagcagccgcgggacggatgagtgcgcgggaacgatggatgacattttacgcctgtgtgggttttctaaaggatcgtccatggttcgccagtacgttctcgccaaagatatcattcctcgcatgtggcttagcgctgatccagtgtttagcgcggcgacaaagatggattttattgggtcggtgctcgattggcgagagcaaacgtttggcggcggcatgtttacgcgcaaccggttcttgtatcaaacgtgtggagatttgtactggttggagtatcaggccggagtggaggctaagcctttgctcacgcgccacactggcgaggatgtgctcgagaagctgcaaatggaactcgaggaagt

SEQ ID NO: 1261 - DNA, 4000 bp, Escherichia coli
  misc_feature (1992)..(1992): n is a, c, g, or t
  misc_feature (2596)..(2596): n is a, c, g, or t
  misc_feature (2607)..(2607): n is a, c, g, or t
  misc_feature (2612)..(2612): n is a, c, g, or t
  misc_feature (2619)..(2619): n is a, c, g, or t
  misc_feature (2640)..(2640): n is a, c, g, or t
  misc_feature (2650)..(2650): n is a, c, g, or t
  misc_feature (2652)..(2653): n is a, c, g, or t
  misc_feature (2655)..(2655): n is a, c, g, or t
  misc_feature (2659)..(2659): n is a, c, g, or t
  misc_feature (2662)..(2662): n is a, c, g, or t
  misc_feature (2667)..(2667): n is a, c, g, or t
  misc_feature (2681)..(2682): n is a, c, g, or t
  misc_feature (2686)..(2686): n is a, c, g, or t
  misc_feature (2688)..(2692): n is a, c, g, or t
  misc_feature (2694)..(2696): n is a, c, g, or t
  misc_feature (2698)..(2699): n is a, c, g, or t
  misc_feature (2702)..(2702): n is a, c, g, or t
  misc_feature (2708)..(2709): n is a, c, g, or t
  misc_feature (2711)..(2711): n is a, c, g, or t
  misc_feature (2721)..(2721): n is a, c, g, or t
  misc_feature (2723)..(2725): n is a, c, g, or t
  misc_feature (2727)..(2728): n is a, c, g, or t
  misc_feature (2732)..(2733): n is a, c, g, or t
  misc_feature (2735)..(2735): n is a, c, g, or t
  misc_feature (2737)..(2738): n is a, c, g, or t
  misc_feature (2742)..(2742): n is a, c, g, or t
  misc_feature (2744)..(2744): n is a, c, g, or t
  misc_feature (2747)..(2748): n is a, c, g, or t
  misc_feature (2751)..(2752): n is a, c, g, or t
  misc_feature (2756)..(2758): n is a, c, g, or t
  misc_feature (2760)..(2762): n is a, c, g, or t
  misc_feature (2767)..(2768): n is a, c, g, or t
  misc_feature (2770)..(2771): n is a, c, g, or t
  misc_feature (2774)..(2775): n is a, c, g, or t
  misc_feature (2780)..(2780): n is a, c, g, or t
  misc_feature (2782)..(2783): n is a, c, g, or t
  misc_feature (2790)..(2792): n is a, c, g, or t
  misc_feature (2797)..(2797): n is a, c, g, or t
  misc_feature (2801)..(2802): n is a, c, g, or t
  misc_feature (2804)..(2805): n is a, c, g, or t
  misc_feature (2807)..(2807): n is a, c, g, or t
  misc_feature (2809)..(2809): n is a, c, g, or t
  misc_feature (2811)..(2813): n is a, c, g, or t
  misc_feature (2815)..(2819): n is a, c, g, or t
  misc_feature (2821)..(2823): n is a, c, g, or t
  misc_feature (2828)..(2828): n is a, c, g, or t
  misc_feature (2830)..(2832): n is a, c, g, or t
  misc_feature (2837)..(2837): n is a, c, g, or t
  misc_feature (2842)..(2842): n is a, c, g, or t
  misc_feature (2844)..(2845): n is a, c, g, or t
  misc_feature (2851)..(2854): n is a, c, g, or t
  misc_feature (2856)..(2856): n is a, c, g, or t
  misc_feature (2858)..(2858): n is a, c, g, or t
  misc_feature (2860)..(2861): n is a, c, g, or t
  misc_feature (2867)..(2869): n is a, c, g, or t
  misc_feature (2874)..(2874): n is a, c, g, or t
  misc_feature (2876)..(2881): n is a, c, g, or t
  misc_feature (2884)..(2884): n is a, c, g, or t
  misc_feature (2886)..(2887): n is a, c, g, or t
  misc_feature (2889)..(2891): n is a, c, g, or t
  misc_feature (2893)..(2893): n is a, c, g, or t
  misc_feature (2895)..(2896): n is a, c, g, or t
  misc_feature (2898)..(2900): n is a, c, g, or t
  misc_feature (2902)..(2903): n is a, c, g, or t
  misc_feature (2908)..(2909): n is a, c, g, or t
  misc_feature (2911)..(2911): n is a, c, g, or t
  misc_feature (2917)..(2917): n is a, c, g, or t
  misc_feature (2921)..(2921): n is a, c, g, or t
  misc_feature (2923)..(2924): n is a, c, g, or t
  misc_feature (2928)..(2928): n is a, c, g, or t
  misc_feature (2930)..(2931): n is a, c, g, or t
  misc_feature (2933)..(2933): n is a, c, g, or t
  misc_feature (2935)..(2935): n is a, c, g, or t
  misc_feature (2937)..(2938): n is a, c, g, or t
  misc_feature (2942)..(2942): n is a, c, g, or t
  misc_feature (2944)..(2944): n is a, c, g, or t
  misc_feature (2952)..(2952): n is a, c, g, or t
  misc_feature (2965)..(2965): n is a, c, g, or t
  misc_feature (2972)..(2972): n is a, c, g, or t
  misc_feature (2976)..(2976): n is a, c, g, or t
  misc_feature (2998)..(2998): n is a, c, g, or t
  misc_feature (3002)..(3002): n is a, c, g, or t
  misc_feature (3013)..(3013): n is a, c, g, or t
  misc_feature (3015)..(3016): n is a, c, g, or t
  misc_feature (3018)..(3018): n is a, c, g, or t
  misc_feature (3027)..(3027): n is a, c, g, or t
  misc_feature (3031)..(3031): n is a, c, g, or t
  misc_feature (3035)..(3037): n is a, c, g, or t
  misc_feature (3042)..(3042): n is a, c, g, or t
  misc_feature (3044)..(3045): n is a, c, g, or t
  misc_feature (3047)..(3048): n is a, c, g, or t
  misc_feature (3057)..(3057): n is a, c, g, or t
  misc_feature (3064)..(3064): n is a, c, g, or t
  misc_feature (3084)..(3084): n is a, c, g, or t
  misc_feature (3086)..(3088): n is a, c, g, or t
  misc_feature (3090)..(3093): n is a, c, g, or t
  misc_feature (3095)..(3104): n is a, c, g, or t
  misc_feature (3106)..(3107): n is a, c, g, or t
  misc_feature (3110)..(3111): n is a, c, g, or t
  misc_feature (3113)..(3113): n is a, c, g, or t
  misc_feature (3115)..(3116): n is a, c, g, or t
  misc_feature (3125)..(3125): n is a, c, g, or t
  misc_feature (3130)..(3130): n is a, c, g, or t
  misc_feature (3134)..(3134): n is a, c, g, or t
  misc_feature (3136)..(3136): n is a, c, g, or t
  misc_feature (3140)..(3140): n is a, c, g, or t
  misc_feature (3144)..(3145): n is a, c, g, or t
  misc_feature (3147)..(3150): n is a, c, g, or t
  misc_feature (3152)..(3155): n is a, c, g, or t
  misc_feature (3163)..(3163): n is a, c, g, or t
  misc_feature (3165)..(3165): n is a, c, g, or t
  misc_feature (3167)..(3168): n is a, c, g, or t
  misc_feature (3171)..(3172): n is a, c, g, or t
  misc_feature (3174)..(3176): n is a, c, g, or t
  misc_feature (3181)..(3181): n is a, c, g, or t
  misc_feature (3183)..(3183): n is a, c, g, or t
  misc_feature (3185)..(3186): n is a, c, g, or t
  misc_feature (3188)..(3189): n is a, c, g, or t
  misc_feature (3191)..(3191): n is a, c, g, or t
  misc_feature (3199)..(3199): n is a, c, g, or t
  misc_feature (3204)..(3208): n is a, c, g, or t
  misc_feature (3210)..(3210): n is a, c, g, or t
  misc_feature (3218)..(3218): n is a, c, g, or t
  misc_feature (3223)..(3224): n is a, c, g, or t
  misc_feature (3226)..(3227): n is a, c, g, or t
  misc_feature (3229)..(3229): n is a, c, g, or t
  misc_feature (3234)..(3235): n is a, c, g, or t
  misc_feature (3237)..(3237): n is a, c, g, or t
  misc_feature (3242)..(3242): n is a, c, g, or t
  misc_feature (3244)..(3245): n is a, c, g, or t
  misc_feature (3258)..(3258): n is a, c, g, or t
  misc_feature (3261)..(3262): n is a, c, g, or t
  misc_feature (3264)..(3264): n is a, c, g, or t
  misc_feature (3272)..(3273): n is a, c, g, or t
  misc_feature (3275)..(3275): n is a, c, g, or t
  misc_feature (3277)..(3278): n is a, c, g, or t
  misc_feature (3280)..(3281): n is a, c, g, or t
  misc_feature (3283)..(3283): n is a, c, g, or t
  misc_feature (3291)..(3291): n is a, c, g, or t
  misc_feature (3296)..(3296): n is a, c, g, or t
  misc_feature (3299)..(3300): n is a, c, g, or t
  misc_feature (3304)..(3305): n is a, c, g, or t
  misc_feature (3322)..(3322): n is a, c, g, or t
  misc_feature (3324)..(3324): n is a, c, g, or t
  misc_feature (3327)..(3327): n is a, c, g, or t
  misc_feature (3330)..(3331): n is a, c, g, or t
  misc_feature (3333)..(3334): n is a, c, g, or t
  misc_feature (3339)..(3339): n is a, c, g, or t
  misc_feature (3342)..(3345): n is a, c, g, or t
  misc_feature (3348)..(3348): n is a, c, g, or t
  misc_feature (3350)..(3350): n is a, c, g, or t
  misc_feature (3363)..(3363): n is a, c, g, or t
  misc_feature (3365)..(3365): n is a, c, g, or t
  misc_feature (3373)..(3373): n is a, c, g, or t
  misc_feature (3376)..(3376): n is a, c, g, or t
  misc_feature (3378)..(3378): n is a, c, g, or t
  misc_feature (3396)..(3396): n is a, c, g, or t
  misc_feature (3403)..(3408): n is a, c, g, or t
  misc_feature (3414)..(3414): n is a, c, g, or t
  misc_feature (3416)..(3420): n is a, c, g, or t
  misc_feature (3423)..(3425): n is a, c, g, or t
  misc_feature (3428)..(3429): n is a, c, g, or t
  misc_feature (3431)..(3432): n is a, c, g, or t
  misc_feature (3435)..(3436): n is a, c, g, or t
  misc_feature (3439)..(3445): n is a, c, g, or t
  misc_feature (3452)..(3452): n is a, c, g, or t
  misc_feature (3454)..(3454): n is a, c, g, or t
  misc_feature (3456)..(3457): n is a, c, g, or t
  misc_feature (3465)..(3465): n is a, c, g, or t
  misc_feature (3467)..(3468): n is a, c, g, or t
  misc_feature (3473)..(3473): n is a, c, g, or t
  misc_feature (3475)..(3479): n is a, c, g, or t
  misc_feature (3481)..(3482): n is a, c, g, or t
  misc_feature (3484)..(3484): n is a, c, g, or t
  misc_feature (3486)..(3486): n is a, c, g, or t
  misc_feature (3488)..(3491): n is a, c, g, or t
  misc_feature (3493)..(3493): n is a, c, g, or t
  misc_feature (3495)..(3496): n is a, c, g, or t
  misc_feature (3501)..(3503): n is a, c, g, or t
  misc_feature (3506)..(3506): n is a, c, g, or t
  misc_feature (3508)..(3511): n is a, c, g, or t
  misc_feature (3514)..(3517): n is a, c, g, or t
  misc_feature (3521)..(3521): n is a, c, g, or t
  misc_feature (3525)..(3526): n is a, c, g, or t
  misc_feature (3528)..(3529): n is a, c, g, or t
  misc_feature (3532)..(3533): n is a, c, g, or t
  misc_feature (3535)..(3535): n is a, c, g, or t
  misc_feature (3541)..(3542): n is a, c, g, or t
  misc_feature (3544)..(3544): n is a, c, g, or t
  misc_feature (3546)..(3547): n is a, c, g, or t
  misc_feature (3552)..(3554): n is a, c, g, or t
  misc_feature (3561)..(3562): n is a, c, g, or t
  misc_feature (3566)..(3566): n is a, c, g, or t
  misc_feature (3572)..(3572): n is a, c, g, or t
  misc_feature (3574)..(3575): n is a, c, g, or t
  misc_feature (3577)..(3579): n is a, c, g, or t
  misc_feature (3584)..(3584): n is a, c, g, or t
  misc_feature (3586)..(3587): n is a, c, g, or t
  misc_feature (3590)..(3590): n is a, c, g, or t
  misc_feature (3592)..(3593): n is a, c, g, or t
  misc_feature (3599)..(3600): n is a, c, g, or t
  misc_feature (3602)..(3603): n is a, c, g, or t
  misc_feature (3614)..(3615): n is a, c, g, or t
  misc_feature (3620)..(3620): n is a, c, g, or t
  misc_feature (3622)..(3622): n is a, c, g, or t
  misc_feature (3626)..(3626): n is a, c, g, or t
  misc_feature (3630)..(3630): n is a, c, g, or t
  misc_feature (3638)..(3638): n is a, c, g, or t
  misc_feature (3648)..(3648): n is a, c, g, or t
  misc_feature (3651)..(3651): n is a, c, g, or t
  misc_feature (3655)..(3656): n is a, c, g, or t
  misc_feature (3658)..(3659): n is a, c, g, or t
  misc_feature (3662)..(3663): n is a, c, g, or t
  misc_feature (3665)..(3665): n is a, c, g, or t
  misc_feature (3667)..(3667): n is a, c, g, or t
  misc_feature (3669)..(3672): n is a, c, g, or t
  misc_feature (3679)..(3680): n is a, c, g, or t
  misc_feature (3684)..(3686): n is a, c, g, or t
  misc_feature (3688)..(3689): n is a, c, g, or t
  misc_feature (3691)..(3691): n is a, c, g, or t
  misc_feature (3693)..(3693): n is a, c, g, or t
  misc_feature (3699)..(3701): n is a, c, g, or t
  misc_feature (3703)..(3704): n is a, c, g, or t
  misc_feature (3708)..(3708): n is a, c, g, or t
  misc_feature (3710)..(3710): n is a, c, g, or t
  misc_feature (3713)..(3714): n is a, c, g, or t
  misc_feature (3719)..(3720): n is a, c, g, or t
  misc_feature (3722)..(3723): n is a, c, g, or t
  misc_feature (3725)..(3726): n is a, c, g, or t
  misc_feature (3733)..(3734): n is a, c, g, or t
  misc_feature (3736)..(3737): n is a, c, g, or t
  misc_feature (3741)..(3742): n is a, c, g, or t
  misc_feature (3744)..(3746): n is a, c, g, or t
  misc_feature (3751)..(3751): n is a, c, g, or t
  misc_feature (3753)..(3753): n is a, c, g, or t
  misc_feature (3756)..(3756): n is a, c, g, or t
  misc_feature (3758)..(3759): n is a, c, g, or t
  misc_feature (3761)..(3762): n is a, c, g, or t
  misc_feature (3766)..(3768): n is a, c, g, or t
  misc_feature (3770)..(3770): n is a, c, g, or t
  misc_feature (3772)..(3772): n is a, c, g, or t
  misc_feature (3777)..(3777): n is a, c, g, or t
  misc_feature (3782)..(3782): n is a, c, g, or t
  misc_feature (3784)..(3785): n is a, c, g, or t
  misc_feature (3787)..(3787): n is a, c, g, or t
  misc_feature (3789)..(3790): n is a, c, g, or t
  misc_feature (3794)..(3794): n is a, c, g, or t
  misc_feature (3796)..(3797): n is a, c, g, or t
  misc_feature (3799)..(3800): n is a, c, g, or t
  misc_feature (3802)..(3807): n is a, c, g, or t
  misc_feature (3809)..(3810): n is a, c, g, or t
  misc_feature (3812)..(3815): n is a, c, g, or t
  misc_feature (3817)..(3817): n is a, c, g, or t
  misc_feature (3819)..(3820): n is a, c, g, or t
  misc_feature (3824)..(3825): n is a, c, g, or t
  misc_feature (3830)..(3830): n is a, c, g, or t
  misc_feature (3832)..(3832): n is a, c, g, or t
  misc_feature (3834)..(3840): n is a, c, g, or t
  misc_feature (3842)..(3842): n is a, c, g, or t
  misc_feature (3847)..(3848): n is a, c, g, or t
  misc_feature (3850)..(3851): n is a, c, g, or t
  misc_feature (3853)..(3853): n is a, c, g, or t
  misc_feature (3858)..(3859): n is a, c, g, or t
  misc_feature (3862)..(3864): n is a, c, g, or t
  misc_feature (3866)..(3867): n is a, c, g, or t
  misc_feature (3870)..(3871): n is a, c, g, or t
  misc_feature (3874)..(3877): n is a, c, g, or t
  misc_feature (3879)..(3880): n is a, c, g, or t
  misc_feature (3883)..(3884): n is a, c, g, or t
  misc_feature (3886)..(3887): n is a, c, g, or t
  misc_feature (3889)..(3889): n is a, c, g, or t
  misc_feature (3891)..(3891): n is a, c, g, or t
  misc_feature (3895)..(3895): n is a, c, g, or t
  misc_feature (3899)..(3899): n is a, c, g, or t
  misc_feature (3906)..(3907): n is a, c, g, or t
  misc_feature (3909)..(3910): n is a, c, g, or t
  misc_feature (3915)..(3915): n is a, c, g, or t
  misc_feature (3917)..(3918): n is a, c, g, or t
  misc_feature (3923)..(3923): n is a, c, g, or t
  misc_feature (3925)..(3926): n is a, c, g, or t
  misc_feature (3928)..(3928): n is a, c, g, or t
  misc_feature (3930)..(3931): n is a, c, g, or t
  misc_feature (3933)..(3934): n is a, c, g, or t
  misc_feature (3940)..(3941): n is a, c, g, or t
  misc_feature (3943)..(3943): n is a, c, g, or t
  misc_feature (3945)..(3945): n is a, c, g, or t
  misc_feature (3947)..(3948): n is a, c, g, or t
  misc_feature (3956)..(3956): n is a, c, g, or t
  misc_feature (3958)..(3959): n is a, c, g, or t
  misc_feature (3961)..(3961): n is a, c, g, or t
  misc_feature (3963)..(3963): n is a, c, g, or t
  misc_feature (3965)..(3965): n is a, c, g, or t
  misc_feature (3967)..(3968): n is a, c, g, or t
  misc_feature (3974)..(3976): n is a, c, g, or t
  misc_feature (3978)..(3978): n is a, c, g, or t
  misc_feature (3980)..(3980): n is a, c, g, or t
  misc_feature (3982)..(3984): n is a, c, g, or t
  misc_feature (3986)..(3988): n is a, c, g, or t
  misc_feature (3990)..(3991): n is a, c, g, or t
  misc_feature (3993)..(3994): n is a, c, g, or t
  misc_feature (3997)..(4000): n is a, c, g, or t
cataaattatttttaatttattaccactttaaatgcaataagtctttattataaaaaataataataataataataataaattaaaatatatatatatcaaataatttttataaataatttttataattttctactacttaattttaattaaaacataaaatatattataataattattttggaaaaacgtactttatattttaaataatcaaagataatttttttttttaatttgtcaattttcattttatattctattaattaatgaattattaaattaaattattatatatatacattatacattataaaattaatattaggtccaacaaattaatgtaatgtattaagcatcatatatttttacctttaattatttaattaaatattaatttttattattattgaactttgattattcattattatttattttatatattaactgttcattcacctaataatagtaataatattttaatttcattaataatataataataagtatagtatatatttatttattttgttttgttttattttattttacttttttttttatattagtattttcacgactattataacgatatgaaataaatgaaattaatataaaggcttatttttcaaataattaaatatttatattaacaactaattttaattctaataatgagttttttaataatttaaaataatatatatatatataaattatatattacataatttatatgatatataataatattaattaagatgttgaatttgtgataaagaatttttcttataatttaaaattctctaataataacctttttttttcctaactgcgagttgtgaactcgtttttttttttttagacccgagttaacgagaaagaaggacgagaggatctccagtctctcccttaaacatatcaaactctcattggataccgtttgggcattgacccggacctctctctaagcaaagttaatataaaagacattctctatacgaaaggcttcttttcaattatctcttgaactatcatagtgggaggaataactacactaatcttctcacagaacaagctaacatttacatagtctaataacaggaatatctaccatggtgagagaacatccaacttcatttgtaggggaaaacaccctaggaggattaaaatttccttatataaacttaaaaggtaatcactgggtcgatctagaaaccttaagtgtgttagttctaagtactaaccacaaaagacatacgatcatagtatttgttatagtagtcttatttataaatacttaataagtattttaaatcataaaaaaaaaagtaaaatgttaaattacagataaagaagaactgaatacaatagaatattaatataaacctatgaaaaattttaacattttattatttatggagtcttgcattattagttttgaaaatttaaaaaaaaaaaaaaatttataaacctattaaactttttataatttattattgtttattaaaattttaaattattataattacacagtcattattttattaataaccatatgaatcttgcaaagttacacaagttatattttcatagtaacctattattttatttaaaacaataaaaatagaaatatataaataattttttgaaatatttattatactttatgttattaattattttttttaataataatttagtataatatatattattatatttaaaatatagcattgtaaccatagtaatttttatttaaaaaacaaaacaatcaattattaatttttttatgacaaaaaaaaagcatccaaacatcgaaccttttgttatatttaaaaataattctttatcatagtatatctatacttttcacaaattttttttcattaagcattagaacaaataaacattgatttatagttatttagtattaaagttatgtttacaatgctttaaattaaattcttttttttttttttttgtagattttnttttttatttttatattctttttaataatattattaaattttaaaaaatatataaatatataataataaactgttttgacaaatagatatttaggtatcataaacaagttaggaaagaaaattaattatttaaaataatatctattttaatattaagtttaattatgatttattagtagttttttcacatgtatcttttaaacatcataaggaccttcgaaaataaatataattaatattataccttttattatttttttaattattttgtattttatcaatttcaattttttttataatattgtttgataaaagtaattattactcttttaacattataacttttttgttaattcaaacaaataaaagaattctctaatacctcaataccttaaaatatgcatacataaaatattcattatttgaaaactctattataataaattttataaaattgtcattaattctcaacagatgataatctctaattttgtaatcattttaatataattttaaatatcatactatctttatataattttatgttttttaaaagtattttttttttaaaaaaaaaaaaaaaaaaaaaaaaaaaaaaaaaaanttttttttttntatanttttttntaaaaaaaaatataaaaaaantttttataanannantttnaanatatnttatattttttttnntttntnnnnntnnnannatntgaaanntntaaaaaaaanannntnnaaanntntnnaaananatnntannatannnannntttanncnncannatatnannataaaannntttantttnnannantnannngnnnnnannnctttntnnnaaaanatatnannaaaatnnnnanantnntaaacnnnaaatncnnnnnnctnannannntntnntnnntnntttannantttttntttntnntttntnntntntnntttntnaaaatttntatatatataaanataaaanaaanatatatatatataaatttaaantttntaaaattttantnntnaaatttttntatnaaannntaaanannannaaatttttntttaaanattttttaaaaaaaaaaaanannnannnntnnnnnnnnnnannatnntnannaaaaaaaanaaaanatantnaaanaaannannnntnnnnaaaaaaananannatnntnnnaaaanantnntnntnaaaaaaanaaatnnnnntnaaaaaaanaaatnntnntnaaatnntnaaaanannattttaaaaaaanatnntnaaaaaaannantnntnntnaaaaaaanaaaanatnntaannataaaaaaaaaaaaaanancanaannannaaaanaannnnttntntaaaaatatatananatatatanaananaaaaaaaaaaaaaaaaanaaaaaannnnnnaaaaanannnnnaannnaanntnnaannttnnnnnnnttttttntntnntttaaaanannatatncnnnnnannantncnnnnantnntcccnnngangnnnntannnntttntttnnanntcnntnaaaagnnantnntaaannntatttannatanaaaaananntnnnttttntnntantnnttttannannaaaaattttannttttntnaaanaaanataaaaanaaaaattttntanaaannannatnntnantnnnngaaaatnntttnnnannananaaaatnnnannaaananatnntaaanntnntnntttttanngnnaaanntnnngaaananatnannanngtgnnnangnttttnaaaangnngntnntttncnngnngnnnnnncnntnnnnantnntctnnttttntntnnnnnnnanaaatnntnngnaaaanntgnnnannatnntcnnnntnntanngnnantnaaanaaanaaaaatnntnnttttntnntttantnntnannannataaannantnannatataaantnntnantnannatatannntnangnnnannntnntnntannnn

SEQ ID NO: 1262 - DNA, 4000 bp, Escherichia coli
  misc_feature (342)..(342): n is a, c, g, or t
  misc_feature (390)..(390): n is a, c, g, or t
  misc_feature (662)..(662): n is a, c, g, or t
  misc_feature (1012)..(1012): n is a, c, g, or t
  misc_feature (1271)..(1271): n is a, c, g, or t
  misc_feature (1273)..(1273): n is a, c, g, or t
  misc_feature (1961)..(1961): n is a, c, g, or t
  misc_feature (1988)..(1988): n is a, c, g, or t
aaaagtggaggaagcgtaatgggtcttagattaaatgaattatcaccaggtgttggcgcaaagaaaactgcccaacgtcgtggtcgtggtatcggttcaggtcttggtaagactggtggtcgtggtgtaaaaggtcagaaatctcgttcaggttctagcattcgctcaggatttgaaggtggtcaaatgcctttatatcgtcgtctaccaaaatttggttttaccagtaaactggctatgaagactgctgaagtacgtctttctgaactgaataaaattgaaggcgatgtagttagccttgaaacacttaaagctgctaaccttatccgtcacgatatgaancgtgctcgtgtaatgctatcaggcgaagtcactaaagcttatactttnaaaggtattaaagtgactaaaggtgctaagcaagctatcgaagctgctggtggtagcatcgaggagtagtaacgtgtcaaaacaatcaatgtcatcggctggtataccgcttaatccattcgcatttatacgtaagtatgatgagctatggacgcgtttattatttttaatcggcgcattgattgtttatcgtttagggtcacatattccagttccgggtattaacccagttaacttggctgatctgttttcgcgcaacgaaaacaccattntgagcatgtttaatatgttctcaggtggtgcgctagagcgtatgtctatcatggcacttggcattatgccatatatctcagcatcgattatcgtacagatgatgtctgcagtattgccatcgcttgaagccctcaaaaaagaaggtgaagcgggacgacgcaagctaaacaagtatacccgtcagggaacgcttgctttagccctagtacagtcattaggaatgtgtgccggcttaatcagccaaaaccttactttatctactggtcttaccttttatattccagctgttacttctttagtagcaggcgcaatgttcttaatgtggcttggtgagcagattacagaacgnggcgtaggtaatggtatttcaatgctcatttttgcgagtattgtggctggtacgccaggtatgatttcgcagtctattgaacaggtcaatcaaggtcagatgaacttgattgtgctatttatttttgtactgctaggtatcgcggttactgcgggtatcgtttatattgaacgtgctcaacgccgtgttcctgtgaactatgcacaaaaacagcaacaaggtcgcaaaatttatgctcagcagcaatcacatttgccgntnaagctaaatatggcaggggttatcccagctatttttgccagttctttgttattgtttcctgcaagtttagggcagtgggttggtcaatcgactgatcctacctttgtacagaaaatacttcaaaatatggcattggtgttgtctccagggcagccgctatatttagtactgtttggcgcaatgattattttcttctgttatttttatacggcattggtatttagtccgcgtgaagtagcagagaaccttaaacgtagtggtgcgtatatcccaggtattcgcccaggacaacaaactcagcgttacctcgatcatgtattaaaccgactgacctttattggcgcgatgtatatgacggttatttgtttaatgccaatggtcgtccagtcatcgtttggtgtgccgtttcaactcggtggtacgtctttactgattatggtggttgtggtaatggacttcatctcgcagattcaagcgcatttgatgacccatcaatatcatgatcagacgttaattcaatcgcccactcaaccttaaatgagcggtacgatatttcaaggagcatgctatgaaagttcaagcatcagttaaaaagatttgtggtagctgtaaagttgtgcgccgtaaaggccgtgtacatattatttgtacagcagaacctcgccacaagcaacgtcaaggttaatanttagtattagaaaacatctagttttcnctgctaattaaattaatacttgaaaaataacggcggatgcgatatcatccgccacttgccgtgtttatacaaaatcttttataatagaatcgatgagcagacttatagtcaaaacatcgataatgactataaaagctctagtattaacagcaacaaatctgaagagtaaagccttatcgctagataacgcttatttttctttaatggagagaaatcaatggctcgtattgccggcgtaaacattccggataataagcatgctgttatttcactaacttacatctttggtgtaggtcgtaccactgctcagaaaatcttagaagcagttggcatcgcccctactactaaagtcagtcagttagatgatacacagttagatgctatccgtgcacaagttgcaaactacatgactgaaggtgaccttcgtcgtgaagtttcaatgaacatcaagcgtttagttgatcttggttgttaccgtggcatccgtcatcgtcgtaacctaccagttagaggtcagaacaccaagaacaacgctcgtactcgtaagggtccgacacgccctctcaaaagataattaacttaggaagctaaaagatggcaaaagacactcgcagtcgcaaaaaggtggctcgtcgttcagtatcggagggcattgcccatatccatgcgtcttttaataacaccattgttacgattaccgatcgtcaaggtaatgcattggcttgggccacttcaggtggacaaggcttccgtggttcacgtaaatctacaccatttgcagctcaggttgcagctgaagtcgctggtaaagcggcccaagaatatggtgttaagaatatcgatgttttggtcaaaggaccaggaccgggtcgtgagtctgcggtaagagcactaggtgcattgggttataaagttaacagcatctctgatgtaaccccaatcccacacaatggttgccgtgcgccgaaaaagcgccgcgtctaatattaaagacgaagctttttatactaaaagcttataggagacataacaatggcccgctatattggaccaaaactgaaattatcacgtcgtgaaggtacggatttaggccttaagtctggcgttaaaccgtatgacgtaaaaacgaagaaagctggtcgtccaccaggtcagcatggcgtaagccgtaacaagacctcagaatatgctctacagttgcgtgaaaagcaaaaagttaagcgtatttatggtgtactagagcgtcaattcgcgaactactataaagaagctgctcgtaagcgtggcgctactggtgaaaacttgctagcaatgcttgagagccgtctagataacgttgtatatcgcatgggctttggctcaactcgcgcagaagcacgtcagctagtcagtcatcgtactgttatggtaaaaaaagctggccgtgatgagtttgttcgtgtgaacattccttcaattcagcttcaagatggtgatgtcatcgctatccaagagaaatctcgcgaacagctacgtattaaaaacgctatcgaattagcgacacaacgtggtattccagaatggcttgatgttgaccacagcaaactacaaggcacgtttaaacatgcgcctgatcgtattgatctacctgctgaaatcaacgaaagcttgatcgttgagctatactctaagtaatgacgtaatgctcaatgttatgaaaatggcattgagcaattaacgttaattaaaccagtttaataaatcgaggtgacatcatgatgctaaatgcaactgagtttctaacgccgaatgccattaatgtggatacggttaacgaaacgattgcgaaagtcacgctcgaaccgttagaacgcggctttgggcataccctaggtaatgctctgcgtcgcatcttgttatcttcattacctggtgctgcagtcattgaagctgagattgatggtgttgaccatgaatactcaacgcttgaaggcctgcaagaagacgtacttgatttgcttttgaacctaaaa

SEQ ID NO: 1263 - DNA, 4000 bp, Escherichia coli
  misc_feature (1988)..(1989): n is a, c, g, or t
  misc_feature (1991)..(1991): n is a, c, g, or t
  misc_feature (2349)..(2349): n is a, c, g, or t
tgcggctgtagctgaagtctggccacccatagttgcggccgggaaggatgacattgacctcatcacccccgttcatcccatgttccgctgagagtatggtaccggactgttgatggacagccagtccaagctgatcgcgatgcccgtaggaaaacacggccgcattggcatcatccctgccaaggaaaggattactcgcaggaatgctgccgtcttcattcaagtgcaataccttgccattgacgctggccaaatcctgggcctggtctccgaagggtgccccggtagtgataaagattgtgccatcgggagcaaacgccaggcgggatccgctggtgccggcaaactctcccgcgaagagttctttcacctctaccaggcggccattatccaggcgtccccgcatcagggtgacggcactgcttggttcctcagaatccgggttcggtttgttgtaggtgaaatagagccattgattctcttcaaagtgcggatgcagggcgaggtcgttaagcccgccattgcggtagaaaggatccagttggggcatgcccatgactggctctggatcaagaacaggatcaggtcctgtggcctcatgaatgatacgaagctcgcgtccccgctcggataccagaaggtcgccattgggcaggaaggccatgctgaagggacgctcaaaatcccgcgcgatgacactgacttcgatgccatgttgctctgccgtatcaaaaatatagggcgtttctgcaaggtccatggcaggaataccgatttcaccctgctgtgcagagagtatgcatggagacagggccgtggtggcaatcaggaaaaatgtcgcagttttcatggcaaacctctgctggtaaggggatggctcaattcgtttgacgctgatattgaacgccggtgtcggaattgtataccgggaaaacagaaacagacagatgcccgaaaattatcctgtgccaataagggagggaatagtaagagtaaaaaaaagcacgcctgtacggggagtagaggcgtgctgcaaatgctcagggaattcgtgggaccctgagggttggggttaggggttaatgattcaggttcagcctcggttgaaatcacccagggcgcccaggcgattatcactacctggaagataattgcgattgctgatactgacaatacggtagacgttatcgttatattctgcccagcgagccagcttttccaggagaggtaattgctccctgagcagtggcaactgtacaggattatggataccaagctctgtactttgcaggttaagggcttggtcaaaggcttcaacagctttcgtatgttggccggattccgccatgtcacgggcaagtgccgtataggtctggatgagttgtgtattgtattgtgcctgctgatccgggttggtgttcaggccaactctttgcatgtgaaccctgtcttccagagttttggcggtggattcaagcaaagccgtgtcatgtcttgccttgtcagtgtttactgatatcagcggcataacatatgcggtgtccatggtgatggattgtggactgctatcggcagatacagggcctgaaaagagcgccgatgcgagcaatgccgttagcagcagacttgtatgatgctttttatgtttgggtaagcttgcaaccgcagactttcctgtatggaaagcagatgcggccaacccggcctttatagaagccatggtctttcccccagtgcaaatattatttccctaactgtcgaacctcgttttgacactccgggaacaccgatggtttcttttggtgaaactctggttggtgttcgccctgtgttcctttccaccggaattattgtttttatggtggatcggatagtccgacggctttgttacgtcttagcattttcagcaaggactaagaaccacataaaacgggtttttcatgctgctttgcacaacgaccggcatcacaaaatcagcaataaatctnntnaattcaataggttatgaattccgcttatgtctggtcgattttatttttttgtccggaattattgagtccctccttgataagaaaaacaatcctgtaccgtttaatgaaagttgacctggcaaagtcccgtttttgatcatccatctctgcacttatcaagtcgtgcgcaaaaaaaaggcgccaactggcgcccttttttgtcgtctatgttgacgaattttacgattcgtccaggaagctcttcaggtgatcggagcgggtcgggtgacgcaacttcctcagtgccttggcttcgatctgtcggatacgttcgcgtgtgacgtcgaactgtttgcccacttcttccaaagtatggtcngtgttcatgtcgataccgaagcgcatacgcagtaccttggcctcacgtgcagtcaggctgcccagtacttccttggtggcttcgcgaagtccttcgtccagtgaggagtccacgggggaatcgatattggcatcctcaatgaaatcacccaggtgcgaatcttcatcatcaccgataggggtttccatggagatgggttccttggcaattttcagcaccttacgaatcttgtcttccgaaagatccatacgctcacccagttcctcaggtgttggctcccggcctttctcgtgaagcatctgacgtgagatacggttaagtttgttgatggtctcgatcatgtgtaccggaatacggatggtacgggcctggtccgcaatggatcgggtgatggcctggcgaatccaccaggtagcgtaagtcgagaatttgtaaccacggcggtattcaaatttatccacggctttcatcaggccaatgttgccttcctgaatcaggtcaaggaactgcagaccacgattggtgtacttcttggcgatggagataaccaggcgcaggttggcttccaccatgtcttttttggcgcgacgtgactttgcttcgccgatggacatgcgacgattgatgtccttgatctcactgatagtaagacctgtttcttcctctaccagcaacatttttttctgtgcccgcaggatttccactttcacctttgccaggctttcggaatagtccttgcggcgcagatgggtgtccagccatttcaggttgacttcattacccggaaaactcttgatgaatacactgcgcggcatctggccagtgttgatacacaggttgcgaacagtcctttcatggcgacggatacgggtcaggcaagcgcgaacatgctcgagcagcgggtcgaactggcgtggagccagcttgaagaacttgaagacttcacccagtttttcaagggcttcgatacctttttcatggtcacgtccatactttttgagggcacgctgggttgaacgatactgcttgcgcaattcttcaaaacggatcttggcttcttccggatcaggaccaccagcattttcgtcctcatcgctggagtcgtcgtccttgtcatcgtcgtcatcactggcttccgagtcgtcagtttctacaggtgcactgcttgctcccggagtgatttctgattcgttagtaatgtccaggtaaccggtgagtaaatcggcgaggcgtttttcctctttttccaccagggtgtattcgtcgaggatgaattcgatagtaccggggaaaaaggccatggcagacatcagttcacgaatgccttcctcgattcgcttggcaatggcgatctcaccttcacgggtcagaagttctacagtgcccatttcacgcatgtacatgcgcacgggatcggtggtgcgaccggcttcattttccactgcagccagtgcggcggcggcttcggcggcagccagttcatcggtctcgttttcgatcatcaacaactgatcggcatcgggggcggtttcaaaaaccttgatgcccatgtcgtcgatcatctggatgatatcttctacctgatccggatctgagatggattcgggaagatggtcattcacttccgcataggtgaggtaattctgctcct

SEQ ID NO: 1264 - DNA, 4000 bp, Escherichia coli
  misc_feature (70)..(70): n is a, c, g, or t
  misc_feature (1407)..(1407): n is a, c, g, or t
  misc_feature (1605)..(1605): n is a, c, g, or t
  misc_feature (1827)..(1827): n is a, c, g, or t
  misc_feature (3129)..(3129): n is a, c, g, or t
  misc_feature (3178)..(3178): n is a, c, g, or t
  misc_feature (3841)..(3841): n is a, c, g, or t
tggaatactcatcaccgcacaaggatttgaaagagtatctgtcgaatgaaacagacaagtcacaatctcncccccggcattctctttaagatatgcgagcaactccccatcccgatctctgatatagtcggaataagtcgatgtcgtatactcctgcctggcagtgaaatcaagcatagcctgcatatcggttaccgaccgtttattgaagaaaaaagtagaagccggcaggatatctcccgggaaatcctccaccggttgttgttggcgcaacacattcataaatgtcagacaagtatccgtatcatggctgacaccggagaaataaatggcatctccattcattttcatatcaaattcggtccatccgcccaactgtgtacacgaacgaatcccgtcggtagcctttcccatactcaacggttgcatacgggcataaatagtagctgccacacgggcacgtttatcctcgtgtactttggcaaacgaggcatcggtcagcaaagatttcttggacaaacgggcatcgatcacttgctcaatcagttttttctgataactcacaaccagaaagtcggaagtgaaataacaagccaggaaactgtcatccggcatcggataaatacgaatctcttcccctttatagtcaaacagctttgacgggaaactactcgaacagtatttacgtataaacttttccaccaactcgtaatcgccgtttcccaagctgcaatacaacacctggttgcgatcattgtcgggttcatggaaactcaacaacactttattcatctgcttgctcaacccgtgcggcgtatcttccaacaacgtatacagatggagcttcagataagaaaataatttggaaacataaagaaaatgtcggtctttactgcaactcaactcattgatcccctgtatcattccggcaagatcatccgtctcgaggactacagtggccgaacccggaacaagcgtgtagagattaaaatccttgcgtccttccgccgccgacaacctgaagaaagaaaacatggcaaagcctgtacacagcagtacaacagacgagattacggctattttcactatcgtacggagtttcatggcattcgttgtttatcggctcagtgcaaaaataataatttctccaaataaaacaaaatatacttaaagaaagaattataaagcatcaatcactaacattctaattcaagcccgtcgaatgcaaaatgcacatgcggaggaagttgcttctctacatctgcctgaagtccgatatggtgactcatgtgaatcagccaggtttccttcgctccgatgcgtttcacagcctccaatgcttcagacaggctctgatgggtgttgtgtggcgctatgcgcaatgcattcatcaccagcacctctatnccttgcaactgctcaaacgattcatcgggcatggtcagcatatctgttatatatccaagctttccgatccgatatcccaaaatgggcagtttgccatgcattacccttaagggtaacacttcggtatgattaacaagaaaagggcgattgggttcaatctcacgcaaaggaatattcggaactcccggataggaatgntccacaaagcaatagggcatccggctgcgcaaacgttcggctgtataagtttcggcatagatgggcacttccccgaaacggcagaaagggcgaagatcatccaaccctcccacatgatcataatgttcatgcgaaatcaacacagcatcgatctttccaaacggaacgcgcaacatctgttccctaaaatccggaccgcaatccagcagtatagtagcgtcntcagtatacaccaatgctgaggtgcgaagacggcaatctctcggatcttttgaagtacaaaccgcacaagtacatcctatttcgggcactccggtagaagtcccgctaccaagtattcttattttcatttctttcaattatcaatctgtcattcctgagagccgacatgccctgcagccccatcgtaatcagataaaattcacttccggatgaatgtctatgccaaacttcgcacggaccgaagcacgcacggcatcggacaatgcgatgacatccgctccttttgcgcctccgcgattcaccagcaccaacgcttgcttatcgtgtaccgccgcagggcctaatgctttacccttccagccacactgatcaatcatccatccggccggaatcttcacccggtcagtatcgatctcgtaaaaaggcatttgaggatattctgcctgtaaggcttcgaactgctcacgacccacaatcggattcataaagaaacttcccgcattccccattacccggggatcaggcaacttctcttcacggatagcgataatcacccggcgcaccacatccaatgtcactccgggatacttctccagctcccggcggatagtaccgtaatctaatgtataatgttccctcttgctcagcctgaaactgacataggtaacaaaaacgctcttattctcagggcgcttgaagatgctgtcccggtaagaatatccacactccgttacatcataaacatgctctttcccttcaatgttcagggtttccacccggacaatcagatctttaacttcaaccccgtaggccccgatgttctgcaccgcactggctcccacctctccggggatcagtgaaagattctccacgccgtaccaatgccgttgcacgcaatagtccacgaagtcgtcccagaccacacctgcccccacacgcacaacaatatcgtcatccgtttcggccacaacctctacgcccccgatgcgtgaatgcaggatagtaccttcgtagtctttagtaaacaataagttgctcccccctccgatatgcagataaggagaggtaacccgtccggacccgatcaacccgcgtaattcatccaccgaagcatactccaggaaacaagccgcagacacatcgataccaaaagtgttatgtgataaaagagagtatttctgttccataatcctataaaagcaatctctaaatacttgtatcctcaaacttgtacaactcccagccactgtctttgcgctggaaatagaggatattggagaacccgttgccaatgcctttcantgccaatattttatgtgaggcattgtcatcattttgctgcccgtagttnatattcgaaagtttatcggcaggcaatgccggcttaaaggcaaaccattggttcaagtcaagtgtagtttcgagtatcgagaagtcatcatccggatcggttgtcacaaagacaagcggttggcggattcgccggctctggaaaatactatccgtcgcaaaatgaccgaagaattcaacaaagtcctcgttctcgttttcctcaatcggacgcagattgattgcttcgagcatccacgcccctttaattctttcaaaataatatttcttcaccattcgttttttcacgaaaatccattccacctgaacggatgtgagtgaagtgtctcctaccagatccatatcctcttcccggtcgaagagtaaggtataataactttgtttggcaaacaagtcatcatgcttccagtacttcctgtcgattttcgaagcccgttctccgttgtagtagggcaacggaaacaccacgcgctgcctttgcagagcgtcatcagaagcaaagttgtagataaagtcgtcaaacgattcgtcagcctcaatcggtttaggttcgtccgaagtcttttctctgtcaatagaatcggttttgttcaccattgccgaatctaccagatgtgtaatagatgcaaaggggtcagcgtcagtcttattactgttgccgcangaagcgaacaacaccaggacggtgactcccgccattattgttttcattttaataattagcaatgtgtcgatatccccacatgccaaccggttttcgaaactctttcatactccggtcggcacatgggatttatatcatcacattattttaatttagctc

SEQ ID NO: 1265 - DNA, 4000 bp, Escherichia coli
  misc_feature (10)..(10): n is a, c, g, or t
  misc_feature (62)..(62): n is a, c, g, or t
  misc_feature (391)..(391): n is a, c, g, or t
  misc_feature (461)..(461): n is a, c, g, or t
  misc_feature (1348)..(1348): n is a, c, g, or t
  misc_feature (1723)..(1723): n is a, c, g, or t
  misc_feature (2152)..(2152): n is a, c, g, or t
  misc_feature (2624)..(2624): n is a, c, g, or t
  misc_feature (2627)..(2627): n is a, c, g, or t
  misc_feature (2687)..(2687): n is a, c, g, or t
  misc_feature (2720)..(2720): n is a, c, g, or t
  misc_feature (2986)..(2986): n is a, c, g, or t
  misc_feature (3559)..(3559): n is a, c, g, or t
  misc_feature (3739)..(3739): n is a, c, g, or t
  misc_feature (3764)..(3764): n is a, c, g, or t
  misc_feature (3770)..(3770): n is a, c, g, or t
  misc_feature (3892)..(3892): n is a, c, g, or t
  misc_feature (3955)..(3955): n is a, c, g, or t
  misc_feature (3991)..(3991): n is a, c, g, or t
gttgtaaatntgggctaaaactcggtgcgctgtccagtaatgctttggtatagggatgcagnggacgtttacgtaacgctttcatttttcccgattctactgtttgcccgcaatatagcacagtcattgaatgcgccattgcagagattgccaataaatcatggcctacaaataatatacttaaatcacgggttttatttaaatgtgtgaataaggctaaaatctgtttctttatattcgtttccataccacgcgtaggatcatcagcaattaacaaggtaggctgagagattaatgcaagggcaatcataaatttttgacaaatatctaatgacaattcatggggatacttattgatacattgagccacgttctcaataccgactcgcgntaagatttgtttcgcaatcttcatttttgagcggtttcgctcccaccaataacgtccttcaacaaactcntcgggtacactttcgagcagttgttcttgaaggcgagatgagggatctaatgctgccattggatcttgaaaaatgacagcaatatcgcgacgcatgatagcctggcgttgtgcttgcttcatggttaataagttttcaccacgccatgtcaaccggtctgcagttacaatccactggggaggaagtgcacctgatatcgcacgtacaatcaaactttttccagagccagtttcgcctacgagtgctctaatctcattttctttaacggtcaggctgactttatcaagcgccttgattaatacaccgttactttcaatctctaaggtcaaatttttgatgtctaaaataatcattaatgtgacatcctgtttctgtgcgctgaacgtaaaccatcacctacaatattcaccgatagcaccatcaaaaatatagcaaggcctggcagtaaaatattccaaggggcaatataagcagtagatagcgcatctgcaatcatcacaccgagttctggcattaacgtttgagcacctaaatttaaaaatcctaaggctgaaatatctagtatcgcgatagaaatagccaatgtaccttggacaattaagcgttctaccatattaggtaagatgttataaataaataaagcggaagatgttgcgccatcaagtttggcggttaggatgtaatctttactcatttcttggcgaacaaaatcacgtgtgacatgaacaaatcgtggtattaaggccaagccaatcgccaacattgcattagttaacccagtacctagcattgccataatgataatggcaattaataaagtgggggttagcatcaaaatgtctaatacatgattgataaaactggaacgaagacctgcagacataccngctatgacacctaaaataacgccaaaacacaatgcaactaaaaccgtaatgatgctagaaaataacgttatttgagtaccgtaaaataagcgggttaacatatcacggcctaatgcatccgtacctaaaatatgtaatatactgccattatcattccatgctggtgggatcagcacagcatcggtatgctgtgtggttggctcaaatggagtcagcagtggtcctaaaatagccataataataaagaaaattaatatccccagtccggcaactgcaacatgacgttgtcgaaattcgctccaggtcgcctgtaacggcgttggatagtgttcttcttcgtataaactagtgtctggcataagcaaacctatctcnggtgggatcaatcatctggctcaagcattcaagacttaatgtcatcaccacgaccaccattgcgactaacaacatacctgcgcggatagcggggaaatctcgttcataaatagcttggataagccagtcaccaatccctggccatgaaaatatggtttcaacaatcatgacatttgtcattaacgtagatatttgcaacgctaacaaaggcaatactggtaacaaggcattacgcaatacatgtctaaagaaaatcgtagaggaaggcagtccacgtgtttgtgcacatttgatgtattcagtttgcaacacgtcagctacagaacggcgcgtcgtgcgcaggaaaacagcaaaggcgataaaagacactgataatgtcggtaggataaggtgctgcagcgcatcatataaagcagcttgtttataggngacatccgataaccaaatatccagtaagataaatccagtgcgatgagggatatcaaataataaactcaaacggcctgacatgggtaaccattgcgcttgtaaactgacgattaatattaataataacgccagccaaaatacggggaatgaatacatcaccatgcttgatgacataaagatattgtcgatttttttgtggtattgcatacctgcaataaaacctaatgggatcccaagtactaaagcgatggtgatagcatagagacttaattctaacgtagcaggtaacaagcgcataatttctggataaagcgcattacctgtggcgaaactgactccccattcgccttctaataatgcttggatataataccaaaatgccattaatacattggtttgttcagcgactagcattagggtaggttggtcttgaataaactcagcaccaaatagatttaaccaagtatctccnggnaagaagtaagctaatgcaaaggacaacaccactaagatacataatgtgataaaggtgagntttaaaaaacgaaacaaggtattgatcatggangcccatcctggttatctatttgttgtaccttgggtgctttcaccacattttcaaaccgaatactaccataagggtttattgataaccccttaatggagtgtgctttaacttgatagcgattagcatgtgcaatagggaccaaaggtatatcatgggcgataatattattagctttggcatataaagatgctcttaaatcgacatcagggatccggattgccgcattaattaatgcgttaaattccgtattacaccacatcgctcgnttagtacctgaaggaatggcttcacaactaagtaaggggcgataaaaattatccggatcaccattatctgccgaccagcctattaatacactatcatgttccccttgggaaagtttgtcacgaaatgcatgccaatcataggttacaacagtgacatcgacatcgaccgcagccaagtaatttttaatcagctgtgccatgcgtttggcattggggttatatgcgcgcacaaccggcattgcccaaagtgtcattttaaagcccgcagggatattggcttgattgagtaattctttggctttgatggggttgtaacttacttctttaatactgctgttataggcccaagaagaaggggggatcagcgaacgagctcgagaggctgaattgaagtaaatagcatctaaaatcgaatttttatcaattgccatcgccaaagctcgacgcactataggctgatcaaaaggcggtttacttgtgttaaaagcccaaaagccaacatttaacccaggctcttcttctaccacaatgtttggcgtagcacgcatgacatcaatctccgcttgagagggntaggcaatagtatcgcactcaccggtgactaacttggcaaagcgaatggcactggaaggcgtaatgtcataaatgagttgtgcagattgtggcacaccacgccaataacccagatgtggtaaaaagcggataaattgatttttttggtaagcatcgaatttaaatggcccagtgccgatnggataaaaatcgatttgtgattganggttancaacagctaacatatcggcatactcagcggataaaataacggcaaaatcggtagcaagattagctaagaaagaagaatctcgttcaaataaactgatctctatgcgataaccattgatacgnttaatggattgaattttctcagccaaattcaaactatcaaaataggggtaactgcccccattnacttcatgatagggatgactagggttgatccagcgntcaaaacta

SEQ ID NO: 1266 - DNA, 4000 bp, Escherichia coli
  misc_feature (628)..(628): n is a, c, g, or t
  misc_feature (1969)..(1969): n is a, c, g, or t
  misc_feature (1991)..(1991): n is a, c, g, or t
ggatcatcgccagtgcggtgcgaagcgcgttttggcccgagaaatcgatcatgcgtcggcgtgaatgaccaagggccacatgccctaactcatgggccaccacgcttgccatttcttcggcagtgacctcgccatcggtgaacttgcgataaaagccgcgggtgatatagattttgccatcgggtgcggccagaccgttgactggatcaatttcataaagatgcaagcgaattttagccacctcaagcgctttagccatgcggtcggtcaacacttttaactttggatcaagcaattcatgcgactggccggtgagctcgcgattggtacgccagaccgaaaaccggtacatgataacgccgtaaattagggccagaagaatgggtgaaaattgcaacatttaacttatatggggcatcatccaccctatgacaagcatgctcgggccacagggcgcaactcggcctgctagcggccgagttgtttcatgccttgttctattccagccagtgtcatcggaaccatccggccaggaaaaaggtcttggatcatgctgatggaatgtgtgtaaccccagtatttctgtggtaccggattaagccagaggtgattttgccagtggtcttgngcgcgctgcaaccagacttgacccgcctcggcattccaatgctcgttggcaccaccggggtaggcgatctcatagggtgacatgctcgcatcgccgacaaaaatgcatttatagtcagctccataggtgtgcaaaacgtccattgtcggaatttgcgcatcccagcgccggttgttgtcccgccaaaccccctcatagaggcagttgtgaaaataataatattcaaggtgtttaaactcggtccgcgccgcgctgaacaattcctccaccaccttgacatgggaatccattgagccgccaacatcaagaaaaagcaggacttttacggcattgcgccgctcggggcgggttttcacatcaagatagccgttttcggctgtggccttgatggtaccatccagatcaagctcgtcctcggccccgtcgcgggcccattggcgcagacgtttcagcgcaactttaatgtttcttgtgcccaactcaatcgtatcgtcgaggtttttaaactcgcgtttgtcccaaaccttgatcgcacgcttgtgccgactttcgttctggccgatccgcacgccttcggggttatagccaaaagcgccaaatggcgatgtgcccgcggtgccgatccatttgctgccgccctgatggcgtttctcttgttctttaaggcgttctttcagggtctccattagtttttcaaacccgccaagcgactgaatctcgtcgcgctcctcctgactgagatgcttttctgccatcttttccagccagtctgcagggatgtccacagcctccatcacttcgccaagcgtgatatcctcaagacccttgaatgtggcagagaacgcctgatcaaatttatcgatattgcgctcgtctttgaccattgcactgcgcgctagatagtaaaacgcctcaatatcataggtcacgatgccagctttcacggcctctaaaaatgttagatactcgcgtagagagactggaattttacgctcgcgcaggttttcaaagaacggcagaaacatcgctacgtcgcagctcggtggatgaccaaagttatgaccagacccgcgagcatgaacatgatgccatagctggtggcataatgcagaatgtcgggccagcggccttttcggcgatgggcggtgtagcccccaaaagacacgccgcaaatcaatcccaatattattagcatacgttttcctattttccccgcgtggcttggcctttgcaaggtggttttgtcaaatcccagcagctattagccggtttgctatctggcctgacaggcgctgtctagtcgaaccaccctgttttatgcatcattgagcagcactttancctctcgccttgcttggttganttacctagtgccgcgtgccataaaggccagtctctcaaataaatgcacatcttgttcgtttttcaacagcgccccgtgcaactgaggtaaagcattcgatccatcccgcgctaagtcctcagctgtgagatcttctgccaacagcagtttgagccaatccagcacctcggacgttgagggttttttcttcaaaccctgctgttcgcgcaactcgtagaactgggtgagggcagtggtcagcaacgcatcttttatcccggggtgatgtacttcgacaatttggcgcatcgtttcgaggtcaggaaaccgtatataatggaaaaagcagcgccgcaaaaacgcatcaggcagttctttttcattgtttgaagtgatgatgacgatgggcctttggcgggcttttatcagttcatcggtctcatagacatggaactccatcttatcgagttcctgcaaaagatcattgggaaactcgatgtcggctttgtcgatctcatcgatcaataatactagtttttcatcggcctcaaaagcctgccagagcttgcccttgcgaatatagttgcgcacatcctgcactttttcgtcgccaagttggctgtcacgcaagcggctaacggcgtcatactcataaagcccctgctgtgctttcgttgtggatttgatattccattcaaccatctcaaggcccagagccttagcgacttggcgggccagttctgtttttccggttcccggttcacctttgaccaaaagtggcctttcgagcgtcacggcggcattgaccgcaaccgtcagatcatctgttgcgacatattcttgggtgcctgtaaatttcatcggtcattccaattgtgtaagtgatttgcgctgacactaacgcgaacacaaaaacaccgcaatcggctcctaacagctagtgacaagcggcgggtcatgaggtaatgcacagcctacgcgtacgtgtgtttgtcaaacttaaaaacatcaaccttgtggagagctcgaaatgaaagcagacgtgattctgcccgataactataaaccgagcgaagatgaaccattcatgaacgccaaacagcgtgagtattttcaacgcaaattgttgagctggaaagctgatcttttagttgagaccagagatacgctggaaggtcttcaggggacgacgcgcaacattcctgattctgcggatcgcgccagtgaggaaactgaccgctcactggaactgcgtacccgggaccgccagcgtaagctggtgaccaagattgattcggccttgcagcgtattgccgagggtgaatttgggtactgcgaagtcaccggagagccgatctcgctcaagcggctggatgcacgacctattgcgacgatgagcctcgaggcgcaagaacgccacgaacgcaaggaaaaagtgcaccgcgacgactgagctcgacagctgtggcttaaacgacagccgtcgtgtcagatgctttgacggtttcggtttcaggatagcgcatgcggattaccggtaaaaaaatcatcgtgatcggtggcgggattggtggtcttgctgcggcgctggcgttggcgcggcttggcgctgtggtaaccgtgcttgaacaaactgccgaaatctctgacatgggggctgggttgcagatcagcccaaatggctttgtggtgcttgatgcgctggggttacgcgatgcggtggttgaccggtcggtggccgcaacttctgtggtcctgcgcaattatagcaattcggcgatggtggcgacacttgatgtttcgccccaaacaggtggacagaattaccacttcattcatcgggcggatctggttgcctgtctgctgagtgcggcaagacaggccggggttcaagtgcggttgcagcacaaggtaaaacaggtgcagacctcggtgataccgcaggtggtcttgacgaatggcgcgacgatgatggctgatctggtggttggtgcggatggtttgcattcttgcttgcggccggtcctaaa

SEQ ID NO: 1267 - DNA, 4000 bp, Escherichia coli
  misc_feature (1992)..(1992): n is a, c, g, or t
  misc_feature (2001)..(2001): n is a, c, g, or t
  misc_feature (2389)..(2389): n is a, c, g, or t
  misc_feature (2495)..(2495): n is a, c, g, or t
  misc_feature (3148)..(3148): n is a, c, g, or t
  misc_feature (3188)..(3188): n is a, c, g, or t
  misc_feature (3268)..(3268): n is a, c, g, or t
  misc_feature (3388)..(3388): n is a, c, g, or t
  misc_feature (3601)..(3601): n is a, c, g, or t
  misc_feature (3626)..(3626): n is a, c, g, or t
  misc_feature (3794)..(3794): n is a, c, g, or t
  misc_feature (3908)..(3908): n is a, c, g, or t
aacttgcgtcctgcgatttccttcaaaggaaaaaggttttgtcactaccgctactgtaagggcgccgatttccttactgatttcggcaatgacgggggcccctccggtgccggtgcctccgcccatgccggcagtgatgaagaccatatcgcttccttccagcattgcccggatatcgtctacgctctcttctgcggcctccctgccgatttcaggttttgcccctgctccgagtcccctggtgagccctttacccagttgaatcttattagaggccaaagacatttcaagggcctgggaatccgtatttgcagccacaaattcaacccccttgagttcggaggctatcatgttgttaatagcgtttccgcctccgcctccgactcctattgcctttatctttgcactgaggtttggttctataaactcaaacgacatatgtttggtcctccaactgatatttaaatcttgaaccatgacttcatgcgaagggttacccgattgaatatgtttccatcccttatccggaatttctttctgggttgactttccatgccgaagagcacaagacccacggcagtagcgaacatgggtccgttgaccacgtccaccaggccggagatccgttgcggaaaaccgattctcgtcggcaactggaatacctggtctgcgatctcggcaattccgggcagcagggcagagcctccggttataacaactcctccggccaatagttctttaagtcccgtccgttccatttcctggtcaatcagtgtaaaaatctcctccaccctgggctcaagtatctcagacaatatgtgtctggacagaagcctgggtttgcgccctcccacactggggacttctatcatctggtctttatccacaagggaactgaggcaactgccgtgacgtgtctttatttgttcggcctccttgacaggcgtccttaacccgactgctatgtcattagtaaggttgttaccgccaagtcccagcaccgccgtgtgttttattgcaccatcagtaaacagggcaagatccgtggtgccgcccccgaagtccacaagggccaccccgaggtccttttcttcctgggttaggacggcctcggccgaggcaaggggctgaaaaactatgtcaactacatcgagtcccgccctgtttgcgcacttgataaggttctgggcagccgtaaccgctcctgttactatatgtaccttggcttccagccttaccccggtcataccgacaggatccaggatccctctctgctcatccaccatatactcttgaggcagaatatgaataacctccctgtcgaggggtatggccaccgcccttgccgcatctatgaccctgtcaacatcctcctgggagacctcctggccctttacagctatcaccccatggctgttgaagccttttatatggccgccggcaatgccgattaacacagagcctatctcgcacccggccatgagttccgcctcttccatagccctccgtatggaatcaacggtgttgtctatattgacaaccactcccttccggagacctacggaagggtgagttcccacgcctataatatcagcacccttactgttgaattcactcactaccgcacatattttagtggtgccgatatccagaccgacgattatgtcacccggcctctcgaccatttcctctcctaatctttcagactgaccagggcctgaccgggaccgtagtccagttcaactttagccacttttttatattttcctgaactataaagttgatacaggactttttccgcctcactgaactgagagctgaggtcttcagtatcaaagtgaaaaggaataccgctgtcagccgtatagagtattaaggtgtcttttccggctatgtgtatctggcttatgttattgacacccagagttcttgtacctctgcctgccatggatattaattccagggccttttggatctggtgatccggtgatncggtgatcnggtgattctctgtgtacttcggatcaattcctgtgatgatgggaagagatacgggctcttccgcagaaagtagttcatcgataatcttaccctgctcatcaatcaaatagatcttgtcagaattcaatagggctaccggagtgcgttctttgatcgtgatcatcaagtggtccggcagctctctctcaacttcaacggcattgacccagggatgcgcctctatgttcgttgcgattgattccagatcgagagacatgagattgtcccgggcggttacaccgctgatctgcaaaacctcctcttctgtgagatgattgcagcctttcaccaggacctggccgaccctgaaaagttcagaccgacatacccaatgccagcacacaaaaangccggcaagaaccaggcatgccgaggccatggcgatcaacattttgggatggatagaccacgataccggaaatatcagactggtccacgggcctgatccatgcatngaagacctgaattctgtggacgtccttctgatcttcatgtctccataccccaaacagacacctccgggacaagtttaatgccagtctctttttgtacgcgctccctgatgatttttagcagatccactacctgtagggcactggcttttccgcagttcacaataaagtttgcatgccttttggatatctcggcatcaccgattctaagacccttgagtccgcaccggtctatgagccttcctgctgaatctcccgggggatttctgaaaatacaccctgcactcggttctcctgcaggctgggtggccctccgtttgagcatcacccttttgacacggcgcctgatccgatcgggatcggctttgcagagttgaatccttgcggcagagatgagggccctgtccggaagccttaaggacctgtaatcaaattgcagtctatctctccggagccagcaactcccatcagggcctgtaaattgtacagcttctattgcttctgacatggaaaacttgttagtgcctgcgttcatggctatggccccccctatacttgccggaatacccgaaagattctcgaggccggacaggccgttgcgtatggaccaggaaacaagggaatccagcctgcatcctgcccctacggacactgtnttaaggaaatggccacgggaggaatggatactgttcaaanctgcaaggctcatgactatcttcacgcctttatcgctgatcaacaggttgcttccccggcccagcaccttatagggtatngagcgattactgaggtaagaaatagtctgctcaagggccttcaaactgcccggaaccaggaacagatgcgcgggcccgcctatccggaagcttgtaagtggtaaaagaggaacatcctcncgtacctggagatctcttatttttttcagatcctcagaaagcaatcgctgactcctttgtcttaagcatgtccagaattttcgttcctatacggcctatagtgccggcaccgagtgttatgaccacgtcatcctcctggagacttgatataattgccccgggaaggtccccgcaggactccacataatgcacctgcctgccctgtttatcccngatatttctggccagacgtcttccnctgactccgactatgggggtttcgccggctggatagatctctgtcagccacagttcatcagcctccccaaaggccgtggtgaaatcgtccattaacatccgggtcctgctgtaccggtggggttcaaaaagaaccacgaaccggcgttcaggccaacatgtcctggcngccgcgagtgtggccagtatctcagtagggtggtgcgcataatcatccactattgttatcccttctgcctcacccagtatctcaaatcgtctgcctacaccttcatatgacatnagaccggtccggatcttgtgaaagggtatctcaagttcaaggcccagggccattgcagccagggaatttcttacatggtgcagccccgggac

SEQ ID NO: 1268 - DNA, 4000 bp, Escherichia coli
  misc_feature (576)..(576): n is a, c, g, or t
  misc_feature (3858)..(3859): n is a, c, g, or t
  misc_feature (3872)..(3872): n is a, c, g, or t
  misc_feature (3874)..(3874): n is a, c, g, or t
  misc_feature (3878)..(3878): n is a, c, g, or t
  misc_feature (3880)..(3881): n is a, c, g, or t
  misc_feature (3883)..(3884): n is a, c, g, or t
  misc_feature (3887)..(3887): n is a, c, g, or t
  misc_feature (3889)..(3890): n is a, c, g, or t
  misc_feature (3893)..(3893): n is a, c, g, or t
  misc_feature (3895)..(3897): n is a, c, g, or t
  misc_feature (3899)..(3899): n is a, c, g, or t
  misc_feature (3901)..(3901): n is a, c, g, or t
  misc_feature (3903)..(3903): n is a, c, g, or t
  misc_feature (3905)..(3905): n is a, c, g, or t
  misc_feature (3907)..(3913): n is a, c, g, or t
  misc_feature (3915)..(3923): n is a, c, g, or t
  misc_feature (3925)..(3926): n is a, c, g, or t
  misc_feature (3928)..(3928): n is a, c, g, or t
  misc_feature (3930)..(3933): n is a, c, g, or t
  misc_feature (3935)..(3935): n is a, c, g, or t
  misc_feature (3938)..(3940): n is a, c, g, or t
  misc_feature (3943)..(3946): n is a, c, g, or t
  misc_feature (3948)..(3949): n is a, c, g, or t
  misc_feature (3951)..(3961): n is a, c, g, or t
  misc_feature (3963)..(3966): n is a, c, g, or t
  misc_feature (3968)..(3973): n is a, c, g, or t
  misc_feature (3975)..(3979): n is a, c, g, or t
  misc_feature (3981)..(3984): n is a, c, g, or t
  misc_feature (3986)..(3992): n is a, c, g, or t
  misc_feature (3994)..(3995): n is a, c, g, or t
  misc_feature (3998)..(4000): n is a, c, g, or t
atagactttcctgtcttagctgactcattactctgaccttgaatatctacccgcaccccaggatatctctcttgtaatttaggaaagagttcattagacgctagtgttaacagctcctgagcattggcaatatcactctctacatctccttgaatggttactgcccgctcaccatcaacacggttgatacgtgcccatccgcgcccctcctctatatccactacgacctctaacggaatcaatgctccattttttcctacaatagttaactgctctagctcaccactacttcggagctctatctcataagtctctctacctagtggaaactcatcaattttaaccccctgaaaagcagctctgacttgatttgatatgtagttagcatctaaccccatagcacctgcactatcttttatatgtaagcgatactcccgtttaccaggacgcagatcatcattaagatcaaccactcctgcataagatcttaaccaactcttaacctctgcagaggctgctttaagctcctgtagatcctctcctaagagacggatatccaatgatctgccacctggncctacagctggttctgtataagtgatcgctattacatctgttaacatcccactctgtttacgccactgctcacgaaactcatctattgaggcatctcttgtctcaccacctaataggtcaacaacaactctagcgacatgtggaccattttcatgagcatctggattctcgccataaatgatagtaatatgttgcactaaatcctgctcatctggttggcgaggtttaaataccctatttgtctcatatagtgctttagttaactctgccaccacctcttcggtgcgagagagaggggttccttgcggaagtagaatacgcgcctccagaatatctccatctatagcaggaaaacctacaaactttatcttacccgccaccggcatagccacagctaaaatcaacaacattaaaactagaccaatagtgagataacgctgttctactgcaaagtctataactggaccaaaaacattatctcttatcttatcaaagcctctctcaaaagattctctgaacttagactgtttattagcatctatatattttaatgagtgccccagatggttaggcagaactaaaaatgcctccgctaaacttactgttaacaccaccaacaatacaatgggcataacccttagtacctgccctatctcgccactaataaaagctaatgagccaaaaattagcaccgtagtggtaaacgaggagagaattccaggtagaacttgtttaatacctgtagttgctgcctccattggttgatcacctttcgccagcctagaggctatgttttcagcgataacgatagcatcgtccatcaacagtcctatcccaatgagtaaacccaccattgagatcatatttatagttacccctaacatcggcaagataaatagagcccctaaaaatgatattggcagccccatagttacccagaaactatatctcagactaaaaaatagccataacactaaaaatactagagctagaccagccattccattacctaataacatatcaagacgatcttgcactggtgaggagcgatcttgggtaatagttagctgaatacctgttggtgcacgctcctgctcactaactacaaattccgcaacctgattatatattgtgagaatatcctgttgacggctcttagttatattaagaatggcagcccgtttcccatcaaactctaccttgctctcatctttttcaaactgatcgtggatagttgcaatatccccaagtctaattgcggcgcctgttttaccagaaataaccactaaatcttctaactcagcagtcgtcttacgctgatctgcaaagcgcagaattatctcctcctgctcaccattaagctctccactaggggttgcgatacttctctgttgaataatattagcgatatcagcagctgaaataccaaattgacgcaccctctggataggaatctcaacccttaactggtggtcagaaaagccctgaatagttatattagcaacatcagcagctctctttaaacggtctttaactacctccgcataccccttcaacactacaggattttcagggccagtaattgcaatagatactacagcatccgtgcgccccaactcctcagtgatagggagctcacactccttaggaaagtcagaaatagcatctacattggattttatatcattaagaaaacgctccattgccgagccctctatcttaataagagtagcaactccccttccctcactagactcacaacgcatctcatctaaacccaccacaccttcaacagcctcctctaagcgttggcagactgcatcctccacctctctcgcagttgcccccttataaatgacagtaaccttaactttattactctcaattttaggaaaagtttcacgctgaagatctgggatagttacgagccctaacagaataatggctgccatcaaaatatttgaggcatttggatggtgggtaaaccagttaatcattttggtaatctaagagctgctgttgcagcttgttatctagttgcggtttaagtaacattccattcactgcagggataagatcagatacgaccaaaatatctccctcattcacacctgagctaactatatttatatcaccctgacggtagagaatctcaactttagatgtctgtagacgctgttcgccatccatcaacatcacctcaccacctctcacagcagttctagggattattatctgctcaggttgaatgcgcccaaagagctgtagccgtacaaacattcccttagagagtggcggacgcactccagggataatcttactgtatggtttatcaattgcaactaccaccccaatcgtacgagtctcactatcgacactatccgtaaaacggacaaactctgcactccactcggcactctcatttcccatatccacctgaacagtagatgtaagctccgcatactctgcaagaccttcactcatctgcagtgagctaggtgcactacgatggctagtaaatagcttagagactgatgagagagccacttgagcaactacctctgaacgatctataccatcccccacaaaaagtttctgcccagtagttacatactgctctctctccatacttaaattagcaattcgtagattaaatggagcataaaccacactattatccaagtctctctctgcctgtgccaacttagcctttaagacccgttgttgagtaggaattagagatagagaattgcgaagattttggactgaactccttgaattaagcataatcctctcagcactatcgatactactttgagatacaccacctgtagcagataactgagagagacgctgaaactcctgattagcaagctcgaaattgcgctgctcaatagtcaataaatcatcagtattggtatgttgaatctctaactctaaaagttgcgctttaagctgctctagtacgagctcataattgatagggtcaaccttaaacaggagctctccagcagagataatctccccattgcgcaaccgaggatgcatcttaataatacgcccactaacttgagcaattgcactccaaactttcgctggctgcaccaccccataaccctctgccataggacgaatcgcaagcttagggacagttatagtacggaccgcacgcaccacctcctgcttttcactcttaataggagcagctttaccacccaccaataacacaaaagcagccaccccaactatgatcggggggactacccataagatagataatcnntttatggttgacntnctgntnntnntantnnctncnnntntnananannnnnnntnnnnnnnnncnnancnnnncnccnnnctnnnntnncnnnnnnnnnnntnnnncnnnnnntnnnnntnnnnannnnnnntnnatnnn

SEQ ID NO: 1269 - DNA, 4000 bp, Escherichia coli
  misc_feature (535)..(535): n is a, c, g, or t
  misc_feature (591)..(591): n is a, c, g, or t
  misc_feature (602)..(602): n is a, c, g, or t
  misc_feature (653)..(653): n is a, c, g, or t
  misc_feature (1968)..(1968): n is a, c, g, or t
  misc_feature (2035)..(2035): n is a, c, g, or t
  misc_feature (2066)..(2066): n is a, c, g, or t
  misc_feature (2381)..(2381): n is a, c, g, or t
  misc_feature (2975)..(2975): n is a, c, g, or t
  misc_feature (3158)..(3158): n is a, c, g, or t
  misc_feature (3312)..(3312): n is a, c, g, or t
  misc_feature (3762)..(3762): n is a, c, g, or t
  misc_feature (3886)..(3886): n is a, c, g, or t
  misc_feature (3943)..(3943): n is a, c, g, or t
  misc_feature (3963)..(3963): n is a, c, g, or t
  misc_feature (3966)..(3966): n is a, c, g, or t
  misc_feature (3972)..(3972): n is a, c, g, or t
  misc_feature (3981)..(3981): n is a, c, g, or t
ctgtaatatcacctactaaggctttcgggtctacttctaatccatattttttagatagttctgtaatttttttagcagcagaatctaaatcgatttttccgccttttacttcttccattcctaagatgatattctcagcaacagtgaagtttttaattaatttaaagtgttggtgaaccataccgatcccaagctgattagcatgtttaggatctttaatgtcaacttctttcccatctaatttaatgacaccctcttcttgatggtacataccaaaaagaacggacatcaacgtagatttaccagcaccattttcaccaagcaatgcatgaacttcgttctttttcacctgaatagtaatgtctttatttgcgtagaagtcaccaaactttttagttatgtttagcatttctatagcgtacatatatttacctctcttttgtatattgttacttatctattataatatatttttgcaatctagtatagcattttagtacgattctgttaattaattttatattatttatcaatnttataattataaaaattaaaactataaaaactgcataatatcattgtgttttcatngttatttccanaatttttcaaagcttaatattgtagaaaatttttttaattattcacatttnaaaaaataataattacgtttgcaaatttatagcttttttaaaaaatttttcaataaaaaaggcctagtataatactagacctttttttgaattataattttaaaaattatagttcaccttcgatatttgctttatctgttactttatctgcttcaggagctacagttgctttaccagatttaagtgattctacaacttctttaattttgttgttgatatcactgcttaagtttggattttcagcaggtagacctacaccatcttctttgatagtgaatactttagcttttccaccttcgaatttaccagctttgatagcatctaatacttgagttactgcaacatcgatacgtttaacagcagatgttaagattacagatttttctacatcttttccatctttatctttagctttgaatacaccttcagaatattggtctttatctacaccaacgatccagtgtttgatttctccgctttctttaagatctttagtagctctttcttgtgcttctttaattgaaccacttccagttccaccagctgctacgaagataacgtcagctccagcatcatacatagttgctgctaaagttttacctttgttagtatcgttgaatgatccactgtagttgtatacgattttgatgtctttgttagcagctttagctccttgaacaaatcctacaccaaatttaactactgcagggattttagctccaccgataaatccaactttaccagtttttgattgtaaagctgctgcatatccagctaagtatcctgcttcgtgttcagcaaatgtaatagattcaacgtttttgttatctacagttccatcgatgaagatgaattttttatctgcaaatgattctgcaacttttggtaattctttttcgaaatagaatcctgctaatgaaataacatcagctgctttagctgcattttgtaagttagctgcgatatcactttggtttttagtttcgattgggtttaatgctttaccaccgtttttatctacccaagctttaacagcttctacgttactttggttgaaacttttatcttttgctccaccttcgtcagtaactactccgatttttaaatcagattttgaagatgaatcttcttttttctcagttttagaagaacatcctacaaagataagtgctgctgataaaataacagcgattaatgaaaatatctttttcataaacaaataatctcctttatttatttttgtatattgtttatacctaaataataccacataattgtataaatatcaacattttattactttttaaaaaaatanttttattattgttcgtattaagcgaaatttaagcgtatttttatctagttataaagagaatgttcantttttgtaatcttatatatacatatacaganagaattaaagcattttcataactataatttatactatttattttattaatacacatttttgatattcttttcaaaaatactttgacataataaaaaagtctcactaaatttctttagcaagacttttattataattatagttcaccttctaaattagtaactgatccttttgcttttagctcatcaccagttcctactacttctaccttacctgatttaagttcttcaatagctttatcaattttagttttattgtcatcacttaggtttggattttcttttggtagccctacaccattttctttaataccgaanatatgttcacctttttcaaatttattttctttgatttcatttaagatttttgttactgctacttcgatatttttaacagctgatgttaagattacagatttttggtattcttttccatttttatcttttcctttgaaaataccttcttcgtattggtctttatctacaccaacaacccagtgtttaatttctccgtctttagacatatcaaggttaccacgttcttttgcttctgagataacaccattacctgtattacctgccgctacaaagattacatctgcacctgaatcatacatagtagctgctaatgttttacctttatttgtatctgagaatgttccactgtagttgtacatgattttaatatcactcttagctgctttagcaccttgaacaaatccaattccaaatctttctacaggtggaattttagttcctccgataaatccaactttaccagttttagattgtaatgcagctgcataaccagctaggtaccctgcttcttgctctttaaagataagtgacgctatatttggtgcatcaacaaaagtatcaacatacatgaattttttatctttatattgttcngcaacttttggtaattctttttcgaattcatatcctgctaaagaaatgatatctgaaacttttgaagcattttgaaggtttgcagccaaatcagattggttttttgattcaacaacaactggatcttttgctccattggcctttgcccatgcttgtatagcttctacgtttgcttggttaaancttttatctttagctccaccttcaccggtaacaacccctattttgtaggaacttttttcttcagtatttgattctgatttattttttttagaagaacatcctactacaattaatgataatgcaagtaacattgcaataatagtacgtaactttntcataatgacctcctatttttatgtactaagaacacaataacacatttttaaaccgatttcaatatttttttactatattattacaaaaacttaaatttattaaacattttaacaattaaatatataaaaagtgttaaatttatatatttccttaattttttatgatataattgaattgattaaagcattttcaggaggatttatttatgacttattatgaaaatattgtggaaactgcgaattatattaagaagtatttcaatgagccaattgattacgcagttgtcctaggaagtggaattacattagaacttgaagaacaacaagagcttggttacgaggctattcctcttttcccaggaaataaacgttcaaaccatgttaaagggcatgcaaataaacttacttttgggaaaatctcaggtaaaaatgtccttgtattaaacggnagacttcactattatgaaggatacaaaatgaaagaagttgcatttatgacttatgttgtaaaattcttaggtgccaaaggattatttattactaacgcttgtggcgctattaacactaactttnctgaaggagatatcgtttgtctagatgatttcatctctctagtaagtaataatcctntaatgggagaaaacgatccncgncttggngagagattngttgatatgactactccat

SEQ ID NO: 1270 - DNA, 4000 bp, Escherichia coli
  misc_feature (1)..(2): n is a, c, g, or t
  misc_feature (4)..(13): n is a, c, g, or t
  misc_feature (15)..(15): n is a, c, g, or t
  misc_feature (18)..(21): n is a, c, g, or t
  misc_feature (24)..(25): n is a, c, g, or t
  misc_feature (28)..(29): n is a, c, g, or t
  misc_feature (32)..(32): n is a, c, g, or t
  misc_feature (35)..(37): n is a, c, g, or t
  misc_feature (39)..(42): n is a, c, g, or t
  misc_feature (45)..(45): n is a, c, g, or t
  misc_feature (49)..(49): n is a, c, g, or t
  misc_feature (51)..(52): n is a, c, g, or t
  misc_feature (54)..(60): n is a, c, g, or t
  misc_feature (62)..(62): n is a, c, g, or t
  misc_feature (65)..(67): n is a, c, g, or t
  misc_feature (75)..(75): n is a, c, g, or t
  misc_feature (77)..(77): n is a, c, g, or t
  misc_feature (80)..(82): n is a, c, g, or t
  misc_feature (84)..(84): n is a, c, g, or t
  misc_feature (86)..(89): n is a, c, g, or t
  misc_feature (92)..(94): n is a, c, g, or t
  misc_feature (96)..(98): n is a, c, g, or t
  misc_feature (100)..(101): n is a, c, g, or t
  misc_feature (103)..(104): n is a, c, g, or t
  misc_feature (106)..(106): n is a, c, g, or t
  misc_feature (114)..(114): n is a, c, g, or t
  misc_feature (116)..(116): n is a, c, g, or t
  misc_feature (119)..(119): n is a, c, g, or t
  misc_feature (124)..(124): n is a, c, g, or t
  misc_feature (126)..(128): n is a, c, g, or t
  misc_feature (131)..(134): n is a, c, g, or t
  misc_feature (137)..(139): n is a, c, g, or t
  misc_feature (141)..(141): n is a, c, g, or t
  misc_feature (143)..(143): n is a, c, g, or t
  misc_feature (145)..(145): n is a, c, g, or t
  misc_feature (148)..(149): n is a, c, g, or t
  misc_feature (151)..(151): n is a, c, g, or t
  misc_feature (153)..(155): n is a, c, g, or t
  misc_feature (159)..(165): n is a, c, g, or t
  misc_feature (168)..(168): n is a, c, g, or t
  misc_feature (171)..(172): n is a, c, g, or t
  misc_feature (175)..(175): n is a, c, g, or t
  misc_feature (179)..(181): n is a, c, g, or t
  misc_feature (184)..(184): n is a, c, g, or t
  misc_feature (187)..(187): n is a, c, g, or t
  misc_feature (191)..(191): n is a, c, g, or t
  misc_feature (194)..(194): n is a, c, g, or t
  misc_feature (198)..(198): n is a, c, g, or t
  misc_feature (200)..(201): n is a, c, g, or t
  misc_feature (203)..(205): n is a, c, g, or t
  misc_feature (207)..(208): n is a, c, g, or t
  misc_feature (210)..(211): n is a, c, g, or t
  misc_feature (213)..(213): n is a, c, g, or t
  misc_feature (234)..(234): n is a, c, g, or t
  misc_feature (247)..(247): n is a, c, g, or t
  misc_feature (266)..(266): n is a, c, g, or t
  misc_feature (279)..(279): n is a, c, g, or t
  misc_feature (304)..(304): n is a, c, g, or t
  misc_feature (310)..(310): n is a, c, g, or t
  misc_feature (318)..(318): n is a, c, g, or t
  misc_feature (329)..(332): n is a, c, g, or t
  misc_feature (334)..(335): n is a, c, g, or t
  misc_feature (338)..(338): n is a, c, g, or t
  misc_feature (345)..(350): n is a, c, g, or t
  misc_feature (353)..(353): n is a, c, g, or t
  misc_feature (358)..(359): n is a, c, g, or t
  misc_feature (363)..(363): n is a, c, g, or t
  misc_feature (365)..(365): n is a, c, g, or t
  misc_feature (370)..(370): n is a, c, g, or t
  misc_feature (373)..(373): n is a, c, g, or t
  misc_feature (376)..(376): n is a, c, g, or t
  misc_feature (379)..(379): n is a, c, g, or t
  misc_feature (381)..(383): n is a, c, g, or t
  misc_feature (385)..(387): n is a, c, g, or t
  misc_feature (389)..(391): n is a, c, g, or t
  misc_feature (393)..(393): n is a, c, g, or t
  misc_feature (395)..(400): n is a, c, g, or t
  misc_feature (403)..(405): n is a, c, g, or t
  misc_feature (407)..(413): n is a, c, g, or t
  misc_feature (415)..(416): n is a, c, g, or t
  misc_feature (418)..(420): n is a, c, g, or t
  misc_feature (423)..(424): n is a, c, g, or t
  misc_feature (427)..(428): n is a, c, g, or t
  misc_feature (430)..(431): n is a, c, g, or t
  misc_feature (433)..(435): n is a, c, g, or t
  misc_feature (439)..(440): n is a, c, g, or t
  misc_feature (442)..(442): n is a, c, g, or t
  misc_feature (445)..(445): n is a, c, g, or t
  misc_feature (447)..(447): n is a, c, g, or t
  misc_feature (449)..(450): n is a, c, g, or t
  misc_feature (452)..(453): n is a, c, g, or t
  misc_feature (456)..(456): n is a, c, g, or t
  misc_feature (461)..(461): n is a, c, g, or t
  misc_feature (463)..(464): n is a, c, g, or t
  misc_feature (467)..(467): n is a, c, g, or t
  misc_feature (470)..(470): n is a, c, g, or t
  misc_feature (474)..(475): n is a, c, g, or t
  misc_feature (477)..(482): n is a, c, g, or t
  misc_feature (484)..(484): n is a, c, g, or t
  misc_feature (487)..(490): n is a, c, g, or t
  misc_feature (493)..(493): n is a, c, g, or t
  misc_feature (496)..(497): n is a, c, g, or t
  misc_feature (500)..(503): n is a, c, g, or t
  misc_feature (506)..(508): n is a, c, g, or t
  misc_feature (510)..(510): n is a, c, g, or t
  misc_feature (513)..(514): n is a, c, g, or t
  misc_feature (518)..(522): n is a, c, g, or t
  misc_feature (525)..(527): n is a, c, g, or t
  misc_feature (529)..(530): n is a, c, g, or t
  misc_feature (532)..(540): n is a, c, g, or t
  misc_feature (542)..(542): n is a, c, g, or t
  misc_feature (544)..(544): n is a, c, g, or t
  misc_feature (546)..(546): n is a, c, g, or t
  misc_feature (548)..(550): n is a, c, g, or t
  misc_feature (552)..(552): n is a, c, g, or t
  misc_feature (555)..(555): n is a, c, g, or t
  misc_feature (558)..(561): n is a, c, g, or t
  misc_feature (564)..(564): n is a, c, g, or t
  misc_feature (569)..(573): n is a, c, g, or t
  misc_feature (575)..(584): n is a, c, g, or t
  misc_feature (587)..(588): n is a, c, g, or t
  misc_feature (590)..(590): n is a, c, g, or t
  misc_feature (592)..(592): n is a, c, g, or t
  misc_feature (594)..(600): n is a, c, g, or t
  misc_feature (603)..(603): n is a, c, g, or t
  misc_feature (605)..(606): n is a, c, g, or t
  misc_feature (609)..(610): n is a, c, g, or t
  misc_feature (614)..(616): n is a, c, g, or t
  misc_feature (619)..(623): n is a, c, g, or t
  misc_feature (630)..(631): n is a, c, g, or t
  misc_feature (634)..(636): n is a, c, g, or t
  misc_feature (638)..(645): n is a, c, g, or t
  misc_feature (647)..(647): n is a, c, g, or t
  misc_feature (649)..(649): n is a, c, g, or t
  misc_feature (651)..(654): n is a, c, g, or t
  misc_feature (657)..(661): n is a, c, g, or t
  misc_feature (664)..(664): n is a, c, g, or t
  misc_feature (668)..(669): n is a, c, g, or t
  misc_feature (671)..(674): n is a, c, g, or t
  misc_feature (676)..(676): n is a, c, g, or t
  misc_feature (678)..(678): n is a, c, g, or t
  misc_feature (680)..(681): n is a, c, g, or t
  misc_feature (683)..(684): n is a, c, g, or t
  misc_feature (686)..(686): n is a, c, g, or t
  misc_feature (688)..(688): n is a, c, g, or t
  misc_feature (690)..(692): n is a, c, g, or t
  misc_feature (694)..(695): n is a, c, g, or t
  misc_feature (697)..(697): n is a, c, g, or t
  misc_feature (700)..(702): n is a, c, g, or t
  misc_feature (704)..(705): n is a, c, g, or t
  misc_feature (707)..(708): n is a, c, g, or t
  misc_feature (711)..(711): n is a, c, g, or t
  misc_feature (713)..(719): n is a, c, g, or t
  misc_feature (721)..(723): n is a, c, g, or t
  misc_feature (726)..(730): n is a, c, g, or t
  misc_feature (732)..(732): n is a, c, g, or t
  misc_feature (734)..(734): n is a, c, g, or t
  misc_feature (736)..(736): n is a, c, g, or t
  misc_feature (740)..(740): n is a, c, g, or t
  misc_feature (742)..(745): n is a, c, g, or t
  misc_feature (747)..(748): n is a, c, g, or t
  misc_feature (752)..(754): n is a, c, g, or t
  misc_feature (757)..(757): n is a, c, g, or t
  misc_feature (759)..(761): n is a, c, g, or t
  misc_feature (763)..(766): n is a, c, g, or t
  misc_feature (769)..(773): n is a, c, g, or t
  misc_feature (775)..(780): n is a, c, g, or t
  misc_feature (782)..(783): n is a, c, g, or t
  misc_feature (786)..(787): n is a, c, g, or t
  misc_feature (789)..(793): n is a, c, g, or t
  misc_feature (795)..(795): n is a, c, g, or t
  misc_feature (797)..(800): n is a, c, g, or t
  misc_feature (802)..(804): n is a, c, g, or t
  misc_feature (806)..(820): n is a, c, g, or t
  misc_feature (822)..(822): n is a, c, g, or t
  misc_feature (825)..(829): n is a, c, g, or t
  misc_feature (831)..(831): n is a, c, g, or t
  misc_feature (834)..(836): n is a, c, g, or t
  misc_feature (838)..(840): n is a, c, g, or t
  misc_feature (843)..(845): n is a, c, g, or t
  misc_feature (848)..(849): n is a, c, g, or t
  misc_feature (853)..(853): n is a, c, g, or t
  misc_feature (858)..(859): n is a, c, g, or t
  misc_feature (864)..(870): n is a, c, g, or t
  misc_feature (872)..(872): n is a, c, g, or t
  misc_feature (877)..(878): n is a, c, g, or t
  misc_feature (880)..(880): n is a, c, g, or t
  misc_feature (883)..(883): n is a, c, g, or t
  misc_feature (885)..(885): n is a, c, g, or t
  misc_feature (888)..(889): n is a, c, g, or t
  misc_feature (893)..(894): n is a, c, g, or t
  misc_feature (898)..(898): n is a, c, g, or t
  misc_feature (1092)..(1092): n is a, c, g, or t
  misc_feature (1095)..(1096): n is a, c, g, or t
  misc_feature (1098)..(1102): n is a, c, g, or t
  misc_feature (1108)..(1110): n is a, c, g, or t
  misc_feature (1113)..(1115): n is a, c, g, or t
  misc_feature (1117)..(1120): n is a, c, g, or t
  misc_feature (1122)..(1122): n is a, c, g, or t
  misc_feature (1126)..(1126): n is a, c, g, or t
  misc_feature (1128)..(1129): n is a, c, g, or t
  misc_feature (1131)..(1131): n is a, c, g, or t
  misc_feature (1133)..(1133): n is a, c, g, or t
  misc_feature (1137)..(1137): n is a, c, g, or t
  misc_feature (1142)..(1142): n is a, c, g, or t
  misc_feature (1145)..(1152): n is a, c, g, or t
  misc_feature (1157)..(1157): n is a, c, g, or t
  misc_feature (1163)..(1164): n is a, c, g, or t
  misc_feature (1167)..(1167): n is a, c, g, or t
  misc_feature (1169)..(1169): n is a, c, g, or t
  misc_feature (1171)..(1171): n is a, c, g, or t
  misc_feature (1173)..(1173): n is a, c, g, or t
  misc_feature (1175)..(1175): n is a, c, g, or t
  misc_feature (1178)..(1178): n is a, c, g, or t
  misc_feature (1180)..(1182): n is a, c, g, or t
  misc_feature (1184)..(1191): n is a, c, g, or t
  misc_feature (1196)..(1196): n is a, c, g, or t
  misc_feature (1205)..(1206): n is a, c, g, or t
  misc_feature (1209)..(1210): n is a, c, g, or t
  misc_feature (1212)..(1212): n is a, c, g, or t
  misc_feature (1214)..(1217): n is a, c, g, or t
  misc_feature (1225)..(1225): n is a, c, g, or t
  misc_feature (1228)..(1228): n is a, c, g, or t
  misc_feature (1231)..(1232): n is a, c, g, or t
  misc_feature (1237)..(1237): n is a, c, g, or t
  misc_feature (1543)..(1543): n is a, c, g, or t
  misc_feature (1609)..(1609): n is a, c, g, or t
  misc_feature (1664)..(1664): n is a, c, g, or t
  misc_feature (1743)..(1743): n is a, c, g, or t
  misc_feature (1775)..(1775): n is a, c, g, or t
  misc_feature (1789)..(1789): n is a, c, g, or t
  misc_feature (1806)..(1806): n is a, c, g, or t
  misc_feature (2364)..(2364): n is a, c, g, or t
nntnnnnnnnnnnangtnnnnggnnttnntgngannntnnnngtnaatntnntnnnnnnntnaannnaaaaaaantnatnnntnannnnttnnntnnnanngnntntaaatcantnttnatatntnnngcnnnnttnnntngnancanntntnnntaannnnnnntanttnntcnatcnnnatnaanaatnaancttngnngnnntnnanntntaaaaattatttagacttganataatttttaaantaaaaatattttctatatnaaccatcaaaaancttaaaacaaaatctagagaagggnagaatnatttttcnccaccctaatnnnntnnttnttttaannnnnncancaccnntagnanattcnaangantgntnnnannntnnnanannnnnnatnnnannnnnnntnncnnnacnngtnntnnannnttgnncnatnancnnanntanagganannaantgntatnnannnnnntnagnnnnttnttnnctnnnntgnnngntannatannnnnatnnncnncnnnnnnnnntntngnannncntantannnnatnattannnnnannnnnnnnnncanntntntnnnnnnnttnannaanntttnnnttnnnnngcagccnnacnnntnnnnnnnngnangnnnnttnnnnnaanttannannnntnantnnanngncntnnnanngnatnnnannannttnannnnnnnannnccnnnnnantntnttancnnnnanntttnnnaanannnannnntgnnnnntnnnnnnannaanntnnnnnantnnnntnnntnnnnnnnnnnnnnnncntcnnnnncnatnnnannntgnnnccnncccnttagnnggggnnnnnnnanccccnnanaantnccnnaacnnattnttttagttacactttaatcaatggttaattttagttcagtttagtgaaactgataattgaagtcaagtttaaaagataatatctcatcatgcataaaacatttataataaaaatttaattattattggtcgaccaaaccaaaacttttacaatatttggtcctggtgagccacatagatacaggccttgggganagnngnnnnnttgggnnnagnnnannnngnaaancnnanangagnttaanccnnnnnnnnttttnaaaaanntantnantncnttngnnngnnnnnnnnaaaantaaaaaaannaannanannnntattgacnaanaannatttnaaaaaaacctgcactagattaaattgatttatttgtttctatgttttgatttatcatggttgaatgaaattaaatattaaaaaaacactgcagcaggctatagcagcacataaagaaggtaaattacaagatgctgaacgcctttatctatccatcttgcagtcatatcctaaccatccagaagccaatcaaaatctaggtgtattagaaacaaataagctaatacaactttttcaaaatagccaatacgacgaagctataaaattaggacaatcccttactgaaagattccctaaacatcaattngcctggaaaatattaggtgttgtattgggacaaacaggcaggcattctgaagctttaaatgcaagncaaactgccgccgcattgcctcctcaagatgcccaagtccactacaacttgggtntcacgctcaaagaattaggtaggttagatgaggctgaagcaagctatagacaagcgatagtgttgcaacctgataatgntcaagcccataataacttgggtgttacgctcnaagaattaggtagnttagatgaagctgaagnaagctataggcaagcgatagtgttgcaacctggttttgctcaagcccatagcaacttgggcctcatactccaaacattgggtaggttagatgaggctgaagtaagctgtaggcaagcgatagctttgcaacctggttatgccaaagctcacaacaacttaggtgttacgctcaaagaattaggtaggttagatgaggctgaagcaagctataggcaagcgatagctttgaaagcagactatgcacaagctcacaacaacctaggtgttacgctccaagaattaggtatattagatgaggctgaagcaagcttgagacaagcaatagcattgaaggcagattatgctgaagctcacaaaaacctaagtcttacgctccaagaattgggcaaatttgatgaggctataaaaatacttaaaaatgttatcaacaaagataaaaaaaaatactcctacctgtattgcgacattcttcatcttaaaacccatgaatatagttgggatgattatgatttttatttaaatgaaataaataaatttgttaacaaaacaaatgggtncgttaataatttcagtcttctaagcatttcagacaacttatcttttttgcaaaaaaatgccagaaataatgccagaaaaacatccaaagcaatttatccaaaactccccctcaatgtaaaactgaaaaatgaaaaccataaaataaaaatagcctatttttctttagatttcaaagatcatgccgttggtaggttagtcaaaaatttatttaaaaatcataatcgtaaaaaatttatagtttatgggttttcttttgcacgccatgaagatgataatatttacaaagaaattaaaaaaacatttgatcatttttatgatttttcagaaaaatcagactctacagccttacaaactatttctgaccttggtcttgatgttgctattgacatgatggggcacacaaaaggtagtcggtcttatttatttaataataggatagcgccaactcaaatctcattcttgggatacctagggaccatgggggataatgcatacgactatatcgttgctgataatttcgttatacccactgaaaatgaaaaatactatgatgaaaaagttttaaaacttccgatatatcaaccaaacaactataaagaaatttctttcaaaactatctctaaaaaatctcttggtttgcctgataattcttttatctattgctgtcttaataatccctataaagttacgccttttatttttgattcctggattaaaattttacaagctacagaaaatacttatttatatttattaaaaagaaacaataatggtgagaaaaatataaaaaaatatatttctaataagggacttgatccaagaagaataatatttaccgataaagtttcgtatgaaaaatacttaagtatattaaatgtctgtgatgtttttcttgatacatctccatacaatgcaggggcaacagcaattgattgcttagcagcaaatactccaataatttcacttgttggtaactcttatgtaagtaggatgtgcggtagtattttaaaaaaattagaattaagtgattttatagcggtggatattgatgattatataagtaaagctgttgctttaacaaaaaaaccaaaagtaaaaataaatttagaaaaatttaacattttcgaaatttctaattttgtacttaattttgaaaaagagttaattaaaattcacaaataaaaagtggtgccctcggcacgattcgaacgtgcgaccctccccttaggagggggatgctctatcccctgagctacgaaggcgtaattaaaaaagtaattaaatctatttaaacgtatttttttaaattactagtatatattttctttttagtataatttaaaaagaatctaaaaatagatagaagttaataaaaatgagtctaaatatttctataatagttgttacctataacagtgaaaatattattaaatcattcctaacgcaaccaattttaagaaaagaacctgacattgttatcgtggataatgcaagtagtgataaaacaaaaactattataaaaaaaattatgccttctgtaactttgatatccttaaaaaaaaatgtaggttatggttcagctgtaaacaaggggataaaagttataaaaaataaatatttattagtaacaaatcc

SEQ ID NO: 1271 - DNA, 4000 bp, Escherichia coli
  misc_feature (3)..(3): n is a, c, g, or t
  misc_feature (5)..(7): n is a, c, g, or t
  misc_feature (11)..(13): n is a, c, g, or t
  misc_feature (16)..(16): n is a, c, g, or t
  misc_feature (18)..(18): n is a, c, g, or t
  misc_feature (20)..(20): n is a, c, g, or t
  misc_feature (22)..(22): n is a, c, g, or t
  misc_feature (24)..(24): n is a, c, g, or t
  misc_feature (26)..(28): n is a, c, g, or t
  misc_feature (30)..(30): n is a, c, g, or t
  misc_feature (39)..(39): n is a, c, g, or t
  misc_feature (41)..(41): n is a, c, g, or t
  misc_feature (44)..(44): n is a, c, g, or t
  misc_feature (46)..(46): n is a, c, g, or t
  misc_feature (50)..(52): n is a, c, g, or t
  misc_feature (55)..(57): n is a, c, g, or t
  misc_feature (59)..(62): n is a, c, g, or t
  misc_feature (64)..(71): n is a, c, g, or t
  misc_feature (73)..(74): n is a, c, g, or t
  misc_feature (78)..(78): n is a, c, g, or t
  misc_feature (80)..(80): n is a, c, g, or t
  misc_feature (84)..(85): n is a, c, g, or t
  misc_feature (87)..(87): n is a, c, g, or t
  misc_feature (91)..(91): n is a, c, g, or t
  misc_feature (93)..(93): n is a, c, g, or t
  misc_feature (95)..(95): n is a, c, g, or t
  misc_feature (97)..(98): n is a, c, g, or t
  misc_feature (100)..(101): n is a, c, g, or t
  misc_feature (104)..(106): n is a, c, g, or t
  misc_feature (108)..(110): n is a, c, g, or t
  misc_feature (113)..(113): n is a, c, g, or t
  misc_feature (118)..(118): n is a, c, g, or t
  misc_feature (125)..(125): n is a, c, g, or t
  misc_feature (127)..(127): n is a, c, g, or t
  misc_feature (130)..(131): n is a, c, g, or t
  misc_feature (134)..(135): n is a, c, g, or t
  misc_feature (137)..(137): n is a, c, g, or t
  misc_feature (140)..(142): n is a, c, g, or t
  misc_feature (144)..(144): n is a, c, g, or t
  misc_feature (147)..(147): n is a, c, g, or t
  misc_feature (149)..(149): n is a, c, g, or t
  misc_feature (151)..(151): n is a, c, g, or t
  misc_feature (155)..(155): n is a, c, g, or t
  misc_feature (158)..(158): n is a, c, g, or t
  misc_feature (161)..(162): n is a, c, g, or t
  misc_feature (169)..(169): n is a, c, g, or t
  misc_feature (171)..(171): n is a, c, g, or t
  misc_feature (178)..(179): n is a, c, g, or t
  misc_feature (181)..(183): n is a, c, g, or t
  misc_feature (187)..(187): n is a, c, g, or t
  misc_feature (189)..(189): n is a, c, g, or t
  misc_feature (191)..(194): n is a, c, g, or t
  misc_feature (199)..(200): n is a, c, g, or t
  misc_feature (202)..(202): n is a, c, g, or t
  misc_feature (205)..(205): n is a, c, g, or t
  misc_feature (207)..(207): n is a, c, g, or t
  misc_feature (210)..(210): n is a, c, g, or t
  misc_feature (212)..(215): n is a, c, g, or t
  misc_feature (218)..(218): n is a, c, g, or t
  misc_feature (220)..(220): n is a, c, g, or t
  misc_feature (228)..(229): n is a, c, g, or t
  misc_feature (236)..(239): n is a, c, g, or t
  misc_feature (246)..(247): n is a, c, g, or t
  misc_feature (249)..(251): n is a, c, g, or t
  misc_feature (253)..(253): n is a, c, g, or t
  misc_feature (256)..(259): n is a, c, g, or t
  misc_feature (264)..(265): n is a, c, g, or t
  misc_feature (267)..(268): n is a, c, g, or t
  misc_feature (271)..(271): n is a, c, g, or t
  misc_feature (273)..(278): n is a, c, g, or t
  misc_feature (283)..(284): n is a, c, g, or t
  misc_feature (286)..(286): n is a, c, g, or t
  misc_feature (288)..(290): n is a, c, g, or t
  misc_feature (293)..(293): n is a, c, g, or t
  misc_feature (296)..(297): n is a, c, g, or t
  misc_feature (299)..(299): n is a, c, g, or t
  misc_feature (301)..(302): n is a, c, g, or t
  misc_feature (304)..(304): n is a, c, g, or t
  misc_feature (306)..(310): n is a, c, g, or t
  misc_feature (312)..(322): n is a, c, g, or t
  misc_feature (326)..(326): n is a, c, g, or t
  misc_feature (330)..(332): n is a, c, g, or t
  misc_feature (334)..(338): n is a, c, g, or t
  misc_feature (340)..(340): n is a, c, g, or t
  misc_feature (342)..(342): n is a, c, g, or t
  misc_feature (344)..(344): n is a, c, g, or t
  misc_feature (346)..(348): n is a, c, g, or t
  misc_feature (351)..(351): n is a, c, g, or t
  misc_feature (353)..(354): n is a, c, g, or t
  misc_feature (356)..(359): n is a, c, g, or t
  misc_feature (362)..(362): n is a, c, g, or t
  misc_feature (364)..(366): n is a, c, g, or t
  misc_feature (368)..(368): n is a, c, g, or t
  misc_feature (370)..(371): n is a, c, g, or t
  misc_feature (373)..(374): n is a, c, g, or t
  misc_feature (377)..(379): n is a, c, g, or t
  misc_feature (382)..(387): n is a, c, g, or t
  misc_feature (390)..(400): n is a, c, g, or t
  misc_feature (402)..(402): n is a, c, g, or t
  misc_feature (405)..(416): n is a, c, g, or t
  misc_feature (418)..(419): n is a, c, g, or t
  misc_feature (421)..(424): n is a, c, g, or t
  misc_feature (427)..(427): n is a, c, g, or t
  misc_feature (429)..(431): n is a, c, g, or t
  misc_feature (433)..(437): n is a, c, g, or t
  misc_feature (439)..(441): n is a, c, g, or t
  misc_feature (443)..(444): n is a, c, g, or t
  misc_feature (446)..(447): n is a, c, g, or t
  misc_feature (449)..(449): n is a, c, g, or t
  misc_feature (451)..(451): n is a, c, g, or t
  misc_feature (453)..(457): n is a, c, g, or t
  misc_feature (460)..(461): n is a, c, g, or t
  misc_feature (464)..(465): n is a, c, g, or t
  misc_feature (468)..(473): n is a, c, g, or t
  misc_feature (475)..(476): n is a, c, g, or t
  misc_feature (480)..(482): n is a, c, g, or t
  misc_feature (484)..(487): n is a, c, g, or t
  misc_feature (489)..(489): n is a, c, g, or t
  misc_feature (491)..(494): n is a, c, g, or t
  misc_feature (496)..(496): n is a, c, g, or t
  misc_feature (498)..(500): n is a, c, g, or t
  misc_feature (504)..(511): n is a, c, g, or t
  misc_feature (513)..(513): n is a, c, g, or t
  misc_feature (518)..(524): n is a, c, g, or t
  misc_feature (526)..(529): n is a, c, g, or t
  misc_feature (531)..(541): n is a, c, g, or t
  misc_feature (545)..(549): n is a, c, g, or t
  misc_feature (551)..(551): n is a, c, g, or t
  misc_feature (553)..(559): n is a, c, g, or t
  misc_feature (561)..(564): n is a, c, g, or t
  misc_feature (567)..(567): n is a, c, g, or t
  misc_feature (569)..(572): n is a, c, g, or t
  misc_feature (574)..(578): n is a, c, g, or t
  misc_feature (580)..(582): n is a, c, g, or t
  misc_feature (584)..(585): n is a, c, g, or t
  misc_feature (588)..(595): n is a, c, g, or t
  misc_feature (597)..(601): n is a, c, g, or t
  misc_feature (603)..(611): n is a, c, g, or t
  misc_feature (614)..(614): n is a, c, g, or t
  misc_feature (617)..(618): n is a, c, g, or t
  misc_feature (620)..(626): n is a, c, g, or t
  misc_feature (628)..(632): n is a, c, g, or t
  misc_feature (634)..(634): n is a, c, g, or t
  misc_feature (636)..(639): n is a, c, g, or t
  misc_feature (642)..(647): n is a, c, g, or t
  misc_feature (650)..(651): n is a, c, g, or t
  misc_feature (653)..(653): n is a, c, g, or t
  misc_feature (658)..(660): n is a, c, g, or t
  misc_feature (662)..(671): n is a, c, g, or t
  misc_feature (674)..(676): n is a, c, g, or t
  misc_feature (678)..(679): n is a, c, g, or t
  misc_feature (681)..(688): n is a, c, g, or t
  misc_feature (691)..(692): n is a, c, g, or t
  misc_feature (694)..(698): n is a, c, g, or t
  misc_feature (701)..(702): n is a, c, g, or t
  misc_feature (704)..(708): n is a, c, g, or t
  misc_feature (710)..(712): n is a, c, g, or t
  misc_feature (714)..(715): n is a, c, g, or t
  misc_feature (717)..(720): n is a, c, g, or t
  misc_feature (722)..(723): n is a, c, g, or t
  misc_feature (725)..(727): n is a, c, g, or t
  misc_feature (729)..(733): n is a, c, g, or t
  misc_feature (735)..(737): n is a, c, g, or t
  misc_feature (739)..(742): n is a, c, g, or t
  misc_feature (744)..(745): n is a, c, g, or t
  misc_feature (747)..(748): n is a, c, g, or t
  misc_feature (751)..(754): n is a, c, g, or t
  misc_feature (756)..(759): n is a, c, g, or t
  misc_feature (762)..(762): n is a, c, g, or t
  misc_feature (764)..(765): n is a, c, g, or t
  misc_feature (767)..(771): n is a, c, g, or t
  misc_feature (773)..(782): n is a, c, g, or t
  misc_feature (784)..(789): n is a, c, g, or t
  misc_feature (793)..(793): n is a, c, g, or t
  misc_feature (795)..(797): n is a, c, g, or t
  misc_feature (799)..(804): n is a, c, g, or t
  misc_feature (807)..(809): n is a, c, g, or t
  misc_feature (811)..(811): n is a, c, g, or t
  misc_feature (813)..(820): n is a, c, g, or t
  misc_feature (823)..(823): n is a, c, g, or t
  misc_feature (826)..(827): n is a, c, g, or t
  misc_feature (829)..(829): n is a, c, g, or t
  misc_feature (832)..(833): n is a, c, g, or t
  misc_feature (835)..(836): n is a, c, g, or t
  misc_feature (838)..(839): n is a, c, g, or t
  misc_feature (841)..(842): n is a, c, g, or t
  misc_feature (844)..(855): n is a, c, g, or t
  misc_feature (860)..(861): n is a, c, g, or t
  misc_feature (863)..(863): n is a, c, g, or t
  misc_feature (867)..(869): n is a, c, g, or t
  misc_feature (873)..(877): n is a, c, g, or t
  misc_feature (879)..(882): n is a, c, g, or t
  misc_feature (884)..(894): n is a, c, g, or t
  misc_feature (897)..(904): n is a, c, g, or t
  misc_feature (906)..(909): n is a, c, g, or t
  misc_feature (912)..(915): n is a, c, g, or t
  misc_feature (917)..(918): n is a, c, g, or t
  misc_feature (920)..(922): n is a, c, g, or t
  misc_feature (925)..(927): n is a, c, g, or t
  misc_feature (929)..(932): n is a, c, g, or t
  misc_feature (934)..(934): n is a, c, g, or t
  misc_feature (936)..(937): n is a, c, g, or t
  misc_feature (939)..(951): n is a, c, g, or t
  misc_feature (953)..(954): n is a, c, g, or t
  misc_feature (956)..(961): n is a, c, g, or t
  misc_feature (963)..(971): n is a, c, g, or t
  misc_feature (973)..(973): n is a, c, g, or t
  misc_feature (975)..(977): n is a, c, g, or t
  misc_feature (979)..(989): n is a, c, g, or t
  misc_feature (991)..(994): n is a, c, g, or t
  misc_feature (996)..(997): n is a, c, g, or t
  misc_feature (999)..(999): n is a, c, g, or t
  misc_feature (1001)..(1001): n is a, c, g, or t
  misc_feature (1003)..(1018): n is a, c, g, or t
  misc_feature (1020)..(1022): n is a, c, g, or t
  misc_feature (1024)..(1024): n is a, c, g, or t
  misc_feature (1026)..(1030): n is a, c, g, or t
  misc_feature (1032)..(1032): n is a, c, g, or t
  misc_feature (1034)..(1039): n is a, c, g, or t
  misc_feature (1041)..(1048): n is a, c, g, or t
  misc_feature (1051)..(1055): n is a, c, g, or t
  misc_feature (1058)..(1058): n is a, c, g, or t
  misc_feature (1060)..(1069): n is a, c, g, or t
  misc_feature (1071)..(1072): n is a, c, g, or t
  misc_feature (1074)..(1080): n is a, c, g, or t
  misc_feature (1082)..(1087): n is a, c, g, or t
  misc_feature (1092)..(1098): n is a, c, g, or t
  misc_feature (1101)..(1101): n is a, c, g, or t
  misc_feature (1103)..(1103): n is a, c, g, or t
  misc_feature (1105)..(1106): n is a, c, g, or t
  misc_feature (1110)..(1110): n is a, c, g, or t
  misc_feature (1113)..(1121): n is a, c, g, or t
  misc_feature (1124)..(1124): n is a, c, g, or t
  misc_feature (1126)..(1127): n is a, c, g, or t
  misc_feature (1130)..(1131): n is a, c, g, or t
  misc_feature (1136)..(1137): n is a, c, g, or t
  misc_feature (1139)..(1141): n is a, c, g, or t
  misc_feature (1143)..(1143): n is a, c, g, or t
  misc_feature (1146)..(1147): n is a, c, g, or t
  misc_feature (1150)..(1150): n is a, c, g, or t
  misc_feature (1152)..(1159): n is a, c, g, or t
  misc_feature (1164)..(1165): n is a, c, g, or t
  misc_feature (1170)..(1170): n is a, c, g, or t
  misc_feature (1175)..(1175): n is a, c, g, or t
  misc_feature (1180)..(1180): n is a, c, g, or t
  misc_feature (1182)..(1184): n is a, c, g, or t
  misc_feature (1186)..(1186): n is a, c, g, or t
  misc_feature (1188)..(1189): n is a, c, g, or t
  misc_feature (1372)..(1372): n is a, c, g, or t
  misc_feature (1383)..(1383): n is a, c, g, or t
  misc_feature (1385)..(1385): n is a, c, g, or t
  misc_feature (1387)..(1391): n is a, c, g, or t
  misc_feature (1396)..(1397): n is a, c, g, or t
  misc_feature (1400)..(1402): n is a, c, g, or t
  misc_feature (1404)..(1405): n is a, c, g, or t
  misc_feature (1407)..(1408): n is a, c, g, or t
  misc_feature (1411)..(1414): n is a, c, g, or t
  misc_feature (1416)..(1417): n is a, c, g, or t
  misc_feature (1420)..(1425): n is a, c, g, or t
  misc_feature (1427)..(1427): n is a, c, g, or t
  misc_feature (1429)..(1429): n is a, c, g, or t
  misc_feature (1431)..(1431): n is a, c, g, or t
  misc_feature (1433)..(1433): n is a, c, g, or t
  misc_feature (1438)..(1439): n is a, c, g, or t
  misc_feature (1441)..(1443): n is a, c, g, or t
  misc_feature (1445)..(1445): n is a, c, g, or t
  misc_feature (1447)..(1448): n is a, c, g, or t
  misc_feature (1451)..(1452): n is a, c, g, or t
  misc_feature (1454)..(1454): n is a, c, g, or t
  misc_feature (1456)..(1456): n is a, c, g, or t
  misc_feature (1458)..(1458): n is a, c, g, or t
  misc_feature (1461)..(1462): n is a, c, g, or t
  misc_feature (1466)..(1467): n is a, c, g, or t
  misc_feature (1469)..(1469): n is a, c, g, or t
  misc_feature (1471)..(1479): n is a, c, g, or t
  misc_feature (1481)..(1481): n is a, c, g, or t
  misc_feature (1485)..(1485): n is a, c, g, or t
  misc_feature (1487)..(1488): n is a, c, g, or t
  misc_feature (1491)..(1491): n is a, c, g, or t
  misc_feature (1493)..(1496): n is a, c, g, or t
  misc_feature (1498)..(1502): n is a, c, g, or t
  misc_feature (1504)..(1505): n is a, c, g, or t
  misc_feature (1508)..(1509): n is a, c, g, or t
  misc_feature (1514)..(1520): n is a, c, g, or t
  misc_feature (1522)..(1522): n is a, c, g, or t
  misc_feature (1524)..(1527): n is a, c, g, or t
  misc_feature (1529)..(1529): n is a, c, g, or t
  misc_feature (1532)..(1532): n is a, c, g, or t
  misc_feature (1534)..(1535): n is a, c, g, or t
gtntnnncttnnnatnantntnanannnanaattataantntcngnatgnnnatnnnannnntnnnnnnnntnngtantntttnntntgtntntntnnanntcnnntnnnttnaaatncacatananagnntanncntannntntantngnatantcntcnngttctantncttgcanntnnnttanantnnnnatttnnanaangncangnnnnacncnaccagaannagtaatnnnnatttttnntnnngntannnntaaannannatnannnnnnaccanntncnnntantcnntnanntncnnnnncnnnnnnnnnnnaaantccnnngnnnnntnancntnnnccntnntnnnnttntnnncncnnannatnnntgnnnnnnatnnnnnnnnnnntnatnnnnnnnnnnnntnntnnnntanannntnnnnntnnntnngnntnanannnnnatnnatnnttnnnnnnannaatnnntnnnnanannnntncnnntttnnnnnnnnanaaaannnnnnntnnnntnnnnnnnnnnncaannnnnanannnnnnntnnnntantnnnnannnnnannncnnctnnnnnnnnannnnncnnnnnnnnnatnccnncnnnnnnntnnnnntnannnntannnnnnctnntnggggnnnannnnnnnnnnatnnncnnannnnnnnnttnntnnnnnaannannnnnannncnngnnnntnngnnntnnnnnannntnnnnannannttnnnntnnnntantnngnnnnntnnnnnnnnnntnnnnnntttnannnannnnnnaannnantnnnnnnnnctnttnngnatnntnngnntnncnnnnnnnnnnnnaagtnnanacannncaannnnntnnnncnnnnnnnnnnnttnnnnnnnncnnnnatnnnnannannncannnannnnantnnannnnnnnnnnnnnanncnnnnnnannnnnnnnnantnnnannnnnnnnnnnannnnannananannnnnnnnnnnnnnnnannntntnnnnnanannnnnnannnnnnnnagnnnnngangnnnnnnnnnnannannnnnnnannnnnnaatgnnnnnnntgnantnnaacnagnnnnnnnnngangnngannacgannannnanaannagnannnnnnnntaaanntaaanatatngaaantnnnantnncagccctattaaaacgtatttggaaactagttcggtcgatactatttcccaagaaggaatgctgcaaataaaggagtattactacaagaaaaaatacctagatcgtattttggaagattttcgttaatagcgtaatattgcaaccctgcccagatggcggaattggtagacgcactagactcnaaatctagcgntngnnnnnatgtnnagnnncnntnnctnnnntnngcnnnnnncntntnangattnncnnnananngtnntntntntcnnagcnntntnnnnnnnnngntttngnnaanannnnannnnnannaannccaannnnnnngnannnngntantnntgaaagggtttgggtaagaccaccttttaggaagacggcgaaatgaaatgaagccgtcagtcctaaaagaaaaattattacttagtagctttcctaggaaccttctccgttgccattgcagcatgataaatataagaagccataattgttgcattcttcattaagtcttctggttgaataccttcaagataatctagattggtatgtcctgcagtaccgggtgttctatcttgtaaatattgaaaacctggaagacccacttcatcaaaagaaacatggtcggtacttcctaggctttgattagacaccatattcatacctaagtcacgaaaaggttccatccatgcagtaagcatggtgcgtgctgcttcattaccttgtaaatatatgcctcggtattgtcctgcaccatagtcttgattaaaataagcagataacatttcatattctggcttgatgccaatagctgcattacgcgggtcaccaaaatgtttttgtacataagcgcgcgagccatataaaccttgctcttctcccgaccataaagcaatgcgaatagtacgcataggttttacccctaaagttttaagtatgcgcatggcttccaatgcgactgctgtgccagatgagttatcacttgcattagaactaccatgccaagtatcaaaatgtgcacccaccattactattccttctttaggatttgttccagggatttcacctactaaattcattgcttgttctaccttatctcctattttattttttatctctagttcaatttttactgctatacctctttttaatacacggtacattctattataatgttctggtgtgactgctaaaatgggtgatgcatttttcatgcctgctgcagaccatccatcttctcttacacccggacgtgaataagcaggaactatacctaatctattgccatcggtttgtaaaaccactgctacattttctgattttaaaaaagccatgcgctctactgcattaataattgttgggtttttaataaccctagctgcatttgcttttataggcgtaatagtggcttgttcaagtgcaataagctcttcgttattataacggtgtaccccatttataagtgttagtaaatcaattacagcagggcttgaaataagtactgccttgccttttaatttacctctatataattcaatgtcttctttggtttgaatatccaccaccattgcctctgcatttatttttcctactgtaccagcagtataagcaactggataagcgttgagtggcatgtaatcgggttcaatcatatgtgccgatacatattcattatcccaggtaacaccatagtccatataggcttcgctattcacattcgttaagcccatctttttcatttcatctaaagcccaaacttgagctctttgcatgtctctagacaaagtaagtcttgcgcctaatacatctacgatataagactcatactccattactttagaacgctgtaagccttcttcgcgtatacgcgctaccatggcccagtctactaaaccaggaaaggtaaacgcaaaggaagaggtaagcacaagtacaaaggaaattactcgaacaagtttgattttgaaaaatgtcttcatgagaacttaaatttagggataggaatgtattttttctacattcaatatactaaaatattctcagaactattatttctccatggtcattatagcagagaaaacctgaataccctcaaaaaagtttttcagtttaatattctcattctcggcatgctggttattatcgtgattggcaataggcaccgtcactggagaagttttcaatactttttcaaatacaaataaaggaaggcttcctccaagtgttggaagtaatagtggctgctcattatctactagtgaaatggcttttgaaattcttcttacatacagattgtctaaagaagttttttgagcattataactttttttatcctgcacgaccatacaaattttagcattcaattttctttcttcatcggtaggttctttatctgttacaaaaaagccttgcgccttaatatggtcaattactttttgttgttgtctttgccaatcattaccaactaccaatctcatatcaacagaagcgatagccttcgtaggtattacattggcagaatacttacctacccctgcgctttgtataccattgatatttaaagaaggtaattgtaaggcgtcgtttaaggcgcctgttctttctgtggcattaatacctaattcttttttaagttggtcttccacactgggaatatttgcaagggcttgcttttcggcagtagataaagctattacatcgtcgtaaaaacctttaatagttacttcccccttttcatttttcatactggcaagtagtcttacaagttccatcgccgggtttaatacccaattaccataatgtccagagtg

SEQ ID NO: 1272 - DNA, 4000 bp, Escherichia coli
  misc_feature (112)..(112): n is a, c, g, or t
  misc_feature (337)..(337): n is a, c, g, or t
  misc_feature (1063)..(1063): n is a, c, g, or t
  misc_feature (2046)..(2046): n is a, c, g, or t
  misc_feature (2454)..(2454): n is a, c, g, or t
  misc_feature (2877)..(2877): n is a, c, g, or t
  misc_feature (2916)..(2916): n is a, c, g, or t
  misc_feature (2935)..(2935): n is a, c, g, or t
  misc_feature (2938)..(2938): n is a, c, g, or t
  misc_feature (2942)..(2942): n is a, c, g, or t
  misc_feature (2951)..(2951): n is a, c, g, or t
  misc_feature (2962)..(2963): n is a, c, g, or t
  misc_feature (2965)..(2966): n is a, c, g, or t
  misc_feature (2968)..(2968): n is a, c, g, or t
  misc_feature (2970)..(2975): n is a, c, g, or t
  misc_feature (2979)..(2979): n is a, c, g, or t
  misc_feature (2981)..(2985): n is a, c, g, or t
  misc_feature (2987)..(2991): n is a, c, g, or t
  misc_feature (2994)..(2994): n is a, c, g, or t
  misc_feature (2996)..(2999): n is a, c, g, or t
  misc_feature (3001)..(3002): n is a, c, g, or t
  misc_feature (3005)..(3007): n is a, c, g, or t
  misc_feature (3009)..(3011): n is a, c, g, or t
  misc_feature (3013)..(3013): n is a, c, g, or t
  misc_feature (3015)..(3016): n is a, c, g, or t
  misc_feature (3018)..(3021): n is a, c, g, or t
  misc_feature (3023)..(3023): n is a, c, g, or t
  misc_feature (3025)..(3030): n is a, c, g, or t
  misc_feature (3033)..(3040): n is a, c, g, or t
  misc_feature (3043)..(3052): n is a, c, g, or t
  misc_feature (3054)..(3054): n is a, c, g, or t
  misc_feature (3056)..(3065): n is a, c, g, or t
  misc_feature (3067)..(3068): n is a, c, g, or t
  misc_feature (3070)..(3070): n is a, c, g, or t
  misc_feature (3072)..(3072): n is a, c, g, or t
  misc_feature (3074)..(3076): n is a, c, g, or t
  misc_feature (3078)..(3080): n is a, c, g, or t
  misc_feature (3083)..(3084): n is a, c, g, or t
  misc_feature (3086)..(3087): n is a, c, g, or t
  misc_feature (3089)..(3097): n is a, c, g, or t
  misc_feature (3099)..(3105): n is a, c, g, or t
  misc_feature (3107)..(3107): n is a, c, g, or t
  misc_feature (3110)..(3110): n is a, c, g, or t
  misc_feature (3113)..(3117): n is a, c, g, or t
  misc_feature (3119)..(3119): n is a, c, g, or t
  misc_feature (3122)..(3131): n is a, c, g, or t
  misc_feature (3133)..(3133): n is a, c, g, or t
  misc_feature (3136)..(3141): n is a, c, g, or t
  misc_feature (3144)..(3144): n is a, c, g, or t
  misc_feature (3146)..(3146): n is a, c, g, or t
  misc_feature (3149)..(3151): n is a, c, g, or t
  misc_feature (3155)..(3155): n is a, c, g, or t
  misc_feature (3161)..(3162): n is a, c, g, or t
  misc_feature (3164)..(3168): n is a, c, g, or t
  misc_feature (3170)..(3170): n is a, c, g, or t
  misc_feature (3172)..(3174): n is a, c, g, or t
  misc_feature (3176)..(3181): n is a, c, g, or t
  misc_feature (3183)..(3183): n is a, c, g, or t
  misc_feature (3185)..(3185): n is a, c, g, or t
  misc_feature (3188)..(3191): n is a, c, g, or t
  misc_feature (3193)..(3193): n is a, c, g, or t
  misc_feature (3199)..(3201): n is a, c, g, or t
  misc_feature (3203)..(3203): n is a, c, g, or t
  misc_feature (3205)..(3205): n is a, c, g, or t
  misc_feature (3207)..(3210): n is a, c, g, or t
  misc_feature (3213)..(3213): n is a, c, g, or t
  misc_feature (3216)..(3216): n is a, c, g, or t
  misc_feature (3219)..(3225): n is a, c, g, or t
  misc_feature (3227)..(3230): n is a, c, g, or t
  misc_feature (3232)..(3234): n is a, c, g, or t
  misc_feature (3236)..(3240): n is a, c, g, or t
  misc_feature (3244)..(3249): n is a, c, g, or t
  misc_feature (3251)..(3252): n is a, c, g, or t
  misc_feature (3256)..(3258): n is a, c, g, or t
  misc_feature (3260)..(3262): n is a, c, g, or t
  misc_feature (3264)..(3264): n is a, c, g, or t
  misc_feature (3267)..(3268): n is a, c, g, or t
  misc_feature (3272)..(3272): n is a, c, g, or t
  misc_feature (3276)..(3276): n is a, c, g, or t
  misc_feature (3279)..(3279): n is a, c, g, or t
  misc_feature (3282)..(3282): n is a, c, g, or t
  misc_feature (3285)..(3287): n is a, c, g, or t
  misc_feature (3289)..(3291): n is a, c, g, or t
  misc_feature (3296)..(3298): n is a, c, g, or t
  misc_feature (3300)..(3302): n is a, c, g, or t
  misc_feature (3304)..(3304): n is a, c, g, or t
  misc_feature (3306)..(3308): n is a, c, g, or t
  misc_feature (3315)..(3316): n is a, c, g, or t
  misc_feature (3319)..(3322): n is a, c, g, or t
  misc_feature (3324)..(3327): n is a, c, g, or t
  misc_feature (3331)..(3333): n is a, c, g, or t
  misc_feature (3336)..(3338): n is a, c, g, or t
  misc_feature (3341)..(3341): n is a, c, g, or t
  misc_feature (3345)..(3346): n is a, c, g, or t
  misc_feature (3349)..(3349): n is a, c, g, or t
  misc_feature (3353)..(3353): n is a, c, g, or t
  misc_feature (3355)..(3355): n is a, c, g, or t
  misc_feature (3357)..(3361): n is a, c, g, or t
  misc_feature (3363)..(3366): n is a, c, g, or t
  misc_feature (3368)..(3368): n is a, c, g, or t
  misc_feature (3370)..(3370): n is a, c, g, or t
  misc_feature (3372)..(3372): n is a, c, g, or t
  misc_feature (3375)..(3375): n is a, c, g, or t
  misc_feature (3377)..(3377): n is a, c, g, or t
  misc_feature (3379)..(3379): n is a, c, g, or t
  misc_feature (3381)..(3382): n is a, c, g, or t
  misc_feature (3384)..(3384): n is a, c, g, or t
  misc_feature (3386)..(3388): n is a, c, g, or t
  misc_feature (3393)..(3394): n is a, c, g, or t
  misc_feature (3396)..(3396): n is a, c, g, or t
  misc_feature (3398)..(3399): n is a, c, g, or t
  misc_feature (3404)..(3404): n is a, c, g, or t
  misc_feature (3406)..(3407): n is a, c, g, or t
  misc_feature (3410)..(3411): n is a, c, g, or t
  misc_feature (3413)..(3413): n is a, c, g, or t
  misc_feature (3421)..(3421): n is a, c, g, or t
  misc_feature (3423)..(3423): n is a, c, g, or t
  misc_feature (3425)..(3425): n is a, c, g, or t
  misc_feature (3427)..(3427): n is a, c, g, or t
  misc_feature (3432)..(3435): n is a, c, g, or t
  misc_feature (3437)..(3437): n is a, c, g, or t
  misc_feature (3441)..(3442): n is a, c, g, or t
  misc_feature (3444)..(3445): n is a, c, g, or t
  misc_feature (3449)..(3451): n is a, c, g, or t
  misc_feature (3453)..(3455): n is a, c, g, or t
  misc_feature (3462)..(3462): n is a, c, g, or t
  misc_feature (3464)..(3465): n is a, c, g, or t
  misc_feature (3467)..(3469): n is a, c, g, or t
  misc_feature (3472)..(3472): n is a, c, g, or t
  misc_feature (3476)..(3479): n is a, c, g, or t
  misc_feature (3481)..(3481): n is a, c, g, or t
  misc_feature (3483)..(3485): n is a, c, g, or t
  misc_feature (3492)..(3493): n is a, c, g, or t
  misc_feature (3495)..(3495): n is a, c, g, or t
  misc_feature (3497)..(3497): n is a, c, g, or t
  misc_feature (3500)..(3500): n is a, c, g, or t
  misc_feature (3503)..(3503): n is a, c, g, or t
  misc_feature (3505)..(3505): n is a, c, g, or t
  misc_feature (3509)..(3509): n is a, c, g, or t
  misc_feature (3511)..(3512): n is a, c, g, or t
  misc_feature (3514)..(3516): n is a, c, g, or t
  misc_feature (3520)..(3520): n is a, c, g, or t
  misc_feature (3524)..(3524): n is a, c, g, or t
  misc_feature (3526)..(3527): n is a, c, g, or t
  misc_feature (3530)..(3536): n is a, c, g, or t
  misc_feature (3539)..(3539): n is a, c, g, or t
  misc_feature (3543)..(3543): n is a, c, g, or t
  misc_feature (3546)..(3546): n is a, c, g, or t
  misc_feature (3550)..(3550): n is a, c, g, or t
  misc_feature (3552)..(3553): n is a, c, g, or t
  misc_feature (3557)..(3557): n is a, c, g, or t
  misc_feature (3559)..(3559): n is a, c, g, or t
  misc_feature (3561)..(3565): n is a, c, g, or t
  misc_feature (3567)..(3572): n is a, c, g, or t
  misc_feature (3574)..(3575): n is a, c, g, or t
  misc_feature (3578)..(3578): n is a, c, g, or t
  misc_feature (3581)..(3582): n is a, c, g, or t
  misc_feature (3584)..(3584): n is a, c, g, or t
  misc_feature (3586)..(3587): n is a, c, g, or t
  misc_feature (3589)..(3590): n is a, c, g, or t
  misc_feature (3592)..(3592): n is a, c, g, or t
  misc_feature (3595)..(3595): n is a, c, g, or t
  misc_feature (3598)..(3598): n is a, c, g, or t
  misc_feature (3601)..(3601): n is a, c, g, or t
  misc_feature (3605)..(3606): n is a, c, g, or t
  misc_feature (3614)..(3614): n is a, c, g, or t
  misc_feature (3616)..(3616): n is a, c, g, or t
  misc_feature (3618)..(3619): n is a, c, g, or t
  misc_feature (3622)..(3623): n is a, c, g, or t
  misc_feature (3626)..(3626): n is a, c, g, or t
  misc_feature (3631)..(3632): n is a, c, g, or t
  misc_feature (3635)..(3635): n is a, c, g, or t
  misc_feature (3637)..(3637): n is a, c, g, or t
  misc_feature (3639)..(3640): n is a, c, g, or t
  misc_feature (3642)..(3647): n is a, c, g, or t
  misc_feature (3649)..(3649): n is a, c, g, or t
  misc_feature (3651)..(3651): n is a, c, g, or t
  misc_feature (3653)..(3653): n is a, c, g, or t
  misc_feature (3658)..(3658): n is a, c, g, or t
  misc_feature (3665)..(3665): n is a, c, g, or t
  misc_feature (3667)..(3671): n is a, c, g, or t
  misc_feature (3673)..(3673): n is a, c, g, or t
  misc_feature (3676)..(3676): n is a, c, g, or t
  misc_feature (3679)..(3679): n is a, c, g, or t
  misc_feature (3681)..(3683): n is a, c, g, or t
  misc_feature (3686)..(3686): n is a, c, g, or t
  misc_feature (3688)..(3688): n is a, c, g, or t
  misc_feature (3694)..(3695): n is a, c, g, or t
  misc_feature (3698)..(3703): n is a, c, g, or t
  misc_feature (3706)..(3709): n is a, c, g, or t
  misc_feature (3712)..(3715): n is a, c, g, or t
  misc_feature (3717)..(3717): n is a, c, g, or t
  misc_feature (3719)..(3720): n is a, c, g, or t
  misc_feature (3722)..(3722): n is a, c, g, or t
  misc_feature (3726)..(3726): n is a, c, g, or t
  misc_feature (3729)..(3729): n is a, c, g, or t
  misc_feature (3732)..(3733): n is a, c, g, or t
  misc_feature (3740)..(3740): n is a, c, g, or t
  misc_feature (3742)..(3742): n is a, c, g, or t
  misc_feature (3746)..(3750): n is a, c, g, or t
  misc_feature (3755)..(3758): n is a, c, g, or t
  misc_feature (3762)..(3764): n is a, c, g, or t
  misc_feature (3767)..(3768): n is a, c, g, or t
  misc_feature (3770)..(3770): n is a, c, g, or t
  misc_feature (3772)..(3772): n is a, c, g, or t
  misc_feature (3774)..(3774): n is a, c, g, or t
  misc_feature (3776)..(3776): n is a, c, g, or t
  misc_feature (3778)..(3779): n is a, c, g, or t
  misc_feature (3782)..(3782): n is a, c, g, or t
  misc_feature (3784)..(3784): n is a, c, g, or t
  misc_feature (3786)..(3786): n is a, c, g, or t
  misc_feature (3790)..(3790): n is a, c, g, or t
  misc_feature (3792)..(3793): n is a, c, g, or t
  misc_feature (3795)..(3795): n is a, c, g, or t
  misc_feature (3797)..(3803): n is a, c, g, or t
  misc_feature (3807)..(3808): n is a, c, g, or t
  misc_feature (3810)..(3811): n is a, c, g, or t
  misc_feature (3818)..(3818): n is a, c, g, or t
  misc_feature (3822)..(3823): n is a, c, g, or t
  misc_feature (3825)..(3826): n is a, c, g, or t
  misc_feature (3828)..(3832): n is a, c, g, or t
  misc_feature (3834)..(3840): n is a, c, g, or t
  misc_feature (3843)..(3847): n is a, c, g, or t
  misc_feature (3851)..(3854): n is a, c, g, or t
  misc_feature (3856)..(3857): n is a, c, g, or t
  misc_feature (3859)..(3859): n is a, c, g, or t
  misc_feature (3862)..(3862): n is a, c, g, or t
  misc_feature (3864)..(3864): n is a, c, g, or t
  misc_feature (3866)..(3868): n is a, c, g, or t
  misc_feature (3870)..(3874): n is a, c, g, or t
  misc_feature (3876)..(3879): n is a, c, g, or t
  misc_feature (3881)..(3881): n is a, c, g, or t
  misc_feature (3883)..(3884): n is a, c, g, or t
  misc_feature (3886)..(3890): n is a, c, g, or t
  misc_feature (3897)..(3898): n is a, c, g, or t
  misc_feature (3901)..(3901): n is a, c, g, or t
  misc_feature (3904)..(3905): n is a, c, g, or t
  misc_feature (3910)..(3911): n is a, c, g, or t
  misc_feature (3913)..(3913): n is a, c, g, or t
  misc_feature (3915)..(3915): n is a, c, g, or t
  misc_feature (3918)..(3918): n is a, c, g, or t
  misc_feature (3920)..(3926): n is a, c, g, or t
  misc_feature (3928)..(3928): n is a, c, g, or t
  misc_feature (3931)..(3931): n is a, c, g, or t
  misc_feature (3933)..(3936): n is a, c, g, or t
  misc_feature (3939)..(3939): n is a, c, g, or t
  misc_feature (3943)..(3944): n is a, c, g, or t
  misc_feature (3946)..(3947): n is a, c, g, or t
  misc_feature (3949)..(3950): n is a, c, g, or t
  misc_feature (3952)..(3952): n is a, c, g, or t
  misc_feature (3954)..(3959): n is a, c, g, or t
  misc_feature (3962)..(3962): n is a, c, g, or t
  misc_feature (3964)..(3965): n is a, c, g, or t
  misc_feature (3967)..(3967): n is a, c, g, or t
  misc_feature (3969)..(3975): n is a, c, g, or t
  misc_feature (3982)..(3984): n is a, c, g, or t
  misc_feature (3986)..(3988): n is a, c, g, or t
  misc_feature (3990)..(3991): n is a, c, g, or t
  misc_feature (3993)..(3993): n is a, c, g, or t
  misc_feature (3995)..(3995): n is a, c, g, or t
  misc_feature (3997)..(3997): n is a, c, g, or t
  misc_feature (3999)..(3999): n is a, c, g, or t
gttaagatctaacgctttccaaaggttcaattgcaggctacttgtcaccttattctttagatattccaacgcgtaaaggctgtgaataccggctgcttctatttgatgttgntgaatgaaacaatagccaacactaaatgatttcaataacttctgacttggaagtaactggcggaagtctgcatttagtgtcgtttcaaagcctaaagcgttaatcgttccgaagttaactgacttccaaagtattgctcctgcagcgtctttttcgccatcatcaatccaatcgatgaggttagtatggtgattatagaagctacttacagtgcctgaaagtccntttttgttatatttcactccgacttctacggcagaaagttcctcaggtttaaggtttggatcggctttatggcctccaaccgagtagaaaagttcggttactgatggcatgcgtagcgacgtattataactcgcatagactttccatgcatcgccaaatctataacttgcgttgatgcttggatagacttttacattcatttcggcccaactgttcttcacacccactactcctgccgacatcgttagacgcccaatgagaaggttatgctctgcaacgaactggatgtttgtgcgattaagtcccatcttatacatcacattgtcggttcctttcacgtgtttgggcttggaaagtgggttgccaaggttcgtacttactaagtcttcgtttcgcaattcagcaccaaacgccgtgcgacctaacgtccaatcaaagtatgcattgacgttaacgccgtagacatctgtacgatgatagttgaaaggataacgttccgcatggtcgcgaaagagttcaaagcggtcgtagttatgattccaatagatagccggacgccatttaacagcaccctttcttgtttcagcttgcaccgccgtataggtcttaaaggtatgttcaaactggtcatcatacttggaactatagttagtactcgagccaaagtctttgttactaaggcctgcatgccaactaatggagaggtcatcatcgtcataaaagccntgataaaaagccttctgacttcggaaatcagtatttaacgcgccggctttattgcgattatagccatcggttcgcatgaaactgcccgataattgattgttccatttgcccctcgctacattgattcttcctcccgaagtgactgagccgaagctgccacttgccgcatgtagggtgacacttgaagttcgattggcctttgtaacgatgtttatggcaccaagaagtgacgatgttccataaacacttgcagccggtccttcgagtatttcaatgcgttctatctcactgatatccacgggaaaatcaaatgcattgtgtcccgtttgcggatcaccaatgttgattccattgagaagcaccgtcatctgctcatagtttccgcctcgaatgctcacgtcagtctgcgctcccaatgggccacgctgacgcacatcgacgcctgaaaccaatttcaataggtcgttaacactatgtactggcgccgcgtttacatcctttcgactcagtacagttaccattctcgactgctgactttgcgtcagaggcgcccttgatccggtgactttcacctcgtcaagcaacgtgggttgtccgctcttataaagcgaagtgtcggccttttgcacgtcagtgctaatgccttttgcttgcgcattagagagtgttgccacgctaagtataccgataattacctctttaccaaggcatgaaaagagtgcaaagcccttgttggtaaagtgattaaaacggatacaacggcgctcgttgaaaactgttttgttcacgtttaaattatttattaacgtttatgcaactgcaaaaacgatggcaaaattagtaaaaataaatgaaataaggagtagaaatgatagaaatttgtaaataataaataaggaaaaagattgtcaagtgcagctaacggagcagcggaatggggctgttcgcgttgatacacattagattatgtttcgtgctttacngccttttggcgtgtgttatcgctgttttatggttccaaacactgcttaatctcagcaaaattatcaatgatatagtcggcaaatgcagcctcaaggtcttctcttttgccatttccataggtcacaccgcaggtctttgcccccgcatttcgccccatctgaatgtcaaaaatggtgtcgccgaccaccagagcctcggcaggttgcaacccgaaatgatgcaaagtgttgagcactggctcggcatttggctttgcattttcaacgtcgtcagcccccaaaatcaaacgaatatagggctctaaatgcagttcttgaacgaaagctactaacgattgatggcctcgactgcttgcaatcgtcacgataagtccctcattgtgcaattgttttatcgtctcaacaacncccggaaaggctggaacggcgccgggaacattgttttccatgaacaatttatgatagagatgagcacatgcttcggcctgttcttcagtcatgttttgcaaggctttgaaacattctttcaatggaagtccgatggttttcgcacattcttcggtcgtgcgttcaggcaaaccgagttgtttgagcgttgctttcatcgtgcgggtgatgagtgcttgcgagtcgccgagcgttccatcgaagtccaaaatcacaatctttgtcttcatcttcgttgcagttttgctcgcgaagttacacataaaatcgcaaaaaacagctgcttttcggatataaaatgccgcagcccatcttttcgtgggttataaaccataagccaatgataatcaaaatgttatctcatttcataaaaatggttttgcngtttgcaccaaatcagcctataatttgcatcaaaacacncgatgatttgaggcatttnatngcangaaatgccncaaatcgtttnncnntntnnnnnnaacnannnnncnnnnncgnannnntnnttnnntnnntngnncnnnntngnnnnnnaannnnnnnnccnnnnnnnnnnantnnnnnnnnnntnngncncnnnannngtnnanntnnnnnnnnnannnnnnngntantgnnnnnanttnnnnnnnnnntnatnnnnnnaancngtnnnaccnatgccnntnnnnnanannntnnnnnncntnatnnnnancgtatnnngntncnnnntgngtngannnnnnntnnnntnnntnnnnncttnnnnnncnntatnnntnnnancanngaanaatncgntgnaannnannntgtcnnnannntngnnngagaganngannnnannnnaacnnnccnnnganaggnntgnaatngngnnnnnannnntntngnttngngngnnanannnatgcnnancnnagcgnannaanncnggaaatgncngntnaaaannnncntccnntnncttnnntnnntgcattntnngnnnttnaaannnntngnnngtttcgnnangncangcnanttgngnnannnttcnattngnnatnnnnnnnatnatgngcntagntnngccntnannnnnannnnnntnnagnatnngnanngnncntcnganttntgannaggcttgntngnnacnnccnatacnntgnancnngnnnnnnangngntattnttcgcgncnnnnntnatngcnannnggngngtaaanngtnnnnnntcnnnncannnntncnntnggantgntannccatatntntgannnnntgccnnnnggannnttnntnancntntnnagntngnctcntnngncnnnnnnnaagnntnnacttgcnacgnngnnannnnntnnnnnnncannnnnattnnnngnntnagncncnnntnnnnnannnntnannannnnntattggnnganttnnggcgnnanangantnnnnnnngngtntnnnnatncgcnntnngnntntnnnnnnagntnngntnnnnnnncaatttnnnannntnntngngncnt

SEQ ID NO: 1273 - DNA, 4000 bp, Escherichia coli
  misc_feature (21)..(21): n is a, c, g, or t
  misc_feature (72)..(72): n is a, c, g, or t
  misc_feature (91)..(91): n is a, c, g, or t
  misc_feature (242)..(242): n is a, c, g, or t
  misc_feature (260)..(260): n is a, c, g, or t
  misc_feature (290)..(290): n is a, c, g, or t
  misc_feature (335)..(335): n is a, c, g, or t
  misc_feature (1003)..(1003): n is a, c, g, or t
  misc_feature (1067)..(1067): n is a, c, g, or t
  misc_feature (1102)..(1102): n is a, c, g, or t
  misc_feature (1199)..(1199): n is a, c, g, or t
  misc_feature (1991)..(1991): n is a, c, g, or t
  misc_feature (2445)..(2445): n is a, c, g, or t
  misc_feature (3051)..(3051): n is a, c, g, or t
gccgtgggtgacgcgttcaangccgccgggttcaaggccccgacgttcctggacgcgacgccctgacccgcncgagccagcccgccccggnccggccacaaagtggagcgttgtgacacagacacgccgtgcaggcgtgccacttcactccacagggttgcgagcggggctagaggtcgtagctgaggacgaggggggcgtggtcgctccagcgggtgtcccaggaccgggcgcggtcgatntcggcggtcacggcggcntcggcaagctccggtgtggcgagctgatantcgatccgccacccggcgtcgttgtcgaaggcctggccacgcatngaccaccaggtgtacggcccgggtccctcgccacccagcacccggccgaggtcgacccagcgcagctcgccgaaccagcggtcgaggtacccgcgctcctcgggcaggaagccggcggacttcaggttgccccgccagttcttgatgtccacctcgcggtgcgcgatgttcaggtccccgccgacgacgacgtacccgcccgcgtcctgcagctcgccgaaccgcgcggtcacccgctcgaggaacgcgtacttgtcgtcctgcttgggcgtcccggcctcgcccgagtggatgtaggccgagaccgcggtcagggtcccgccgcccgccagcgtcaggtccgcctcgacccatcggccgctgtccgtggccaggtccgagccgatcccgatccgcgcgccgaccatcggcagccgcgaggcgatggcgacgcccgcgcggcccttcgcctgagcctcctggtgcactatcgcccactcgtcaccgagcagctcgtgcaccacgtcgtcgggcgcgcggacctcctgaagcaggagcacgtcgggccgacgctcggccagccagtccggcatgcccttgcggaaggcagcccggagcccgttgacgttgacggtcgcgatggtcagcatccgcccatcaaacctcatgtcaccgacccggtcgccacncccgccccggccggacggtgagtgtcgcgctgtcgagccgagcagcgatcctcaccggcggtgncggatcagaggctgcgctcggcggcctccaccacnttcgtgagcagcatcgcgcgagtcatcgggccgacgccgcccggcatcggcgcgatccacgccgcgatcccgcggacgccaggatcaatatcgccgnccaaccgcgtcttccccgtctccgggtccgggacgcgggtgatgcccacgtcgagcacggctgcgcccggcttgaccaggtccgccgtgatgatcccgggcacgccggcggctgcgacgatgacgtccgcgttccgggtgtgctcggcgatgtcctccgtcccggtgtggcacagcgtgaccgtcgcgttcacctcgcgccgggtcagcatcaggccgagcggtcgcccgaccgtcaccccgcgcccgatgacgacgacgtccgctccggccagcgccaccccgtggcgctggagcagctcgatgatgccgcgcggggtacacggcagcggcgtatcgatcggcccgctgacccggagcaccaggcgacccaagttcgtcgggtgcaggccgtcggcgtccttcgccgggtccatcagctcgagcacccgctgggcgtcgaggtgacgcggcagcgggagctgcacgatgaagccggtgcacgccgggtccgcgttcagcgcggcgatcgcggcgtcgacatcggcctggctcgcgtcggcggggagatctacccggatcgagcggatgccgacctcttcgcagtctcggtgcttgccggcgacgtaggcgtgggagcccgggtcgtcaccgaccagcaacgtgccgagaccaggtgtgatgccccgctcgcgcagcgcgcgaacccgctccgcgagctccgccttgattacggctgcagtcgcgaccccgtcgaggatctgagcggtcactgctgcagccccgggtagagcgggaattcctcggtcagctntttcacccgcgcgcgcaaggcctcgacatcggcgccgcccttgagcacggtcgcgatgatctccgccacctcggtgaactcggtagcgccgaagccgcgggtcgcgagcgccggggtgccgatccgcagaccggaggtcacccgcggcgggcgcgggtcgaacggcaccgcgttgcggttcaccgtgatgcccgcctcgtgcagctggtcctcggcctgctggccgtccatcgcggagttgcgcaggtcgacgagcaccaggtgcacgtccgtgccgccggtcagcacggagacaccggccgccgtgacgtcggccgcggtcaggcgctccgcgatgatccgggcaccgtcgagggtgcgctgctggcgggcgcggaactcctcgcccgccgcgatcttgaacgcgacggccttggcggcgatgacgtgcatgagcgggccaccctgctgaccngggaacacggccgagtcgatcctcttcgcgtactcctcgcgcgacaggatgaagccggagcgggggccaccgatggtcttgtgcacggtcgaggagacgacgtcggagaacggcaccggactcgggtgcaggcccgcggcgacgagacccgcgaagtgagccatgtcgacccagagcttcgcaccgacctcgtccgcgatcgagcggaaggccgcgaagtcgaggtggcgcgggtacgcggaccagccgccgatgatgacgtcggggcgctgctcgagcgccttctcgcggaccttgtccatgtcgacgaggaaggtgtcggggtccaccccgtaggagccgacctggtagagcttgccggagaagttgatcttcatcccgtgggtgaggtggccaccgtgcgcgagctcgaggccgaggatcttgtcgccgacgttgatgagcgcgtgcaggacggcggcgttggccgtcgcaccggagtgcggctggacgttcgcgtgctcggcgccgaacagctccttggcgcgcgcgatcgcgagcgtctcggcgatgtccacctgctcgcagccgccgtagtagcgcttgcccgggtagccctcggcgtanttgttggtgagcacggagccctgcgcctgcaggaccgcgcgagggacgaagttctcgctcgcgatcatctcgagcgtctcgcgctgacgggtgagctcgccctcgaggacggcggcgatctcggggtcgacctgggccaggggctggtcgatgacagagtggtaggtcgactgggcgctcatgatctcctcgcaagcatgttgacggtcagggtgcgtccgcggggatctgcgtgcaggaactccgcggtgcggtgaccttcggcccaggcgtccgacctgaagtcaactgctgcgtcactccccggtggtcgtccacccattgcgccagtcgcgaccggcacagcctaccaagtcacccggcgtcctcgacatcgacaacttcgccctcgccgaggatgcggcgcaggtacgcgtaggtgaggtcccccgccgtcttgtcgtactggtgctcgaacccgtgcttggcgtacagcgcgaggttctgcttggagtcctgaccggtgaagacccacacctcgcgggtgttctccggcaggtaatggagcacctcgaagagcagctgggtgccgatgccctggccctggatgtcgggagcgacggcgagccggccgagggtcgccctgtcgtcctcgatgccgacccggatcgagccgaccagccgggggccgatccaggctccgatcgtgacgacgtcgtcccgcgccatgtcctcacggagctcgccgagggtctgggtgagcggcgggatgttcgggtccccgcagagttgcgcctcggtcacgaaggccgcgcggcggagtgtcaggagttcaccagcagcgtcgcccgggacacggtcgagtcgcacctcaacgtcagtcatgccgtaatcgtctcaggtcgccggagcggcgactaccctcacacacgtgtccgaccacgattccgccgcgcctgcctctcccgcc

SEQ ID NO: 1274 - DNA, 4000 bp, Escherichia coli
  misc_feature (999)..(999): n is a, c, g, or t
  misc_feature (1466)..(1466): n is a, c, g, or t
  misc_feature (1742)..(1742): n is a, c, g, or t
  misc_feature (1943)..(1943): n is a, c, g, or t
  misc_feature (1955)..(1955): n is a, c, g, or t
  misc_feature (1957)..(1957): n is a, c, g, or t
  misc_feature (1960)..(1960): n is a, c, g, or t
  misc_feature (1988)..(1988): n is a, c, g, or t
  misc_feature (2020)..(2020): n is a, c, g, or t
  misc_feature (2068)..(2068): n is a, c, g, or t
  misc_feature (2272)..(2272): n is a, c, g, or t
  misc_feature (2479)..(2479): n is a, c, g, or t
  misc_feature (2648)..(2648): n is a, c, g, or t
  misc_feature (2653)..(2653): n is a, c, g, or t
  misc_feature (2659)..(2659): n is a, c, g, or t
  misc_feature (2662)..(2662): n is a, c, g, or t
  misc_feature (2664)..(2665): n is a, c, g, or t
  misc_feature (2667)..(2679): n is a, c, g, or t
  misc_feature (2682)..(2711): n is a, c, g, or t
  misc_feature (2713)..(2720): n is a, c, g, or t
  misc_feature (2722)..(2726): n is a, c, g, or t
  misc_feature (2728)..(2737): n is a, c, g, or t
  misc_feature (2739)..(2750): n is a, c, g, or t
  misc_feature (2752)..(2765): n is a, c, g, or t
  misc_feature (2767)..(2768): n is a, c, g, or t
  misc_feature (2770)..(2789): n is a, c, g, or t
  misc_feature (2791)..(2798): n is a, c, g, or t
  misc_feature (2800)..(2802): n is a, c, g, or t
  misc_feature (2804)..(2824): n is a, c, g, or t
  misc_feature (2826)..(2851): n is a, c, g, or t
  misc_feature (2853)..(2859): n is a, c, g, or t
  misc_feature (2861)..(2863): n is a, c, g, or t
  misc_feature (2865)..(2872): n is a, c, g, or t
  misc_feature (2874)..(2889): n is a, c, g, or t
  misc_feature (2891)..(2892): n is a, c, g, or t
  misc_feature (2895)..(2898): n is a, c, g, or t
  misc_feature (2900)..(2902): n is a, c, g, or t
  misc_feature (2905)..(2912): n is a, c, g, or t
  misc_feature (2914)..(2926): n is a, c, g, or t
  misc_feature (2928)..(2932): n is a, c, g, or t
  misc_feature (2934)..(2944): n is a, c, g, or t
  misc_feature (2946)..(2950): n is a, c, g, or t
  misc_feature (2952)..(2962): n is a, c, g, or t
  misc_feature (2965)..(2984): n is a, c, g, or t
  misc_feature (2986)..(2995): n is a, c, g, or t
  misc_feature (2997)..(2997): n is a, c, g, or t
  misc_feature (2999)..(3012): n is a, c, g, or t
  misc_feature (3014)..(3019): n is a, c, g, or t
  misc_feature (3021)..(3027): n is a, c, g, or t
  misc_feature (3029)..(3029): n is a, c, g, or t
  misc_feature (3031)..(3063): n is a, c, g, or t
  misc_feature (3065)..(3073): n is a, c, g, or t
  misc_feature (3075)..(3082): n is a, c, g, or t
  misc_feature (3084)..(3088): n is a, c, g, or t
  misc_feature (3090)..(3097): n is a, c, g, or t
  misc_feature (3099)..(3118): n is a, c, g, or t
  misc_feature (3120)..(3120): n is a, c, g, or t
  misc_feature (3122)..(3127): n is a, c, g, or t
  misc_feature (3129)..(3130): n is a, c, g, or t
  misc_feature (3132)..(3150): n is a, c, g, or t
  misc_feature (3153)..(3189): n is a, c, g, or t
  misc_feature (3192)..(3192): n is a, c, g, or t
  misc_feature (3195)..(3196): n is a, c, g, or t
  misc_feature (3198)..(3207): n is a, c, g, or t
  misc_feature (3209)..(3209): n is a, c, g, or t
  misc_feature (3211)..(3217): n is a, c, g, or t
  misc_feature (3219)..(3234): n is a, c, g, or t
  misc_feature (3236)..(3253): n is a, c, g, or t
  misc_feature (3255)..(3310): n is a, c, g, or t
  misc_feature (3312)..(3321): n is a, c, g, or t
  misc_feature (3323)..(3325): n is a, c, g, or t
  misc_feature (3327)..(3356): n is a, c, g, or t
  misc_feature (3358)..(3374): n is a, c, g, or t
  misc_feature (3376)..(3384): n is a, c, g, or t
  misc_feature (3386)..(3396): n is a, c, g, or t
  misc_feature (3398)..(3404): n is a, c, g, or t
  misc_feature (3406)..(3415): n is a, c, g, or t
  misc_feature (3417)..(3423): n is a, c, g, or t
  misc_feature (3425)..(3428): n is a, c, g, or t
  misc_feature (3430)..(3432): n is a, c, g, or t
  misc_feature (3434)..(3453): n is a, c, g, or t
  misc_feature (3455)..(3513): n is a, c, g, or t
  misc_feature (3515)..(3543): n is a, c, g, or t
  misc_feature (3545)..(3545): n is a, c, g, or t
  misc_feature (3547)..(3557): n is a, c, g, or t
  misc_feature (3559)..(3559): n is a, c, g, or t
  misc_feature (3561)..(3569): n is a, c, g, or t
  misc_feature (3571)..(3574): n is a, c, g, or t
  misc_feature (3576)..(3620): n is a, c, g, or t
  misc_feature (3622)..(3629): n is a, c, g, or t
  misc_feature (3631)..(3651): n is a, c, g, or t
  misc_feature (3653)..(3680): n is a, c, g, or t
  misc_feature (3682)..(3695): n is a, c, g, or t
  misc_feature (3697)..(3703): n is a, c, g, or t
  misc_feature (3705)..(3714): n is a, c, g, or t
  misc_feature (3718)..(3718): n is a, c, g, or t
  misc_feature (3720)..(3721): n is a, c, g, or t
  misc_feature (3723)..(3724): n is a, c, g, or t
  misc_feature (3726)..(3726): n is a, c, g, or t
  misc_feature (3728)..(3744): n is a, c, g, or t
  misc_feature (3746)..(3747): n is a, c, g, or t
  misc_feature (3749)..(3750): n is a, c, g, or t
  misc_feature (3752)..(3756): n is a, c, g, or t
  misc_feature (3758)..(3762): n is a, c, g, or t
  misc_feature (3764)..(3766): n is a, c, g, or t
  misc_feature (3768)..(3768): n is a, c, g, or t
  misc_feature (3770)..(3774): n is a, c, g, or t
  misc_feature (3776)..(3781): n is a, c, g, or t
  misc_feature (3783)..(3783): n is a, c, g, or t
  misc_feature (3786)..(3786): n is a, c, g, or t
  misc_feature (3800)..(3800): n is a, c, g, or t
  misc_feature (3802)..(3802): n is a, c, g, or t
  misc_feature (3805)..(3805): n is a, c, g, or t
  misc_feature (3810)..(3810): n is a, c, g, or t
  misc_feature (3831)..(3831): n is a, c, g, or t
  misc_feature (3841)..(3841): n is a, c, g, or t
  misc_feature (3845)..(3848): n is a, c, g, or t
  misc_feature (3850)..(3852): n is a, c, g, or t
  misc_feature (3858)..(3861): n is a, c, g, or t
  misc_feature (3864)..(3865): n is a, c, g, or t
  misc_feature (3874)..(3874): n is a, c, g, or t
  misc_feature (3880)..(3880): n is a, c, g, or t
  misc_feature (3883)..(3883): n is a, c, g, or t
  misc_feature (3886)..(3889): n is a, c, g, or t
  misc_feature (3891)..(3892): n is a, c, g, or t
  misc_feature (3899)..(3900): n is a, c, g, or t
  misc_feature (3907)..(3907): n is a, c, g, or t
  misc_feature (3910)..(3911): n is a, c, g, or t
  misc_feature (3914)..(3914): n is a, c, g, or t
  misc_feature (3924)..(3924): n is a, c, g, or t
  misc_feature (3927)..(3927): n is a, c, g, or t
  misc_feature (3931)..(3931): n is a, c, g, or t
  misc_feature (3937)..(3937): n is a, c, g, or t
  misc_feature (3942)..(3943): n is a, c, g, or t
  misc_feature (3945)..(3945): n is a, c, g, or t
  misc_feature (3954)..(3954): n is a, c, g, or t
  misc_feature (3960)..(3961): n is a, c, g, or t
  misc_feature (3963)..(3964): n is a, c, g, or t
  misc_feature (3971)..(3971): n is a, c, g, or t
  misc_feature (3973)..(3973): n is a, c, g, or t
  misc_feature (3978)..(3978): n is a, c, g, or t
  misc_feature (3985)..(3985): n is a, c, g, or t
  misc_feature (3988)..(3988): n is a, c, g, or t
  misc_feature (3990)..(3990): n is a, c, g, or t
gataggctcaacgcggacgtcattgcccatgtcatcatagtagatgtcagcctgcatatcgatcaggtcgataatacccttgaaggtatcctcctgaccgacgggcagctggatgggcacaccgttggcgtgcagacgatcatggagcatctgaacgcagcggtagaaatcggcacccatggtgtccatcttgttgacgtacaccatgcggggaaccttgtactcgtcagcctgacgccaaacggtctcagactgcggctcaacaccgcccttagcggccagaacggtaacggaaccgtccagaacacgcagagaacgctgaacctcaacagtgaagtcaacgtgacccggggtgtcgatgatgttgatacgatggcggttcttcttgaagagagccggatcgtgctgggtctcggtatggctccaatagcaggtggtagcagcggaagtgatggtgataccacgctcctgctcctgttccatccagtccatcgtagcagcgccgtcatgaacctcaccgatcttatggttgataccggtgtagtacaggatgcgctcggtggtggtggtcttacctgcgtcgatgtgggccatgataccgatgttacgggtcatttgcagagatacatctctcggcgtagccatggcttatacctcctcgacagcgaatcaataacgatagtgggcaaaagccttgttggcctcggccatcttgtgcgtatcctcgcgcttcttgacagagccgccgacaccgttggtggcgtcgatgatctcagcagccagacgagcagacatggtcttctcgccacgggcgcggctgtaagcggtcagccagcgcaggccgagggtctcgcggcgggcagggctaacttccagaggaacctgatagttagcgccgccgacacggcgggtcttgcactcgaggttaggcatgatgttctccattgccttctcgaacatctcgagcgggtcgttgccggtcttttccttcacgatgtngaatgcatcgtaaacgatctcctgcgcaacacctttcttgccatccagcatgatgtagttgaccaggcgggtgacaaccttggaattgtaaataggatcggccagaacttcgcgtttcgcgacattacctcttctgggcatctttcttccctccttcacataaatgatatcatcggtactcgaaagttaagaaactcccgttgtgccacaaaaaaggcgttggcctattttatggcgaaaagatgtttccttacttcttggcaccggccttggggcgcttagcaccgtatttgctgcgggcctgattacggttcgcaacaccctgggtatccagagtaccacggatgatgtggtaacggacaccgggcagatccttgacacgaccgccgcggatcagaacaacgctgtgctcctgcaggttatggccgataccgggaatgtaagaggtgacctcgataccattcgtnaggcggacacgggcaactttacgcagagcagagttaggcttcttgggggtcatggtacgcacggcagtgcagacaccacgcttctgcgggctgttgaggttggtgtactcctttttctgggagttgtagctcttcagaagggcaggcgcggtgctctttttgaccagaacctcacggcctttgcgcacgagctggttaaaagtaggcatttcttttctcctttcttcacttattcacgcgctttttgcgggtcgtccggccagatggccgcactanaccccgcatctcacgcaatgattatattacagcatcccggccggaatgtcaagagtattgccaaaaaaatcttgaaaaaatcgtgcaatacggagaatttttcatttctgaagcaaaatgtgcaaatcttgcgccggtttgggcggcagcgttgcattttggtaagtccgcgcatagaatgaagcggaccgtctccccccnccgccgcgcggncngcngccgtccgtgcgcgttttgtctatttancagagacaaatatacattttgcacaaaaacangccgccagattcatggacttgacgagtcgatttctgttgcattgtgtnccccgctttgctataatgaagatacagacaaaaccggaacagttccggccatgcaagttctgacgctacatttttgaggaggtcctgacaatgaagaaactgcttgctatcctgatttccctgtgcatggtatccgccttcgctgtacctgtttttgcagatgccaacagcgattatatcgccgccgtcaaggcctaccaggcncagatcgccgcgaaggaagccgcctacactgcagcggtggatgcttattccaagaatgcaaaggccaaggcagacgccgacagcgccgcaattctgaaggccgccaaggctgcccaggcgaaggccgatgcagactgtctggccgtcatcgccgcgggcaaggctgcccagtcccaggctgacgcgcgcgtcgccgcggtaattgcngcaggcaaggccacgcaggccaaggctgatgcacgcgaggccgcctatgcgaaggccgtgaaggcgtatcaggatcagatcgccgcacgtgaggccgcctacatcaaggccgtgctgggcaagtaattctaccttattataataggagcggagcgccgggaaaggcgcnccgcntttttnttntnntnnnnnnnnnnnnnggnnnnnnnnnnnnnnnnnnnnnnnnnnnnnngnnnnnnnncnnnnngnnnnnnnnnncnnnnnnnnnnnncnnnnnnnnnnnnnncnnannnnnnnnnnnnnnnnnnnncnnnnnnnngnnngnnnnnnnnnnnnnnnnnnnnngnnnnnnnnnnnnnnnnnnnnnnnnnngnnnnnnncnnngnnnnnnnncnnnnnnnnnnnnnnnncnncgnnnncnnnggnnnnnnnngnnnnnnnnnnnnngnnnnngnnnnnnnnnnngnnnnngnnnnnnnnnnngcnnnnnnnnnnnnnnnnnnnntnnnnnnnnnngncnnnnnnnnnnnnnncnnnnnngnnnnnnncngnnnnnnnnnnnnnnnnnnnnnnnnnnnnnnnnnannnnnnnnngnnnnnnnngnnnnngnnnnnnnngnnnnnnnnnnnnnnnnnnnngncnnnnnngnngnnnnnnnnnnnnnnnnnnnaannnnnnnnnnnnnnnnnnnnnnnnnnnnnnnnnnnnncgncgnngnnnnnnnnnncncnnnnnnncnnnnnnnnnnnnnnnngnnnnnnnnnnnnnnnnnncnnnnnnnnnnnnnnnnnnnnnnnnnnnnnnnnnnnnnnnnnnnnnnnnnnnnnnnngnnnnnnnnnngnnngnnnnnnnnnnnnnnnnnnnnnnnnnnnnnnannnnnnnnnnnnnnnnngnnnnnnnnncnnnnnnnnnnngnnnnnnntnnnnnnnnnncnnnnnnngnnnntnnngnnnnnnnnnnnnnnnnnnnntnnnnnnnnnnnnnnnnnnnnnnnnnnnnnnnnnnnnnnnnnnnnnnnnnnnnnnnnnnngnnnnnnnnnnnnnnnnnnnnnnnnnnnnncncnnnnnnnnnnncngnnnnnnnnncnnnngnnnnnnnnnnnnnnnnnnnnnnnnnnnnnnnnnnnnnnnnnnnnngnnnnnnnntnnnnnnnnnnnnnnnnnnnnncnnnnnnnnnnnnnnnnnnnnnnnnnnnntnnnnnnnnnnnnnntnnnnnnnannnnnnnnnngcgngnngnngncnnnnnnnnnnnnnnnnncnncnncnnnnngnnnnntnnngngnnnnngnnnnnngngcntggcggcgagattntngtngaccncggcggcgacgttgtcgtcgnccacggcggncgcnnnntnnnccgccnnnntgnncgcggcggnggaggnggngtnnnngnnggcggcnncggcggnggnngcngcgatggtgncgncgtngtaggnggcgnngntgttgttgntgtggnngnngttcttntngtagntgcggtnggngntcttctccag

SEQ ID NO: 1275 - DNA, 4000 bp, Escherichia coli
  misc_feature (626)..(626): n is a, c, g, or t
  misc_feature (1151)..(1151): n is a, c, g, or t
  misc_feature (3556)..(3556): n is a, c, g, or t
  misc_feature (3568)..(3568): n is a, c, g, or t
  misc_feature (3768)..(3768): n is a, c, g, or t
  misc_feature (3970)..(3970): n is a, c, g, or t
gactcgaccctttggcgcaggcgttggcctaacgcatcgagtgcctgccgggcggcggcggcatcgatatcaaacagccacaccggatgcccggccccggccgccacctgggcgataccgatgcccatggtgccggcaccaatcacggcgacccttgcgttgacgttcggcaggttcatgattatttcccgctgaaattaggggggcgtttggcgaagaaggcgctgacgccttcgcggtagtcgtcgctgcggccgccgaggcgctgcaggtcgcgttccagatcgagctgctgatcgagggtattgttcgccgagctgtagagggcttttttaatcagccccagcccgtaagtgggttgggtggccaggtgttgtgccagcgtttggctggtggcggccagttggtccgccgctaccacctgccagatcatgccccatgccagcgcctgttgtgcgctgactttatctcccagcagcgccatgcccatggcgcgggcgtggcctgccaaacggggcaggaaccagctgccgccggagtccggcaccagccccaggcggcagaaagactgaataaaattggcgttatcggcggcgatcacgatatcgcaggccagcgccagcgcngcgccggcccccgccgcgacaccgttgacggcgcacaccaccggctttggcagggcggtcagacgacggatcagcggattgtaaaaacgctctaccgacaggccgagatccggcgcctgctgttcgacgctgacgttgcgatcgttcagatcctgcccggcgcaaaagccacgtcccgcaccggtgatcagcaggcagcgtacggtttcgtcccgctcggcgagggtcaaggcttcgctcagttggcggtgcatctcgtcgttgaagctattgagccggtctggccgattgagggtcagcgtcagcaccccggcttcaaggtgggtgagaatcaatgcgttttccataaatcagcgcccctgatagtttggcgtacgtttttcgaagaaggcggcgatgccctcgcggcgatcgtcggtggcggccagggtggcaaactgctggcgttcgatgagcagcccttggctaaggccggtttcctccgcctgtttcagcgcctgtttggcggcgcgcagtgccagcggngcctgcctgctgatgtgctcggcgatctgctgtgcgcgttccagcgtcagggcgtcgacgcacacttcactgaccaacccgcactgcaatgcgcgcgaggcgttaatggcttcgccactcagcaccatctgactggcgaaggacttgccgacgcagcgaatcaagcgctgagtgccgccggcccctggcatcaggccgagggtgatttccggcaggccaaagcgggcgctttcgccgcaaatgacaatgtcgcaggccagcgccagctcgcagccggcgccgagcgcatagccgttcactgccgccagcagcggtttactgaactgcgccagccgttgccacaacagcgggcggcgatccgtcagcgtagcgggcaggtcctgccgttgcagttcgtgcagatcggcaccggcggcaaagaaacgcgttgtgccggtgatcactactgcgccaatggcggtatcggcatcggcctgttccagtaaatacaccagctgctccaggcagggtgtgttcagggcattgcgcgcttgtggacggtgcagttccagcgtcagcacgcgcgcctggcgatgttgcaggatcaaaggggtttccattggcggctcctatacgtcaaagtccagcaccacaccgtcaccgcgtggccacgactggcagctcaatacgtagcctgccgcgagttgatccggctccaggctgtagttgacggccatgtccacctgaccggcttttaaccggcacttgcaggtggcgcacacgccgcctttgcaggcatagggaagatcggcaccctgacgcagcgccgcgtccagaatgctgtcgtcctgcgaaccgacctcgatatccaaccggcggccgtcgagcaaaatcgccactcgcgtggcgttgcgcggggtgtcgttgaccgggcgggcgaccacgccgctggtgttaaagcgctcgctgtggatacgctcggcggctacgccagcctgttccagcacgctttgggcgtcgtccatcatggtttgcgggccgcagataaaggcatggtcatagtcgcggtaatccagcagcgcgccgccgatcgccaacaggcgctcgcggtcgatgcgcccactgagcagcgggctgtcgaggctctcctggctgaacagatacagcggctgaaaacgttgtggatagcggtttttcagatcggacagcgtctccttgaacatcaccgaacggctgctgcggttgccgtaaatcagcgtgaagctgctgtttggttcaagttgcagggtggctttgatgatcgacagcatcggcgtgatgccggaaccggcggcaatcgccagatagttgccgctgttttccgcctgtggctggtagccgaaacggccctgcggcaccatcacctccagcgcgtcgccgactttcagtagccgattaacgaacgaggaaaagcggccctgatggatggctttaacgccgatctgcagcagcccttcctgaggagcgctgcagatggagtagcagcggcgcagctcttcgccatccacctgcgcctttagcgtcagatgttggccgggggtgtagcagtaatgacttttcagctcttcgggcacgcgcagagtgatagctacggcgtccggcgtttcgcgctcgatggcggcgacgttcaggcgatggaagaccgtcatggttttctgcgctcctaaatgcatttgaaatagtcgaagggttcgcggcaatcgcagcagcgatacagcgctttgcaggcggtggagccgaattcgctgattttttcgctgtgggtgctgccgcagcgcgggcagggcaccgggcctgcagcctgcggtttgtcgcaggtatggccctgtggcggtgcgacgccgtattcacgcagccgttcacgcgccgaggcgttcatccagtcggtggtccacgccgggctgaggcgaatgtccactttgaccggggcaaagccggcctcggccagccgctgctcgatggcttcgagcaggaactcggtggcggggcagccggagtaggttggcgtaaaggtaatgcgccagccgtcgccgtcggcttcaacgtcgcgaaccatgcccagatcggtaatcgacagcaccggcagttccggatcgctgatctgttgcaggcagtgccagatttgcggaatttccgcggcctgcagccgggtaatgttcatagcggccccttaccagtttgcgttgggataggcgcgttgcaggaactgcatctcggccagcagcggaccgagatgttcgctgtgccgaccctgtttaccgccgtggcggaacgcctgctctgccggcagcgtcagggtggcctgttgcagcgtttcttcaaccagcgccagccacggagcctcaagctggcgcggatcggcggcgataccctgttctgccaactgnagttcaagctcntcggcatggaacagctcggcggtaaaacgccacaggccatccagcgactgctgcattttttggtggctgacggggctgccgtcacccagacggatcatccagccacggctgaaacgcaggtggtaatgcgcctctttcagtgacttggcggcgatggcggcgagttgcgcatcgcgactttggctcaaggcctgatgcanctgcacgtggtaggcgtccatcaggaactgccgcaccagagtgtcgttgaagccgccgttgggctgttccgccagcagcaggttatggaactcacgttcgtcacggccgaaggccagtcggtcttcgctgaattgcggcccggccagttcggcggcataaccgagaaagttgcgtgcctggccgagtaggtccaggccgatnttggccagcgccaggtcgatctccagttcc

SEQ ID NO: 1276 - DNA, 4000 bp, Escherichia coli
  misc_feature (1)..(298): n is a, c, g, or t
  misc_feature (356)..(356): n is a, c, g, or t
  misc_feature (417)..(417): n is a, c, g, or t
  misc_feature (599)..(599): n is a, c, g, or t
  misc_feature (1017)..(1017): n is a, c, g, or t
  misc_feature (1025)..(1025): n is a, c, g, or t
  misc_feature (2016)..(2016): n is a, c, g, or t
  misc_feature (2150)..(2152): n is a, c, g, or t
  misc_feature (2173)..(2173): n is a, c, g, or t
  misc_feature (3729)..(3731): n is a, c, g, or t
  misc_feature (3736)..(3744): n is a, c, g, or t
  misc_feature (3748)..(3751): n is a, c, g, or t
  misc_feature (3754)..(3754): n is a, c, g, or t
  misc_feature (3760)..(3761): n is a, c, g, or t
  misc_feature (3763)..(3763): n is a, c, g, or t
  misc_feature (3766)..(3767): n is a, c, g, or t
  misc_feature (3769)..(3769): n is a, c, g, or t
  misc_feature (3771)..(3772): n is a, c, g, or t
  misc_feature (3775)..(3778): n is a, c, g, or t
  misc_feature (3780)..(3781): n is a, c, g, or t
  misc_feature (3785)..(3788): n is a, c, g, or t
  misc_feature (3790)..(3791): n is a, c, g, or t
  misc_feature (3794)..(3794): n is a, c, g, or t
  misc_feature (3805)..(3806): n is a, c, g, or t
  misc_feature (3809)..(3810): n is a, c, g, or t
  misc_feature (3812)..(3813): n is a, c, g, or t
  misc_feature (3822)..(3822): n is a, c, g, or t
  misc_feature (3824)..(3825): n is a, c, g, or t
  misc_feature (3830)..(3830): n is a, c, g, or t
  misc_feature (3835)..(3836): n is a, c, g, or t
  misc_feature (3840)..(3840): n is a, c, g, or t
  misc_feature (3842)..(3843): n is a, c, g, or t
  misc_feature (3845)..(3845): n is a, c, g, or t
  misc_feature (3848)..(3848): n is a, c, g, or t
  misc_feature (3850)..(3850): n is a, c, g, or t
  misc_feature (3852)..(3852): n is a, c, g, or t
  misc_feature (3858)..(3858): n is a, c, g, or t
  misc_feature (3860)..(3860): n is a, c, g, or t
  misc_feature (3862)..(3864): n is a, c, g, or t
  misc_feature (3866)..(3867): n is a, c, g, or t
  misc_feature (3869)..(3870): n is a, c, g, or t
  misc_feature (3872)..(3878): n is a, c, g, or t
  misc_feature (3880)..(3880): n is a, c, g, or t
  misc_feature (3882)..(3886): n is a, c, g, or t
  misc_feature (3888)..(3892): n is a, c, g, or t
  misc_feature (3894)..(3900): n is a, c, g, or t
  misc_feature (3903)..(3906): n is a, c, g, or t
  misc_feature (3908)..(3908): n is a, c, g, or t
  misc_feature (3912)..(3917): n is a, c, g, or t
  misc_feature (3920)..(3920): n is a, c, g, or t
  misc_feature (3922)..(3922): n is a, c, g, or t
  misc_feature (3924)..(3924): n is a, c, g, or t
  misc_feature (3926)..(3929): n is a, c, g, or t
  misc_feature (3931)..(3933): n is a, c, g, or t
  misc_feature (3935)..(3938): n is a, c, g, or t
  misc_feature (3940)..(3947): n is a, c, g, or t
  misc_feature (3950)..(3951): n is a, c, g, or t
  misc_feature (3953)..(3955): n is a, c, g, or t
  misc_feature (3957)..(3959): n is a, c, g, or t
  misc_feature (3961)..(3961): n is a, c, g, or t
  misc_feature (3963)..(3964): n is a, c, g, or t
  misc_feature (3968)..(3971): n is a, c, g, or t
  misc_feature (3973)..(3979): n is a, c, g, or t
  misc_feature (3981)..(3984): n is a, c, g, or t
  misc_feature (3986)..(3987): n is a, c, g, or t
  misc_feature (3990)..(3993): n is a, c, g, or t
  misc_feature (3995)..(4000): n is a, c, g, or t
nnnnnnnnnnnnnnnnnnnnnnnnnnnnnnnnnnnnnnnnnnnnnnnnnnnnnnnnnnnnnnnnnnnnnnnnnnnnnnnnnnnnnnnnnnnnnnnnnnnnnnnnnnnnnnnnnnnnnnnnnnnnnnnnnnnnnnnnnnnnnnnnnnnnnnnnnnnnnnnnnnnnnnnnnnnnnnnnnnnnnnnnnnnnnnnnnnnnnnnnnnnnnnnnnnnnnnnnnnnnnnnnnnnnnnnnnnnnnnnnnnnnnnnnnnnnnnnnnnnnnnnnnnnnnnnnnnnnnnnnnnnnnnnnnnnnnnnnnncgagatctcggctgagacatagacagagtacttggaaaacgcccccattgtggagacnccgagaccatctgctgcgtcggtcgacccttcccgcgtgatcgtgtgatcgtgacgagggngcgtacatcgcgttcggaggggtttgaatacgacaacgacgacggtgtgtgcgtgcgcgtgggcgcgcgcgcgtctcacgcagtttgacggatatacaccggtattcaccggaatacactacgggtacgatacccgtatgataccgacggaagacacgacggaccctcttcgccccctaacnaccctcggaacgcggcggtttgagttttttctcatctctctcatataacatggaagaaatcgcggggtcaaacgcacaccgcgagcggaaaacaccccgcggatcccccgtaccgatgccggaccgggttcgcgcgtgcttcgatacgcacgcgaggtgcgtataatacttagggtttagggatccagcgcgcgacgcgcgcgcactgggacgtccgagagcgcgagagcgcgatgggagtccgtccgtcctctgttcagtcgttcatcgcgtgaaatccatcgttatacgtgaaacgcgcgaacgtccagcgcgaacgttcgaacgtcgtcgtccagcgtgacgttctaacgccgaacgcgcgggttcgcgtcggcgttcgcgtcggcgcgtcgggcgttacgggcggcgacggttngacgacgnttcgacgacgacgttcgagcgttcgcgacgttcgcgaccgtcgtcgtcgcgatcgaacgaacgaacgatggatcgatcgatggacagaatgttggcactcgcgctcgcgtttaaactcaacggatggagcgatgcgtcgaacggtgcgagggaccggacgcggtgagtgtctgggtgtgattttgttacaagtgagagctatcgcgcggcttccgcggcttccgcgtcgaacggcggacgcgaacgacggataatcagagcccgacgcgatcggtgtcgcccatcagcggcgtcgggtcccgcccgagaatctccccggtcgcgcccttccagtcggcgacgcccaaagagtacccccaatcgctctgcgtctcgatctccacgtccccgatcgggcgcgccatgcacaacaaaaccatcccttgctcgatctcgtcttcgctgagcgtgaactcgagatcggtgatgtcgctctggtcgatcgcgcccttggcgcagcgggcgacgcacgccccgcagatgcccccgcggcaggtgaacgggatctcgatcccggcggcgagtccggcgtcgaggatgtactggttcgacccgcactcgacgtcgacgcgggaatcgccggcgccgagaaaggtgacggtgaccttatcgccgacgtcgtcgtcggacgtggcgatctttcgcttggacaagtcgatggcgtctcgggcaaacttatctccattgtctcgaccgaagagcgccgtcgtcttcgcggcgctcttcgcgcgagacgcgcgcgaggaggaggacggacgaagacgacggagcgcgtcggtggccgggcgggcgagcgcgctcgggtcgagacgcgcgcgcatcgtcgcgaggaggcgcgtcgcgaggtgccgccgggagtcggtgtcgccgacacgcgacgagtccctcgttggtttcccgcctgagtcatcaaaaaagatgtacatggatgtacgagagacgtcaatatgtnccgtatgtccgataccattatttatacgacgcgctatccagattcaatgtcgcgacgcgcggcgcgtcatacgacgccgcgacgaacgaagatgacgacgacgacgtcgtcatccgtggtcaccgcgctcgccnnncgatgggaatccgtcgtggantcggcgagcgccgcgatcggtgccccgagaggttcaaccatgttcctcctcggactcgccttagggcctctgatcggcgttggatttcccgcgatcgatttcgcgctggaacgcgtcgtcggcgcgtccaaacgaaccaaggctttcgtgaagagcgcgtacggtttggtgttcggggtgttgctgtcgttggcgagttttggacgggcgacgatcgtgtgcgcgcactttggggcgtgctcgtacgcgacgatggttttcgcgcgcagacggtgcggcgggttggtgttcgtcggatcgttcgcgtatctcatttggtatcacatgaaggcggacacggcgaacacgtggaaacgcggagaggtggatattagcggattactcatggtgttggtgctcaaggtgacggcgtgcgcggtcaactatcaagacgcggcgacgacgccggcgaacgagatgagcgaatttcaaaatcggagacatctcaagacgctgccaaacgtgctagattacgcgagttggttgatgtttccgtgtaccttagtcagcggtccggcggtggagttccgagactactctgattggttgcacgacagaggagtgtggggaggcgacaagagaccgagcgcgtttgttccggcgatgaaaaaattcctcggcagcgtcgtttgcctcgcgttgcacaagggagtgacggcgtattacaccatagaaaacacatatctctcatggaagtggtctcagtactcattcttcgagaaggtttggcaccagtacatgtacggacaaggaaaccgattcaagtactactttgtttggatgtttgccgatttcgcagctacggtgtcgggtcttggctttagcggttacgacgccaagggcaacggccggtgggagacgacttgcaacatccatccaatcggatgcgaaaccgccatcacgatgaacacgattccgattcattggaacgtgcaaaccggcatgtggttgcgccactacgtctacgatcgcgtgacgccaaaggggaagaagcccggattgctccagcttctcatcacgcaaaccgtctccggcgtctggcacggcctctacgctggctactggctattcttcgtttccaccgcgttcgccgtgaacgccgcccgtttgatttaccgctggcaacagggccgcgtgccgaaaaagtaccatcgtctcgtcgaaatcccgcattggttcttcacccagtttggcctcaactacctctgctccgccttcatcctcgtcgatctccgtcagtgtatcaacgattgggcatccgtccactactggggtcacgtcgtcatcgccatcatgctcgtattcggtaccgttttcgcccctccgagcaaatccaaatccaaagccgcgtaggaaggaaaagacgcgagcgaacgcgccgacgcgagcgaacgcgcgtcgacattagaccatgaaatcaacaattttacattcacttcacgcgcgcacaatccaatccacccgtcgtctttccacgcatccattcgttcgtttacatttgacttttgactttgacnnngacgnnnnnnnnnaaannnnccncccccnncnggnngngnncgnnnngnncgcnnnncnnccncgcccgcgcgnncgnncnnaccgacgancnntccgncgcgnncgangnnangcncncncctcgntngnnngnnanncnnnnnnngncnnnnncnnnnncnnnnnnntcnnnncncgcnnnnnncgnangnannnnannnannnncnnnnnnnngtnngnnngnnngngnncgannnngnnnnnnnannnngnncgnnnnannnnnn

SEQ ID NO: 1277 - DNA, 4000 bp, Escherichia coli
  misc_feature (479)..(479): n is a, c, g, or t
  misc_feature (561)..(561): n is a, c, g, or t
  misc_feature (578)..(578): n is a, c, g, or t
  misc_feature (3632)..(3632): n is a, c, g, or t
ccaccatttggaccgccaaattcaatatacttttcacgtcggaagcttacgcaaccgttccctccctttccggagctgataaaaagttttgcttggtcaagaaatttcataacctatctcataattaataaatttataaaaaataaatagaactatgaactggttaaattaaagtttaattagttttttcagcaatagggtcaacagaaataactggaccacctgttcttagttttttaaaactaactgtaccctcgattagagaaaaaattgtatgatctcttccaagtcctacatttttcccgggttgccacttagttcctcgttgacgaacaattatatttccaggaataacactttcaccaccaaattttttaacgcccaaccttcttccggctgaatctcttccattcctagatgaaccacctgcttttttatgcgccattttttactcctcagtcttctttttcttaactganctagttttagtatcagtctttactgttttctttgctgtagttttctttgctgtagctgttttctttacaggagctttttccntttcaggagctgcatcngtttttactgccgctgcttttttagtttctttttctttaatatctacaatttttaacattgttaagtgttgttgatgaccattttttcttctgtagttatgtcttctttttttcttaaagacgataattttctcagctcgagtttgttcaactacttcagcattaacaacagcacctttgataactggatcaccaacaattgggtcacctttaccaccaatcataagtacttcatttaggttaactttatcacccgcttcaccgattagtttttcaactgaaataacgtcatcttttgaaactttatattgctttccgccactacgaattactgcgtacattataaatatccattaatatgatggggaattaaaatttcccctaggggcgcaaatataacgttgagtgagtaggtgtcaagcatattataggtaaaatatagtttatcttgctttatttaaaaccatcattctttgtattactagaatgggtaaaaatgacaataaaaacataactaaatatatctcattaactgatatgtttaaatagtctaaaagacccgctagccactctccaataatacgagagaagtgcctaatactcattaaaaatgcaaattgtgttgcggctataactttaaatgaaagactcatacagagtgataaactggcagacatcacaaatgaacccattatggataataaaattaaaattgatgagcctatgtatagattagaaatatggttgtttaaaataaatactgagatcatcgttagagcaatgaaaagctgagacatcgtaataattttatagggattaaatttatctgataaataacctcccgctatagctgagaaaactcctatatagagcccaatagagcgaatttttgttaagagttcatgatcccaaccagcgagatttgtgtatagattagatatgcttacatagtgcattccaaaagaaatattagacactaagcagaataatattaacattaaaattactggtgtaattgaggtttgatataaatcttttagtattttttttaaatttattatctgtttctttttatttggtcttgaaaaagaaagaattttatctttaatactttctttctggaaaattataaaaaatgaacttcctaatagtgcaataccaaaaaatatgaaagtttggtttaatccataatttcttattaaaatagaacttactagagcagaaatgctcacaccaaacgttcttgcgccccacataaggccattacttatacctctctcatttttatcaagtatatcaatagcaaggccatcagttgccacatcaagaattgatgtgctgagtattataaaagataataatattccgattagtaatggagacatttgtattgaaatgaattgagacaatacaaggaaaataaggcctaatagggttaacgaactcaatatccagggttttctttttcccattttggatgattgatatgtgtcaacgaacggcccaatgataaacttaagtgtccatggcaaggaggctactgaggttattatagcaatatcgctaatagaaaagtcttttgacgctaaccaatctagtaaagaaaaataaatcaggccctgaggtataccctgaataaagtataaaaaagaaagtccaacacgtctatttagacggctgttagaaagaaccaaagatctactccattgatgtttcttgttttttaactgcatcagaaacttctcggtcaattcctaatgcaaaatctgagacatacgggtttgttaatctttcgttaccaaaagtagacattgggccgtggccaggtataaatcttatctcatcacctagaggccataattcattaactattgaattaactaattgctcatggtttcctctcggtagatctgatcttcctatcgacccttggaataatacatcaccaacagcagctatctttgcttctttatgaaaaaatattacatgcccaggagtatgaccaggacagtgacgaacaccaaatatttgatttcctattgtcacttcatcgccaccctcaaggaatctagatgtctcaaaagactcagcaggagaaaaattatatttctttccttgctcctcaaggctttcaattaaaaacatatcatccttatgcggaccttctattggaatattaagttggcgggcaagttcagcagttgcaccagcgtgatctaagtgtgcatgcgtaataagaattttctcaatttttacatcatacttctttattgcggtaattatttgatcgatatcaccgcccgggtcaattacagcaccttttttagtttctgtgcaccataagatagaacagttctgttggaacggagtaaccggtataacaaaggcatgtacagcaagttctttttcttcagtcatgattctattgtatatccttagaggcttatttagccaatcacttcttttaaaaagtcttgcattgctttccatgagcgtctatctgcatctggattatatgccattcccatttccggggaatttgcttctttgttagtaaatgcatgagaagttgatccataggcatgaatttgccaatcagccttagattctgtcaactcatttgcgagaccattaacatcttcgtgtggtaccattggatcatcattaccatgcaaaacaagaacttttgtattgatggtgttaccttcggtatttcctggcttattaaaaataccatgaaaagagactacaccagctatatctgaacctatcctcgcaacatcaagaacacaaagaccgccaaagcaaaagcctatacttgcaatttttgaattgttcacaccagtttctgatcttactgcatcaattgcagataacattcttttttgaagttttggtcgatcagaaagaacatcattcattaattcaatattttcttctggcgagcttccagtttttccttctccatacatatctacagcaaatccggaataccctaagtcattcatcgattttgctttatcgagtgtaaattgatctctacccgcgtaagtnggaacaactaaaacaacaggggcattcttattaccctcataaggaaagaaaataccttctaggcgagtatcatcatcaaaataatcaacaacttttcccatttgtaactcctaattattctggcatatttcctgatacgactgacatagcattatcaactcgtatttgagctccgttaacaaatttagattcatctgaagcaagatatagtgcagcatttgcaatatctaaaggttcgccaactttattgctctctactggagcttcttgaacaacaggtgaggctccaaatttttcttccattaatgctggaacgcttgcaaccattggggttgctattcctgatggatgaatcgtattacatctca

SEQ ID NO: 1278 - DNA, 4000 bp, Escherichia coli
tcagtgagcaaacgccgcgcgacgtatgggaaagcggagtccaagaggttgaagtctggatcgagcgtgagacaaatgttctcttgcgtcagaagagatctgatcacgagcgaaaatctctccggaactcgaatcggatagtcgtacaggagtttgttgaactcacgggtgagtccccggaacgaaaacttttccgtgctcgccagagattgaagggcttcgtctccccacacatcggccaaaccttcggccaccggtccgatgtcagcaccgggttgcaaaaagccgaggtcttcgagagtctccgccaacgcttcgtagtctctgttcatggtatgcaccaccgcatcgataagactctcttggttggatcgagaaatctcggcgacgttcccaaagtcgacgtacgcaatgtcgccgtttggcagagccaacacgttgcccgggtgcggatcgccgtggaagagcccgaattcgagcagttgcttcaaaccagcttcgacaccgttcaccataaagcgtgcgcgagctgcatcgtcatcgaacgcatcctcgcgagtgcaccgcacgccctgctgccaatgcatcacgagaacgcgcggcccactcaattcgctcaccacgggcggaatctgcacgttgacgtcgttgcgaaaattgaagccaaaatcgcgaaggttacgcgcttcttgcacgaaatccaactcctcgagcaatttctccgcgaactcatccaccaagagagacgccgagcacccgagattggctcgagcgtaaccgtcaaaaaattgcagagcggccgcgcgcagcaaaaacaaatccatgacgcatcgcgcgcgcgtattcggtcgcaaaaccttgatcgcgacgtcggtaccatccttcttgagcttgcctcggtacacttgaccgatcgatgccgcagcgatcggctcttcagagatttcactaaacgtatcctcgatgacgcgtcccgtttcctcctctataattttgtacgccaactttgagttgaacggcggtacgcgatcctgaagcttggtcaactcctccatcaagtcctcattcaccaaatccggcctgttggccaagttttgcccgagcttcacgaagagcggaccgagctcgatgagcgtctctttgactgcttctccccaacgcgttccgccgtcctccgcatccaacttttgcaatcgatcctgcttattcctcagctttccgagtaccaaagcaagctctgccgatcgtttcgccaactccaacggcctgctcagcgcctcattgcgaatctcctcgggattatacctcgtcaccattcgacaaaagtctctgtccgcctccaacttcgccttatccttctccttgagcgtcgccttcttcaccgccttgggcttggacgtcactttttgcgtccccgcttccaacgcaacaccccccgcgccttctcgcgtctcatccgggttcgccaccgcctctccccgcgtcgtcgacgctcgacttcctcgctcggccgacgcaaccctcgacttcgcgaatcccaaaggcgtcgcattccttccttcaccgaaacccgtccccatccgccggttccctcccaaacgagccctcaacgcatcgcgcgcgatgcgttccccgcgtaccccctttgaacccgtcgccacccgtcgcgtgggaccgggtgtcgagttcggcgcgctcgcgataccgatccgcattgtatgcgtcagcggcaactaccccgaacgagtcgaactgagtggagctcgcgcgcgccttcgcttctcttcacttcgcgcgcgtccgaacacgacgggcgattcgttcgatcgcgacgaccgcctacttcgtatcgacgaccacgaccgacgcgcgcgcgcgtgtgacgacgacgaagtggacgccgacgtgcgcgacgtcacgcacaaaaactacaactacgtggagcgacgatttcacccaattcctggattagcgccgcacgcgtttgtgacgagtgcatttcggttaaaagctcgcgcgtgtccgccggcgacgcgacgacgcgacgcggaaggcgtccgacccgactgacgcgtcggcgcgcgagcacgtattttaaatcgttttatttcttcaccaatgtccgcggtgtccgtgggggcacacgccggcgtcatcggacgccccgagcatcggtcgcgcacgcaccggcgcgcggcgggcgtcgtcccgcgagccgagggtggtggccccggtcccggcggcgcgcgacgcgcgaattcacccggtggtggtcgaagcggggcgagaggaatggggcgaggcggtggacgcgggcgtggacgcgggcgtggacgcgggcgcgggcgtggacgcggcggggttcgtaaacagagcgacgggaagcagcaccttgggcaaacgctcgagtacgtcgcggaaaaggcgttcccggcggtggatgatctcgtcgacgacccgccgttgaaaattcttccgttgggtgggttgggagagattgggatgaactgcatgctgattggacacggggatcgatacattttgttggacgcggggttgatgtttccagagtgcgttttgagttttgtcgtgttttcgtacggcgttttacgtttcgctttttttcgtttaccgagactgacgatcgttgttgaaaaaattgtagtcacgaggaattgggtattcaaaaggttttaccggacgtgtcgttcttggcgcgttggcgcgataagattgaagccgtgctcataacgcacggacacgaggaccacattggagcgttgccgtgggtggtgccggcgctcgatccgtcgacacccatttacgcgggtttgtttacgatgcaactcattagacggagaatgatggagttttctctctggaacgacgagcggttcaaggtttttgagatgaatgagcgctttcaagcgggtccatttgacatggaggcggtgcgcgtgacgcactccattccggattgttgcggtttaattttccgttgcgacgcgggtaccatcgtgcacactggcgattggaagattgacgaaaacccggtagatgggcgcgttttcgatcgcgaatcgtgggaacgcgtcggaaacgagggtgtgacgctcatgatgagcgacagcacaaacgtgctctctccggggagaacagtgagcgaatccgccgtgagcgaaggcatcatgcgtcgagtgttgggacaccgcgggcgtatcatcaccacgcagtttgcgtccaacattcaccgtctgtacggtgtccgagatgctgcagaagcgacgggtcgccagattgcgtttttgggtttgtcgttgacgacgtaccttgaagcggcgaaaaaggcgggcatcgctcccatcgaccctgagaagctcattccggctgatgaaatcgacaactgcgatccaagcaagcttctcatcgtcaccactggatcacaaggggaggatcgcgcgcagctcgcgcaggcggctttcggtagctcgcgtttgttgacgcttcaacccgaggatctcttgttgtactcggccaagatgattccgggtaacgaaaagagagtcatgcgcatgatgaacgagattgccaagagaggaccagaaatcgcaatgagccgcgaggattgtttgcactcatcaggtcatggatacaaggatgagctggacgaagtgatcaaactcgtcaagccggagcattttttgcctgtgcacggggagtacgcgtttttgcgagcgcacgaacagctcgcgagacaatctggggtcatgcacacgactgtgatagggaacggggaaatgcttggagtcacgcctctggcgtctaagcgtcaacacggaacgatgggcaacttccaccgcatcggcaaggcgcgtttacagacgatgttcaacgacggggggttcggaagcggcacggcggaggatctcgccatcgaagagcgcatgagaatcgctgtcgaaggcatcatcgtgtgcgattacgaaatcgcaaacaacgg

SEQ ID NO: 1279 - DNA, 4000 bp, Escherichia coli
  misc_feature (1)..(4): n is a, c, g, or t
  misc_feature (7)..(16): n is a, c, g, or t
  misc_feature (18)..(27): n is a, c, g, or t
  misc_feature (29)..(78): n is a, c, g, or t
  misc_feature (80)..(97): n is a, c, g, or t
  misc_feature (99)..(124): n is a, c, g, or t
  misc_feature (126)..(158): n is a, c, g, or t
  misc_feature (160)..(178): n is a, c, g, or t
  misc_feature (180)..(197): n is a, c, g, or t
  misc_feature (199)..(227): n is a, c, g, or t
  misc_feature (229)..(229): n is a, c, g, or t
  misc_feature (231)..(255): n is a, c, g, or t
  misc_feature (257)..(280): n is a, c, g, or t
  misc_feature (282)..(301): n is a, c, g, or t
  misc_feature (303)..(310): n is a, c, g, or t
  misc_feature (312)..(381): n is a, c, g, or t
  misc_feature (383)..(436): n is a, c, g, or t
  misc_feature (438)..(439): n is a, c, g, or t
  misc_feature (441)..(443): n is a, c, g, or t
  misc_feature (446)..(454): n is a, c, g, or t
  misc_feature (456)..(470): n is a, c, g, or t
  misc_feature (472)..(479): n is a, c, g, or t
  misc_feature (481)..(481): n is a, c, g, or t
  misc_feature (483)..(483): n is a, c, g, or t
  misc_feature (486)..(496): n is a, c, g, or t
  misc_feature (498)..(544): n is a, c, g, or t
  misc_feature (546)..(575): n is a, c, g, or t
  misc_feature (577)..(591): n is a, c, g, or t
  misc_feature (594)..(594): n is a, c, g, or t
  misc_feature (596)..(609): n is a, c, g, or t
  misc_feature (611)..(613): n is a, c, g, or t
  misc_feature (615)..(625): n is a, c, g, or t
  misc_feature (627)..(627): n is a, c, g, or t
  misc_feature (629)..(637): n is a, c, g, or t
  misc_feature (639)..(646): n is a, c, g, or t
  misc_feature (648)..(688): n is a, c, g, or t
  misc_feature (690)..(699): n is a, c, g, or t
  misc_feature (701)..(753): n is a, c, g, or t
  misc_feature (755)..(779): n is a, c, g, or t
  misc_feature (781)..(795): n is a, c, g, or t
  misc_feature (797)..(807): n is a, c, g, or t
  misc_feature (809)..(818): n is a, c, g, or t
  misc_feature (820)..(824): n is a, c, g, or t
  misc_feature (826)..(858): n is a, c, g, or t
  misc_feature (860)..(869): n is a, c, g, or t
  misc_feature (871)..(880): n is a, c, g, or t
  misc_feature (882)..(892): n is a, c, g, or t
  misc_feature (894)..(911): n is a, c, g, or t
  misc_feature (913)..(921): n is a, c, g, or t
  misc_feature (923)..(929): n is a, c, g, or t
  misc_feature (931)..(946): n is a, c, g, or t
  misc_feature (948)..(949): n is a, c, g, or t
  misc_feature (951)..(955): n is a, c, g, or t
  misc_feature (957)..(975): n is a, c, g, or t
  misc_feature (977)..(979): n is a, c, g, or t
  misc_feature (981)..(981): n is a, c, g, or t
  misc_feature (983)..(986): n is a, c, g, or t
  misc_feature (988)..(999): n is a, c, g, or t
  misc_feature (1001)..(1014): n is a, c, g, or t
  misc_feature (1016)..(1035): n is a, c, g, or t
  misc_feature (1037)..(1037): n is a, c, g, or t
  misc_feature (1039)..(1040): n is a, c, g, or t
  misc_feature (1042)..(1051): n is a, c, g, or t
  misc_feature (1054)..(1092): n is a, c, g, or t
  misc_feature (1094)..(1103): n is a, c, g, or t
  misc_feature (1105)..(1111): n is a, c, g, or t
  misc_feature (1113)..(1116): n is a, c, g, or t
  misc_feature (1118)..(1120): n is a, c, g, or t
  misc_feature (1122)..(1128): n is a, c, g, or t
  misc_feature (1130)..(1139): n is a, c, g, or t
  misc_feature (1141)..(1141): n is a, c, g, or t
  misc_feature (1144)..(1166): n is a, c, g, or t
  misc_feature (1168)..(1184): n is a, c, g, or t
  misc_feature (1186)..(1193): n is a, c, g, or t
  misc_feature (1195)..(1195): n is a, c, g, or t
  misc_feature (1197)..(1205): n is a, c, g, or t
  misc_feature (1207)..(1207): n is a, c, g, or t
  misc_feature (1209)..(1209): n is a, c, g, or t
  misc_feature (1211)..(1219): n is a, c, g, or t
  misc_feature (1221)..(1238): n is a, c, g, or t
  misc_feature (1240)..(1252): n is a, c, g, or t
  misc_feature (1254)..(1257): n is a, c, g, or t
  misc_feature (1259)..(1291): n is a, c, g, or t
  misc_feature (1293)..(1298): n is a, c, g, or t
  misc_feature (1302)..(1303): n is a, c, g, or t
  misc_feature (1306)..(1315): n is a, c, g, or t
  misc_feature (1317)..(1317): n is a, c, g, or t
  misc_feature (1320)..(1325): n is a, c, g, or t
  misc_feature (1327)..(1327): n is a, c, g, or t
  misc_feature (1329)..(1329): n is a, c, g, or t
  misc_feature (1332)..(1332): n is a, c, g, or t
  misc_feature (1334)..(1334): n is a, c, g, or t
  misc_feature (1336)..(1336): n is a, c, g, or t
  misc_feature (1338)..(1354): n is a, c, g, or t
  misc_feature (1356)..(1366): n is a, c, g, or t
  misc_feature (1368)..(1368): n is a, c, g, or t
  misc_feature (1370)..(1372): n is a, c, g, or t
  misc_feature (1374)..(1375): n is a, c, g, or t
  misc_feature (1377)..(1381): n is a, c, g, or t
  misc_feature (1383)..(1387): n is a, c, g, or t
  misc_feature (1389)..(1395): n is a, c, g, or t
  misc_feature (1397)..(1400): n is a, c, g, or t
  misc_feature (1402)..(1404): n is a, c, g, or t
  misc_feature (1406)..(1407): n is a, c, g, or t
  misc_feature (1410)..(1410): n is a, c, g, or t
  misc_feature (1413)..(1422): n is a, c, g, or t
  misc_feature (1424)..(1429): n is a, c, g, or t
  misc_feature (1431)..(1435): n is a, c, g, or t
  misc_feature (1437)..(1443): n is a, c, g, or t
  misc_feature (1446)..(1448): n is a, c, g, or t
  misc_feature (1452)..(1456): n is a, c, g, or t
  misc_feature (1458)..(1461): n is a, c, g, or t
  misc_feature (1463)..(1470): n is a, c, g, or t
  misc_feature (1473)..(1476): n is a, c, g, or t
  misc_feature (1478)..(1482): n is a, c, g, or t
  misc_feature (1484)..(1486): n is a, c, g, or t
  misc_feature (1490)..(1491): n is a, c, g, or t
  misc_feature (1493)..(1493): n is a, c, g, or t
  misc_feature (1496)..(1498): n is a, c, g, or t
  misc_feature (1503)..(1506): n is a, c, g, or t
  misc_feature (1508)..(1512): n is a, c, g, or t
  misc_feature (1514)..(1515): n is a, c, g, or t
  misc_feature (1520)..(1521): n is a, c, g, or t
  misc_feature (1523)..(1526): n is a, c, g, or t
  misc_feature (1528)..(1528): n is a, c, g, or t
  misc_feature (1532)..(1532): n is a, c, g, or t
  misc_feature (1535)..(1536): n is a, c, g, or t
  misc_feature (1540)..(1545): n is a, c, g, or t
  misc_feature (1550)..(1550): n is a, c, g, or t
  misc_feature (1552)..(1552): n is a, c, g, or t
  misc_feature (1554)..(1557): n is a, c, g, or t
  misc_feature (1559)..(1559): n is a, c, g, or t
  misc_feature (1562)..(1563): n is a, c, g, or t
  misc_feature (1565)..(1567): n is a, c, g, or t
  misc_feature (1569)..(1569): n is a, c, g, or t
  misc_feature (1576)..(1579): n is a, c, g, or t
  misc_feature (1581)..(1581): n is a, c, g, or t
  misc_feature (1584)..(1586): n is a, c, g, or t
  misc_feature (1588)..(1591): n is a, c, g, or t
  misc_feature (1595)..(1597): n is a, c, g, or t
  misc_feature (1599)..(1599): n is a, c, g, or t
  misc_feature (1602)..(1602): n is a, c, g, or t
  misc_feature (1604)..(1605): n is a, c, g, or t
  misc_feature (1607)..(1607): n is a, c, g, or t
  misc_feature (1611)..(1614): n is a, c, g, or t
  misc_feature (1616)..(1618): n is a, c, g, or t
  misc_feature (1620)..(1621): n is a, c, g, or t
  misc_feature (1623)..(1624): n is a, c, g, or t
  misc_feature (1626)..(1626): n is a, c, g, or t
  misc_feature (1629)..(1629): n is a, c, g, or t
  misc_feature (1632)..(1635): n is a, c, g, or t
  misc_feature (1637)..(1639): n is a, c, g, or t
  misc_feature (1641)..(1643): n is a, c, g, or t
  misc_feature (1646)..(1651): n is a, c, g, or t
  misc_feature (1653)..(1654): n is a, c, g, or t
  misc_feature (1659)..(1659): n is a, c, g, or t
  misc_feature (1661)..(1661): n is a, c, g, or t
  misc_feature (1665)..(1665): n is a, c, g, or t
  misc_feature (1667)..(1670): n is a, c, g, or t
  misc_feature (1674)..(1675): n is a, c, g, or t
  misc_feature (1677)..(1677): n is a, c, g, or t
  misc_feature (1680)..(1680): n is a, c, g, or t
  misc_feature (1682)..(1682): n is a, c, g, or t
  misc_feature (1685)..(1686): n is a, c, g, or t
  misc_feature (1692)..(1693): n is a, c, g, or t
  misc_feature (1695)..(1698): n is a, c, g, or t
  misc_feature (1700)..(1700): n is a, c, g, or t
  misc_feature (1705)..(1705): n is a, c, g, or t
  misc_feature (1710)..(1710): n is a, c, g, or t
  misc_feature (1713)..(1713): n is a, c, g, or t
  misc_feature (1775)..(1775): n is a, c, g, or t
  misc_feature (2855)..(2855): n is a, c, g, or t
  misc_feature (2857)..(2858): n is a, c, g, or t
  misc_feature (2867)..(2867): n is a, c, g, or t
  misc_feature (2870)..(2870): n is a, c, g, or t
  misc_feature (2872)..(2873): n is a, c, g, or t
  misc_feature (2877)..(2878): n is a, c, g, or t
  misc_feature (2880)..(2880): n is a, c, g, or t
  misc_feature (2885)..(2886): n is a, c, g, or t
  misc_feature (2888)..(2888): n is a, c, g, or t
  misc_feature (2890)..(2893): n is a, c, g, or t
  misc_feature (2895)..(2896): n is a, c, g, or t
  misc_feature (2898)..(2903): n is a, c, g, or t
  misc_feature (2906)..(2910): n is a, c, g, or t
  misc_feature (2912)..(2917): n is a, c, g, or t
  misc_feature (2920)..(2920): n is a, c, g, or t
  misc_feature (2922)..(2923): n is a, c, g, or t
  misc_feature (2925)..(2931): n is a, c, g, or t
  misc_feature (2939)..(2949): n is a, c, g, or t
  misc_feature (2953)..(2953): n is a, c, g, or t
  misc_feature (2955)..(2955): n is a, c, g, or t
  misc_feature (2958)..(2962): n is a, c, g, or t
  misc_feature (2964)..(2964): n is a, c, g, or t
  misc_feature (2967)..(2967): n is a, c, g, or t
  misc_feature (2969)..(2971): n is a, c, g, or t
  misc_feature (2973)..(2974): n is a, c, g, or t
  misc_feature (2977)..(2977): n is a, c, g, or t
  misc_feature (2981)..(2981): n is a, c, g, or t
  misc_feature (2983)..(2986): n is a, c, g, or t
  misc_feature (2988)..(2990): n is a, c, g, or t
  misc_feature (2992)..(2993): n is a, c, g, or t
  misc_feature (2995)..(2998): n is a, c, g, or t
  misc_feature (3000)..(3001): n is a, c, g, or t
  misc_feature (3003)..(3005): n is a, c, g, or t
  misc_feature (3007)..(3014): n is a, c, g, or t
  misc_feature (3016)..(3016): n is a, c, g, or t
  misc_feature (3019)..(3019): n is a, c, g, or t
  misc_feature (3021)..(3022): n is a, c, g, or t
  misc_feature (3024)..(3033): n is a, c, g, or t
  misc_feature (3035)..(3037): n is a, c, g, or t
  misc_feature (3039)..(3040): n is a, c, g, or t
  misc_feature (3042)..(3046): n is a, c, g, or t
  misc_feature (3048)..(3049): n is a, c, g, or t
  misc_feature (3051)..(3053): n is a, c, g, or t
  misc_feature (3055)..(3055): n is a, c, g, or t
  misc_feature (3058)..(3071): n is a, c, g, or t
  misc_feature (3073)..(3078): n is a, c, g, or t
  misc_feature (3080)..(3081): n is a, c, g, or t
  misc_feature (3085)..(3086): n is a, c, g, or t
  misc_feature (3088)..(3089): n is a, c, g, or t
  misc_feature (3093)..(3097): n is a, c, g, or t
  misc_feature (3099)..(3099): n is a, c, g, or t
  misc_feature (3101)..(3101): n is a, c, g, or t
  misc_feature (3103)..(3104): n is a, c, g, or t
  misc_feature (3106)..(3107): n is a, c, g, or t
  misc_feature (3109)..(3116): n is a, c, g, or t
  misc_feature (3118)..(3119): n is a, c, g, or t
  misc_feature (3121)..(3123): n is a, c, g, or t
  misc_feature (3125)..(3125): n is a, c, g, or t
  misc_feature (3127)..(3132): n is a, c, g, or t
  misc_feature (3135)..(3136): n is a, c, g, or t
  misc_feature (3138)..(3146): n is a, c, g, or t
  misc_feature (3148)..(3150): n is a, c, g, or t
  misc_feature (3152)..(3152): n is a, c, g, or t
  misc_feature (3156)..(3157): n is a, c, g, or t
  misc_feature (3161)..(3162): n is a, c, g, or t
  misc_feature (3164)..(3167): n is a, c, g, or t
  misc_feature (3169)..(3203): n is a, c, g, or t
  misc_feature (3205)..(3206): n is a, c, g, or t
  misc_feature (3208)..(3208): n is a, c, g, or t
  misc_feature (3210)..(3213): n is a, c, g, or t
  misc_feature (3215)..(3222): n is a, c, g, or t
  misc_feature (3224)..(3234): n is a, c, g, or t
  misc_feature (3237)..(3243): n is a, c, g, or t
  misc_feature (3245)..(3247): n is a, c, g, or t
  misc_feature (3249)..(3251): n is a, c, g, or t
  misc_feature (3253)..(3253): n is a, c, g, or t
  misc_feature (3255)..(3255): n is a, c, g, or t
  misc_feature (3258)..(3263): n is a, c, g, or t
  misc_feature (3265)..(3288): n is a, c, g, or t
  misc_feature (3290)..(3292): n is a, c, g, or t
  misc_feature (3294)..(3294): n is a, c, g, or t
  misc_feature (3296)..(3300): n is a, c, g, or t
  misc_feature (3302)..(3303): n is a, c, g, or t
  misc_feature (3305)..(3313): n is a, c, g, or t
  misc_feature (3318)..(3319): n is a, c, g, or t
  misc_feature (3321)..(3325): n is a, c, g, or t
  misc_feature (3327)..(3329): n is a, c, g, or t
  misc_feature (3331)..(3337): n is a, c, g, or t
  misc_feature (3339)..(3345): n is a, c, g, or t
  misc_feature (3347)..(3354): n is a, c, g, or t
  misc_feature (3356)..(3375): n is a, c, g, or t
  misc_feature (3377)..(3380): n is a, c, g, or t
  misc_feature (3382)..(3389): n is a, c, g, or t
  misc_feature (3391)..(3402): n is a, c, g, or t
  misc_feature (3404)..(3414): n is a, c, g, or t
  misc_feature (3416)..(3417): n is a, c, g, or t
  misc_feature (3419)..(3445): n is a, c, g, or t
  misc_feature (3448)..(3460): n is a, c, g, or t
  misc_feature (3463)..(3467): n is a, c, g, or t
  misc_feature (3469)..(3470): n is a, c, g, or t
  misc_feature (3472)..(3472): n is a, c, g, or t
  misc_feature (3474)..(3475): n is a, c, g, or t
  misc_feature (3477)..(3480): n is a, c, g, or t
  misc_feature (3482)..(3484): n is a, c, g, or t
  misc_feature (3486)..(3505): n is a, c, g, or t
  misc_feature (3509)..(3519): n is a, c, g, or t
  misc_feature (3521)..(3521): n is a, c, g, or t
  misc_feature (3523)..(3533): n is a, c, g, or t
  misc_feature (3535)..(3543): n is a, c, g, or t
  misc_feature (3545)..(3545): n is a, c, g, or t
  misc_feature (3547)..(3556): n is a, c, g, or t
  misc_feature (3558)..(3568): n is a, c, g, or t
  misc_feature (3570)..(3575): n is a, c, g, or t
  misc_feature (3577)..(3585): n is a, c, g, or t
  misc_feature (3587)..(3594): n is a, c, g, or t
  misc_feature (3596)..(3613): n is a, c, g, or t
  misc_feature (3615)..(3655): n is a, c, g, or t
  misc_feature (3657)..(3680): n is a, c, g, or t
  misc_feature (3682)..(3707): n is a, c, g, or t
  misc_feature (3709)..(3709): n is a, c, g, or t
  misc_feature (3711)..(3715): n is a, c, g, or t
  misc_feature (3717)..(3720): n is a, c, g, or t
  misc_feature (3722)..(3723): n is a, c, g, or t
  misc_feature (3725)..(3736): n is a, c, g, or t
  misc_feature (3738)..(3756): n is a, c, g, or t
  misc_feature (3758)..(3762): n is a, c, g, or t
  misc_feature (3764)..(3765): n is a, c, g, or t
  misc_feature (3767)..(3769): n is a, c, g, or t
  misc_feature (3771)..(3780): n is a, c, g, or t
  misc_feature (3782)..(3789): n is a, c, g, or t
  misc_feature (3791)..(3833): n is a, c, g, or t
  misc_feature (3835)..(3852): n is a, c, g, or t
  misc_feature (3854)..(3871): n is a, c, g, or t
  misc_feature (3873)..(3873): n is a, c, g, or t
  misc_feature (3875)..(3878): n is a, c, g, or t
  misc_feature (3880)..(3892): n is a, c, g, or t
  misc_feature (3894)..(3916): n is a, c, g, or t
  misc_feature (3918)..(3919): n is a, c, g, or t
  misc_feature (3921)..(3952): n is a, c, g, or t
  misc_feature (3955)..(3958): n is a, c, g, or t
  misc_feature (3960)..(3977): n is a, c, g, or t
  misc_feature (3979)..(3999): n is a, c, g, or t
nnnnttnnnnnnnnnntnnnnnnnnnntnnnnnnnnnnnnnnnnnnnnnnnnnnnnnnnnnnnnnnnnnnnnnnnnnnannnnnnnnnnnnnnnnnnannnnnnnnnnnnnnnnnnnnnnnnnnannnnnnnnnnnnnnnnnnnnnnnnnnnnnnnnnannnnnnnnnnnnnnnnnnnannnnnnnnnnnnnnnnnntnnnnnnnnnnnnnnnnnnnnnnnnnnnnntntnnnnnnnnnnnnnnnnnnnnnnnnnannnnnnnnnnnnnnnnnnnnnnnntnnnnnnnnnnnnnnnnnnnntnnnnnnnnannnnnnnnnnnnnnnnnnnnnnnnnnnnnnnnnnnnnnnnnnnnnnnnnnnnnnnnnnnnnnnnnnnnnnannnnnnnnnnnnnnnnnnnnnnnnnnnnnnnnnnnnnnnnnnnnnnnnnnnnnntnntnnntannnnnnnnnannnnnnnnnnnnnnntnnnnnnnntntnttnnnnnnnnnnntnnnnnnnnnnnnnnnnnnnnnnnnnnnnnnnnnnnnnnnnnnnnnnntnnnnnnnnnnnnnnnnnnnnnnnnnnnnnntnnnnnnnnnnnnnnncanannnnnnnnnnnnnntnnntnnnnnnnnnnntntnnnnnnnnnannnnnnnntnnnnnnnnnnnnnnnnnnnnnnnnnnnnnnnnnnnnnnnnntnnnnnnnnnntnnnnnnnnnnnnnnnnnnnnnnnnnnnnnnnnnnnnnnnnnnnnnnnnnnnnntnnnnnnnnnnnnnnnnnnnnnnnnntnnnnnnnnnnnnnnnannnnnnnnnnnannnnnnnnnnannnnntnnnnnnnnnnnnnnnnnnnnnnnnnnnnnnnnnannnnnnnnnntnnnnnnnnnntnnnnnnnnnnntnnnnnnnnnnnnnnnnnntnnnnnnnnntnnnnnnntnnnnnnnnnnnnnnnntnnannnnntnnnnnnnnnnnnnnnnnnntnnntntnnnntnnnnnnnnnnnntnnnnnnnnnnnnnntnnnnnnnnnnnnnnnnnnnntntnntnnnnnnnnnnttnnnnnnnnnnnnnnnnnnnnnnnnnnnnnnnnnnnnnnntnnnnnnnnnntnnnnnnntnnnntnnntnnnnnnntnnnnnnnnnntnttnnnnnnnnnnnnnnnnnnnnnnnannnnnnnnnnnnnnnnntnnnnnnnnantnnnnnnnnntntntnnnnnnnnntnnnnnnnnnnnnnnnnnnannnnnnnnnnnnnannnnannnnnnnnnnnnnnnnnnnnnnnnnnnnnnnnnannnnnnaaanntannnnnnnnnnanaannnnnntntnggntntncnnnnnnnnnnnnnnnnntnnnnnnnnnnnantnnntnnannnnntnnnnnannnnnnnannnnannntnntantannnnnnnnnntnnnnnnannnnnannnnnnnttnnntttnnnnnannnntnnnnnnnnttnnnntnnnnntnnngttnncnttnnnatatnnnntnnnnntnntggtnntnnnntntttnttnntgcnnnnnntatanantnnnntnaannannntnatattcnnnntntannncnnnntttnnntnctngnntntttnnnntnnntnntnntnatncannnntnnnannnaannnnnntnnaattntnctantnnnnaaanntnttntnganntatttnntnnnntnttttngttanagngttatagttagcaaagtttttgtgatagatgcttacctatcaatattcaaaaagatgttcanctataactgtactatagtcgtacacagtacacacgaattgtgccacaaaaattttagtagagcctatctatattgtgtagagataacaataatctgatatatattctattgtagttggcagtgtaaatctatcaaaatattctttattttctccttctaaattattgaataaatctttaataatttcttctcggatatttttattttttaacagaaaaacattaccatctgcttttctgatagtgtttagaaaaaaaggtagtaaatatttcgtgtatacttcatatctatgattctttatagaaggtgaatctatctctctcttagaaaaattaataagagtatttacaacatctgtttcaataagatttctaatttttttctcacttgcttccaaaaatatatcggtcatcgtattagccttagatatctctaacttaatgttagcagagagactactcaaactgtcatcaggaaaacaaataggtccaacccaaagatttattctaaaaacctcaacgggattatttttataggcatctataataatgtaacaataatgaatatcatctaaacgttttataaaggataccatatttttatgccaaaaccttttaggtgttttaaaaccgaatgaatttattaaaagtgtgaattttttaagtattaattgagaatctaacataatataataactatttattattgttataagtagaaccacttgaatattcaataccattatcttttaatctttttaagattggttccatatctggtactccttttgggtcattaagaaagtgccaatgagggtttgcttctccagattgtttgtacttaatatccttatctatttgcttattcatatgatcaatctcgctttgagtcctctctcttttaaaattagctgatttaaactctatatctttaccatcgtattccttatcataaactctatcttttaacctttttccttttccttctccaaaaattttagtggcttcatcatcatgaaattttcgtgcgtaataccaccagcttgataaccccagcacatccacccacgcattggtatcncnnacataagcnaanannttanncncaccnnanannnnannannnnnntcnnnnntnnnnnnccncnncnnnnnnngatgatannnnnnnnnnntgtngnagnnnnntnctncnnnannatnatantnnnntnnntnntnnnnannannncnnnnnnnntnttntnnannnnnnnnnngnnngnngnnnnnanngnnntnttnnnnnnnnnnnnnnannnnnncnncttnntnntagnnnnntntngnngnncnnnnnnnntnntnnntnannnnnnagnntnnnnnnnnntnnntntttnnacannannnnannnnnnnnnnnnnnnnnnnnnnnnnnnnnnnnnnntnntnannnnannnnnnnnannnnnnnnnnntannnnnnntnnnannntntnttnnnnnntnnnnnnnnnnnnnnnnnnnnnnnnannnanannnnntnntnnnnnnnnnaaaanntnnnnntnnntnnnnnnntnnnnnnntnnnnnnnnannnnnnnnnnnnnnnnnnnnannnnannnnnnnncnnnnnnnnnnnntnnnnnnnnnnnannannnnnnnnnnnnnnnnnnnnnnnnnnnttnnnnnnnnnnnnnttnnnnntnntntnnannnntnnntnnnnnnnnnnnnnnnnnnnntcannnnnnnnnnntntnnnnnnnnnnntnnnnnnnnntntnnnnnnnnnntnnnnnnnnnnntnnnnnnannnnnnnnntnnnnnnnntnnnnnnnnnnnnnnnnnntnnnnnnnnnnnnnnnnnnnnnnnnnnnnnnnnnnnnnnnnntnnnnnnnnnnnnnnnnnnnnnnnntnnnnnnnnnnnnnnnnnnnnnnnnnntntnnnnnannnntnntnnnnnnnnnnnntnnnnnnnnnnnnnnnnnnntnnnnntnntnnnannnnnnnnnntnnnnnnnntnnnnnnnnnnnnnnnnnnnnnnnnnnnnnnnnnnnnnnnnnnntnnnnnnnnnnnnnnnnnnannnnnnnnnnnnnnnnnnancnnnntnnnnnnnnnnnnnannnnnnnnnnnnnnnnnnnnnnnannannnnnnnnnnnnnnnnnnnnnnnnnnnnnnnnctnnnnannnnnnnnnnnnnnnnnntnnnnnnnnnnnnnnnnnnnnnt

SEQ ID NO: 1280 - DNA, 4000 bp, Escherichia coli
  misc_feature (1)..(1166): n is a, c, g, or t
  misc_feature (1208)..(1211): n is a, c, g, or t
  misc_feature (1213)..(1214): n is a, c, g, or t
  misc_feature (1218)..(1230): n is a, c, g, or t
  misc_feature (1232)..(1239): n is a, c, g, or t
  misc_feature (1241)..(1248): n is a, c, g, or t
  misc_feature (1250)..(1258): n is a, c, g, or t
  misc_feature (1260)..(1261): n is a, c, g, or t
  misc_feature (1263)..(1265): n is a, c, g, or t
  misc_feature (1268)..(1269): n is a, c, g, or t
  misc_feature (1286)..(1286): n is a, c, g, or t
  misc_feature (1561)..(1561): n is a, c, g, or t
  misc_feature (1725)..(1725): n is a, c, g, or t
  misc_feature (1983)..(1983): n is a, c, g, or t
  misc_feature (1990)..(1990): n is a, c, g, or t
  misc_feature (2155)..(2155): n is a, c, g, or t
  misc_feature (2278)..(2278): n is a, c, g, or t
  misc_feature (2326)..(2326): n is a, c, g, or t
  misc_feature (2329)..(2329): n is a, c, g, or t
  misc_feature (2350)..(2350): n is a, c, g, or t
  misc_feature (2428)..(2428): n is a, c, g, or t
  misc_feature (2857)..(2857): n is a, c, g, or t
  misc_feature (3878)..(3878): n is a, c, g, or t
  misc_feature (3966)..(3966): n is a, c, g, or t
nnnnnnnnnnnnnnnnnnnnnnnnnnnnnnnnnnnnnnnnnnnnnnnnnnnnnnnnnnnnnnnnnnnnnnnnnnnnnnnnnnnnnnnnnnnnnnnnnnnnnnnnnnnnnnnnnnnnnnnnnnnnnnnnnnnnnnnnnnnnnnnnnnnnnnnnnnnnnnnnnnnnnnnnnnnnnnnnnnnnnnnnnnnnnnnnnnnnnnnnnnnnnnnnnnnnnnnnnnnnnnnnnnnnnnnnnnnnnnnnnnnnnnnnnnnnnnnnnnnnnnnnnnnnnnnnnnnnnnnnnnnnnnnnnnnnnnnnnnnnnnnnnnnnnnnnnnnnnnnnnnnnnnnnnnnnnnnnnnnnnnnnnnnnnnnnnnnnnnnnnnnnnnnnnnnnnnnnnnnnnnnnnnnnnnnnnnnnnnnnnnnnnnnnnnnnnnnnnnnnnnnnnnnnnnnnnnnnnnnnnnnnnnnnnnnnnnnnnnnnnnnnnnnnnnnnnnnnnnnnnnnnnnnnnnnnnnnnnnnnnnnnnnnnnnnnnnnnnnnnnnnnnnnnnnnnnnnnnnnnnnnnnnnnnnnnnnnnnnnnnnnnnnnnnnnnnnnnnnnnnnnnnnnnnnnnnnnnnnnnnnnnnnnnnnnnnnnnnnnnnnnnnnnnnnnnnnnnnnnnnnnnnnnnnnnnnnnnnnnnnnnnnnnnnnnnnnnnnnnnnnnnnnnnnnnnnnnnnnnnnnnnnnnnnnnnnnnnnnnnnnnnnnnnnnnnnnnnnnnnnnnnnnnnnnnnnnnnnnnnnnnnnnnnnnnnnnnnnnnnnnnnnnnnnnnnnnnnnnnnnnnnnnnnnnnnnnnnnnnnnnnnnnnnnnnnnnnnnnnnnnnnnnnnnnnnnnnnnnnnnnnnnnnnnnnnnnnnnnnnnnnnnnnnnnnnnnnnnnnnnnnnnnnnnnnnnnnnnnnnnnnnnnnnnnnnnnnnnnnnnnnnnnnnnnnnnnnnnnnnnnnnnnnnnnnnnnnnnnnnnnnnnnnnnnnnnnnnnnnnnnnnnnnnnnnnnnnnnnnnnnnnnnnnnnnnnnnnnnnnnnnnnnnnnnnnnnnnnnnnnnnnnnnnnnnnnnnnnnnnnnnnnnnnnnnnnnnnnnnnnnnnnnnnnnnnnnnnnnnnnnnnnnnnnnnnnnnnnnnnnnnnnnnnnnnnnnnnnnnnnnnnnngatctaattaggtgtgtagtagattatatataatagtggggnnnnannttannnnnnnnnnnnnannnnnnnnannnnnnnntnnnnnnnnntnntnnnctnnaccaatctctacctttnaattttcaccctttaacgccttgttcttagattgttttaattatcagaccactccggatttttaatccatatccccttatgatcttgaatgaatttaggagtcgtttcggagattactttaggtttctcttctttttcctgatcatcaagagatataatcttgtcgtcccgaagaacttttccgctaaaagtaattttcatattcaaatttcctttcctcaggtttcagcgtcaactctcatatccaatggttttattatttcaaatcaaacaanaaacataacaaccagaaaatatcttttatttagtaatacaactctaaatataagtcaacaatttactaataaagaatatttgacaaatacggctctcttactttttataaaaaagttaccacctttaagatagattttatagactaagttttttctcttgaatntctgctcttcttgtctttgctagtttaccaagctctcccagtgcttttcgggctctagctgcagctgcttttatattcttagtttcaaaactctcattttccgaaagataggtttcataagcagatacaatttgatcgtgggtcatacgtacactctcctattttttaaataattaaaatttagtctcaagacatgtaactatcacatgtagctagttaaatccaagtaaaaaattctacccgtaaaataatcggaanagacgtncatcaagctactttttgcgtttttgccgctcgtttccgttcattctcgtccaagtgccttttacgtagacgaatactggtaggagtaatctccgcaagttcgtcatcattaagataaccaagaacttgctcgaggctcattattctaggaggcgcaatacttacngtatcatctgatccagatgcgcgcacatttgtgagctttttccccttacaaacattaacaacaagatcattatctttattgttttcgccaataatcattcctgtatacacttcctcagccggncctaggaacataactcctctatcttgcaagttaaataaagagtgcgtngtngtgcttccgttctcaagaganattaatactccgttattacgacgagccaattctccgcaatacggaacataatcatgaaagctatgattcaaaataccngttcctcgggtaagagttaacagttgtgagcggaaaccaaacaaaccacgtgttggaatgacaaattccagccgaaccgattccgttccagtgtgaatcatatttttcattacacctttacgttggcccattgcctccatcaccgttcccatgtactgctcttcaacatcaattattgcaaattcttctggctccattgtcttgtcattaattttctttaaaacaacttgtggtctggaaatagaaaattcaaaatcctcccgcctcatagtttctataagaatagtaaggtgtaattctcctctacccgaaactttaaatgtgtcattggagcttgcttcttcaactcgtaaagctacattttgtttaatttctttaaataatctttcacgcaattgtcttgatgtaacaaatttcccttctcgcccngcaaatggtgagctgttaacaagaaagtttatggataatgttggctcatcaatttctattaaaggcaacgcttctaggttgttacgatcagtaatggtttcccctatatccacttctttcattccagcgataccaacaatatctcctgttaccgcatcctgcacctcttttcgttgcaaaccttcaaaagtgaataatttagaaactttaaaatcctctttatcgcctgatcgtttaattaaagtgtattgtttgcttgaatcatagcaacccctttgaatcttccctactgcaattcgccctacgtagtcattataatcaatgttggagaccaacatttgaaatgcaccttttggatcaccttcatgtggcgcaactttatcaattatcaagtctaataaaggtttcatattctggtcttctccacctggttccactcgacaaaaaccatgtttagcagacgtgtatatcgtggaaaaatctaactgctcatctgatgctcctagattaacaaaaagatcgaaaaccagatttagtgcgttttctggattagctccagggcgatcaattttatttacaacaacaattggttttagtcctaagtcgagtgatttttttaatacaaaccgtgtctgcggcatgggaccttcataggcatcaactataagcaagactccatttaccattttaagaatacgctcgacttctcctccaaaatcagcatgccccggggtatcaacaatattaattttatattcattatgttcaatagaagcattttttgaaaaaatggtgatgcctcgttctttttctaaatcattgctgtccatgatgcacgaccctgacaattcattagctctaaacataccactttgccttaatagacaatcaacaagtgtggttttcccatgatcgacatgggcgataattccaacatttctaatatgttcgttgttcataatattacgaatattctttctctaaagttaaattctaaaaaagatcacttgattagcacaanagccaaaccattcattatatgcattttttataaaaataaaaggtaaatactaggttcagaactatttaaatatcaatgtttaagcggntctgatatagattttgaaggtatttggcatctca

SEQ ID NO: 1281 - DNA, 4000 bp, Escherichia coli
  misc_feature (82)..(82): n is a, c, g, or t
  misc_feature (2368)..(2368): n is a, c, g, or t
  misc_feature (2866)..(2866): n is a, c, g, or t
  misc_feature (2893)..(2893): n is a, c, g, or t
  misc_feature (3597)..(3597): n is a, c, g, or t
  misc_feature (3627)..(3627): n is a, c, g, or t
acttttgagtactaagcttatgcttggccaaggtattcatgtagaaggtattaattttttcacaggcttttgtgtggaaggncatacgcatgcgattcgcaaacaaaaaagtgacaagccaaagcgtaataatgcactgtgggtggcagagcaacttggcattaaattacacattattgatgtgattgaagagtatcgagacgttcttttaaatccaaaacatggttatggaaaaaacatgaatccttgtttagattgcaaagggttcatggtgaaaaaagccaagcagtggatggaggagaatgattttgactttattattaccggcgaggtaatgggtcaacgtcctatgtctcagcgcaaagaaaccatgccagtggtgcaagaagaatccggcgcaggtgatttgttattacgccctttgtgcgctaaacacttaccactaactaaggctgaaattgaaggctgggtggatcgtgaacggttgctagacttttcgggacgcacccgtaagccgcaaatggcgttggctaaagaatacggttttgatgactatgccactcctgcaggtggctgttgttttttaaccgataaacaatattcggataaattagtggatatgtggcaagcccgcggtaatcgtgattaccaacttgatgatcttatgatgcttaaggtgggtcgacacattcgccctaatcagcgtttcaagatgattattgctagagaagagggtgaagtgaaatttttagagggttatcgtaatcagtacgctcatttgtattcaaccagctgtaatggcccgatagcattaatagatggagagcccaatcaagaagatataaagattgctgctaagattttggcgagatattcccagggtagagatgaagacagtgttgatgtagaagttaaattgcaggctggcgtagctcagcaattaagtgttaaacctttttcagcagaagagattgataaaaactggatggtttaaggtgttataatagtaatacttatttaattacttaagtattatgaaaacaattactttaaaaaccaaagatgatttttttgatcaaatcaatcaaatggcgttagacgcccatatatccaaaagtgcgttgatacgaaaagcaattagatcgtatcaaaaaaaccttgaaaagcaaaaaattatcaaacaaatgcaaaaatcttcttttgaaactagaggtttggacgctgaattaaaacatgattttgaagcactagacgatgaacaccttttgccaccttgggaagattgatgaattttattaggggtggaatttatttggccaaccttaatccaagtagaggcgctgaaattggtaaaattcgtccagttttagttattcagtctaatgggttaaatagcattaaacatccaacagtaaatattttgccacttactacaaatttgaaaaacaacacttttttgcattttagagttaataaaagagatgagttaaagcataattcagatattgtttgtgattatattcgtgcaattgatagtagtaaattcacatcaagtatattaactcaacttagtaaaaatgaaatgcaacaaatagaagaaaaattaagttggatactaggctttaatgattaaccaccaccaacagctttaatgacctcaatcttatcaccttcatttaagctaaattcaatatgttttgacttgggaataatagcttcattaacttctagcgcgatacgctgatcttgataacccaatttagtgattaaatcctgtacattcgagcattcatctatttttagattttcaccattaacaactagattcattgatccatttttcctatcgcacaagagacgaatgatttagctttagctttagtagaatcaaatccatgaacagaatcaaccttggggtagcctaaacctagtaaaacctcagttaactccttccttttagattcgtcaatatcaatatcaataatgccctgttcgatattaatttcaatattttcagtatcgaaaaccttggttaattttttagtgattgtgcctgcacaaccaccgcatttaatattttcaacagtaatgttcataacactccaaaaattgacaattcatgacatcattatatcactctaatttatttatttgagtatcagcttgaatgacgattgtggtaaaattttcggagttttggattcaggagtgtttggtgtcgcaagttgcattattagccgtgttagctttggaagatggtacgattttccacggtaaatcgattggtgctagtggcaatacagtcggcgaagtggtgtttaatacttcaatgaccggctatcaagaaatccttactgacccttcttangcacaacaaattgttgcactgacttaccctcacatcggcaatacaggtactaatttggttgatgaagagtctagtcaaatttacgcttcaggtttgatcattcgtgatttgccgctcatggtaagcaattggcgttcgaacatgcctttagatgagtatttatcctcgcacaatattgtggccattagcgacattgatacccgtgcactaacgcgtcatttgcgtgaaaaaggctctcttaagggttgtattatcagcggtgacgatgttgatgaagcagaagccatcgaaaaagcacagtcttttgcaggtctaaaaaacatggatttggcaaaagtagtttctactactaagacttatgagtttaataaaggttcgtactcgttagaaagtaatgaatttagaaaacttgatgcaaaatttaaggttgtggtttatgactatggcgttaagaaaaatattttaagaatgttggtggatcgaggctgtgatttaacngtggtgaatgccaaaactccagtggangaggttttgtcaatggatcctgacggtgtattcttatctaacggaccgggtgatcctgaaccgtgtgattatgccattagcagtattcaaactttattggaaaaaaacacgccaatttttggtatttgtttgggtcatcagttgttatcgttagcgagtggcgctaaaacccagaaaatgaaatttggtcatcatggcgctaatcatcctgtgcaagacttaaacaccaaacaagtaatgattacttcgcaaaatcacggctttgccgtatcagaggacaatataccggatacactggaaattacacatcgttcgctatttgacaattcaattcaaggtgttaaagtagccaataaacctgcttttagttttcagggtcaccctgaagcttcaccaggtccgcacgatgtaagcggtttatttgatgtttttattgaggagatgaaaaaatgaaaaatatattgatgagcttattattgctattgatggctaacacagttgttttagctgaagaagacattgatccatttgaggatatgaatcgagttatttatgattttaatgaaacaattgatgataatctgcttgagcctgtttctagagcgtataaagaacatgcacctggaattctacaaagtggagttagtaatttctttggtaatttgcgtgatgtgtctacattggctaatcaaatattacaattnaaacccgttgaaagtgtaaccacgttgggncgtgttattgtgaattcaaccattggtttgtttggcttatttgatgtggcctctgagatagacttgactaagagtacagaagattttggtcaaacattagccgtatggggtgtcggcgatggtccgtacgtaatgataccgctgttaggcccgtcaaccgtaagagatggtgttggcctttatgtggatttaacatccgatgcaaatatgattaatgagatgaatgatatcggctttgtcagcgctagtatgatgaatatagttgataagcgtgtggagctcttacccgcgactgatttgttagatcaatcggatgacccgtacattaccatgcgttcatcgtatttgcaaaaaagacaatttgacattttcg

SEQ ID NO: 1282 - DNA, 4000 bp, Escherichia coli
  misc_feature (1)..(1): n is a, c, g, or t
  misc_feature (5)..(6): n is a, c, g, or t
  misc_feature (17)..(17): n is a, c, g, or t
  misc_feature (27)..(27): n is a, c, g, or t
  misc_feature (34)..(34): n is a, c, g, or t
  misc_feature (40)..(40): n is a, c, g, or t
  misc_feature (43)..(44): n is a, c, g, or t
  misc_feature (46)..(46): n is a, c, g, or t
  misc_feature (50)..(51): n is a, c, g, or t
  misc_feature (54)..(55): n is a, c, g, or t
  misc_feature (61)..(61): n is a, c, g, or t
  misc_feature (67)..(67): n is a, c, g, or t
  misc_feature (71)..(71): n is a, c, g, or t
  misc_feature (79)..(79): n is a, c, g, or t
  misc_feature (81)..(81): n is a, c, g, or t
  misc_feature (85)..(85): n is a, c, g, or t
  misc_feature (88)..(90): n is a, c, g, or t
  misc_feature (92)..(94): n is a, c, g, or t
  misc_feature (96)..(98): n is a, c, g, or t
  misc_feature (108)..(110): n is a, c, g, or t
  misc_feature (113)..(114): n is a, c, g, or t
  misc_feature (123)..(123): n is a, c, g, or t
  misc_feature (126)..(127): n is a, c, g, or t
  misc_feature (129)..(130): n is a, c, g, or t
  misc_feature (137)..(137): n is a, c, g, or t
  misc_feature (139)..(140): n is a, c, g, or t
  misc_feature (145)..(145): n is a, c, g, or t
  misc_feature (149)..(151): n is a, c, g, or t
  misc_feature (153)..(153): n is a, c, g, or t
  misc_feature (155)..(155): n is a, c, g, or t
  misc_feature (158)..(158): n is a, c, g, or t
  misc_feature (164)..(164): n is a, c, g, or t
  misc_feature (167)..(167): n is a, c, g, or t
  misc_feature (173)..(174): n is a, c, g, or t
  misc_feature (177)..(179): n is a, c, g, or t
  misc_feature (182)..(184): n is a, c, g, or t
  misc_feature (186)..(194): n is a, c, g, or t
  misc_feature (196)..(199): n is a, c, g, or t
  misc_feature (201)..(201): n is a, c, g, or t
  misc_feature (206)..(206): n is a, c, g, or t
  misc_feature (210)..(210): n is a, c, g, or t
  misc_feature (215)..(215): n is a, c, g, or t
  misc_feature (218)..(218): n is a, c, g, or t
  misc_feature (220)..(220): n is a, c, g, or t
  misc_feature (222)..(223): n is a, c, g, or t
  misc_feature (227)..(227): n is a, c, g, or t
  misc_feature (229)..(229): n is a, c, g, or t
  misc_feature (232)..(237): n is a, c, g, or t
  misc_feature (239)..(240): n is a, c, g, or t
  misc_feature (243)..(246): n is a, c, g, or t
  misc_feature (248)..(250): n is a, c, g, or t
  misc_feature (252)..(252): n is a, c, g, or t
  misc_feature (256)..(257): n is a, c, g, or t
  misc_feature (262)..(265): n is a, c, g, or t
  misc_feature (268)..(268): n is a, c, g, or t
  misc_feature (270)..(271): n is a, c, g, or t
  misc_feature (275)..(275): n is a, c, g, or t
  misc_feature (279)..(279): n is a, c, g, or t
  misc_feature (281)..(281): n is a, c, g, or t
  misc_feature (283)..(287): n is a, c, g, or t
  misc_feature (289)..(289): n is a, c, g, or t
  misc_feature (292)..(295): n is a, c, g, or t
  misc_feature (299)..(299): n is a, c, g, or t
  misc_feature (301)..(304): n is a, c, g, or t
  misc_feature (307)..(307): n is a, c, g, or t
  misc_feature (313)..(314): n is a, c, g, or t
  misc_feature (316)..(317): n is a, c, g, or t
  misc_feature (319)..(319): n is a, c, g, or t
  misc_feature (323)..(323): n is a, c, g, or t
  misc_feature (325)..(327): n is a, c, g, or t
  misc_feature (333)..(335): n is a, c, g, or t
  misc_feature (339)..(342): n is a, c, g, or t
  misc_feature (346)..(346): n is a, c, g, or t
  misc_feature (348)..(349): n is a, c, g, or t
  misc_feature (355)..(355): n is a, c, g, or t
  misc_feature (364)..(365): n is a, c, g, or t
  misc_feature (367)..(367): n is a, c, g, or t
  misc_feature (374)..(378): n is a, c, g, or t
  misc_feature (380)..(384): n is a, c, g, or t
  misc_feature (387)..(387): n is a, c, g, or t
  misc_feature (389)..(392): n is a, c, g, or t
  misc_feature (399)..(403): n is a, c, g, or t
  misc_feature (405)..(405): n is a, c, g, or t
  misc_feature (409)..(410): n is a, c, g, or t
  misc_feature (412)..(413): n is a, c, g, or t
  misc_feature (418)..(428): n is a, c, g, or t
  misc_feature (430)..(433): n is a, c, g, or t
  misc_feature (438)..(438): n is a, c, g, or t
  misc_feature (440)..(441): n is a, c, g, or t
  misc_feature (444)..(445): n is a, c, g, or t
  misc_feature (450)..(451): n is a, c, g, or t
  misc_feature (453)..(455): n is a, c, g, or t
  misc_feature (457)..(458): n is a, c, g, or t
  misc_feature (463)..(466): n is a, c, g, or t
  misc_feature (468)..(472): n is a, c, g, or t
  misc_feature (474)..(477): n is a, c, g, or t
  misc_feature (479)..(480): n is a, c, g, or t
  misc_feature (485)..(500): n is a, c, g, or t
  misc_feature (502)..(502): n is a, c, g, or t
  misc_feature (505)..(505): n is a, c, g, or t
  misc_feature (508)..(510): n is a, c, g, or t
  misc_feature (512)..(512): n is a, c, g, or t
  misc_feature (514)..(519): n is a, c, g, or t
  misc_feature (523)..(524): n is a, c, g, or t
  misc_feature (526)..(527): n is a, c, g, or t
  misc_feature (531)..(532): n is a, c, g, or t
  misc_feature (534)..(535): n is a, c, g, or t
  misc_feature (538)..(538): n is a, c, g, or t
  misc_feature (543)..(543): n is a, c, g, or t
  misc_feature (546)..(549): n is a, c, g, or t
  misc_feature (551)..(552): n is a, c, g, or t
  misc_feature (554)..(556): n is a, c, g, or t
  misc_feature (559)..(559): n is a, c, g, or t
  misc_feature (562)..(562): n is a, c, g, or t
  misc_feature (564)..(569): n is a, c, g, or t
  misc_feature (571)..(577): n is a, c, g, or t
  misc_feature (581)..(582): n is a, c, g, or t
  misc_feature (584)..(584): n is a, c, g, or t
  misc_feature (588)..(588): n is a, c, g, or t
  misc_feature (591)..(592): n is a, c, g, or t
  misc_feature (594)..(594): n is a, c, g, or t
  misc_feature (597)..(598): n is a, c, g, or t
  misc_feature (602)..(604): n is a, c, g, or t
  misc_feature (608)..(609): n is a, c, g, or t
  misc_feature (611)..(613): n is a, c, g, or t
  misc_feature (615)..(615): n is a, c, g, or t
  misc_feature (618)..(620): n is a, c, g, or t
  misc_feature (625)..(626): n is a, c, g, or t
  misc_feature (632)..(632): n is a, c, g, or t
  misc_feature (638)..(638): n is a, c, g, or t
  misc_feature (641)..(642): n is a, c, g, or t
  misc_feature (644)..(645): n is a, c, g, or t
  misc_feature (647)..(647): n is a, c, g, or t
  misc_feature (652)..(652): n is a, c, g, or t
  misc_feature (655)..(656): n is a, c, g, or t
  misc_feature (659)..(659): n is a, c, g, or t
  misc_feature (662)..(664): n is a, c, g, or t
  misc_feature (673)..(673): n is a, c, g, or t
  misc_feature (678)..(678): n is a, c, g, or t
  misc_feature (685)..(685): n is a, c, g, or t
  misc_feature (690)..(690): n is a, c, g, or t
  misc_feature (699)..(699): n is a, c, g, or t
  misc_feature (702)..(702): n is a, c, g, or t
  misc_feature (704)..(705): n is a, c, g, or t
  misc_feature (707)..(719): n is a, c, g, or t
  misc_feature (721)..(721): n is a, c, g, or t
  misc_feature (724)..(728): n is a, c, g, or t
  misc_feature (731)..(734): n is a, c, g, or t
  misc_feature (738)..(740): n is a, c, g, or t
  misc_feature (743)..(743): n is a, c, g, or t
  misc_feature (747)..(751): n is a, c, g, or t
  misc_feature (756)..(757): n is a, c, g, or t
  misc_feature (763)..(763): n is a, c, g, or t
  misc_feature (766)..(766): n is a, c, g, or t
  misc_feature (769)..(769): n is a, c, g, or t
  misc_feature (772)..(772): n is a, c, g, or t
  misc_feature (778)..(779): n is a, c, g, or t
  misc_feature (781)..(781): n is a, c, g, or t
  misc_feature (783)..(785): n is a, c, g, or t
  misc_feature (787)..(787): n is a, c, g, or t
  misc_feature (789)..(791): n is a, c, g, or t
  misc_feature (793)..(793): n is a, c, g, or t
  misc_feature (796)..(796): n is a, c, g, or t
  misc_feature (798)..(799): n is a, c, g, or t
  misc_feature (801)..(804): n is a, c, g, or t
  misc_feature (806)..(806): n is a, c, g, or t
  misc_feature (809)..(810): n is a, c, g, or t
  misc_feature (814)..(814): n is a, c, g, or t
  misc_feature (817)..(817): n is a, c, g, or t
  misc_feature (820)..(820): n is a, c, g, or t
  misc_feature (822)..(824): n is a, c, g, or t
  misc_feature (826)..(831): n is a, c, g, or t
  misc_feature (833)..(835): n is a, c, g, or t
  misc_feature (837)..(846): n is a, c, g, or t
  misc_feature (848)..(849): n is a, c, g, or t
  misc_feature (851)..(851): n is a, c, g, or t
  misc_feature (853)..(854): n is a, c, g, or t
  misc_feature (862)..(863): n is a, c, g, or t
  misc_feature (865)..(865): n is a, c, g, or t
  misc_feature (867)..(868): n is a, c, g, or t
  misc_feature (870)..(871): n is a, c, g, or t
  misc_feature (873)..(877): n is a, c, g, or t
  misc_feature (879)..(880): n is a, c, g, or t
  misc_feature (882)..(888): n is a, c, g, or t
  misc_feature (890)..(890): n is a, c, g, or t
  misc_feature (895)..(895): n is a, c, g, or t
  misc_feature (898)..(900): n is a, c, g, or t
  misc_feature (902)..(906): n is a, c, g, or t
  misc_feature (908)..(909): n is a, c, g, or t
  misc_feature (912)..(914): n is a, c, g, or t
  misc_feature (916)..(926): n is a, c, g, or t
  misc_feature (928)..(932): n is a, c, g, or t
  misc_feature (934)..(935): n is a, c, g, or t
  misc_feature (939)..(941): n is a, c, g, or t
  misc_feature (944)..(948): n is a, c, g, or t
  misc_feature (951)..(965): n is a, c, g, or t
  misc_feature (969)..(972): n is a, c, g, or t
  misc_feature (974)..(978): n is a, c, g, or t
  misc_feature (980)..(982): n is a, c, g, or t
  misc_feature (984)..(987): n is a, c, g, or t
  misc_feature (989)..(992): n is a, c, g, or t
  misc_feature (994)..(995): n is a, c, g, or t
  misc_feature (998)..(1003): n is a, c, g, or t
  misc_feature (1005)..(1005): n is a, c, g, or t
  misc_feature (1009)..(1010): n is a, c, g, or t
  misc_feature (1015)..(1015): n is a, c, g, or t
  misc_feature (1017)..(1017): n is a, c, g, or t
  misc_feature (1019)..(1020): n is a, c, g, or t
  misc_feature (1023)..(1023): n is a, c, g, or t
  misc_feature (1025)..(1025): n is a, c, g, or t
  misc_feature (1031)..(1034): n is a, c, g, or t
  misc_feature (1036)..(1037): n is a, c, g, or t
  misc_feature (1039)..(1045): n is a, c, g, or t
  misc_feature (1048)..(1053): n is a, c, g, or t
  misc_feature (1055)..(1055): n is a, c, g, or t
  misc_feature (1057)..(1057): n is a, c, g, or t
  misc_feature (1059)..(1062): n is a, c, g, or t
  misc_feature (1064)..(1065): n is a, c, g, or t
  misc_feature (1070)..(1073): n is a, c, g, or t
  misc_feature (1075)..(1077): n is a, c, g, or t
  misc_feature (1079)..(1083): n is a, c, g, or t
  misc_feature (1086)..(1088): n is a, c, g, or t
  misc_feature (1090)..(1091): n is a, c, g, or t
  misc_feature (1094)..(1100): n is a, c, g, or t
  misc_feature (1104)..(1107): n is a, c, g, or t
  misc_feature (1109)..(1111): n is a, c, g, or t
  misc_feature (1114)..(1115): n is a, c, g, or t
  misc_feature (1117)..(1125): n is a, c, g, or t
  misc_feature (1128)..(1146): n is a, c, g, or t
  misc_feature (1151)..(1158): n is a, c, g, or t
  misc_feature (1160)..(1160): n is a, c, g, or t
  misc_feature (1162)..(1164): n is a, c, g, or t
  misc_feature (1166)..(1172): n is a, c, g, or t
  misc_feature (1174)..(1175): n is a, c, g, or t
  misc_feature (1177)..(1180): n is a, c, g, or t
  misc_feature (1183)..(1184): n is a, c, g, or t
  misc_feature (1186)..(1186): n is a, c, g, or t
  misc_feature (1189)..(1190): n is a, c, g, or t
  misc_feature (1192)..(1193): n is a, c, g, or t
  misc_feature (1196)..(1199): n is a, c, g, or t
  misc_feature (1203)..(1203): n is a, c, g, or t
  misc_feature (1205)..(1207): n is a, c, g, or t
  misc_feature (1209)..(1212): n is a, c, g, or t
  misc_feature (1214)..(1215): n is a, c, g, or t
  misc_feature (1217)..(1221): n is a, c, g, or t
  misc_feature (1223)..(1225): n is a, c, g, or t
  misc_feature (1227)..(1228): n is a, c, g, or t
  misc_feature (1231)..(1231): n is a, c, g, or t
  misc_feature (1234)..(1234): n is a, c, g, or t
  misc_feature (1238)..(1241): n is a, c, g, or t
  misc_feature (1243)..(1247): n is a, c, g, or t
  misc_feature (1254)..(1254): n is a, c, g, or t
  misc_feature (1256)..(1256): n is a, c, g, or t
  misc_feature (1259)..(1260): n is a, c, g, or t
  misc_feature (1262)..(1263): n is a, c, g, or t
  misc_feature (1265)..(1266): n is a, c, g, or t
  misc_feature (1268)..(1275): n is a, c, g, or t
  misc_feature (1277)..(1278): n is a, c, g, or t
  misc_feature (1280)..(1281): n is a, c, g, or t
  misc_feature (1283)..(1287): n is a, c, g, or t
  misc_feature (1289)..(1290): n is a, c, g, or t
  misc_feature (1292)..(1292): n is a, c, g, or t
  misc_feature (1294)..(1297): n is a, c, g, or t
  misc_feature (1300)..(1301): n is a, c, g, or t
  misc_feature (1303)..(1307): n is a, c, g, or t
  misc_feature (1309)..(1309): n is a, c, g, or t
  misc_feature (1311)..(1311): n is a, c, g, or t
  misc_feature (1314)..(1315): n is a, c, g, or t
  misc_feature (1318)..(1320): n is a, c, g, or t
  misc_feature (1322)..(1326): n is a, c, g, or t
  misc_feature (1328)..(1331): n is a, c, g, or t
  misc_feature (1333)..(1335): n is a, c, g, or t
  misc_feature (1338)..(1353): n is a, c, g, or t
  misc_feature (1356)..(1360): n is a, c, g, or t
  misc_feature (1362)..(1364): n is a, c, g, or t
  misc_feature (1368)..(1368): n is a, c, g, or t
  misc_feature (1370)..(1370): n is a, c, g, or t
  misc_feature (1372)..(1374): n is a, c, g, or t
  misc_feature (1376)..(1379): n is a, c, g, or t
  misc_feature (1381)..(1392): n is a, c, g, or t
  misc_feature (1394)..(1395): n is a, c, g, or t
  misc_feature (1397)..(1398): n is a, c, g, or t
  misc_feature (1400)..(1400): n is a, c, g, or t
  misc_feature (1402)..(1407): n is a, c, g, or t
  misc_feature (1409)..(1416): n is a, c, g, or t
  misc_feature (1419)..(1419): n is a, c, g, or t
  misc_feature (1421)..(1421): n is a, c, g, or t
  misc_feature (1423)..(1423): n is a, c, g, or t
  misc_feature (1425)..(1428): n is a, c, g, or t
  misc_feature (1430)..(1438): n is a, c, g, or t
  misc_feature (1442)..(1442): n is a, c, g, or t
  misc_feature (1444)..(1445): n is a, c, g, or t
  misc_feature (1449)..(1453): n is a, c, g, or t
  misc_feature (1455)..(1463): n is a, c, g, or t
  misc_feature (1465)..(1474): n is a, c, g, or t
  misc_feature (1476)..(1476): n is a, c, g, or t
  misc_feature (1478)..(1478): n is a, c, g, or t
  misc_feature (1481)..(1481): n is a, c, g, or t
  misc_feature (1486)..(1486): n is a, c, g, or t
  misc_feature (1488)..(1489): n is a, c, g, or t
  misc_feature (1491)..(1494): n is a, c, g, or t
  misc_feature (1497)..(1497): n is a, c, g, or t
  misc_feature (1499)..(1500): n is a, c, g, or t
  misc_feature (1502)..(1503): n is a, c, g, or t
  misc_feature (1506)..(1506): n is a, c, g, or t
  misc_feature (1508)..(1509): n is a, c, g, or t
  misc_feature (1513)..(1516): n is a, c, g, or t
  misc_feature (1518)..(1523): n is a, c, g, or t
  misc_feature (1526)..(1528): n is a, c, g, or t
  misc_feature (1530)..(1540): n is a, c, g, or t
  misc_feature (1542)..(1543): n is a, c, g, or t
  misc_feature (1545)..(1545): n is a, c, g, or t
  misc_feature (1547)..(1547): n is a, c, g, or t
  misc_feature (1549)..(1549): n is a, c, g, or t
  misc_feature (1551)..(1558): n is a, c, g, or t
  misc_feature (1560)..(1560): n is a, c, g, or t
  misc_feature (1563)..(1565): n is a, c, g, or t
  misc_feature (1568)..(1569): n is a, c, g, or t
  misc_feature (1574)..(1574): n is a, c, g, or t
  misc_feature (1576)..(1577): n is a, c, g, or t
  misc_feature (1580)..(1580): n is a, c, g, or t
  misc_feature (1582)..(1582): n is a, c, g, or t
  misc_feature (1584)..(1586): n is a, c, g, or t
  misc_feature (1588)..(1588): n is a, c, g, or t
  misc_feature (1591)..(1593): n is a, c, g, or t
  misc_feature (1599)..(1604): n is a, c, g, or t
  misc_feature (1606)..(1609): n is a, c, g, or t
  misc_feature (1613)..(1615): n is a, c, g, or t
  misc_feature (1619)..(1622): n is a, c, g, or t
  misc_feature (1624)..(1631): n is a, c, g, or t
  misc_feature (1638)..(1640): n is a, c, g, or t
  misc_feature (1642)..(1644): n is a, c, g, or t
  misc_feature (1647)..(1648): n is a, c, g, or t
  misc_feature (1651)..(1654): n is a, c, g, or t
  misc_feature (1658)..(1659): n is a, c, g, or t
  misc_feature (1663)..(1667): n is a, c, g, or t
  misc_feature (1986)..(1986): n is a, c, g, or t
  misc_feature (1990)..(1990): n is a, c, g, or t
  misc_feature (3223)..(3223): n is a, c, g, or t
nttgnngaaacgagagnaaaaggaggnagcgaanaaagtnatnnanaagnnatnnagaganagaaanaganaaaaagananaganagnnntnnngnnnggcagcgaannnttnngtcttaaanagnntnnacttgtntnnatatnaacnnntntnttntatttntanaacttnnttnnnatnnntnnnnnnnnnannnntntattnttantactntantntnntttntnctnnnnnncnncgnnnntnnngntttnngcacnnnnggngnngaanaganangnnnnncntcnnnntcgnannnntcntcttcnncnncntcgnannngttgtnnnctannnnttgntnnttcttnttcttttcnntngtgttgnnnnntnnnnnttntnnnncggcggnnnnngnggtnntnntcatnnnnnnnnnnnannnnttttncnncannttgannannnannctttnnnntnnnnntnnnntnntaatnnnnnnnnnnnnnnnncnctnatnnncncnnnnnnctcnncnnctcnncnnttntttcnctnnnntnntnnnctnttntnnnnnnannnnnnngcgnngncgtnttnngngannaacnnntggnntnnncntcnnngcgcnnctactncttctnctnntnntntttcnctnnttnttnnntcttctttnttttnttctttnttttnttcttcttnttntnntnnnnnnnnnnnnntnttnnnnncgnnnngacnnnacnaacnnnnntcttnnttgatnttnttnttntttttnntntnnntntnnntnttntnntnnnntnatnnttcntcntcntnnntnnnnnntnnncnnnnnnnnnntnntntnntctcttgnngngnnanntnnnnngnngnnnnnnntngttcnacnnntnnnnncnncgnnnannnnnnnnnnncnnnnncnncggnnncgnnnnntcnnnnnnnnnnnnnnntctnnnngnnnnntnnntnnnngnnnncnntcnnnnnncnctcnncctcntncnnctntntgtttnnnntnncnnnnnnnttnnnnnntncnannnntnntttcnnnncnnngnnnnntcnnncnnctnnnnnnncccnnnntnnntcnntnnnnnnnnntcnnnnnnnnnnnnnnnnnnngtccnnnnnnnntngnnntnnnnnnncnncnnnnatnncntcnntnnctnnnngttntnnntnnnntnnannnnntnnntnnttnatntttnnnncnnnnncatcttntnctnntnntnntnnnnnnnntnntnntnnnnnannantnnnncgnngnnnnngngnagnngannngnnnnngnnnngnnnatnnnnnnnnnnnnnnnncgnnnnntnnntgtntntnnntnnnntnnnnnnnnnnnngnngnngnannnnnntnnnnnnnnttntntntnnnntnnnnnnnnnatanannaatnnnnntnnnnnnnnntnnnnnnnnnntntntgnttttntnncnnnngtntnnanngtngnnaatnnnngnnnnnnaannnannnnnnnnnnntnnantncnannnnnnnntnttnnntannacaanannacnangnnngnagnnnctactnnnnnntnnnntaannngtannnntnnnnnnnncatcatnnntnnnggnngcnnnngaannaccnnnnnttgttgttgttgttcacggcatcttttcctctttttttcttattacgttcaatcaaccttttcatctcctcgtccgagggtggatccggcgcactcgccgggtacacgacgtacattcggttccgaatgatttcctctaaattgctcgggttcatggcgaaaaaaaccgtcatcgcgattggaatggagaggtagacggagaatttgaacgcttccagggagaaggatttcgccatgcttgtgagttcgttgtgttgaatgggcgagttgttgatgaaaatcaaagaaaaaaataaaatttagggtacgtttacaattntttnttgtattctaaaatttgtgttagtaagcacattcgactctgaatagagttcaaattaagcgaatggccatgggttcgacccccatacgcggtacacgcattgtattgcctcgttagctcagtaggtagagcgttcgccttttaagcgttttttttgcattaatgtgcattctattacattctattacgttctattacgttctactaatcatcacgacagacatccatactcaaaaccatctcgcaaaacgttctgtgctttcctcgaaattgccgcaacggcatttgatcgagcccgtagcaccggtcgtcttcgccgcagttcgcgcacgtcgaattccatcccccgtcgccaatccaccacggcgacccacacgctaagcaaggcatctttggaaaataatgtcccgtaagatttctgttattcgagaaaactttcgtttcgccttgttgtttggtcggtcgcaaaaacgcttcgggaacgcgaacgccaattttgccgccgagtggcaataattttttcccctctttttgttcttctttttcttctacatcttcttttgctgatagtttatcctgcgataacaacgaagaagacgttttgtctttcaaaaacactcgttctttttgttgcatcagtgcgacgcaaccggcgccgcctcgaccttcggcgatgacgccacatcgctccatggtgtctggaaccgactcccaaacttgttggcacgcgatgaaaaagttagcttctttcttctcgcaaaaatcgtctccatcaaaagcggtatcgtactcgcacaagcacgcgtctaacatttcgcgaagcttttcggcatctttgacgccttcaaagaccaaatgattccttcgatcgccgcacaaactaaagcttcgtcgaaacaacaactgttttcgtttttgttcatcatcgtcttcgtctgcgtcgtctttaaaccacggcttttcgttcacggcatacacgcgaacgggttccgagtgtttatgaagccactgcagaggtgttgttaagcgcgagtttacccaaacgacgccttgtgaacgcaagctggatgacagcaacgtagcggtagcgttgattttatctttgttgttattatcgtcatcatccaaatctaaatcttccgtgaacgagaccttcccgtactcttttcggagcattaagaacaacttcctggaatcaaacggtcgtcgcgccaggtacacgaccggtggcggntcctcttcgtcctcttcttcttcttctacctctgctatttttatttctcgctccttgttcccgagcgcctcggagtacgtctccgtgcactccacgcaaacctgctcaatctgtttatcgtacttgttgtgttcgaaagtgattttagaaacgaacaactcggcgtagttttccgacgccttttcggtttctaatatccactcgtccactctgttgctcaacccgtgaatcgtacttccagaagcgtctctctctcgcaccgcatccgcgactgcttcgcccaactttgcgccttcacctttaacgagcacagagacgtcttcgtttctagaagcactctcgacaaatatacgctcaattctctccctctctcggacgtactcttcccctctggaagagagcacgacgaatatttttaccgttccaatcgctccttcccgaatctcctcgcacgccttcgcaaactctctagaactactactagacgacgacgcgtcatcgttggtaggaatcggattcatcaaaacaacgctcatcaccgattccattttatcgtgttgcatgagcgcgttcaaaacgattaaactctctttactcccgaacgcaatcgaaatcgctcgatccttcgcgttgattcttttcaacacgttgtgcaactgtttgctcgttttcttcctcccgtctacatcgtcttcaattttgttgttgttgttaatgttactgctgaaatcaatcgcgtggacgcagctcgcgcactttgaactcgcaaaaatgtgc

SEQ ID NO: 1283 - DNA, 4000 bp, Escherichia coli
  misc_feature (2864)..(2864): n is a, c, g, or t
aagcaggcgaatattccccatacgggcggagagttctttccattcattgcggatagctgtcgttttggaatagaccgtattcgagataacagaatagatttcagtaccggtcagtttttcgagtacttcggccttttcttctttccgggctttgaggaatcgggcaaattcattttgtgccaataaaacggtacgggtgaattgattataattcagaccgatgagttgaatcaatttattctccgattcactgattcctgtagtgataggagacggatctccaagggggtatacccggagttctgcaggttgaagtttcccgcttattttattattggctcgccatacccgccataccgagcgataactttttccgtctacagcaataaattctacagcagccatcgcttcggcagtacctctgcggagtatttgacgacgatctccctgttgaatgaattcttgtccgacatccggcattttagtaccttcaataccggtggtgcggggcatattgttgaataaggccagacagatagcatccagaatagtcgattttccggcaccggtgggaccgcatattgcgaagatcccggcagatcgcagaggagctgccgtaaaatcgatatcgaattctccggcaatagatgccagattttttccttgtatacgtaatattttcattgtttttctcccattttcagctgtgattcttcaatgacttcccggaataaatgagccaattcttcgggcagaggattttgatatcgcctttcgtatactcggttcaacagcttccagggatccagtaattcttcggtggtgagcgtattctcgttttttgtaagttgtactgtatccggataaaaggggagtacccgggttaaacgcacctgtttggtgcgtagggcttcctccactttattgcgcaaagcaggttccggttcggtgagtagtaccctgacttcgaggaaaggggccggatgatcgtctctctcttccgggagctgagagaggcgattcaacacttcgtccaagggggccggatgtttagggatacgaagtaaagtgactaaaggattaaaaataattttagtctgatttagaagtattcctttgtcgatctccagtaagatcactccgtggcggtaattttcttctgcaaaagacatgggtaacggactgccggcatagcgtatctcgttgcggttggcaatctgctgttcccggtggatatggcccaaagctccgtaagtgatttgggaagggaagacactggaaggaatcccttcgagtccgccgatgatcaggcgttcactttgatcaccttcggaaatctgacttcctgcggcttgcaggtgtcccatagcaatgatggcttcttgtttttgcctgcgttcttcgacgcaggcaaccagcttgtcgtacatggccttaacccctgcctgataaggatctccttcactctcgactgccggatagtctccctgtcggagatagggtaccgccagacaccaaccttgccgtttccccgatctgtctttcagttcgatgattaattcctccgtatcgattgtgccgtctgctcttttacgtactgtaccccgaatttgtatgttcatttcttcgagtaaaggaatcggggtttcgagccgactggcagaatcatgatttcctgcaatcaggatgatttgtaagcccggattttgttctgttacccggcgtaggaaccgataaaattgacgttgtgcctgagcagaaggattagctacatcgaatatatctcctgaaataagaagcacatcgatttgttgtgtggtaatttgatctgtcagccaatctaaaaaatactgatgttcctgaaaacggtcatagccgaaaaaggtctgcccgatatgccagtctgctgtatgaatgattttcatgtcctgtcatttggacaaaaatagtaagatttgcagatataaccaaatagctcacgggctatggtaatcctaccatagcccgtgagctatagccggtgataatggcaagtcatcagcttaccggattcatcgtgtaggtgcatgccatttccttcgcaataacggaacaggttgcaatcggcacattcgccctgacgggcccattcccggttccggaatttttcgaagcggttgttccacacttccataaaatcatcctggtaaatattcccttggtcgtagttggcccggatactgggacaacccgatatcgctccgttaatgcggatagatccgacagaaattccggcatggcaacgataaaattggtcacggacttcagcttcataaggacctaaaaaaccttcacaagcgaaattgacgtgaatacgaccttcttgccgggtttgacggataaaatccaatacttttttgaattgggaagaagatagttgtaattcaggcacttgtgctgctctgcctgcgggaaagatggtaaagatacgccattgtccgactcctagttcgatcaaatattctttgaaaacggggagagtatcgatgttttgttgattgatacaactgacgacatcccatacgatttctttttcccggctcagcattccgatagcctgactggcccggcgaaagctttccggatgtcggcgtaaccagttgtgggcatcttccggtccgtccagacttacggtaatgctgtgcaggcctgcttgtaaaagtctgtccagcctctgacgggataataacaaaccgttggttaccaatccccaggggtattcccggcgataacatgcccggccacactcttccagatctttgcgcatcagaggttctccacccgtgaaaatgataaaaacccggtggggatcgacctgtggagtnatgttgtccaaagcctttaagaagtcttcttttggcatatcgggttgcccggaaatcgctttgcaatcactgccacaatgccggcaagcgagattacagcgaagggtacattcccaaaaaagagtatgtaattcgtgtttttgccggatcagctgttctttttgtcggaagagttccaggcccaggcgtttccggaggctgatggaattattcatgatcttcttctttttgaggagtcagtatgatttttacttcttgtgttgtatttcccctattccagccttcacctccctgtaaatctttacgaaggaaggttactttcagagaatcggcctggtagtacggattattttcgtcggggttgatttttaaattatacttcaccgtatcgatcgggaacgctgcttgccgggtttcgaattctccttcttttccggagtataacgtatcgttgaccgggtggcttccatagggggtatcggggataaaatcaggacggggttcgtaactgaattccatatcggacacgataatctgaatatcggatagcgcctgacctgcctgatcggtgacttttcctttgatggtataggaagctgtcggcgtaccgtacatacatatgatgttaccgggatcgtccccgttatcctcacaggaggagaaacctaaaaatcctaataaagtagtcaatatccagttcaggctacgattccagcgataatgtaatgttttcatggtttgtttttttatgattaaactgtttaaatgccttgattttcttgaggtcggcctttccggacaggttgacggtgagaaatcgaaggtctttcatataatgagttgtatttaaaagttcaaacggaatccgatttgccccgtgaggttgaaaaactgttccgagcgaatcgtttgtatttcactggccggggtcagattccataaaaatcctccttctgcatagaccgatacatggcgaataatggggtaggcaatacctattcgtgtgttcgctgaccaaagcgtacccggtattcgtcgacgctgacttttataggccgaatagattttgcctgaaagattaacttcacagacaataccggcagaccaataacagtagaaacgttcccaatgggtca

SEQ ID NO: 1284 - DNA, 4000 bp, Escherichia coli
  misc_feature (2)..(2): n is a, c, g, or t
  misc_feature (7)..(12): n is a, c, g, or t
  misc_feature (15)..(15): n is a, c, g, or t
  misc_feature (17)..(22): n is a, c, g, or t
  misc_feature (24)..(29): n is a, c, g, or t
  misc_feature (31)..(31): n is a, c, g, or t
  misc_feature (33)..(40): n is a, c, g, or t
  misc_feature (44)..(48): n is a, c, g, or t
  misc_feature (51)..(51): n is a, c, g, or t
  misc_feature (53)..(53): n is a, c, g, or t
  misc_feature (55)..(59): n is a, c, g, or t
  misc_feature (61)..(64): n is a, c, g, or t
  misc_feature (66)..(68): n is a, c, g, or t
  misc_feature (70)..(70): n is a, c, g, or t
  misc_feature (72)..(73): n is a, c, g, or t
  misc_feature (75)..(81): n is a, c, g, or t
  misc_feature (83)..(83): n is a, c, g, or t
  misc_feature (86)..(90): n is a, c, g, or t
  misc_feature (93)..(94): n is a, c, g, or t
  misc_feature (96)..(100): n is a, c, g, or t
  misc_feature (105)..(105): n is a, c, g, or t
  misc_feature (107)..(109): n is a, c, g, or t
  misc_feature (113)..(117): n is a, c, g, or t
  misc_feature (119)..(124): n is a, c, g, or t
  misc_feature (126)..(127): n is a, c, g, or t
  misc_feature (130)..(135): n is a, c, g, or t
  misc_feature (138)..(138): n is a, c, g, or t
  misc_feature (140)..(140): n is a, c, g, or t
  misc_feature (143)..(148): n is a, c, g, or t
  misc_feature (150)..(151): n is a, c, g, or t
  misc_feature (153)..(153): n is a, c, g, or t
  misc_feature (155)..(158): n is a, c, g, or t
  misc_feature (160)..(163): n is a, c, g, or t
  misc_feature (165)..(165): n is a, c, g, or t
  misc_feature (167)..(169): n is a, c, g, or t
  misc_feature (173)..(176): n is a, c, g, or t
  misc_feature (179)..(195): n is a, c, g, or t
  misc_feature (198)..(199): n is a, c, g, or t
  misc_feature (201)..(203): n is a, c, g, or t
  misc_feature (205)..(208): n is a, c, g, or t
  misc_feature (210)..(214): n is a, c, g, or t
  misc_feature (216)..(219): n is a, c, g, or t
  misc_feature (221)..(224): n is a, c, g, or t
  misc_feature (226)..(227): n is a, c, g, or t
  misc_feature (230)..(235): n is a, c, g, or t
  misc_feature (237)..(242): n is a, c, g, or t
  misc_feature (245)..(247): n is a, c, g, or t
  misc_feature (249)..(249): n is a, c, g, or t
  misc_feature (253)..(258): n is a, c, g, or t
  misc_feature (260)..(260): n is a, c, g, or t
  misc_feature (262)..(267): n is a, c, g, or t
  misc_feature (269)..(272): n is a, c, g, or t
  misc_feature (274)..(276): n is a, c, g, or t
  misc_feature (278)..(285): n is a, c, g, or t
  misc_feature (287)..(294): n is a, c, g, or t
  misc_feature (296)..(296): n is a, c, g, or t
  misc_feature (298)..(299): n is a, c, g, or t
  misc_feature (301)..(302): n is a, c, g, or t
  misc_feature (304)..(308): n is a, c, g, or t
  misc_feature (310)..(315): n is a, c, g, or t
  misc_feature (317)..(318): n is a, c, g, or t
  misc_feature (320)..(320): n is a, c, g, or t
  misc_feature (322)..(327): n is a, c, g, or t
  misc_feature (329)..(329): n is a, c, g, or t
  misc_feature (332)..(332): n is a, c, g, or t
  misc_feature (334)..(335): n is a, c, g, or t
  misc_feature (337)..(338): n is a, c, g, or t
  misc_feature (340)..(346): n is a, c, g, or t
  misc_feature (348)..(353): n is a, c, g, or t
  misc_feature (355)..(362): n is a, c, g, or t
  misc_feature (367)..(367): n is a, c, g, or t
  misc_feature (369)..(370): n is a, c, g, or t
  misc_feature (372)..(372): n is a, c, g, or t
  misc_feature (375)..(375): n is a, c, g, or t
  misc_feature (377)..(387): n is a, c, g, or t
  misc_feature (391)..(397): n is a, c, g, or t
  misc_feature (399)..(399): n is a, c, g, or t
  misc_feature (401)..(412): n is a, c, g, or t
  misc_feature (414)..(414): n is a, c, g, or t
  misc_feature (416)..(416): n is a, c, g, or t
  misc_feature (428)..(428): n is a, c, g, or t
  misc_feature (455)..(456): n is a, c, g, or t
  misc_feature (469)..(469): n is a, c, g, or t
  misc_feature (493)..(493): n is a, c, g, or t
  misc_feature (713)..(713): n is a, c, g, or t
  misc_feature (725)..(725): n is a, c, g, or t
  misc_feature (890)..(890): n is a, c, g, or t
  misc_feature (917)..(917): n is a, c, g, or t
  misc_feature (929)..(929): n is a, c, g, or t
  misc_feature (1010)..(1011): n is a, c, g, or t
  misc_feature (1016)..(1016): n is a, c, g, or t
  misc_feature (1073)..(1073): n is a, c, g, or t
  misc_feature (1157)..(1157): n is a, c, g, or t
  misc_feature (1190)..(1190): n is a, c, g, or t
  misc_feature (1193)..(1193): n is a, c, g, or t
  misc_feature (1358)..(1358): n is a, c, g, or t
  misc_feature (1394)..(1394): n is a, c, g, or t
  misc_feature (1433)..(1433): n is a, c, g, or t
  misc_feature (1496)..(1496): n is a, c, g, or t
  misc_feature (1517)..(1517): n is a, c, g, or t
  misc_feature (1520)..(1520): n is a, c, g, or t
  misc_feature (1791)..(1791): n is a, c, g, or t
  misc_feature (1793)..(1793): n is a, c, g, or t
  misc_feature (1826)..(1826): n is a, c, g, or t
  misc_feature (1829)..(1829): n is a, c, g, or t
  misc_feature (1847)..(1847): n is a, c, g, or t
  misc_feature (1868)..(1868): n is a, c, g, or t
  misc_feature (1874)..(1874): n is a, c, g, or t
  misc_feature (1984)..(1985): n is a, c, g, or t
  misc_feature (2740)..(2740): n is a, c, g, or t
  misc_feature (3283)..(3283): n is a, c, g, or t
  misc_feature (3695)..(3695): n is a, c, g, or t
  misc_feature (3721)..(3721): n is a, c, g, or t
  misc_feature (3826)..(3826): n is a, c, g, or t
  misc_feature (3989)..(3989): n is a, c, g, or t
anaaaannnnnnaanannnnnncnnnnnntntnnnnnnnnagannnnnaantntnnnnngnnnntnnntntnntnnnnnnnanacnnnnngtnnannnnnttttntnnnctcnnnnngnnnnnncnnaannnnnnccncnctnnnnnnannanannnngnnnntntnnngggnnnngcnnnnnnnnnnnnnnnnngtnnannncnnnntnnnnnannnngnnnntnngtnnnnnntnnnnnnggnnntntctnnnnnntntnnnnnnannnngnnnannnnnnnngnnnnnnnnananncnnannnnngnnnnnnanntntnnnnnngngananngnngnnnnnnnannnnnngnnnnnnnnaaaanannanatntnnnnnnnnnnnagannnnnnnanannnnnnnnnnnntntntttttgtggggngagtgatgaagtcttaacaaaattggnnaaatgcccagctnagactcgtcaaagagcctcacttntgctatactatctcccaataagggcttttaattccatcccgtgaggtggagaaggctaaatcactttaccgagcccttggaataaattcagagggctctttgtcatgtcttggagcccggaaaagaggttatgatggaactacaaacgtccaaagtccgcatgctgcttgatgtcgagcagaagccgcctttcctacaagggctcttgttgagcgcccancacgtctttgcnatgtttggggcgaccattctggtgcccctgattctggggatgccggtttcggtggcgctctttgcctcagggattgggaccctcatctacatggtctcgacccagttcaaggtgccggtctacctagggtcgtccttcgcctttatccaggccatggccttcgcnaatagtcagatgaatggcgatgtctcngctgcccaaacnggggtggtgctagttgggctagtctatgttggaatggccctcttgattcgggcaattggaactacttggattgatcgcttnntgccncctattgtgattgggcccatgattatggtaatcggtttgggcttagccaactcagcngttaagaatgctggttttgtggaggggggcgacatcaaacatatcctggtcgcccttgttaccttcttaatcacggccttcatnaataccaaagccaagggttttctcaaaatcatnccnttcctctttgggattattgggggctacttggtggccgttgtctttggtttggtagactttaagccagtcctagaggcagcttggtttgaagtgccacatctctatttgccatttgaaactgggggcttcttcagtcgctatcacctctactttgggccagagacntgggcgattttgccggtagcggtcgtgaccattgcngaacatattggggaccatacagtgttggggcaaatctgnggccgtaagttcttggaaaaaccaggcctccatcggaccttgattggggatggggtggcgacngctgtgtcagcctttatcggnggnccggccaataccacttatggcgagaacactggggtggtagggatgacccgtatcgcttccgtctctgtcattcgcaatgctgccctctttgctatcgggcttagctttatgggcaaattcacggccatcatctccaccattcctaaacccgtattaggtggtatggccatcctactctatggggttattgcttctaacggtttgaaagtgctgattgagaagcaagttgacttccaccaagtccgcaacttgattatcgccagttccatgntngtgctaggcttgggcggcgcggttctcaaattnggnccggtgaccttatccggnactgccctctgcgccttggcnggcgtnctgctcaacttaatcttgccacacgaagaaaaattccaagaccagaaggttgaagaattacttggtgaagcgtaaataaggagctccctttccagggggcttttcttgtnnggaaaaagccaagcatgagcagaatcttgcagagcaaaaaaatctctcgaaatcaggccttaaggcattgcatatttgctggagtatgctataatagtacggtgcgcaaagtacgcacactgagtgggaggaggcttaggcttccatgaaccacatcacgaaccaaaaattaaggaggaatgtttcgtggctaaaaaagtcgtaaaacaagttaaattacaaatcccagccggcaaagcaagccctgctccaccagtaggtccagcgctcggtcaagcacaagtaaacatcatggggttctgtaaagagttcaacgctcgtacacaagatcaagcaggcttgattattcctgttgttatctctgtatacgaagaccgttcatttactttcatcaccaaaactccaccagctccagtattgttactgaaagctgctaaagttgacaaaggttcaggtgtacctaacaaaactaaggttgccactgtaaccaaagatcaagtacgagaaatcgcagaaactaaaatgccagacttaaatgcagccaatgttgaagctgcaatgcgcatggttgaaggtactgctcgctcaatggggattacagtccaagactaagcacaatgtagcttctcaacccgaattctatcgggtgtgggaggtcaaaccgttataaccacaacataggaggaagaaaaatggctaaaaagagcaaaaacttacaagcggctcttgcaaaagtagaccgcaacaaaaaatangaagctaacgaagctgttaccttagcaaaagaaatcgacttcgctaagttcgacgctaccgttgaagtttcttacaacttaaacatcgacgttaagaaagctgaccaacaaatccgtggcgcaatggtattgccacacgggactggtaaaaccagccgtgtagttgtaatcgcgcgtggcgaaaaagctaaagaagcggaagcagcaggtgctgactttgttggtgaagcagacttaatccaaaagatttctgacggttggttagaattcgacgtgatggtcgctacccctgacatgatgggtcaagtgggtcgccttggtcgtgtcttagggccaaaaggcttgatgccaaaccctaaaaccgggactgttaccatggacgtaaccaaagcagttaacgacatcaaagctggtcaagtaacttaccgtgctgacaaagctggtatcgtgaacgtgccaatcggtaaagtatcttttgaagacaacaaattggttgaaaacctcaaggcgcttcacgagcaaatcttgcgtgtgaaaccagcngctgctaaaggtacttacatcaacaacttgactttgagcactacttttggtcctgggatcaagttggatgttacttctctctaatttttagcgagaaatccgcgaagaggcttgacatgatggcccttcttcgctacaataacatacgttaatataacgaccgaagacagtaagtggcgcaggccttaatttcttaccgaggaagttccacgaatggaagctatctctatgtctaaggtgacatagagattttttatggcaacataaaaatctctatatcaaactagcggaggtgaaattatgacaaaagcaattctcttgaaaaagcaagaagaagtttcaaaagttgctgaagaactcaaatctgcagcatctgtagtcgttgttgactacttaggcttaaccgttgaanaagtgactaacttacgtaaagagttncgtgataacggcgtgcaaatgaaggttgtgaaaaacaccatcttacgtcgtgctgctgctcaagctgaaatcgaaggcttggatgcccactttgtaggcccaacngctatcgtgttcagcgaatcagaagttgtagcgccagcgaaagttatcgcagaattcgcgaagaaagctgaaaagcttgaaatcaaaggtggcttaatcgaagggaaagcagcttcagcagaagacgtgaaggctcttgcagctcttccagaccgcgacggcntgctctctatg

SEQ ID NO: 1285 - DNA, 4000 bp, Escherichia coli
  misc_feature (177)..(177): n is a, c, g, or t
  misc_feature (564)..(564): n is a, c, g, or t
  misc_feature (685)..(685): n is a, c, g, or t
  misc_feature (1062)..(1062): n is a, c, g, or t
  misc_feature (1129)..(1129): n is a, c, g, or t
  misc_feature (1218)..(1218): n is a, c, g, or t
  misc_feature (1395)..(1395): n is a, c, g, or t
  misc_feature (1738)..(1738): n is a, c, g, or t
  misc_feature (1740)..(1740): n is a, c, g, or t
  misc_feature (1921)..(1921): n is a, c, g, or t
  misc_feature (1976)..(1976): n is a, c, g, or t
  misc_feature (1988)..(1988): n is a, c, g, or t
  misc_feature (2035)..(2035): n is a, c, g, or t
  misc_feature (2864)..(2864): n is a, c, g, or t
  misc_feature (2921)..(2921): n is a, c, g, or t
  misc_feature (2987)..(2987): n is a, c, g, or t
  misc_feature (3209)..(3209): n is a, c, g, or t
  misc_feature (3527)..(3527): n is a, c, g, or t
  misc_feature (3530)..(3530): n is a, c, g, or t
ccgcgggcattggtttcgttcacgaaactacccaccaccacgctgaatgccttcaaaggctcgccgtcgatgacgcgcttctcgccttggatggtacgcacgggggtgttgtcttcctccaccaccacggtgcgctgcaccacaggtgcggcaggttgctgcacgggagcgggctgnacgggctgcggctgcgtgttttggggaatgatggtaaccgtctgagtgggcttgttcatctcttgtgctctggcccgttcgtaagcctggcgataggcgctctcctgtgatttgcaagaagcggcgaacagggctacggcgcagagacttagagcgaggatagcagggttcttcatttcagtgacgttttatttctgtagatgtttgttgtcctggtggtctgctcatcccgtttccgaggatgacgcatataatacgacgcaaaaatacaaggaaatgaaggatcagatgcgatacgtaatcataaaaaacagtaaacaactcctttttcctcccttgtttgcggtattctgaagagaaagtgctatttttggactcgaaacattntcaatttaatctcagaacgatatgaaaggtctcagtattttagcagctttcttaggcggtgcagcagtaggcgccgcatgtggcattcttttcgcacccgaaaaaggcgagaatatgcgtncacgcattgcagacgctatccgcaagcgtggcattaagctcaacggcaaagagctcgagagcctggtcgacgacattgccgacgaacttaacacgtccaacgactaagcacgcgcaggcgtgtcccctttgaaaaactgacgcacgatgatgtcgagtgatcagaatgtgagaatcttggagcggctggtgcgcaatctcaagcgctacgtcgatctcaagttggaaaccctgcgcttagacgccgtgagtcgcatcactatgctactttcggccatactcatcggcgtagtcttcttttgtctcgcatcgttggtggccatcatgctctcgtttgccgctgtggtctatttggcccccatcgtgggcggctacgtngtatccgcaggtttggtggctttgttctacgttgtggtggcgttgctgctcattctcttccgcaaancgctcatcatcgatcccatcacccgctttctcgtggcgctcctgctgtcggaagaaggagagatgggcgtgcgcgatgaacgagggggnaccactgtcggcgacaccactgctttcaattcgtctcagccatgagcacatacatttccctcgaacaagtgcgatggcaccagaagcgactccaattggagctgcaaaaagtgggcgaagagatcagcaaagatctcacaaccctcacggcgccgccggccggcgacggcaatgtgntggaaaccctcatgagcacggccacccgtgcgtggtggatcttcgacggagcgctcaccggctacaagctcttccgccgtctgcgcgggtttaccggacttttcggcaaacgcaaaggcagacgctgagccgtcgcgcggcagttcctgctgcgatgccggcacattccaattcccgccctcggtctattttcgtagaccgggggcgtttttgtttcccttcgccgcagcagccggtcgatgtgcccgcgaatgatgcgcgttcgtcgcgtgtccaacgcaaaccgtcccggcagctgctcgatgcgcagcgggctgcaaagttcggccacgacatcgattcngncggtcggaggcgcggggcgaaaagacaccggctgagagaacaggggaggcgtcgcgatgggaaaaacaggggaggaggcaccgaaaaagtgggagttgtttctgttttcttccccatttttcagccaaaattcccctcttttcgccggcaatgcgaaggcagaaaactttggcgcgaagcnggagagagattggcctgagaagacgagccgtcatacggagccaacacacgatctnagggagcaaacngaacgttgccccccaccgaaagcacgatggagggcatcgaaacgaancgccaaggtattttcccccgatagaaacacagcgccgagtgagaaagtggctcagcggggcttaaaagtgccattgtgggcttgtgcgcgcgaaaaaaacgcaagatcgcgtgcgcgtgtggagcgaaatgcttatatttgcacaagttatatggccccgattcggcatccggctcacccattgccgaaccgttgagcggctgcaaacgcccaaacaatgatccaagaaacagatagaatcaaacaagtgaatatcgaggaggaaatgaagtcctcgtatattgactattcgatgtccgtcatcgtgagccgtgcgctgcccgatgtgcgcgacggcttcaagcccgtgcatcgccgcattctctacggcatgatggacatgggaatcacgcacgataaggcgacgaaaaagtcggccgccatcgtcggtgaggtgctcggtaagtatcacccccacggcgacagctcggtctacggcgccttggtgcgcatggcacaaccgtgggccatgcgctatcccctggtgatcggacaaggtaactttggttcgatggacggtgacggggcggcagccatgcgttacacagaggccaaaatgagtctcgtgggcgaagccatgatgcaggacatcgagaaggaaacggtcgacatgaaccgcaactacgacaactcgcgcgacgagccctcggtgttgcccacccgcattccttccttcttggtcaacggcgccaccggtattgccgtgggtatggccaccaatgtgcccacacacaacctcggtgaagtgatcgatggctgtgtggcctatgtcgacaaccccgatatcgangtcgacggcctcatgcagcacatcaagggccccgatttcccgaccggagcctacatnttgggcaacgcaggcatccgcagtgcctacgaaaccgggcgcggtcgcgtcatgctgcgtgccaangccgaaattgaagccggaaccttgcacgacaagatcgtggtgcgcgccgtgccttacgggaccaacaccggcgacctggtgaaatccatcgcccaattggccaaagagggcaaggtcgagggcatcaccaatgtcaacgacgagtcggaccgcgaaggcatgcgcatcgtggtggacgtcaagcgcgggcaaaatgccaatgtggtgctcaacaagctctanaaactcacgggcctgcaaaccagcttcgccgtcaattgcattgcgctggtgcccattcccggcacgagtcccgccaagatgcgcccgcagttgctcaccctcaaggactgcatccgccacttcatcgaacaccgccacgatgtggtgattcgtcgcacgaagttcgacctgcgcaaggccctcgaacgtcagcacatcctgcgcgcactgatcatcgcctccgacaacatcgacgaggtggtggccatcatcaaatcgagccgcaacacccaggaggcgcaagagcgcttgatgcagcgctttgccctcgacgaaatncangccaaggccattgttgatatgcgtttggcgcagctcaccggcctgcaacaggagaaactccatgccgaatatgacgaactcgaacagcgcattgcctatttcaatcagatcctctcggatcccgaactttgcaaaaaggtgatcaaagacgagttgctcgaggtcaaagccgcctatggcgacgaacgcaaaacggaaatcctgcccgatctctcgaacttcaacgccgaggacttctattccgacgacgaagtggtgatcaccatcagccacctcggctacatcaagcgcaccccgctggccgaattccgcgcgcaaggacgcggcggagtcggagccaaaggcggatccacacgcgatcaggacttcatcgagtacatctatcatgccacgatgcacaacacgatgctgttcttcaccgccaaaggacgctgctactggttgcgtgtctacgaaatcgaggagggcac

SEQ ID NO: 1286 - DNA, 4000 bp, Escherichia coli
  misc_feature (84)..(85): n is a, c, g, or t
  misc_feature (120)..(120): n is a, c, g, or t
  misc_feature (147)..(147): n is a, c, g, or t
  misc_feature (169)..(169): n is a, c, g, or t
  misc_feature (214)..(214): n is a, c, g, or t
  misc_feature (216)..(216): n is a, c, g, or t
  misc_feature (236)..(236): n is a, c, g, or t
  misc_feature (799)..(799): n is a, c, g, or t
  misc_feature (1980)..(1980): n is a, c, g, or t
  misc_feature (2022)..(2022): n is a, c, g, or t
  misc_feature (2454)..(2454): n is a, c, g, or t
  misc_feature (2505)..(2505): n is a, c, g, or t
  misc_feature (2689)..(2689): n is a, c, g, or t
  misc_feature (2817)..(2817): n is a, c, g, or t
  misc_feature (3426)..(3426): n is a, c, g, or t
  misc_feature (3449)..(3449): n is a, c, g, or t
caggccgtcagcaaagagaatttccgcactgccgtattcaccgccgctgccatgtccggccgcagcgtgcgcatcctgcaccanntgacgcagcccgccgaccacccggtaagcatctancaccccgaaggcgaatacctgaaaggncttgtgctatacgtggaataancaggaaccggcttctgtacaggaaggacagaaaaagcccttcatntnctaaacattgttaatatacnaaagaaaacaagcaaaacattatgttttataacataaatccctttatctttgcaccgtgtttttcatggtattagatttaaggttaataaagattggctgtctgggatagatagccttcttttttttatacctcccgccttccctttttttgatgctttatacatcgccttttccgataatttgtctacatttgcgttttattaattagttcaacttcgaaagacacgttaatttatagaaagcattatgagcatcaagattcgcttaatcattatgaatttcctacagtttgccgtgtggggagcatacctcacatcaatgggcagttacctggtaaacgtaggcctgcacgagcacatcggtatgttttacgccatgcagggaatcgtatcgttgtttatgcctgccgttctcggcatcattgccgaccgctggataccggcacaaaagctgttaagcttcagtcacttcaccgcagccctgttcatggccgcagccggatactacggcatgacgaaaggtgcggaggtagatttcggtactctgttcacactttactcgntaagcgttgctttctatatgcctacattggcattgtcgaactccgtggcctacaccgcactcgacaaagccggactggataccatcaggacattccctcccatacgtattttcggcacaatcggattcatctgctccatgtgggtggtggacctgctcggactgcaaaataattacgggcagttctttgcctgcgccatcatcggagtagcgtatggcgtatatgcgctgaccctgccggaatgccccaccagcaagggcgacaatgccaaatcattggtagaggcactgggcttacgcgcctttacgctattcaagcagaagaaaatggctgttttcttcattttctccatgctgctgggcgtttccttgcagattaccaacggatttgccaatccctacatcagcagtttcggcagtattcccgaatatgccggcactttcggagtgcaacatgccaacatcctgatttcgctgtcgcaaatatccgaaacactctgcatcctgctgatacctttcttcctgaaacgcttcggcatcaagcaggtgatgctgattgccatgctggcatgggtattgcgcttcgggctcttcggcatgggcaatcccggaagcggcgtatggatgtttgtactttccatgattgtgtacggtgtggcattcgatttcttcaacatatccggttcgctgtttgttgacagagagaccgaccggggcatccgttccagcgcacagggactgttcgttatcatgacaaacggtttcggtgccactatcggcacactgggtgcacaggcggtagtgaatcactttgtagatttcaacagcaatgtcccgcagatagcgcaatggcaatcggcatggtacgtatttgcaatctacgcgctgaccgtagcagtggtgtttgccatcgtattcaagtacaaacaccatccggaagatttaaagtaactacagccgatgaacaaaaaaaagattgagctgcaagtattgaatatctcaaacagccaggcacaggccggcgcttatgccatggtgctgggcgagataaacggcatgcggcaactgccggttatcataggcagtgccgaggcacaatccatgatgattgaaatgagaggcatcgttcctccccggccgctgacgcatacgctgtttgcctcagttctcaaggtactgggngcaaccctgctgcgcgtgcttatttacaaagtggacaacggngttttctattcttacctctatatgaaaacggaagagaccatcctgcgcatcgacgcacgtaccagcgatgccgtggccctcgccttgcgcatggatgcccccattttcatatacgatgatattttagaagccgaatgcctgaaaacagagcacagcatcactcccacccaacagacggatgatgccgccgcagatgccgctacacagaaaaagaccctgaaacaattaaaggaagcccttcaaaacgccatagacgcagaagactacgaacgggctgcacaactaagggatattatcaaccagcataagaaaccataaacaatcatgcacgtattctacacccccgacatacaatcgcaagccgaactgcccgaagaagaagccgctcacgcagtccgcgtactgcggctgcaaacaggcgacgaggtaacnctgaccgacggcaaaggcaacttctaccgtgcggaaatcagtaccgccacnaccaagcgttgccttgtcaacatactcgaaaccatcccccaagcgcctttatggagcggacacctgcacattgcaatggctcccaccaagaatatggaccgcacggaatggtttgcagagaaagccaccgaaataggctttgacgaactgactttcctgaactgccgtttttccgaacgtaaantaatcaaaacggagcgcattgccaagatactggtatccgccatcaagcagtcgctgaaagcacgcctgccccgcctgaacggaatgaccgacttcaaccggttcatcagccagcctttcgaaggccgnaaattcatcgcgcattgttacgaaggagaaaaacctttattgaaagacgttgtccgtaaaggagaagacgcgctggtgcttatcggaccggaaggcgacttcagtgaagaagaggtgaaacaggccattgaaaacggattcgagcccatcagcctcggccgttcccgactgcgcactgaaacggcggcactcgtagcctgccacatattgaatctacaaaaccaataatacgatatgagaaagagtatttccttctatttgctgccggttttattaacagtgctatgcctgagctcatgcagcgaaaccgggcaaaaaacagaatacacgcatgtaatccccgccaatgccacagaagtggcggcactcgacctaaaaagcatcgtcgataaagccggattgaatacctcagacagccgggccaccttgcagaagttcctggggctgctccttgaaggcgggagcgccaacctgaaacaagaagcggaaactcttctgaaagaccctgccgaaagcgggatagactggaacgccccgctctacgtattcgaagcccctacgctgcacaacacggcaatcaccctgaaaattgccgatttaaagaagttngaagccatgctccggctgcttgnccaggaacagttgtgcaccgccccggtcgaggccggcggttaccggagcgttgaaataaaagacgcaggagtactgcttgcctacaacgacggcactctgctgggagtttacggcggcagtacggaacagttgaagaagctgcaacccgccatcaccgccctcatgcaacaacctgccgacaaaagcatccgcaccggcaaatacttcaccccgatgatgcagcaaaaaggagacatacgcctgctggcaactcccgatgccctccccatggacgttcgcggtgtactgacctggccgcacggcacgcaactgttgggttatgtcctgtttgaaaacggacgtatatacgctaccctgcaaaacgccgatttcaaaggaaataccaaagaaagcaaccagcctttccaccctcaaaattcgcgggagctgcaacaggccatgctgaacatgatgcacggacgagccttcaacatttcattgaccagcaacgaattgcttactttaagcaacctgcgggtgcttatggaatatgctccgaacgaaccggaag

SEQ ID NO: 1287 - DNA, 4000 bp, Escherichia coli
  misc_feature (353)..(354): n is a, c, g, or t
  misc_feature (356)..(356): n is a, c, g, or t
  misc_feature (358)..(359): n is a, c, g, or t
  misc_feature (361)..(361): n is a, c, g, or t
  misc_feature (363)..(364): n is a, c, g, or t
  misc_feature (366)..(373): n is a, c, g, or t
  misc_feature (376)..(376): n is a, c, g, or t
  misc_feature (378)..(379): n is a, c, g, or t
  misc_feature (382)..(387): n is a, c, g, or t
  misc_feature (392)..(394): n is a, c, g, or t
  misc_feature (398)..(398): n is a, c, g, or t
  misc_feature (400)..(401): n is a, c, g, or t
  misc_feature (403)..(403): n is a, c, g, or t
  misc_feature (405)..(406): n is a, c, g, or t
  misc_feature (409)..(409): n is a, c, g, or t
  misc_feature (412)..(413): n is a, c, g, or t
  misc_feature (415)..(417): n is a, c, g, or t
  misc_feature (419)..(421): n is a, c, g, or t
  misc_feature (424)..(425): n is a, c, g, or t
  misc_feature (427)..(427): n is a, c, g, or t
  misc_feature (432)..(432): n is a, c, g, or t
  misc_feature (441)..(441): n is a, c, g, or t
  misc_feature (448)..(448): n is a, c, g, or t
  misc_feature (452)..(453): n is a, c, g, or t
  misc_feature (456)..(460): n is a, c, g, or t
  misc_feature (462)..(464): n is a, c, g, or t
  misc_feature (466)..(484): n is a, c, g, or t
  misc_feature (486)..(490): n is a, c, g, or t
  misc_feature (493)..(494): n is a, c, g, or t
  misc_feature (496)..(497): n is a, c, g, or t
  misc_feature (499)..(500): n is a, c, g, or t
  misc_feature (502)..(509): n is a, c, g, or t
  misc_feature (511)..(512): n is a, c, g, or t
  misc_feature (514)..(518): n is a, c, g, or t
  misc_feature (520)..(538): n is a, c, g, or t
  misc_feature (540)..(543): n is a, c, g, or t
  misc_feature (546)..(551): n is a, c, g, or t
  misc_feature (553)..(554): n is a, c, g, or t
  misc_feature (556)..(558): n is a, c, g, or t
  misc_feature (560)..(566): n is a, c, g, or t
  misc_feature (568)..(568): n is a, c, g, or t
  misc_feature (570)..(579): n is a, c, g, or t
  misc_feature (581)..(594): n is a, c, g, or t
  misc_feature (596)..(600): n is a, c, g, or t
  misc_feature (602)..(602): n is a, c, g, or t
  misc_feature (605)..(605): n is a, c, g, or t
  misc_feature (608)..(608): n is a, c, g, or t
  misc_feature (610)..(612): n is a, c, g, or t
  misc_feature (616)..(616): n is a, c, g, or t
  misc_feature (618)..(620): n is a, c, g, or t
  misc_feature (622)..(622): n is a, c, g, or t
  misc_feature (626)..(631): n is a, c, g, or t
  misc_feature (633)..(633): n is a, c, g, or t
  misc_feature (635)..(635): n is a, c, g, or t
  misc_feature (637)..(640): n is a, c, g, or t
  misc_feature (642)..(643): n is a, c, g, or t
  misc_feature (650)..(650): n is a, c, g, or t
  misc_feature (652)..(652): n is a, c, g, or t
  misc_feature (658)..(658): n is a, c, g, or t
  misc_feature (815)..(815): n is a, c, g, or t
  misc_feature (1152)..(1152): n is a, c, g, or t
  misc_feature (1386)..(1386): n is a, c, g, or t
  misc_feature (1520)..(1520): n is a, c, g, or t
  misc_feature (1749)..(1749): n is a, c, g, or t
  misc_feature (1879)..(1879): n is a, c, g, or t
  misc_feature (1985)..(1985): n is a, c, g, or t
cgcgccttaaggtgcaaattgatgtgattgcatgcgaatcgaagcaccgatcggtcgccacagtgcgacagctggcgttcgcctcgcttctcgaagtggcctcttcgtgaatagtgccgcgatgcgcgatgcgaacgcggaccgcagacaggggcaaaccgccgttctttgagcggaacacttttccacacagagacgtcgtcttgagggtgcaagatgcgttgccgcatctgtacgggctgtttcgtgtacacgcgatgcgcgcggagaacgaagacgtggaccgcgcatcgctcgcgaaagatgctctgtggcgaataatacgcaagcgttttagattgcacgagcactgnngnanngngnngnnnnnnnncgncnnacnnnnnntttgnnntcgntnnancnnccncgnngnnntnnnagnncngcgcnctcgcgccnatctcgnttgnnacnnnnngnnncnnnnnnnnnnnnnnnnnnncnnnnntcnncnncnngnnnnnnnntnnannnnntnnnnnnnnnnnnnnnnnnntnnnnggnnnnnngnngnnntnnnnnnncngnnnnnnnnnncnnnnnnnnnnnnnngnnnnnanggncgngnnnaggncnnncngggnnnnnngngngnnnnanncgcgcgncnacgcgntcgagagccgttaaaccgccgcgcgtcgacggtgagcgacaccgaacgtcgtccgaagagagcgcgaacgcgaatggctaaagcaatcttctttgacctcgacgacacgctcgtgcgaacgagcgatgcggatcgagtcgcgtacgatgcggtgaancgtcgtctcgagcgtgaactcggcgcggcggtcgatgcggaggcgtgcgtggagcgttacaagcgcggtgtcaagaagacgccgtgggatacgcaaacggcggaagcgagcgaggagggcgcagagacgtcgagtgagtgcgtcgataccgacgaaatggcggctgccaagacgccgatgcacgtgtggtcttggagacgcgtgctgtgggagcgagcgctcgaggaatcggtttccctcggcgatgaggacgcgagacgcaaattggactattgcgcgtacgtagcgaacgatacctttcgcgacgttcgactgcgggagctgaagattccacgcnccgtgaaggatgagatcgaagctctcaagtgcgcgggcgtcatcgtgggcgtgattaccaacggcgatccagtgattcagagagagaaactcgcggcgtgcggcgcgtacaaggtcttcccaaatgagctcatactcgtcggcggtgaggaaatcctagccgggcgcgaagagaagcccggacgcggcgtattcgagcgcgctctcgcgctcgcgggcgcatcggccgaccgcnccgtctttatgggtgataattggaacgccgacatcgtcggcgcgtccgccgccggctacgcgggagcggtttggatcaaacgcgacgacgaaaaagacgacgagcgatccgttgtcgacgcgtggaacggtggnaaaccactcgaaaatttcttattcatccgagcgaattccgtcgtcgacgcgtgtcgcgacgcccaccttgaggagtgggtcaccgacggctgacgacgacgtttcgcaacaaccgccgcgcgtcaacgccaccaccaccatcacggcggctgcagcggcagtggcggaaaacatcaccctaggtaataatattcatgtaacaccaaccgatagcacccagaagtagtcntgatcaagtccatcgcatccatcctccagccagccagcgcgacgactcaccgctttccaaccaacagttaaaatccaatccatatccaaaaatggacccattgtcccaattcttgagttatgaacggtcnaatagagataaaatcgccgccaggctgtcgacgtcacgcggaatgcactacgcgaccgttcacccgttcgcgcgtcacacgcggtcgcggacgaaggcactctcgnagacaactcctcatcctcacttcagtcgccacgatgatgctcgcggcgagacacagcgggatgatgcgcgcgggaagcgcgatgcgtttgaacgacaagtataagatggatcaaaagattatgaaaaaggctgtcgtcggtcgtggacggtgcgcgacgacgagcgcgagcgcggtgaagcgaaacgaaaacgcttcgaccaagctcgcgatgggcgtcgcgtgcatgacgattgttggtgacgcgggcgcggcgcgggcgggcgcggtgagcgatcggttggcggcggcgttggacgccgcggatagcgcggcggagagcgcgtccgcggtgtttgaacgcgtcggtgcggtgatcgaccagggcgtggatttggcgcaacaagcggcgccggttgtgttgccggcggcagaacgcgcggtgaaggcggtgcagccgatcggtgaggcggtcgggtcctacgccggtcgggcgttggcgcccgtggcggacgaggcggtcaaggcggcggcgagcgccgggtcacaggctgtcggcgcggcagacagtgcgctcaaggcgcaaggcgtcgatgtgtccccggcgctcaaggtggtcggggacggcgccgaggccacggcgaaggttgcggtgccgttggcggaaaaggcggttgattacttgtcgcacgcgtctggcgccgaattggcgcaaaccggtgccgagctcttcgccgcctacctcttggttccggtgttcttcaaggtgctcgcggacattggtcgcggctaccgcggtgacttgcgcccgatcgaagcgtacgatatgcttctctctggcgacgccgtcatcgtcgacacgcgcggcgcggacgtcaccgtccaacttcccgggggcgccaaccgccgcgtgctcgtctgcgatctcggcgccgccggtggattttccggcgccgcctccggcaaggtggctgcgctcaagattgcctccctcaagggtgtcaagcgcaacaggcgcatcattcttctcgaccaaggcggcggcaacaagtcgctcgccaagtcgctctccaagcaaggtttcggcaaggtgtacgtcgtcaagggtggtttcaacgcctggcgcagcaccggtctcgccacttcggcgtaatcgcgacgcccatctcgagcgacccattccttttgcgccgcgaaacctgtcaataataaacacacgacaaagtcatgaaacacatccatttcccaaatcaaatgtgcgaaggaatgaaacaacgaagcgaagcgacgcggtttggacgccgaacgatcgcacccgcgtcacacgtcgccgcgcgacgcgccgcacccgatcgcgaagacggatttgaagacttgaaaacttttccaatcgaaactcccgccgcgcctcgacgaaacgggcggtctagacgcgatacgccgtcgacgaacgcgttgacgcgtcgacggttttcactcgatttgaaccgacaacggtttggttttggtttttatcgaggcggtgtttgaaaacgcgcgcgcgacggcgcgatggatgcggcgcgacacatcgttcgggcgtcagaggcgttggatgacgcgttatccgtgggaacgagcggacaggcgagacgggcggtggaggaggcgcgggaagcggtgagacaaatggcggcggcgtgcgtttcgtctggtttggttcgttcagaggaggaggaagaggaagggtctcgctcgaaaagggatgcggaaacgcgaagacttaagaaacggtgtgatgcgttggagcgggcgttggtgcgggaacgcgagaggagcgccgagttggagcgggaggttatctctggacgaagcgcgtggtttgaaagggcgagacgcgagttggacgcggcgctgagaagagggcaggcgaatgcgagcgcgaacgcgaacgcgagggatgacgaggtgaagagaatggagagagagattgcgaggttgacggcggtgaataatgcgttgcgtgaggaggcgctggcgctcgaagcagacgtggtg

SEQ ID NO: 1288 - DNA, 4000 bp, Escherichia coli
  misc_feature (1070)..(1070): n is a, c, g, or t
  misc_feature (3113)..(3113): n is a, c, g, or t
ttacaaaccaataagtttctgtaatgaccagagagtccattaataaagttatgggagtcaaaaccattttcaacaatttcattaaataataataaacatgatggaatgtcttctttgtctgcaaattcggtgaacttgaaaaagtaatcgtagtctagaatatgaaggttattaattacatcttgatatgtgatattattttcagaaaacgtaacgatttgatcaaatacggacaatgcatccctcaatgcaccatcggctttcatggcaatcatgtgtagagcttcgggttctgcttttacattttcttttttagcaatttctaccaaatggtcagtaatgtcttttactttgattcttgagaaatcaaaaatttgacatcttgatagtatggtaggtattattttatgtttttctgttgttgctaaaataaatatagcgtgctttggtggctcttcaagcgtctttaaaaacgcattgaatgcaaaattagatagctggtgaacctcatcaataatgtatactttaaagtcgcctagttgaggagcaattcgaacttgatctgtcagctcacgaatgtgatctacaccgttattggaggctccgtcaagctcatagatatttagagatgctcctgaattaaagctttcgcacgaatcacaattatcacatgcttcagtttcttcagtccgattaaaacaattgatggttttagctaatattcttgcggttgtcgttttccctacacctctggtgccacaaaacaaaaaagcttgtgccaaatgttcattcttgatggcattttttagggtgctcgtaattgatttttgtccaactactgtgtcaaaagtctgaggtcggtatttgcgtgctgaaacaataaaatcacccataaaacaaagatattgatttatatcaatcaaatgataaaatcattttatcttcttggataaatctcgactagggttccgttatttggtccccaaagctttaagttactaggtattataaatcgagagtcttctgtgttttcttcgattaagtctacattttcgtagagaacagttctnaattcaattttttctttagaaataaaaatgagattgaattgattcacggcttcagcgtctctcgtccatgatttttgatcatctgcagctctcaatggtgctccccagcatccttctccggcataaacgataccaatactgtcattccttataaatccttcgtctgcctgatctgaatcatcactaatgatgggccaagtgaccttacaagtatgagaatcattttcaagacataatcttacattattgaatttttcaaattcgggaacgaaatttttgtattgggtgttcatttcctttttcgcttttacatgagcacgtataggacgatggtattggggtatttgccagtaatagtccttgtgttcctttagtgtttttcttaaaaataatcgttgagagccaaatttccatatttcagagtttagcgaaattaaattcaataaatctccgccaaatgtagttgagtaaaatactttcgaatgaggaacatcgaacaaacgaagcatgactcgatttcccaattcgtgattccctctcgttaccaccaagggagttattcttccatctgaagagatactattttcccagtcaataaaccattccttccattgtctctctgtatctatacctgtaaagtctccgttaaaaagaacggcatgcgctttgagcttgcttaccatgcgattggcctttactctaacgattcttgtgtctctcgagtctccgcctgcgataaatgatatcttttcattggaatcatcacttactgtagtgaaataatagacttggtttttaccttcagaatcttcaatataaaagtaataacgtgtatttggatttaagtttttaagtcttacaacatgattaaacatgcctttgtaatgattttgatcactcaggacatatgttagcgtattttggttgggataagatttatccatgaagaaattcacgaattcaccactttgttgattccatatgatcgttgcctcataagaagcatttttattaaagaccacccgaacaaaattagttttacaactagagccgaaagcgtcgacacagaacaggacaataagtaaagctctcaataaagtattcacaaggtttaattatttttctttgaattcactaaaatcaatgtcagagttaatctgatttgatttaacagtgcctgagaaagtaacgtttccaaatgacataatttgagtttgtggaaaaaggattccattaacttccttgtagtcggagtattcaacagagttttctgcaggttctccaccttcaggagccgtgacaatacttaatgtattggccaaaagaaaatcatttttattaaaatattgaaactcttcattttcaccatcaatgattttaatcacataatattcgtcagatccttttggttcaatcccaatggcttcaacagtaatattgtttttagcataattaagctgaggaaacaaaccaaacgattttttcttttcctctacctcatcttttgtgaggtctttttttcctgtttgcatgttttgattaaatccttttttaccagtaaaatagcctgattggagtaccataccattcatttccattttcattgaggatgttttaggagacttgaacattttagttaaagtcaatgcaccaggcatttgtgccatactcaattcagtcacctccttgtaggttttgatgcttttaattttctttaagacctctttcatcgttgcagaaccagtcaccttcattaaataattatttattacttgattacctgttaaatcgcttgggcgcattctttcttttggattgccataagggtctaacagttcgatattgttatcaccatcaaagggaagtagcttgtcaataatctctgaattaccaacaacaacgatattacagttttcaaaaggaatgtgcttttgagcaacatccaaaaccatttctttactcataccattgagtttttgaagatacttctgatagtaatctttatctaaattgtacttgatgctgtttaaagcaaaccttgcnatagtcgaaggttgttcaagtgatcttgcaaatcttcctgaagaggaagcttttgtcatgctcaactctttatcactaaccatattggtagcaatgtttttaagttcatacataatttctgtaatggcagagtcagtaaccgcatttctgaaattaccgccagcagatagccatgacccattgtcagttaaagaaagtcttgaataacagccataagtataagctttgtcttctctcaggttttgcatcaatctatttccaaaacccccacctccaaggatattaaaaagaagcttcgtttctatttgatcagagctactcaaatccatgtcaacaggaaatgtaatataaatcacggattgtactgcgccaggtttgtccacaaaatagactttatttccacctgtatttctatttgtagatggatattttttcttataaggtttttttccttcccaagatccaaaatgcttattgaccaaattctctgcggattctctattaatatctcccacaattacaatataactttcttgaggtgtgaaagtgctttggtaatatgcaataaggtcgtcacgagaaatatttgctaatgaagcttctgtcatcacattactgtatggatgtccggcaaaattcacttttacgacagcattatttgccatttcatcagcactcgatttagttgctgaaaggtttgattctgcttgttttttaattcgatttacttcgtctttaggaaaacttgcgtttttcgccacatcttccataagggataatccagtagaaaagtgtttggtaagacagctcagtcgaattgaattttcgctggcacttaaatttgcaccaatgaaatctattttattgtcaagttcatcttttgttaa

SEQ ID NO: 1289 - DNA, 4000 bp, Escherichia coli
  misc_feature (344)..(344): n is a, c, g, or t
  misc_feature (582)..(582): n is a, c, g, or t
  misc_feature (602)..(602): n is a, c, g, or t
  misc_feature (1484)..(1484): n is a, c, g, or t
  misc_feature (1600)..(1600): n is a, c, g, or t
  misc_feature (1631)..(1631): n is a, c, g, or t
  misc_feature (1660)..(1660): n is a, c, g, or t
  misc_feature (1714)..(1714): n is a, c, g, or t
  misc_feature (1736)..(1736): n is a, c, g, or t
  misc_feature (1822)..(1822): n is a, c, g, or t
  misc_feature (1885)..(1885): n is a, c, g, or t
  misc_feature (1927)..(1927): n is a, c, g, or t
  misc_feature (1973)..(1973): n is a, c, g, or t
  misc_feature (2399)..(2399): n is a, c, g, or t
  misc_feature (2513)..(2513): n is a, c, g, or t
  misc_feature (2847)..(2847): n is a, c, g, or t
  misc_feature (2850)..(2850): n is a, c, g, or t
  misc_feature (2881)..(2881): n is a, c, g, or t
  misc_feature (2996)..(2996): n is a, c, g, or t
  misc_feature (3089)..(3089): n is a, c, g, or t
  misc_feature (3275)..(3275): n is a, c, g, or t
  misc_feature (3401)..(3401): n is a, c, g, or t
  misc_feature (3452)..(3452): n is a, c, g, or t
  misc_feature (3470)..(3470): n is a, c, g, or t
  misc_feature (3479)..(3479): n is a, c, g, or t
  misc_feature (3512)..(3512): n is a, c, g, or t
  misc_feature (3614)..(3614): n is a, c, g, or t
  misc_feature (3650)..(3650): n is a, c, g, or t
  misc_feature (3662)..(3662): n is a, c, g, or t
  misc_feature (3956)..(3956): n is a, c, g, or t
  misc_feature (3974)..(3974): n is a, c, g, or t
ttatgaagacagatgtgcgtattgtagccgcaacgaatgtcaatatgcacaatgctgtcagtgaaggtaagttcagagaagacttgttttatcgtctaaatactatcccaatacagattcctcccctacgagataggggcgaagatattgttcttttgttccgactttttgccatgcagatggctgaaaagtatcagattccaaagataacactaacagacgaggccaagaaattactcatgcaatacaagtggccgggtaatattaggcagttaaagaacattactgagcagatgtctatcctcagtaaacaacgcgaaatcgatgcaaacacgctgttacantttatccctcacgatgaagaaagcacgcaattagctacgatttcaaagcccggtgagcactcttatgaaacagaacgcgagatactatataagatattgtatgaacttcgcggtaatgtcaacgacttaaaacgcgacatgaatttgctgaaaaagcagataaatgacaacaatatgattgccaacgtgccgagtttccaagggaatgccatcgtccctgcacagagttcatcactcnttcgcaatgaaagcgctcanccttatggcattatcagcaccccgacacaagaggttcagcccgacacttacgatgccgtcgccgaagaaatcaacaagcctgagtgccttaatcttaatgatttaggacgccaaatggtagtaaaagctttggaacgcaatggaggaaaccgcaaaaaggcagcgcaagagttaggtatttcagaccgaacgctctaccgacgcatcaaacaatacggactcgattaaggcttatggccttactaaagctcacgaaaatgaagaaactaaaatacatcttagcgctttgtttgcttgtttttatggcctcatgtgcctttaaaggctacaagtttaacggcgcaagtattgattatagcaaaacaaagacgatacaaattgccgagtttcccgttcgctccagctatgtttggggacctatggggccgttattcaacaaccggttaaaagaccaatttgccgaccatacgaagctaatccaagtgaaaaggaacggagatttgaagctggaaggggagataacacaatacactcagcgtaataagtcggtgacaagtgacggaagatctgcacaaacagaacttgcaatgactgttaatgtgaggtttacgaacacgaagaatcacgcagaagactttgaaaaacaattcacatcaactgccagttacgagacaacaaagagcttaaatgccgttcaagaagaactcgttacacagatgacaaaagacttagtggaccagattttcaatgcaacagtagcaaattggtaagtaaatatggatattaagcgccttattctacatcccgaaactatggaccgagagaccctttacgatctccgcagcttcattgcgctccatccttactgccaaacagcaagantgttaatgctgcaaaacctctatattctacatgattcggcgtttgatgaagagttgcgtaaggccgcaatctgcatcacagaccgtcgcattctctttgacatgattgaggcagcncactataaagtgcacgcaggaaagtccactntgacgcagaaaaagcttcatgaaacaacntcagagaatggagaccgcactacaaaacttatcgatacgttcctcgattctatncccgaagacaccgaagataagncaaatgacaagaccaagcgccccactccagccgatgctaccgtggactatgtggcctacttgcttaatcttgaagaggaagaagancaggaacaacatcgtcataaggcacaagaccgcacgtcaacacttattgataatttcatcgangatggcggattcaacctcagtaccgaagagaacacagaggangaactgtcaaaatactacacacccaattatcgtttagaagacctgncgcatggagatgtaacgcaaaatgaagctcctcaacagcctattgataatgaagaagtagacgatgtagatgaaaattatttcacagaaacccttgctcgcatctacattaaacagagaagatatgagaaggctttggaaattattaagcgtttaaatttgaataatccaaaaaaaaatgcttactttgcagaccaaatgcgtttcttagagaaattgatcataaataataaaaacaaaaaataaagcaatgatttacacattattagtcgtattgatcgtacttgcagccattcttatggtctttgttgtattgattcaagagtcaaaaggtggcggtttggcatcaaacttctcatcttccaatgccatcatgggcgtgaggaagactaccaatatgattgaaaaactaacctggggactcgcnatttcaatggttgttcttagcgttctttgtgctcgtgtggcaccaagtgcaccaacagatcaaagtgttatggagaagaatgctactgaaacacagactactaaccccataaanacacagggttttggggcaagtcagcaagtgcctcaagctcctcaatcacctgctaaataaaaaattagtaaaaaatataaggaaaagtttggtgtttccaaacttttcttatacctttgcacccgctaaacaacaatagcaaacgcattaaatggtggatgtagttcagttggttagagcgtcagattgtggttctgaatgtcgtgggttcgagtcccaccctccacccttaaacgggaattctctcacgagagttcccgtttttcgtgttataacgaatgaggtctggagctgcatccctatgaatcaagtccaaacaacgctgttcaagcgngantcataagggtgaaactccagacctctaaggncaaaacaagcccgaaggcttatcgctttgctttcaaaatcaagcgaagactctgcttataattcatgtaactccacatccaattcaggaaaacaatcgtcttattctttactccnaagattgaacgtagatgcactataagccataaaagccatgcaaagaagccaccaaacttaagctttcctatttcaactacagccttcttgcgnccgattgtagccatagtaccgagattatgatagctaaatggctgctcagtttcgcctttttcttgcctgattaggttctttgcaagtgtctttgcctgctgaatggcaacctgagccaactgaggatggccataaggataagcctcatcaccctctacaatgcattgatcgccgatggcatatacntctttcaagcccttaactcgattgaaacgatccactaaaatgcggccagcgtgaccgatactttcagtcggaataccatcgatattgttggctttgataccactaacccatattactgtctctgcngaaatacgctgaccatctttcaatactaattctttgtcaacataatctgtnaccatgcagttggtcatnacctccacnccaagttctttcaacgccttttcggcctcacgngatgaacgttctgacattgcacctaataggcgcggagtggcattaatgaggtagatgtgcatgcaagatgtatctaaatcgggataatcgcgaggcagaatngtttgtttcatctctgccaacaccccagcaatctcnacacctgagggnccaccgcctacgatagcaatgttcattaaggcttgttttcgcgcctcgttatcctcagtttccgcgcgctccagattctgaagaatcgtatttctcagtcgcattgactcactaaccgacttcatcggcagtgcagaagcctcgatattcttgtttccaaagaagttggttgtcgcaccagctgccagcaccaagtcgtcataatgaatcgttccaatggatgttttgatagctttctcttcagtatctatatgctgaacttcggccattctgaagaagaagttcttccaaccntggaataatcgacgaaanggaaaagagatattactcggttcaag

SEQ ID NO: 1290 - DNA, 4000 bp, Escherichia coli
  misc_feature (64)..(64): n is a, c, g, or t
  misc_feature (667)..(667): n is a, c, g, or t
  misc_feature (1139)..(1139): n is a, c, g, or t
  misc_feature (1208)..(1208): n is a, c, g, or t
  misc_feature (1454)..(1454): n is a, c, g, or t
  misc_feature (1580)..(1580): n is a, c, g, or t
  misc_feature (1951)..(1951): n is a, c, g, or t
  misc_feature (1953)..(1953): n is a, c, g, or t
  misc_feature (1958)..(1958): n is a, c, g, or t
  misc_feature (1965)..(1965): n is a, c, g, or t
  misc_feature (1967)..(1967): n is a, c, g, or t
  misc_feature (1977)..(1977): n is a, c, g, or t
  misc_feature (1988)..(1988): n is a, c, g, or t
  misc_feature (1991)..(1991): n is a, c, g, or t
  misc_feature (2065)..(2065): n is a, c, g, or t
  misc_feature (2067)..(2067): n is a, c, g, or t
  misc_feature (2587)..(2587): n is a, c, g, or t
  misc_feature (2643)..(2643): n is a, c, g, or t
  misc_feature (2679)..(2679): n is a, c, g, or t
  misc_feature (2814)..(2814): n is a, c, g, or t
  misc_feature (2858)..(2858): n is a, c, g, or t
  misc_feature (2961)..(2961): n is a, c, g, or t
  misc_feature (3013)..(3013): n is a, c, g, or t
  misc_feature (3066)..(3066): n is a, c, g, or t
  misc_feature (3378)..(3378): n is a, c, g, or t
gtgggttgccggggtaaaccccacggtctccttgtcgtcggagaggttcatgaccacgcatcgncgcgcctccgtgcgaataatcgcctcgcgctgggcgtccagcagcaggtgcggcagaaccgaggtgcgccacgagccggggccgagcacaatccagtcggattcctcaatagcggagagcgcctccgggcagggacgcgcatgctccggggacaggccaatatcgtgcacgcgctcctccttggagaggttcacctgccccacgaccttgacccgctcgattccgccaccggagtgctcgcgcaacacggtaccgtaaatcaccatggggtccagcgccatggggagcacgcggccgcgggcgttcagcagggcgcccgcccagtccaggccggccacagggtcgtccagcagctgccagagcgtcgcgatgagcaggttgccaagcgcgtgatagtccaggggaaactccccctcgtagccttcgggcgcggcgaaacggtgctgcatgacgtcgcgccaggtgcggccccaatcggtgtcgtcgcagagcgccgagagcgccatgcgcaaatctccgggaggaagaatacccatctcctcacgcaggcgacccgaggagccgccgtcgtccgccacggttaccacggccgtcaggtcgggngtcacgtggcgcagagccgaaagcgatccgtacaggccgtgcccgccgcccatggccgtcaccttcggtgaacggtgcgtggtcttcagcagacgcagagcctgggtcgggagcgcgggcaggcggggaatcccctgagtgtcataactggttgaatgagtgttcatagtctgtatctcacatacccggaagcggccggccctccgctcggggtgcgaagggcgaccggtagctgattatgggttgccggtcagtactgcggggctattcgcggcccttgtcgcggtgctgcacgttcacgttgacatcggggaaggcggagaggcggcgggccagctcctcggtcacggccaccgagcggtgcttaccaccggtgcaaccaatcgcgatggtggcgtagtacttaccctcgcggcggtagccctccagcacgggacgcagggcggccaggtagttgctgatgaactcctcngtgccggcgtgctccagcacgtagtcgcgcacgggggcgtcctggccggtcagcgggcgcagttcgggnacccagtgcgggttcggaataaagcgcatgtcggccatgtagttggcgtccgaaggcgcaccgtacttgaagccgaagctcatgacggtcaggttcagcttcttgtccgcaccctcggcgaacatctcgcgcacggtgcgggccagctcgtgaacgttcatgccggtcgtatcaatcgtgcggtccgaggccaggcgcaggccctcgaagagggtgcgctcggcgcggatgccgtcgagcacgcgnccctcaccctgcagcgggtgcgggcggcgctgagcctcgtaacgggcgatgatggtctcgtccttggcatccaggaagagcatggagaagtcaatatcggacttgcgcaacgtctcgatggcggcnggcaaatcagagaacagcgcgcgggcgcgcacgtcaataccgagagccaccttcggcacgcgagcgccgtcgcgggtcaccagctcggccagggacccgagcatctgcggagggatgttatcgataacgtaccagccctcgtcctcgagcacgttagcgacggtgctacggcccgcaccggagataccggtaatcaccagaatctgcgggcgctcatcgctctggacggaatgtgcggcggcatggtgctgattgtctgccatggtgtctcttcccctttgacgcgaactactctataagccatgatacaagaccttgattagacggtccgggcccgtgctcacatatttcaggacatgacaaaaaagagncnccccncccccancncccccgagcnttaacgcgaancgncccgccgcaaagaatgcgacgggtcgaatgttccgctcgtgaaaagcgccgtaaaaatgttatgaaaacgttgngnagagcgccacgaatctgctcggatgcgtctgccgcgggaacggccgcgggctaggagcagtccgggccgaagaagccgctcacgtactccagcaggcgcaccgaaacgtccttcttcgagccgatcagcaccggctcctcatcggtcagcgcagagagcagggtaatcgtgttctcgtccgtaccgaagcccaggttcacgcccaccgtgttcacggccaggaagtcggcgcccttgcgctgcatcttctcgcggcccagctccagcggggtcttttctgccgagccggtctccgcggcgaaacccacaataatctgcgggcccatgcaggtctgaccggcctcccgagcctgagcgcgacgcaccacaacctcacgcaggatatcggggttgcgcaccaggttgatgaccggcgcatcctcggaatcggcgctcttcttaatcttgaactcggcgaactcggcgggcctgaaatcggccaccgccgcggacatcaccagaacgtccgcggatgcgctcncctccaggactacctcgcgcagctccagggcgcgctcaacgcgggtcacccgcacnccctcgggggcgggcacctcgatgttcgcggcgatnaggtgcacgtgcgcgcccaggtcgcgggccgcctcggccagggccacgccctgcttgccggtcgagcggttacccaggtagcgcacggggtcgaggggctcgcgggtgccgccggcggtaatcaccacggtgcgnccggccagcggaccggatgcggcgggcacctcccgggccgcgcnctcgacggcctcggggccgccatgaccgtcgatgctcaccgaccccagggtcgccaggcgtgcggcggccgcgcgctcctgctccgtatcggcgtacaggggntgggtcggggcgtagccgggcgtgtacaccgggtgcgtggaacgcttcgggnaccgcgcaatgacctcctgcgccaggcggaagatgtcctcgggttcgggcatncggccggggccggagtccgggcccgtcagacggccaatcgccggctcaatcacgtggtagccccacgaacgcagggtctgcacgttcgcgcgggtcgccgggttctcccacatctgcgtgtgcatggccggggccagaatcacgggcgcgtgcgtggtcagcacggtcgccgacaacaaatcgtccgcgcgtccggcggccaggcgggccagcaggtcggcggtggccggggcaatcaccacggcgtcggcctgctcggcctggcgcacgtggttcacctcgggcacgcgctcgaacacgtcggtcgaaacngggttgccgctcagcgcctccagggtgggtacccccacgaacttggtcgcgttcggggtgggcatggcgataacctcgtcaccattcttcgcaaaaaggcgaaggagcatcgccgccttgtacgcggcgatgccccctcccataccaacgataatgcgcatggtacgtcagataatccttaaactagccggtcggctcgttactcggcgtggtcgtcgaggatgacctcttcaatcgcgatgacctcgtcgctaccggcgggaatgtactcctcctcgatagcgtcggggtactcggtgacgctgaagtcaatcagagcgttcggctcttcagcgatcgggtaaccgtcctcgttgaacttggtgccgggcttgtgctcagcctcaacgcggtcggtaatgatttcgcgcatagcaaccgacagggacttctcagtcgagtcagcgtcgaccagcgggccgatgtgagggttcttggaatcctgcaggttagcgtagtacgcgttgatctggcgggcgcggcgggcaccgaaaatcaccaggccgtacttggactctgccttctcgatcagcgagtctgcgctggggcgcacgatgccctcgggagtaacgccgtcaacgaa

SEQ ID NO: 1291 - DNA, 4000 bp, Escherichia coli
  misc_feature (1)..(4): n is a, c, g, or t
  misc_feature (6)..(6): n is a, c, g, or t
  misc_feature (10)..(28): n is a, c, g, or t
  misc_feature (30)..(30): n is a, c, g, or t
  misc_feature (34)..(39): n is a, c, g, or t
  misc_feature (43)..(47): n is a, c, g, or t
  misc_feature (50)..(51): n is a, c, g, or t
  misc_feature (53)..(53): n is a, c, g, or t
  misc_feature (56)..(59): n is a, c, g, or t
  misc_feature (62)..(66): n is a, c, g, or t
  misc_feature (68)..(69): n is a, c, g, or t
  misc_feature (72)..(73): n is a, c, g, or t
  misc_feature (76)..(76): n is a, c, g, or t
  misc_feature (79)..(80): n is a, c, g, or t
  misc_feature (83)..(87): n is a, c, g, or t
  misc_feature (90)..(90): n is a, c, g, or t
  misc_feature (92)..(99): n is a, c, g, or t
  misc_feature (102)..(110): n is a, c, g, or t
  misc_feature (113)..(114): n is a, c, g, or t
  misc_feature (116)..(123): n is a, c, g, or t
  misc_feature (126)..(128): n is a, c, g, or t
  misc_feature (132)..(132): n is a, c, g, or t
  misc_feature (134)..(145): n is a, c, g, or t
  misc_feature (149)..(150): n is a, c, g, or t
  misc_feature (157)..(157): n is a, c, g, or t
  misc_feature (160)..(163): n is a, c, g, or t
  misc_feature (165)..(169): n is a, c, g, or t
  misc_feature (173)..(175): n is a, c, g, or t
  misc_feature (178)..(179): n is a, c, g, or t
  misc_feature (185)..(190): n is a, c, g, or t
  misc_feature (194)..(195): n is a, c, g, or t
  misc_feature (201)..(207): n is a, c, g, or t
  misc_feature (210)..(211): n is a, c, g, or t
  misc_feature (216)..(226): n is a, c, g, or t
  misc_feature (229)..(231): n is a, c, g, or t
  misc_feature (234)..(235): n is a, c, g, or t
  misc_feature (242)..(244): n is a, c, g, or t
  misc_feature (247)..(247): n is a, c, g, or t
  misc_feature (252)..(255): n is a, c, g, or t
  misc_feature (259)..(260): n is a, c, g, or t
  misc_feature (263)..(263): n is a, c, g, or t
  misc_feature (266)..(266): n is a, c, g, or t
  misc_feature (270)..(270): n is a, c, g, or t
  misc_feature (277)..(278): n is a, c, g, or t
  misc_feature (284)..(285): n is a, c, g, or t
  misc_feature (288)..(288): n is a, c, g, or t
  misc_feature (294)..(302): n is a, c, g, or t
  misc_feature (304)..(305): n is a, c, g, or t
  misc_feature (307)..(320): n is a, c, g, or t
  misc_feature (324)..(326): n is a, c, g, or t
  misc_feature (335)..(335): n is a, c, g, or t
  misc_feature (338)..(345): n is a, c, g, or t
  misc_feature (348)..(350): n is a, c, g, or t
  misc_feature (354)..(365): n is a, c, g, or t
  misc_feature (368)..(379): n is a, c, g, or t
  misc_feature (382)..(382): n is a, c, g, or t
  misc_feature (384)..(388): n is a, c, g, or t
  misc_feature (390)..(392): n is a, c, g, or t
  misc_feature (394)..(410): n is a, c, g, or t
  misc_feature (415)..(426): n is a, c, g, or t
  misc_feature (428)..(437): n is a, c, g, or t
  misc_feature (442)..(444): n is a, c, g, or t
  misc_feature (448)..(449): n is a, c, g, or t
  misc_feature (453)..(462): n is a, c, g, or t
  misc_feature (465)..(481): n is a, c, g, or t
  misc_feature (485)..(489): n is a, c, g, or t
  misc_feature (491)..(493): n is a, c, g, or t
  misc_feature (497)..(518): n is a, c, g, or t
  misc_feature (520)..(555): n is a, c, g, or t
  misc_feature (557)..(558): n is a, c, g, or t
  misc_feature (562)..(562): n is a, c, g, or t
  misc_feature (564)..(572): n is a, c, g, or t
  misc_feature (574)..(576): n is a, c, g, or t
  misc_feature (578)..(585): n is a, c, g, or t
  misc_feature (587)..(588): n is a, c, g, or t
  misc_feature (592)..(596): n is a, c, g, or t
  misc_feature (600)..(602): n is a, c, g, or t
  misc_feature (607)..(608): n is a, c, g, or t
  misc_feature (613)..(617): n is a, c, g, or t
  misc_feature (619)..(619): n is a, c, g, or t
  misc_feature (623)..(636): n is a, c, g, or t
  misc_feature (638)..(641): n is a, c, g, or t
  misc_feature (643)..(648): n is a, c, g, or t
  misc_feature (650)..(669): n is a, c, g, or t
  misc_feature (672)..(675): n is a, c, g, or t
  misc_feature (678)..(683): n is a, c, g, or t
  misc_feature (686)..(690): n is a, c, g, or t
  misc_feature (692)..(694): n is a, c, g, or t
  misc_feature (696)..(698): n is a, c, g, or t
  misc_feature (700)..(701): n is a, c, g, or t
  misc_feature (704)..(714): n is a, c, g, or t
  misc_feature (718)..(723): n is a, c, g, or t
  misc_feature (729)..(731): n is a, c, g, or t
  misc_feature (736)..(737): n is a, c, g, or t
  misc_feature (740)..(752): n is a, c, g, or t
  misc_feature (754)..(760): n is a, c, g, or t
  misc_feature (762)..(769): n is a, c, g, or t
  misc_feature (772)..(772): n is a, c, g, or t
  misc_feature (775)..(778): n is a, c, g, or t
  misc_feature (781)..(785): n is a, c, g, or t
  misc_feature (790)..(790): n is a, c, g, or t
  misc_feature (792)..(795): n is a, c, g, or t
  misc_feature (798)..(798): n is a, c, g, or t
  misc_feature (800)..(800): n is a, c, g, or t
  misc_feature (805)..(808): n is a, c, g, or t
  misc_feature (810)..(811): n is a, c, g, or t
  misc_feature (814)..(814): n is a, c, g, or t
  misc_feature (816)..(817): n is a, c, g, or t
  misc_feature (820)..(821): n is a, c, g, or t
  misc_feature (824)..(824): n is a, c, g, or t
  misc_feature (827)..(828): n is a, c, g, or t
  misc_feature (832)..(833): n is a, c, g, or t
  misc_feature (835)..(838): n is a, c, g, or t
  misc_feature (840)..(840): n is a, c, g, or t
  misc_feature (842)..(842): n is a, c, g, or t
  misc_feature (844)..(845): n is a, c, g, or t
  misc_feature (847)..(862): n is a, c, g, or t
  misc_feature (864)..(865): n is a, c, g, or t
  misc_feature (867)..(870): n is a, c, g, or t
  misc_feature (872)..(872): n is a, c, g, or t
  misc_feature (876)..(878): n is a, c, g, or t
  misc_feature (880)..(890): n is a, c, g, or t
  misc_feature (892)..(895): n is a, c, g, or t
  misc_feature (897)..(905): n is a, c, g, or t
  misc_feature (907)..(911): n is a, c, g, or t
  misc_feature (914)..(929): n is a, c, g, or t
  misc_feature (931)..(931): n is a, c, g, or t
  misc_feature (934)..(934): n is a, c, g, or t
  misc_feature (936)..(936): n is a, c, g, or t
  misc_feature (938)..(938): n is a, c, g, or t
  misc_feature (941)..(944): n is a, c, g, or t
  misc_feature (946)..(946): n is a, c, g, or t
  misc_feature (948)..(948): n is a, c, g, or t
  misc_feature (951)..(951): n is a, c, g, or t
  misc_feature (953)..(960): n is a, c, g, or t
  misc_feature (963)..(963): n is a, c, g, or t
  misc_feature (965)..(967): n is a, c, g, or t
  misc_feature (971)..(971): n is a, c, g, or t
  misc_feature (973)..(977): n is a, c, g, or t
  misc_feature (979)..(979): n is a, c, g, or t
  misc_feature (983)..(985): n is a, c, g, or t
  misc_feature (988)..(989): n is a, c, g, or t
  misc_feature (991)..(998): n is a, c, g, or t
  misc_feature (1003)..(1003): n is a, c, g, or t
  misc_feature (1006)..(1019): n is a, c, g, or t
  misc_feature (1026)..(1026): n is a, c, g, or t
  misc_feature (1029)..(1029): n is a, c, g, or t
  misc_feature (1031)..(1033): n is a, c, g, or t
  misc_feature (1036)..(1043): n is a, c, g, or t
  misc_feature (1045)..(1055): n is a, c, g, or t
  misc_feature (1058)..(1058): n is a, c, g, or t
  misc_feature (1063)..(1064): n is a, c, g, or t
  misc_feature (1067)..(1067): n is a, c, g, or t
  misc_feature (1073)..(1073): n is a, c, g, or t
  misc_feature (1087)..(1088): n is a, c, g, or t
  misc_feature (1092)..(1092): n is a, c, g, or t
  misc_feature (1097)..(1097): n is a, c, g, or t
  misc_feature (1103)..(1103): n is a, c, g, or t
  misc_feature (1107)..(1116): n is a, c, g, or t
  misc_feature (1122)..(1123): n is a, c, g, or t
  misc_feature (1127)..(1139): n is a, c, g, or t
  misc_feature (1142)..(1142): n is a, c, g, or t
  misc_feature (1145)..(1157): n is a, c, g, or t
  misc_feature (1162)..(1163): n is a, c, g, or t
  misc_feature (1166)..(1166): n is a, c, g, or t
  misc_feature (1174)..(1176): n is a, c, g, or t
  misc_feature (1180)..(1180): n is a, c, g, or t
  misc_feature (1184)..(1197): n is a, c, g, or t
  misc_feature (1201)..(1201): n is a, c, g, or t
  misc_feature (1204)..(1206): n is a, c, g, or t
  misc_feature (1209)..(1209): n is a, c, g, or t
  misc_feature (1212)..(1215): n is a, c, g, or t
  misc_feature (1218)..(1221): n is a, c, g, or t
  misc_feature (1223)..(1225): n is a, c, g, or t
  misc_feature (1227)..(1227): n is a, c, g, or t
  misc_feature (1229)..(1231): n is a, c, g, or t
  misc_feature (1234)..(1234): n is a, c, g, or t
  misc_feature (1236)..(1236): n is a, c, g, or t
  misc_feature (1239)..(1239): n is a, c, g, or t
  misc_feature (1241)..(1242): n is a, c, g, or t
  misc_feature (1245)..(1248): n is a, c, g, or t
  misc_feature (1250)..(1252): n is a, c, g, or t
  misc_feature (1256)..(1260): n is a, c, g, or t
  misc_feature (1262)..(1262): n is a, c, g, or t
  misc_feature (1264)..(1265): n is a, c, g, or t
  misc_feature (1269)..(1270): n is a, c, g, or t
  misc_feature (1274)..(1274): n is a, c, g, or t
  misc_feature (1276)..(1276): n is a, c, g, or t
  misc_feature (1278)..(1278): n is a, c, g, or t
  misc_feature (1281)..(1283): n is a, c, g, or t
  misc_feature (1287)..(1289): n is a, c, g, or t
  misc_feature (1293)..(1293): n is a, c, g, or t
  misc_feature (1295)..(1295): n is a, c, g, or t
  misc_feature (1299)..(1299): n is a, c, g, or t
  misc_feature (1307)..(1307): n is a, c, g, or t
  misc_feature (1311)..(1311): n is a, c, g, or t
  misc_feature (1314)..(1316): n is a, c, g, or t
  misc_feature (1319)..(1319): n is a, c, g, or t
  misc_feature (1333)..(1338): n is a, c, g, or t
  misc_feature (1342)..(1351): n is a, c, g, or t
  misc_feature (1353)..(1354): n is a, c, g, or t
  misc_feature (1356)..(1357): n is a, c, g, or t
  misc_feature (1359)..(1361): n is a, c, g, or t
  misc_feature (1363)..(1364): n is a, c, g, or t
  misc_feature (1366)..(1366): n is a, c, g, or t
  misc_feature (1369)..(1369): n is a, c, g, or t
  misc_feature (1371)..(1371): n is a, c, g, or t
  misc_feature (1373)..(1378): n is a, c, g, or t
  misc_feature (1380)..(1380): n is a, c, g, or t
  misc_feature (1382)..(1382): n is a, c, g, or t
  misc_feature (1384)..(1384): n is a, c, g, or t
  misc_feature (1386)..(1389): n is a, c, g, or t
  misc_feature (1391)..(1391): n is a, c, g, or t
  misc_feature (1393)..(1393): n is a, c, g, or t
  misc_feature (1395)..(1396): n is a, c, g, or t
  misc_feature (1398)..(1401): n is a, c, g, or t
  misc_feature (1404)..(1405): n is a, c, g, or t
  misc_feature (1409)..(1409): n is a, c, g, or t
  misc_feature (1411)..(1412): n is a, c, g, or t
  misc_feature (1414)..(1415): n is a, c, g, or t
  misc_feature (1417)..(1417): n is a, c, g, or t
  misc_feature (1420)..(1420): n is a, c, g, or t
  misc_feature (1422)..(1422): n is a, c, g, or t
  misc_feature (1424)..(1424): n is a, c, g, or t
  misc_feature (1426)..(1426): n is a, c, g, or t
  misc_feature (1428)..(1428): n is a, c, g, or t
  misc_feature (1433)..(1434): n is a, c, g, or t
  misc_feature (1439)..(1440): n is a, c, g, or t
  misc_feature (1442)..(1444): n is a, c, g, or t
  misc_feature (1449)..(1453): n is a, c, g, or t
  misc_feature (1456)..(1456): n is a, c, g, or t
  misc_feature (1458)..(1459): n is a, c, g, or t
  misc_feature (1464)..(1465): n is a, c, g, or t
  misc_feature (1468)..(1468): n is a, c, g, or t
  misc_feature (1471)..(1471): n is a, c, g, or t
  misc_feature (1473)..(1473): n is a, c, g, or t
  misc_feature (1476)..(1476): n is a, c, g, or t
  misc_feature (1478)..(1479): n is a, c, g, or t
  misc_feature (1481)..(1482): n is a, c, g, or t
  misc_feature (1490)..(1490): n is a, c, g, or t
  misc_feature (1495)..(1496): n is a, c, g, or t
  misc_feature (1498)..(1498): n is a, c, g, or t
  misc_feature (1502)..(1502): n is a, c, g, or t
  misc_feature (1504)..(1504): n is a, c, g, or t
  misc_feature (1506)..(1507): n is a, c, g, or t
  misc_feature (1510)..(1510): n is a, c, g, or t
  misc_feature (1512)..(1512): n is a, c, g, or t
  misc_feature (1515)..(1515): n is a, c, g, or t
  misc_feature (1519)..(1520): n is a, c, g, or t
  misc_feature (1522)..(1523): n is a, c, g, or t
  misc_feature (1525)..(1528): n is a, c, g, or t
  misc_feature (1530)..(1530): n is a, c, g, or t
  misc_feature (1532)..(1532): n is a, c, g, or t
  misc_feature (1534)..(1534): n is a, c, g, or t
  misc_feature (1541)..(1542): n is a, c, g, or t
  misc_feature (1544)..(1547): n is a, c, g, or t
  misc_feature (1550)..(1550): n is a, c, g, or t
  misc_feature (1552)..(1552): n is a, c, g, or t
  misc_feature (1554)..(1555): n is a, c, g, or t
  misc_feature (1557)..(1557): n is a, c, g, or t
  misc_feature (1560)..(1560): n is a, c, g, or t
  misc_feature (1564)..(1565): n is a, c, g, or t
  misc_feature (1567)..(1567): n is a, c, g, or t
  misc_feature (1574)..(1578): n is a, c, g, or t
  misc_feature (1580)..(1580): n is a, c, g, or t
  misc_feature (1582)..(1583): n is a, c, g, or t
  misc_feature (1587)..(1587): n is a, c, g, or t
  misc_feature (1589)..(1589): n is a, c, g, or t
  misc_feature (1592)..(1598): n is a, c, g, or t
  misc_feature (1601)..(1604): n is a, c, g, or t
  misc_feature (1606)..(1606): n is a, c, g, or t
  misc_feature (1608)..(1608): n is a, c, g, or t
  misc_feature (1612)..(1612): n is a, c, g, or t
  misc_feature (1615)..(1615): n is a, c, g, or t
  misc_feature (1619)..(1619): n is a, c, g, or t
  misc_feature (1621)..(1622): n is a, c, g, or t
  misc_feature (1624)..(1624): n is a, c, g, or t
  misc_feature (1626)..(1627): n is a, c, g, or t
  misc_feature (1630)..(1630): n is a, c, g, or t
  misc_feature (1632)..(1632): n is a, c, g, or t
  misc_feature (1634)..(1634): n is a, c, g, or t
  misc_feature (1636)..(1637): n is a, c, g, or t
  misc_feature (1639)..(1639): n is a, c, g, or t
  misc_feature (1641)..(1642): n is a, c, g, or t
  misc_feature (1647)..(1647): n is a, c, g, or t
  misc_feature (1649)..(1649): n is a, c, g, or t
  misc_feature (1654)..(1657): n is a, c, g, or t
  misc_feature (1659)..(1665): n is a, c, g, or t
  misc_feature (1668)..(1669): n is a, c, g, or t
  misc_feature (1671)..(1671): n is a, c, g, or t
  misc_feature (1673)..(1673): n is a, c, g, or t
  misc_feature (1675)..(1675): n is a, c, g, or t
  misc_feature (1681)..(1684): n is a, c, g, or t
  misc_feature (1686)..(1689): n is a, c, g, or t
  misc_feature (1691)..(1692): n is a, c, g, or t
  misc_feature (1694)..(1694): n is a, c, g, or t
  misc_feature (1701)..(1702): n is a, c, g, or t
  misc_feature (1704)..(1705): n is a, c, g, or t
  misc_feature (1708)..(1709): n is a, c, g, or t
  misc_feature (1712)..(1712): n is a, c, g, or t
  misc_feature (1714)..(1717): n is a, c, g, or t
  misc_feature (1719)..(1719): n is a, c, g, or t
  misc_feature (1723)..(1723): n is a, c, g, or t
  misc_feature (1725)..(1726): n is a, c, g, or t
  misc_feature (1729)..(1730): n is a, c, g, or t
  misc_feature (1738)..(1739): n is a, c, g, or t
  misc_feature (1742)..(1742): n is a, c, g, or t
  misc_feature (1744)..(1744): n is a, c, g, or t
  misc_feature (1746)..(1746): n is a, c, g, or t
  misc_feature (1749)..(1749): n is a, c, g, or t
  misc_feature (1751)..(1751): n is a, c, g, or t
  misc_feature (1754)..(1754): n is a, c, g, or t
  misc_feature (1758)..(1758): n is a, c, g, or t
  misc_feature (1760)..(1763): n is a, c, g, or t
  misc_feature (1766)..(1769): n is a, c, g, or t
  misc_feature (1772)..(1773): n is a, c, g, or t
  misc_feature (1776)..(1778): n is a, c, g, or t
  misc_feature (1780)..(1781): n is a, c, g, or t
  misc_feature (1784)..(1784): n is a, c, g, or t
  misc_feature (1991)..(1991): n is a, c, g, or t
  misc_feature (1996)..(1996): n is a, c, g, or t
nnnntnaaannnnnnnnnnnnnnnnnnntnaaannnnnngggnnnnnggnntnggnnnnaannnnngnnttnnttnttnnaannnnnggnannnnnnnnaannnnnnnnnggnntnnnnnnnnggnnnaaancnnnnnnnnnnnncccnnaaaaaanaannnnannnnncccnnnccnnaaaccnnnnnngggnnttgggnnnnnnnttnnaaggnnnnnnnnnnnttnnnggnnaaggaannnggnaaaannnncccnnaanttngggnaaagggnncccccnnttngggggnnnnnnnnnanngnnnnnnnnnnnnnntttnnnaaaaaaaanggnnnnnnnnaannnaaannnnnnnnnnnnggnnnnnnnnnnnnccngnnnnngnnngnnnnnnnnnnnnnnnnnttttnnnnnnnnnnnntnnnnnnnnnnccccnnnaaanngggnnnnnnnnnnaannnnnnnnnnnnnnnnnaaannnnntnnngggnnnnnnnnnnnnnnnnnnnnnngnnnnnnnnnnnnnnnnnnnnnnnnnnnnnnnnnnnngnnaaantnnnnnnnnngnnnannnnnnnntnncccnnnnngggnnnaaaannccccnnnnncntttnnnnnnnnnnnnnntnnnncnnnnnnannnnnnnnnnnnnnnnnnnnggnnnnttnnnnnnggnnnnncnnngnnntnnggnnnnnnnnnnnaaannnnnncctttnnnttttnnggnnnnnnnnnnnnnannnnnnnannnnnnnnggnggnnnnttnnnnnggggngnnnnccncnaaaannnnannggngnnttnnaanggnncccnnannnngntngnnannnnnnnnnnnnnnnnanngnnnnangggnnntnnnnnnnnnnncnnnnannnnnnnnngnnnnnaannnnnnnnnnnnnnnncnggngntnccnnnngnanggncnnnnnnnnaangnnnaaangnnnnncngggnnnaanngnnnnnnnnccccnaannnnnnnnnnnnnnggggggnttngnnnccnnnnnnnngnnnnnnnnnnnccnggggnnggnaaaggncccaagggttgggnntttnccccnttaaangggnnnnnnnnnngggttnnaaannnnnnnnnnnnnttnggnnnnnnnnnnnnnggggnnttnaaaatttnnngggntttnnnnnnnnnnnnnngggnccnnnttnaannnnccnnnngnnncncnnnttntnccncnnggnnnntnnngggnnnnntntnngggnngggnanangcnnnaaannnatanangcgnaaaccccnccanaannngantttttttaaagggnnnnnnggannnnnnnnnntnnanngnnnanngntanangnnnnnnantntntnnnncngngnnannnnaanncccnanngnntngcncncncncnccccnngtttnngnnnggggnnnnncanannttttnnctnttntnttntnnanntttttttntaaanngngtgngnannttntnccncacnntnncnnnntntntnaaaaaanngnnnngtntntnngnggnaaanncnaaaaaannnnncnanntttnanggnnnnnnnggnnnngngncccnccntttncnntncnnaanangnanntnannctcancngcgcnnnngnnnnnnntanncnangngggagnnnngnnnntnncnttttttnnannccnnaanannnnantgtntnnggnntttttttnnccntntnccnanggnaatntnnnntannnncannttnnnanncanaaaaaaagggaacccaacgggttccctttaaaaagcaattactgatggtccagttagattctcggtaaatcgccttctccttttaatggtaagttagagctccccatgagatagctatctatatggtgtgcagcctgtcttccttctgcaatggcccaaacaatgagtgattgtccccttctttgatcgccagcagtaaaaacaccngctanattggttttatagttgtcctcagttgcagcaatatttgttctttgatccattgctacccccaactgttctgctactgtattctcagagcctgtaaagcccatggctaataaaaccatttctgccttccatattttctctgttccagctacttctaccaattttgaacgctgtcctgggctgtgctcccaatgtacctcaatggtttttaaacctgtgaggtttccattcgcgtctccaacaaattctttggtattaatgctaaagaaacgcgaggcaccttcttggtgagagctagttgtcttgagtcgcattggaaaaaatggccaaggctggttttctggtcgttcgctagtgcctttaggcataatttcaaagttagacacggtattagccccttgtctaatagaggttccaatacaatcagatcctgtatctcctccgccaattacaatgacatctttccctgtagctaaaatgtcttcattggtgtaggtctcttttcctacgcgtttattgctttgttttaaaaagtccatggcctgaaccaccccttttaggtctgctccaggaatatctaatgtccttcttatagttgcaccaccgcttagtaatacaacatcgtagtcttttttaagatcagctgcgtttaggtcttttcctatttcaattcctgttttaaaaacaatgccctcttcttctaatatagccaaacgtctgtctatgacatttttctccatcttaaaatctggtataccaaaccttaataatccgcctggtttagagtctctttcgtaaacggtcactaaatgccccgccctgtttaattgttgtgcagcagctagtccggcaggaccagatccaacaacagccactttttttccagttcttatggctggtttatgaggcacaacccagccttttgcaaaggctgtttctgctacgcttttttcaatattttctatagttactggatcttcattaatacccaatacacaggcttcttcacaaggtgcgggacacagccttcctgtaaattcaggaaagttgttggtggcgtgtaatatcttagctgccttttcccattttcctttgtaaacggcgtcattgaaatctggaatcaagtttcctaatggacacccactgtgacaaaatggtataccgcagttcatgcatcttgcaccctgatctttgaggtctttctcttctaaaggaaccgtaaattctttataattctttacgcgctcttctggcttttcgtaagattctacttttctgtcgaattctaaaaatcctgttatctttcccattttcctataaagtttgagcggtttctgctgctattctaactagtgcgagtcggtattcttctgggaatactttaatgaaatgccccagctgagactcccattgttctaatatttcttgagccctaggactttgtgtggcgtgatagtgattttctatcagtgtctttaattggtctatgtctgtctgatcttctacagccagtagatttaatccttcttctttacaaatagacttaaaggtcttattagggtcatagacataggcaattccaccactcatacctgcgccaaaatttcttcctactgccccgagtattaccgctgttcctccggtcatatactcacaaccatggtctccaataccctctactacagctatagctcctgagtttctcacacaaaaacgttcccctgctttaccgttaatataggcttctcctgccgtagcaccgtataaggtcacatttcctgtaatgacattgtcgtgcggaacaatagtagcttctacaggtactttcacgactaattttgccccagaaagtccttttccaaggtaatcgtttgtgtttccatacaccgtcatggttaaacctttggtggcaaatgcaccaaaactttgtcctgctgctcctgtaaaattaagtttcaaggtgttgtctggcattcctgctgcgccatattttttagatatctcat

SEQ ID NO: 1292 - DNA, 4000 bp, Escherichia coli
  misc_feature (579)..(579): n is a, c, g, or t
  misc_feature (1035)..(1035): n is a, c, g, or t
  misc_feature (1068)..(1068): n is a, c, g, or t
  misc_feature (1427)..(1427): n is a, c, g, or t
  misc_feature (1465)..(1465): n is a, c, g, or t
  misc_feature (1775)..(1775): n is a, c, g, or t
  misc_feature (1978)..(1978): n is a, c, g, or t
gagttctgtgactccaactgatattcatgcagtattccacgaaaccattgcacatcgactcgtatttaatcctgtttatgaaatgcgaagaactgtaattgctcgggatttaaccaatggcattttgaacgttattaaagcaccctaaacaagatgacacaagtaactccactatttgattaccacatcagttggaaatctaaaggcaagcatcctggtcgtcacaaaagtaaccaaagaggtatgggtattgagttcgccggttatacaacacttctctcatatccagatccaagaagaattgacattcgtcaatcaattcgagatcccttaggtgagatttacgtcaaaatgtttaatcagcgaagtgcaacacccgtcatgattgtgtgcgacttatctgccagtatgaattttggtgggaaaaataaaaaaattaatcttgcggccgaagtcgctcaatccattgcacattcagcgattgatcgtcatgatgctttagggcttgtaggttttgatgatgaaattagagaggattggttggcgcctatttcatttagatcacaacatgcaatgacnctcatcaatgaacttaaaaaatttacatcaacaaataaatcaaacagagcaatcaaagatctttatcaatacatgccgcgagagcgtgcgcttattttctttatttcagactttcatataccagaagttgatttggaaaattgcttatcgaatcttatgaggcatcatgtcgttcctatcgtgctatgggataagaaagaatatatcaacttacctaattttggtattgtgaccatcactgatcctgagagtggcaaaaaagatacactttttttaagaaaagaattgaaagaaaaaattatagattcatttgaaaaaagacgcgccgccattacaaaatcttttatgaattttgatattccacctttttttgtggacgaacatttcgatgccaataaaatgactgaatactttaatcaatttgtgggcgcctaagattatgaaataccttatttncctctggatacttttactttcaaccacgggctntgcgcttgatgctcaagaatggcctgatattgaagagggtatcgtctctatcaaaataaaagagcccctccagcaagtgggttacaccatcggtgataaaccttcaagatatatcgaaatcaccattaaaaagccttatgtactgattaaagagtctcttcctattccgggctacgaaagaaaataccaaggtcaagatttgggtattgttctagacaccatgaagcatgtaataaaagaaagtaacacatcaactacactaacacttgatctcacctaccaaatttttacaaataaggttgtcgttaagccaggatttctaccctctgaatatattcgactcttaaaccctaataatnctaaaaaacaagtatttaaatatagaattccggagcgncgcatcgcaatctctcctctttctattttcggcaatgttaaaattgaagaagatatgagcccgttaagaggtgtttttttaatggatgaagaagcttctattaaaattctaaaaatttctggcatcatcgcacttctcgcatttatcggccttatttatatttatagtcaatatgcttggctacctaataagagaggtgtatttgcaagaacacatcgtacgattgtaaagctgaaagctacccctgcttctgttcaaaaagccataactgatatgcatcatgctttcgatcttgtgacaggaaaaatantttttaaagacaatctttctgatctttatataaaaaatacttcatttgaaaatattgactcagaacttcgtgagttctttaaactttcaacactcgtattttttaacgcctcatctaaaaaatatgatcacgaagaaatactcaaatggcttaaaaatttctcgagacattgtcgagattgtgaaagaaaacttatcgtcganaaaagtgcactcgtggtaggggttgctaaatgacattttcatttccatgggtcttatggtttatgcctttagcatttattccacttatttttaaagagacttctcttcaatattattcatggaacgaaatgattccaaaagatcgtctctcaagcatcattgcaatcattttaaaatttatcgccacgcttattttaatcatgattattataggattaagtggtccgcattcacgtcaaaaagaaattgaaaaaacaggtataggtgcccaaattggtcttgtgctagatcgaagtgctagtatggatgacccttttgctgggaatgatcaaacaaaagtaggagaaattaaatctgctgctgctgcaagacttattattgaattcgttcaatctagagcaaatgatatgattgggatggttacttttagtaactctgcgatgtatgttttaccattgactgacaataaaaatgcgattatttctgcggtcagagccacagctggtaatgcattatttcaaactaatataggcagtggacttacgacaggtgcagaattgtttaataaagtgcctgactcaggctcaagggccgtgattttactttcagatggtggcggtcgcattgacgctgcgacgcaagaaaaaattaaagattggtttggccgatttaaaattagtctctattggatcgtattaaggcagcctggtggtatcagtatttttaatacatcattcaaaccaaaagatgatgatcctttgccccctcaaattgagttaaatgaattctttaagacacttccttcgtctttccaggcatacgaagctgaagaccctaaaacactccaaaaagcgattgaagatattaatcaaaaagaaaagaaaccaattaaatatttcgaaaaaattcctgggcaggattattcaacccattgctttgtaacggcagctcttttgatgattgctttgctgacgcttaaattgatagaggttaagtcatggctttaataacaaaaaatatttttagcaccaaaaaacttacttggctttttgtcatgctcctcatagcttctctcggtatatttattaagcaatttatcgaactaaaaaatattcaagtgtttaatcaaaatattaaggaaggcaaatcgcctcgcatgtttctaaatagttttgaagcacgctatgcaactgcctactggctcaccactaaagaaagatataaagaggcaagccttcttttttcaaatcttttacctgttgcatcaccatcacaaaaagcagcgattcactacaatactggtaacattttctttaagcgcgcattagctattaatggcacagatatgactgtaaaaaatgaaactgaatatttatttagacaagcaaaagccgcttatatgctctctattaaaatagataatcatgcgtgggatgtgaaacataatctcgatcgcgtcctgatgatacttcctgctaatccagctccaggtgttggcgactccgaatcacctggacttattttgggtaatattcctgtaggcttgccttagacttatgaaagagtggctgaagacaatacaatcgagatcaaatctcgatttggacaccctctcacttatattatcgatcggattgatagtgctagctattatcaatccatcgataccgcttaaacataatatttataactatgtgtttgtggctgacatctctcaaagtatgaacacaatagatatgtccgttatgaataaacccttaacaagactcgagcacatgaagcatagtcttcatgaaattatgtctgaactcccctgtggcacgaaggtaagtattggaatttttgttggtgtcagtgtttcagcatcttataccccaattgaaatctgtgaaaattttgatgccattgaagataccatcgatcatttagattggcggtcgggctggtctggcaattctcgtataagagaatcttttttcaatctagcccgcctcattagaagtttccctgaaaactctcaag

SEQ ID NO: 1293 - DNA, 4000 bp, Escherichia coli
  misc_feature (1)..(2): n is a, c, g, or t
  misc_feature (4)..(6): n is a, c, g, or t
  misc_feature (8)..(11): n is a, c, g, or t
  misc_feature (13)..(17): n is a, c, g, or t
  misc_feature (19)..(20): n is a, c, g, or t
  misc_feature (23)..(23): n is a, c, g, or t
  misc_feature (26)..(31): n is a, c, g, or t
  misc_feature (33)..(34): n is a, c, g, or t
  misc_feature (36)..(36): n is a, c, g, or t
  misc_feature (38)..(38): n is a, c, g, or t
  misc_feature (40)..(48): n is a, c, g, or t
  misc_feature (50)..(51): n is a, c, g, or t
  misc_feature (54)..(55): n is a, c, g, or t
  misc_feature (57)..(65): n is a, c, g, or t
  misc_feature (67)..(67): n is a, c, g, or t
  misc_feature (69)..(69): n is a, c, g, or t
  misc_feature (73)..(79): n is a, c, g, or t
  misc_feature (82)..(83): n is a, c, g, or t
  misc_feature (86)..(86): n is a, c, g, or t
  misc_feature (90)..(91): n is a, c, g, or t
  misc_feature (94)..(95): n is a, c, g, or t
  misc_feature (97)..(97): n is a, c, g, or t
  misc_feature (99)..(102): n is a, c, g, or t
  misc_feature (104)..(107): n is a, c, g, or t
  misc_feature (110)..(114): n is a, c, g, or t
  misc_feature (116)..(118): n is a, c, g, or t
  misc_feature (120)..(120): n is a, c, g, or t
  misc_feature (122)..(125): n is a, c, g, or t
  misc_feature (127)..(133): n is a, c, g, or t
  misc_feature (136)..(138): n is a, c, g, or t
  misc_feature (140)..(140): n is a, c, g, or t
  misc_feature (142)..(145): n is a, c, g, or t
  misc_feature (147)..(147): n is a, c, g, or t
  misc_feature (149)..(149): n is a, c, g, or t
  misc_feature (151)..(152): n is a, c, g, or t
  misc_feature (154)..(156): n is a, c, g, or t
  misc_feature (159)..(159): n is a, c, g, or t
  misc_feature (161)..(161): n is a, c, g, or t
  misc_feature (163)..(163): n is a, c, g, or t
  misc_feature (166)..(167): n is a, c, g, or t
  misc_feature (169)..(169): n is a, c, g, or t
  misc_feature (171)..(184): n is a, c, g, or t
  misc_feature (186)..(192): n is a, c, g, or t
  misc_feature (194)..(195): n is a, c, g, or t
  misc_feature (198)..(203): n is a, c, g, or t
  misc_feature (205)..(206): n is a, c, g, or t
  misc_feature (208)..(215): n is a, c, g, or t
  misc_feature (217)..(228): n is a, c, g, or t
  misc_feature (230)..(234): n is a, c, g, or t
  misc_feature (236)..(240): n is a, c, g, or t
  misc_feature (244)..(246): n is a, c, g, or t
  misc_feature (248)..(249): n is a, c, g, or t
  misc_feature (251)..(252): n is a, c, g, or t
  misc_feature (254)..(257): n is a, c, g, or t
  misc_feature (259)..(261): n is a, c, g, or t
  misc_feature (264)..(266): n is a, c, g, or t
  misc_feature (269)..(272): n is a, c, g, or t
  misc_feature (274)..(279): n is a, c, g, or t
  misc_feature (281)..(283): n is a, c, g, or t
  misc_feature (285)..(287): n is a, c, g, or t
  misc_feature (290)..(292): n is a, c, g, or t
  misc_feature (297)..(297): n is a, c, g, or t
  misc_feature (301)..(301): n is a, c, g, or t
  misc_feature (306)..(308): n is a, c, g, or t
  misc_feature (310)..(310): n is a, c, g, or t
  misc_feature (313)..(313): n is a, c, g, or t
  misc_feature (317)..(322): n is a, c, g, or t
  misc_feature (325)..(325): n is a, c, g, or t
  misc_feature (329)..(332): n is a, c, g, or t
  misc_feature (335)..(336): n is a, c, g, or t
  misc_feature (338)..(342): n is a, c, g, or t
  misc_feature (344)..(344): n is a, c, g, or t
  misc_feature (346)..(346): n is a, c, g, or t
  misc_feature (348)..(350): n is a, c, g, or t
  misc_feature (354)..(361): n is a, c, g, or t
  misc_feature (365)..(366): n is a, c, g, or t
  misc_feature (368)..(369): n is a, c, g, or t
  misc_feature (371)..(371): n is a, c, g, or t
  misc_feature (373)..(375): n is a, c, g, or t
  misc_feature (377)..(378): n is a, c, g, or t
  misc_feature (382)..(383): n is a, c, g, or t
  misc_feature (386)..(388): n is a, c, g, or t
  misc_feature (390)..(390): n is a, c, g, or t
  misc_feature (395)..(395): n is a, c, g, or t
  misc_feature (397)..(398): n is a, c, g, or t
  misc_feature (400)..(400): n is a, c, g, or t
  misc_feature (402)..(403): n is a, c, g, or t
  misc_feature (405)..(407): n is a, c, g, or t
  misc_feature (409)..(414): n is a, c, g, or t
  misc_feature (416)..(418): n is a, c, g, or t
  misc_feature (420)..(422): n is a, c, g, or t
  misc_feature (425)..(426): n is a, c, g, or t
  misc_feature (429)..(431): n is a, c, g, or t
  misc_feature (433)..(437): n is a, c, g, or t
  misc_feature (439)..(439): n is a, c, g, or t
  misc_feature (441)..(441): n is a, c, g, or t
  misc_feature (444)..(444): n is a, c, g, or t
  misc_feature (446)..(447): n is a, c, g, or t
  misc_feature (450)..(451): n is a, c, g, or t
  misc_feature (456)..(458): n is a, c, g, or t
  misc_feature (460)..(467): n is a, c, g, or t
  misc_feature (469)..(469): n is a, c, g, or t
  misc_feature (472)..(472): n is a, c, g, or t
  misc_feature (475)..(476): n is a, c, g, or t
  misc_feature (478)..(478): n is a, c, g, or t
  misc_feature (481)..(482): n is a, c, g, or t
  misc_feature (484)..(484): n is a, c, g, or t
  misc_feature (487)..(488): n is a, c, g, or t
  misc_feature (490)..(490): n is a, c, g, or t
  misc_feature (493)..(495): n is a, c, g, or t
  misc_feature (497)..(498): n is a, c, g, or t
  misc_feature (500)..(501): n is a, c, g, or t
  misc_feature (504)..(505): n is a, c, g, or t
  misc_feature (507)..(514): n is a, c, g, or t
  misc_feature (517)..(517): n is a, c, g, or t
  misc_feature (519)..(520): n is a, c, g, or t
  misc_feature (527)..(527): n is a, c, g, or t
  misc_feature (529)..(530): n is a, c, g, or t
  misc_feature (534)..(534): n is a, c, g, or t
  misc_feature (536)..(537): n is a, c, g, or t
  misc_feature (544)..(548): n is a, c, g, or t
  misc_feature (550)..(554): n is a, c, g, or t
  misc_feature (556)..(556): n is a, c, g, or t
  misc_feature (558)..(559): n is a, c, g, or t
  misc_feature (561)..(565): n is a, c, g, or t
  misc_feature (567)..(568): n is a, c, g, or t
  misc_feature (570)..(570): n is a, c, g, or t
  misc_feature (572)..(573): n is a, c, g, or t
  misc_feature (576)..(576): n is a, c, g, or t
  misc_feature (580)..(580): n is a, c, g, or t
  misc_feature (582)..(583): n is a, c, g, or t
  misc_feature (585)..(585): n is a, c, g, or t
  misc_feature (587)..(591): n is a, c, g, or t
  misc_feature (594)..(595): n is a, c, g, or t
  misc_feature (597)..(597): n is a, c, g, or t
  misc_feature (599)..(602): n is a, c, g, or t
  misc_feature (605)..(605): n is a, c, g, or t
  misc_feature (608)..(617): n is a, c, g, or t
  misc_feature (619)..(622): n is a, c, g, or t
  misc_feature (624)..(626): n is a, c, g, or t
  misc_feature (628)..(634): n is a, c, g, or t
  misc_feature (636)..(637): n is a, c, g, or t
  misc_feature (643)..(644): n is a, c, g, or t
  misc_feature (647)..(647): n is a, c, g, or t
  misc_feature (649)..(654): n is a, c, g, or t
  misc_feature (656)..(656): n is a, c, g, or t
  misc_feature (658)..(663): n is a, c, g, or t
  misc_feature (665)..(666): n is a, c, g, or t
  misc_feature (668)..(670): n is a, c, g, or t
  misc_feature (677)..(677): n is a, c, g, or t
  misc_feature (679)..(684): n is a, c, g, or t
  misc_feature (686)..(687): n is a, c, g, or t
  misc_feature (690)..(690): n is a, c, g, or t
  misc_feature (695)..(698): n is a, c, g, or t
  misc_feature (700)..(700): n is a, c, g, or t
  misc_feature (703)..(704): n is a, c, g, or t
  misc_feature (706)..(707): n is a, c, g, or t
  misc_feature (710)..(710): n is a, c, g, or t
  misc_feature (712)..(722): n is a, c, g, or t
  misc_feature (725)..(727): n is a, c, g, or t
  misc_feature (730)..(736): n is a, c, g, or t
  misc_feature (738)..(741): n is a, c, g, or t
  misc_feature (743)..(743): n is a, c, g, or t
  misc_feature (745)..(746): n is a, c, g, or t
  misc_feature (748)..(760): n is a, c, g, or t
  misc_feature (763)..(766): n is a, c, g, or t
  misc_feature (768)..(771): n is a, c, g, or t
  misc_feature (773)..(773): n is a, c, g, or t
  misc_feature (776)..(781): n is a, c, g, or t
  misc_feature (783)..(783): n is a, c, g, or t
  misc_feature (786)..(791): n is a, c, g, or t
  misc_feature (793)..(793): n is a, c, g, or t
  misc_feature (796)..(800): n is a, c, g, or t
  misc_feature (804)..(810): n is a, c, g, or t
  misc_feature (812)..(812): n is a, c, g, or t
  misc_feature (815)..(819): n is a, c, g, or t
  misc_feature (822)..(823): n is a, c, g, or t
  misc_feature (825)..(826): n is a, c, g, or t
  misc_feature (829)..(830): n is a, c, g, or t
  misc_feature (832)..(838): n is a, c, g, or t
  misc_feature (840)..(843): n is a, c, g, or t
  misc_feature (845)..(846): n is a, c, g, or t
  misc_feature (848)..(848): n is a, c, g, or t
  misc_feature (850)..(850): n is a, c, g, or t
  misc_feature (852)..(855): n is a, c, g, or t
  misc_feature (857)..(858): n is a, c, g, or t
  misc_feature (860)..(861): n is a, c, g, or t
  misc_feature (863)..(863): n is a, c, g, or t
  misc_feature (866)..(871): n is a, c, g, or t
  misc_feature (873)..(873): n is a, c, g, or t
  misc_feature (875)..(875): n is a, c, g, or t
  misc_feature (877)..(877): n is a, c, g, or t
  misc_feature (879)..(879): n is a, c, g, or t
  misc_feature (882)..(883): n is a, c, g, or t
  misc_feature (888)..(888): n is a, c, g, or t
  misc_feature (890)..(890): n is a, c, g, or t
  misc_feature (892)..(892): n is a, c, g, or t
  misc_feature (894)..(901): n is a, c, g, or t
  misc_feature (906)..(906): n is a, c, g, or t
  misc_feature (908)..(908): n is a, c, g, or t
  misc_feature (912)..(912): n is a, c, g, or t
  misc_feature (915)..(915): n is a, c, g, or t
  misc_feature (918)..(918): n is a, c, g, or t
  misc_feature (920)..(922): n is a, c, g, or t
  misc_feature (925)..(930): n is a, c, g, or t
  misc_feature (932)..(934): n is a, c, g, or t
  misc_feature (936)..(937): n is a, c, g, or t
  misc_feature (940)..(941): n is a, c, g, or t
  misc_feature (943)..(943): n is a, c, g, or t
  misc_feature (945)..(945): n is a, c, g, or t
  misc_feature (947)..(947): n is a, c, g, or t
  misc_feature (949)..(953): n is a, c, g, or t
  misc_feature (955)..(955): n is a, c, g, or t
  misc_feature (957)..(958): n is a, c, g, or t
  misc_feature (961)..(965): n is a, c, g, or t
  misc_feature (968)..(976): n is a, c, g, or t
  misc_feature (978)..(980): n is a, c, g, or t
  misc_feature (983)..(987): n is a, c, g, or t
  misc_feature (989)..(993): n is a, c, g, or t
  misc_feature (995)..(997): n is a, c, g, or t
  misc_feature (999)..(999): n is a, c, g, or t
  misc_feature (1015)..(1015): n is a, c, g, or t
  misc_feature (1079)..(1079): n is a, c, g, or t
  misc_feature (1107)..(1107): n is a, c, g, or t
  misc_feature (1165)..(1165): n is a, c, g, or t
  misc_feature (1366)..(1366): n is a, c, g, or t
  misc_feature (1459)..(1459): n is a, c, g, or t
  misc_feature (1660)..(1660): n is a, c, g, or t
  misc_feature (1843)..(1843): n is a, c, g, or t
  misc_feature (1859)..(1860): n is a, c, g, or t
  misc_feature (1985)..(1985): n is a, c, g, or t
  misc_feature (1994)..(1994): n is a, c, g, or t
  misc_feature (2008)..(2008): n is a, c, g, or t
  misc_feature (3279)..(3279): n is a, c, g, or t
nntnnngnnnncnnnnngnnttncgnnnnnncnncngngnnnnnnnnncnnganngnnnnnnnnnanancaannnnnnntcnnacngccnnctnncnannnngnnnnccnnnnntnnngngnnnncnnnnnnnccnnnanannnngntncnngnnnatncntnggnncngnnnnnnnnnnnnnnannnnnnncnncannnnnnanngnnnnnnnntnnnnnnnnnnnncnnnnngnnnnngccnnntnntnngnnnngnnntannngannnngnnnnnngnnngnnncgnnnttttntttnccgannngnggnttgnnnnnnggntttnnnnctnntnnnnntncnannnatannnnnnnnttannannangnnngnnttgnngannnanaaggngnncngnngnnntnnnnnngnnntnnncgnngcnnngnnnnngntngantnngannagtgnnntnnnnnnnntntcnccnntnccnntncgnncnttnnngnncnnttnngnnnnnnnngtntnncctcgcngnngacncnngcggtgnnnnnannnnngnanngnnnnngnntnanngtngttncnntntnnnnnttnntngnnnnttntannnnnnnnnntnnnnannngnnnnnnntnnttgcgnncangnnnnnngngnnnnnncnntnnnccgtttncnnnnnnannttngtttnnnngnagnnanngtncnnnnnnnnnnngtnnnggnnnnnnntnnnntntnngnnnnnnnnnnnnntgnnnnannnngnatnnnnnngngcnnnnnngnatnnnnnccgnnnnnnncnggnnnnnaannanncgnnannnnnnntnnnngnnantngnnnnannanntngtnnnnnncngngnantannaggancnanannnnnnnnattgncngaanaancantnnnttnnnnnntnnnannagnngngntngnnnnntngnngannnnngcnnnnnnnnntnnnatnnnnntnnnnngnnncnggggttcgaatccccntctctccgcaaacgaccgggaggtcggctgggttgcaaacgatattcgtttgcaacctttttgnttttcggaggcaacgaatttattcggancgtttcgggatcgtccgtagtgcggacggccgacggccgggtattggcagggatatgnggctcttcggtcggtcgcgggaaggcgggccgcaactcgatctttgtcttgtctgtcggaagttgggaaaagttattatccggggtttcgaaatcgactacccggtgacggacgagatgtttgcccggccggaatagcgtttttttagctggtgcgggtatcggcgttgtgaagattcgtgttaaagaaaaaagcctccgntcgaacggaggcttttttcttgcaggcggaaggatctacttcgtagaagcggctctcttctccttgatacgggctttcttacccgtcaggttncgcaggtagtagatgcgtgcgcgacgaaccacgccctgcttgtttacctcgatgctctcgatgtggggcgaatagagggggaagatacgctcgacgccgatgccgttggagatcttgcggatcgtgaacatcttggtcttgcccgtacccttgatctggataactacgccgcggaagctctgcaggcgctccttgttaccntcgacgatcttgtacgtaacggtgatcgtatcaccggcctggaacgacggaacatccgtcttggtccacatctgctcgttgacgagccggattactgcatccttgttcattgttgcaacaatttttttgatgatttctgcgttcaacattatcgctgtgtttgcctaccatgcagggatcttnctctgcaatcctccgnnaatcaacggattgatgttcccggtcgtggcttcgcacccaatataagaggttgatacggtccgcaaatatagaaactttttcccaaacgggcaatcggctgtctaaaaaatagatgactccgcanccggaccgnttgtgcggcgatgncggctgcggcgggtgtgggaggtgaacgggtttcatcttgaatcgtgtcgggaggtgcggattgcttcgacgggcggtgcgtatggatggctctcgaactttgaggcacatggtttgcggttagtctgcaactccctgccccgatcctttttgtttacaatggaattttccgacgggatcggcatgcggggaatttcccgggtgcagggaaggaagtatgtatgttgtatggaatatgggaggcggttcggacattcttttcgaacgagttcgacgaatgtcgcccgccttttcgtatatttgtcactaaaatcggagaaaaatatgatgaaagagaagttggtattcgtcaccaacgacgacggttacaattcaagaggtattcaggcgctccttgaggtcgcacgcaagttcggccgggtggtcgccattgcccccgaaacgccgcagagcggtatgagtcaggcgataacgatcaataatccgcttttcctgcgcgaagtgtcgaaaggcgacggtgtggaggtttatgctttttcgggaaccccggtcgattgcgtgaagatcgctttcgactactttctcaagggccgcaaggtcgatctggcgctttcggggatcaatcacggctcgaattcggcggccaatatcctctattcgggtacgatgggcggtgcgatcgagagcagtttctacggttgtcctgccatcgggctttcgctggacgatcacagtctggaggcggatttcgaagccgcgaagatttacagcgagcgcatcgtgcgtgcggtggtcgaggccaatccccccacgccgttctgtttgaatgtcaatatacccaagggacggcccgaagcggtgaagggtattcgggtgtgccgccagaacaaagggtattggcgcgaggagtttttccgtcgccacgatcctcggggccgggagtatttctggctgacgggtgcgttcgtcaatagcgaacccgaatcgaccgatacggacgagtgggcattggcgaacggctatgtttcggtggttcccgtgcagacggatatgaccgactatgcgcagatggctccgctggagcggatactcggataggatttatcggaccggaggctggtgccggagattgggcgatcctgttttgcggcggaagctgcccggggcgtaattccggatttcggtccgaagtcggaattgccggagtcgcaggaatgtgccgaggcgattttcgttcgtttcgaggtgaatagagggtgtttgaaccggcngtccgaaaataaattttcaattactcccgtcttttcctatatttgtattcgtgaagacgggaagcggttcgggccggtgcgtcggagcggaagaattcgaattttagcggaatattcaatatgctgatcaaaattttactcatcgtggccatcgtcatccagacgatcgcgactctgttcgccatccgtttgatccgtacgaccaagtacaattcgatctggattctgttcaccatcggatttacgctcctttccgtcgaacgggtcgtgcaattcctgcgtgccaacggtcagacgctgccttatgaggtgttcgtctggttgggactggtcatttcgatcagtatgtcgatcggcgtgatgtatgcccataagcttttcaagtacatcgcccggctcaaccgccagcggcagttgctcaacaagcgcatcctgacggccgtgctgcgcaccgaggagaaatcgcggtcgcgtttcgcgaaggatttgcacgacgggctggggccgttgctctcgtcggcccgtatgtcgctgtcggccctgcaacgggagtcgctgccggccgatcagcaggagatcatcggtaatacgacttatgtgatcgacgaggcgatccgctcgctgcgggaaatttcgaacaacctttcgccgcatgtgctcaacgatttcggcctggcgcggggcatccagaacttcgtgggaaagagttcggcgatgcacg

SEQ ID NO: 1294 - DNA, 4000 bp, Escherichia coli
  misc_feature (2298)..(2298): n is a, c, g, or t
gtgacgccgatcgcctcgccatcggcctgggcgaggtgcttgccgatgcggctgagccttgtgtccgtggtcacgactttcatgtcgtcggcatcgtagagcggcttgcggtcgatcgcgatcaggatcggcaccggcgcggccgtcagcaggtcgccgagcacgccgtcctcgaacagcacgtcgccgttgagcaggagggtcgaatcgtcggtgaaatggtcgcgcgcggcgtggcaactcgcgagattgtctgtcgtcgcatggtcgaggtttcgcacgctcaggacacccggccgcgcggcgaggtgcgcctccaccgtctcggcggcgtggccggtgacgaccgcgacctcatgcacgccggcgcgggccagcgcatcgagctgtcgatcgaggatggcgcggccaccgaccggcaacaggcatttcggccgctggtcggtgagcggcgccagccgcgcgccgcgtccggcggcgaggatgacggcgctcagcaccatgactcggggccgccatgcgcgggccaaccatgacaggacggagcgcggtggctacagtgccgcctcgtcgcgatgccgcccgattcctcagccgagtctcgacccggcatggccacccccgactccgaaccgacctccgccgtcgcggctgacgagcgactgacatattggtcgccgttgcgcattccggcgttccgtcggctgtggtgcggcaacgtgctctccaatatcggcggttggatgcagaccgccggcgccggctgggtgatgaccgagctggcgccgcacgaccaccgcgagatgttcgtggcgctgctggcggcggctggcacctgtcctgtgttcctgttcggcttcctcgccggcgtgctcgccgaccgcttcgaccggcgcaaatacctgatcgtcacgcagctgtggatgatgctggcgtcggccgtgctggcggtgctggcgttcaccgggctcttgagcgcctggaacctgatcgcggtgatgttctgcatgggcatcggtaacgccatgaacgggcctgtctggcacgccgtcgtgcctgaaatggtcggccgacgctacctgcccggcgcggtggcgctcaacagcgccggcttcaatttcggccgcaccattggcccggtgatcggccagatcctgcagggcgtggccgggaccttcgcgctcttcgccatcaacgccgccaccttcgccggcgttatcttcgccgtgttcacctggaagcggccacccgaggccagcgccgcgcagcgccgcgagggcttcatcgccgccttcggcagcggcatccagttcatccgcgccacgcccgcgctgtgggcgatctgggcgcgcgcggtgtgcttcttcatcccctcctgcgccttcgccaccttgctgccgctcaccggccgcgatcgcctccagctcgacgccgccgagtatggcgtgctgttctccagcttcggcgtcggcgcggtgctgggtaccatgctgatcccgcggctcaacagatggttcggctcggaccgcgccaacctcgtggcgatgctggcggtcgccttcggcatggggatctcggcgatgatcgccaacgccatcgtcgtcgggctggcgctggcgctggccggcggctgctggatgatcgtcaacgccaacaacaacgtcgccacccagcaccatctgccgtcctgggtgcgcgcccgcggcatggcggtgcaccagctcgtcttcttcggcagcctggccgtgggccagacggcgtggggcgtcgtcgcctcgcaggtcggcaccgcctgggcgctcgcctgcgccgccttcctgctcgtggtgctgaccggagtcgccgcggcgatccgcctgccggccgccggcgcgccgcccggcggcggctgagcggacgagtgtggcgaacgcgccacgctggacacagaaatttacggatgtgagtcgattctcacttgcgtcgtggcgcaatcggcgtatctacattccttagacgcccacgcacgtgcctatggcccattagtggttatgcaacgacggaaagcgtccttcttggaaatgccggcaatagaccggcgccgaaagggacctttgtcatgcatacgatccgtgcggggcggaagcacccgcccattgtcggactgaccttcacgctcgagccctcgggctacggcctgttgttcggtcggaagaaccctctctcgagtatgtgccgctcccggtagcgcatccccagggatgacccgggagtgttggtccgtcgtgttccggcgcctggcgccgcgacgcggtcctncgcaccccgtttgaggctggttctttcgaaatgaccgaccgtatccgacgtttcctcgccgacaagcaacccgagaccccctgcctggtggtcgatctcgacgtggtggagttcaactaccgccgcatgcgcgagctgttgccgcaggcgaagatcttctacgccatgaaggcgaacccggcgaacgaggtgctcgcgcgcctgggcaagctcggctcgaacttcgacaccgcctcgcgcggcgagatcgagctgtgcttcgcgcagggcgtcggcgccgagcgcatctccttcggcaatacgatcaagaaggagaaggacatcgcctgggcgcaccagaacggcgtgcgcctgtacgccttcgacagcgaggcggagctgcagaagctcgcccgctcggcgccgggcgcacgcgtgttctgccgcgtgctggtcgattgcgacggtgcggagtggccgctgtcgaaaaagttcggctgcgcgcccgacatggcgcgcgacctgctgaaacgcgccaacgacatgggcctggaggcctacggcgtctccttccatgtcggctctcagcagaccgacctcgaccagtgggaccgcgcgctcgcgcaggtctcgcagatgttctacgcgctcgccgagaccggcatcgacctgaagatggtcaatctcggcggcggcttccccgcgcgctaccgcaaggacgtggcgccggtcgaggcctattgcgaggcggtgcagcgcgcgctggtgcggcacttcggcaaccgcatgcccgaggtgatcatcgagccgggccgctcgatggtcggcgacgccggcgtgcttcagagcgaggtggtgctgatctcgcgcaagtcggccaacgaccgcaagcgctgggtctatctcgacgtcggcaagttcggcggcctggccgagacgatggacgagagcatcaagtaccgcatcaccacgccgtacccggcgggcggccgctcgggcccggtggtgctcgccggcccgacctgcgacagcgccgacatcctgtacgagaagaccgagtacaagatgccgctggcgctgaaggtgggcgacaaggtcgagatcctctcgaccggcgcctacaccaccacctacgcgtcggtggcgttcaacggcttcgcgcctttgaagacctactgcatctaatccagtagcccacacggtctgcgacgacggggccttgaaaaaggccccgtcggcgtttcagtttccccgcccacccgctatttccggagaccttcgatggccgctccccgcaagtcgaagaaggaggtcgcgttcggcggccgcatggtgatgatcggcttcggctcgatcggccagggcgtgatgccgctgatcctgcgccatatcgccatcaagccgaagcagatcacggtgatctcggccgaggatcgcggcggcctgcccgagctcgagaagtacggcatcaccttcatccgcaagcggctgacgcgcgccaactaccgctcggagctatcgaagctggtgagcaagggcgacttcatcgtcaacctgtcggtcgaggtcgcctcgacggcgctgatcgagttcgcccaggagaagggcgcgctttacatcgacacctgcatcgagccgtggccgggcggctataccgaccccaacctctcggtctcgcagcgctcgaactacgcgctgcgcgaggcggcgctgaagctgcgcc

SEQ ID NO: 1295 - DNA, 4000 bp, Escherichia coli
  misc_feature (53)..(54): n is a, c, g, or t
  misc_feature (98)..(98): n is a, c, g, or t
  misc_feature (104)..(104): n is a, c, g, or t
  misc_feature (134)..(134): n is a, c, g, or t
  misc_feature (143)..(143): n is a, c, g, or t
  misc_feature (153)..(153): n is a, c, g, or t
  misc_feature (288)..(288): n is a, c, g, or t
  misc_feature (294)..(294): n is a, c, g, or t
  misc_feature (303)..(303): n is a, c, g, or t
  misc_feature (327)..(327): n is a, c, g, or t
  misc_feature (546)..(546): n is a, c, g, or t
  misc_feature (568)..(568): n is a, c, g, or t
  misc_feature (657)..(657): n is a, c, g, or t
  misc_feature (744)..(744): n is a, c, g, or t
  misc_feature (750)..(750): n is a, c, g, or t
  misc_feature (1137)..(1137): n is a, c, g, or t
  misc_feature (1155)..(1155): n is a, c, g, or t
  misc_feature (1166)..(1166): n is a, c, g, or t
  misc_feature (1172)..(1172): n is a, c, g, or t
  misc_feature (1182)..(1182): n is a, c, g, or t
  misc_feature (1245)..(1245): n is a, c, g, or t
  misc_feature (1314)..(1314): n is a, c, g, or t
  misc_feature (1674)..(1674): n is a, c, g, or t
  misc_feature (1954)..(1954): n is a, c, g, or t
  misc_feature (1985)..(1986): n is a, c, g, or t
  misc_feature (2033)..(2033): n is a, c, g, or t
  misc_feature (2036)..(2036): n is a, c, g, or t
  misc_feature (2072)..(2072): n is a, c, g, or t
  misc_feature (2180)..(2180): n is a, c, g, or t
  misc_feature (2267)..(2267): n is a, c, g, or t
  misc_feature (2312)..(2312): n is a, c, g, or t
  misc_feature (2327)..(2327): n is a, c, g, or t
  misc_feature (2342)..(2342): n is a, c, g, or t
  misc_feature (2485)..(2485): n is a, c, g, or t
  misc_feature (2561)..(2561): n is a, c, g, or t
  misc_feature (2633)..(2633): n is a, c, g, or t
  misc_feature (2642)..(2642): n is a, c, g, or t
  misc_feature (2863)..(2863): n is a, c, g, or t
  misc_feature (3212)..(3212): n is a, c, g, or t
  misc_feature (3287)..(3287): n is a, c, g, or t
  misc_feature (3303)..(3303): n is a, c, g, or t
  misc_feature (3323)..(3323): n is a, c, g, or t
  misc_feature (3665)..(3665): n is a, c, g, or t
  misc_feature (3731)..(3731): n is a, c, g, or t
  misc_feature (3740)..(3740): n is a, c, g, or t
  misc_feature (3945)..(3945): n is a, c, g, or t
tgatttttattcaagagggtgattacgtaaaaatgtcattgcgctctaaaggnnctaccgatgtaaatcgtttggcacgcgagcatttcaacggtggnggacanatcaatgcggcaggcggcagatatgatggnactatagangaagcagtancctacttcagaagtgtacttcctgatttcatacaaaagaacagttaataaaacgatgaatatactaaaaaaaataggcctcctaagtgcccttggcatagttttggtaggttgtgctgaccgacaagcacgccancctgtnagtaagaanactagcactttcttgaaagaatcngctgtaaagaacaaagccctcttagcaaaagagcaagcgctgatagacgatatcatcaaaaaggatacactacatactttcttagactctcagcacggatttaagttttactacctacaccaaaaccctgaagctgattacacagcacagtttggcgatatagtaacttatgactatagcctgtcagacctaaatggcaatgagctgtaccaagaaaancccgatggcgaataccgctatnacgtagataaagaagaggttttccaaggcttgcgctcagctctcaaactattaaaagagaaagaaagcggggtgttcttttttccgtcnagtgtggcgtatggctatcgaggcgataaagataaaataagctataaccagcctattatagccaaaatagaggtttttaaaataganaagaanccagagaaggtattacctcgccctgaataagtaattttatttaaataagtatatatgagacaaatgaatttaatcgcattgctatcggcaatgtttgtattctttagttgcaattcgcaaaagaaagcctataaagatttaggcgatggtctttttgctgacatcgaaactactaaaggacatattgtggtaaaactcaactacaaagaagtacctactacggtagctaactttgtaaccttagccgaaggtaaaaacaatttcgtaaaagtagaatacaaaggaaaacctttctacaatggtactattttccaccgtgtgatagatggttttatgatacaaggtggtgaccctaccggcactggtatgggcgatcctggttaccgnttcgaagatgaatttgtnccctcacttangcacancaaaaaaggnattttatcaatggcaaactctggccctaacaccaatggcagccagttcttcatcactcaagtncctaccccacacttagacggcagacacacagtatttggcgaaacagtaaaaggtgaagaggtgatagangctatcgctaaagctccaagaaatggtcaagaccgccctaatgaagacatcaaaataaagaatatcaccattgtagccaacggaaaagacgctgaaaagtttgatgctgtaaaggtattcgacagctacttcaaaagtgtagctgaaagagaaaaagaaaaagaagagcgtgtaaaacgtgcttctgctaagtttttagaagaaataaaagtgcaagaacctcaagctaaagtactgccttctggagtaaaaatctttactataaacaatggcgaaggtaaacaacctaagcaaaccgaatttgcaatggtaaactatgcaggttatttgcgcaacggagctctttttgactctaacatnaaagaagtagaagaaagttatggcaaataccaagctatgcgcgagcaacaaaacggttatcaacctattcctttcccttatactccttcagctcaattgatacctgggttcaaagaagctcttctcactatgaaagtaggcgataaaatacgcgtatttatcccagcaactttaggatatggcgaagcaggagcaggtgatgttatcccacctaatagcgatttgatttttgatatagaaatcactggcactatggctgcacctaaaatgaattaagaantttagataattagtaaataaagagacgatgnncaaaaacatcgtctctttatttttaggggtatacagggcttaaatcngtngtttcataaggaggctggtcttttaagaaaacacgngcagtaagattgccttttagttctatttggtcatcagtaattcgtagccaactgccttctcgcaaacctattacgggtatatcgttaaacttatgaaactctttaatncgggtttcacgcgtttcgcccttgtgcttgctatgagggtcagggtctaaataatgcggattgatattaaaaggcacagcccctagngtctgaaaagaaggcggatagataataggcatatcgttagtggtntgcatcgtctgtccngctatattactaccngcgctagtacccatataaggtgtccctccagctaccacctcgcgcaaaatagacatcaaaccgagttcgtacaagcgtgtaacgagcaaaaaagtattgcctccccctgtaaagatagcttttgcttgcactaatgctgcttnagggtcggcaaaggtatgtagccccactaccctcttctgtatcttttcaaagccttgctgtgcaatagcggtatantcatcgtgagtgataccactggggcgtgcataaggtataaagagtatttcatcaattcctgcaaaaaagtcngtaagttcntcttgtaaataagatagataggtacctccataaacagtagaggtactggctaataaaagtcttttcattagtataatacgtttttaggttatcagtggcaaagataaaaaataattgtcaattgataattattttttatctttgcctaaaattaagtaagtaatgaaaaagacatacaatacagatttattgcaaactgtcgttttgcgcaatgctaacgntatggaagtgagtgtgatgaactttgggggcatcattaactctataaaagtacctgtaaaaggtaaaaaagtagaatgtgtattagggtttgataccttcgaagaatacataagcgatcgttatagagctgaatatccctatctgggtgccgtaatagggcgtaatgcagggcgcatcaagtatgggaaagcctatatagacggcaaagaggtacaagtaaattgcaatctgggcgaaaaccaaatacacggaggcgttacaggatttgatagtgtattttgggaagtaatagcgcaagaaaaaggcgagaatccttctgtaactctgcaatatattagcaaagatggngaagagggctacccaggggaagtagtagtacgtgtaacctacactctcaccgaagacaataaactgcgtatagantaccaaggcactaccnatgcccctacaatcttaaancttacccagcatacatacttcaacctaaatgaaagtgacactgatattctgggcaatacgctgcaaataactgctgataaatatgtacctttagaagaaggctttttcacccccacaggcgaacgaccctctgtagcaggcacacctttagattaccgcaagggtcaaaaagtatatgcacataccgacaactcttttgtgcgcgaaatagatgctgaaaaaataatggctaccctaaccaacagcgagggcagcttaacgatgacggtacgcactaatcaccctgtgctacacatctacgcaggctattacctgcccctattagaggtagcccatcgcaanactataggacaaagcagaggtatctgttttgaagcacaaggctatgccgatgctactaaacacccncattttganagtgtaatactcagacctgaagaaaagtacgaatactttactgaatttcagtttctaagtaatgattagaaaaagaataccaataacaagtaacacaaaaagtgaatgaaaaagatttattttatattgtttttagggctactcttatcgtgtacccaaactcataaaaacgcaccgttacaacctgtaaaagtaacggtacctnctgaactacaagcctattaccaaggagttgatttcaacaaaacaggaaaagcctt

SEQ ID NO: 1296 - DNA, 4000 bp, Escherichia coli
  misc_feature (159)..(159): n is a, c, g, or t
  misc_feature (344)..(344): n is a, c, g, or t
  misc_feature (459)..(459): n is a, c, g, or t
  misc_feature (1033)..(1033): n is a, c, g, or t
  misc_feature (1056)..(1056): n is a, c, g, or t
  misc_feature (1253)..(1253): n is a, c, g, or t
  misc_feature (1571)..(1571): n is a, c, g, or t
  misc_feature (1574)..(1574): n is a, c, g, or t
  misc_feature (1577)..(1577): n is a, c, g, or t
  misc_feature (1802)..(1802): n is a, c, g, or t
  misc_feature (1808)..(1808): n is a, c, g, or t
  misc_feature (1811)..(1811): n is a, c, g, or t
  misc_feature (1986)..(1986): n is a, c, g, or t
  misc_feature (1988)..(1988): n is a, c, g, or t
  misc_feature (2060)..(2060): n is a, c, g, or t
  misc_feature (2456)..(2456): n is a, c, g, or t
  misc_feature (2498)..(2498): n is a, c, g, or t
  misc_feature (3925)..(3925): n is a, c, g, or t
  misc_feature (3990)..(3990): n is a, c, g, or t
  misc_feature (3999)..(3999): n is a, c, g, or t
gaaataaaagtacccgtttttccagaatccattacagatgctgttgtagtagaaatcaataaaaatgttggcgatgaagtaatgactggcgacactgtgttttctctagaaactgataaagtcgtattagatgtggtgagtgaagaaagcggagtcatnacaaaaatttctgtcaaaaatggcgatactgtaatagaaagtcagctacttgcagaacttgagattaaagatattagcgtcaacaaaaaggaagctgcagtggcagaagacaacaaaacccctcaaacaagccctgctgtaagacaagcgctaatagacaacgatttatcaaaagaagaggtggntggctctggcaaaaacaaccgcatactaaaagaagatgttacaagccacaaaagcagcaccacaaccccagtagaagacacccctatgagagctggagaaaggctagaagaaagngtaccaatgagtagaatgcgccaaactatcgccaaaaggcttctggatgcaaccaaccaaagtgcaatgctaactacctttaatgaagtagacatgacaagtattatgtctatgcgcaaaaaacaccaagaaaaatttgtaagtgaacacggtgttaaattaggctttatgtctttgtttgtcaaagcagccacaaacgcccttaagaaattccctgcagttaactcatttattgatggagatgacattgtgtatcacggctattgtgatatcagtgttgctgtatcaacagacagaggcttggttgtgcctgttttaaaagatactcaagaattatcgcttgcagatgttgaaaacaaaattattgatttttcaacaagagctaaatctggaaaattagaattatcagaaataagcggtggaacattcaccattaccaatggcggtacttttggtagcctcatgtcaactccaattatcaacccgccgcaaagtgcggttttgggtatgcataacatccaaaaaagagcggttgtgatagacaatgaaattgtcattagagatatgatgtatntagcgctatcttatgatcatcgnattattgatggtaaagatgctgtaatgttcttgagtcatattaaagacacaatagaagatccaactcgcatagttttagatttataactttaggcaataatatgaactacgatatcataattataggtggcggtcctggtggttatgtgagcgctatacgcgccgcacaattaggttttaaagttgggtgtattganaaatggattgacaaaaaaaacaacccatctttaggcgggacttgtttaaatgttggctgtattccatcaaaagctctgcttgaaagttctcatttatttaaaaacatacaaaatagtgagcatctaggcatcaaagccaacgccaaaattgatgtaaagaaaatgctggccaacaaagataaaatagtgggtgagctcaccggtggcatagcatcactctttaaagcaaacaacatcacctggctacaaggcacaggaaaactgcttaaaaacaaacaagtgtcattcatagatggcaaaaataatgaagaaattctnacngcnaaaaacattgttttagcaactggatcagtgtctgtcataccccctaatatgaagcttggcaagagagttatagattcagaaggcgctcttgatttggacaaaatcccaaagaagctatgcgttataggagcgggtgctattggtttagagctaggaagcgtatggagaaggcttggtagtgaagttgttatcttagagcgagatggatttttgacaacagcaganagcaangtntctagaacctctgcttcgtattttaaaaaacaaggattaaacatttttaccggggctgaagttatcagtgtcagtgaaaccagtaaatttgcaacggttaagtataaaaaagcgcaagaagaaataacagaaaaatttgataatgttatcgttgcagtaggaagaaaaccttatntngaagggtgtatagacaaagattctggcgtcaaaattaacgatagcggtagggttgaagtggatgacttttgncaaacaagtgtagagggtgtatatgcaattggcgatattgttaaaggcccaatgcttgcccataaagcatcagaagaaggggttgtagttgcacagagaattgctggacaaaagagccaaataaaccatgacttagtgcctatggttatttatacgcatccagaaattgcatgggttggtaaaactgaaaaagatctaaaaacaagtggggttgactataaagttggagagtttagctttatggcaaatggccgtgcaaaaagtgcaagtgaaactgacggcttcgttaaagtacttgcagatagcaatactgacagaatattaggcatgcatatcgttggacacaatgcatcagaactaattgcaaatggagtaataaccatggaatttgaaggnacaagtgaagatctttcaaggatgatttttgctcatccaacnttgtctgagagtattcatgaggcagcacttgcagtagacaaaagagcaatacacaccattaacaaaaagtaggtaatatgaatttacacgaatatcaagcaaaagatttatttagaagttttaatataccttgctccactggtacaactattacaaaaacacatgaaatagcagatgccataaaacaactcaaaggaaataagtggattattaaagctcaggttcatgctggaggcaggggtaaagctggaggtgttaagcttatagagtctgttgatgaagcgcaagagtttacagaaagccttttaggtaaaaaccttgtgacctatcaaacagataaaaatgggcaacaagtaaacaccatcttaatagaagaagtctgcaatatatctagtgagttctatttaagtatgcttgtcgataggggcagtgaaagcattgcaatcatctcatcaactgaaggtggcatggaaattgaagaggtgtcaagaaacacccctgagaaaatcattactacaagaataaatcctgcaattggcattatgccttatcaagtaagaaaaatatttaccacgcttgggctagaaggaaaagacctgtatagagaattacaatccatgcttgtaaatatgataacaatgtttaagcaaaacgacttatcactccttgaggtaaaccctttagttttaaccaaagaaaacaatttactatgtcttgatggcaaggtttcagtagatagtaatgcactttatagacaaaaagaattagagaaaaagcacgaccttactcaagaagatgaaagggaaatagacgctgaaagctttgagcttaactatgttgcgcttgatggcaatgttggttgcatggtaaatggtgcaggacttgctatggcaaccatggatcttatcaagctacatggcggagaccctgcaaactttctagatgttggtggtggcgcaacagttgaaagggttactaaagctttggaaataatcctatccgataaaaacgttaaaagtattttgattaacatctttggcggtattgtacgttgcgatattattgctgacggcataattgaggcgctcaagaagattcaaactgatgttaagtttgttgtgcgcttagaaggcaataacgccgaacttgggctgaaaaaattagaagatgaagatttagatatattggttgcaaaagaccttacaaaagcaaccaaacttgcaattgaaagcgctgcgttataggaataaaaatgagcatattaattaataaagacacaaaagttatttgccaaggctttactggagcgcaaggcacatttcactcaactcaagcaatagaatacggcacaagaatggtaggcggggtaacaccaggtaaaggtggcacaacccaccttgacttgccagtatttaatagcgttgagnaagcggttaatgacacaggtgcaaatgctagtgttatttatgttcccgctcctttttgcaaaganagtattatng

SEQ ID NO: 1297 - DNA, 4000 bp, Escherichia coli
  misc_feature (281)..(281): n is a, c, g, or t
  misc_feature (287)..(287): n is a, c, g, or t
  misc_feature (290)..(290): n is a, c, g, or t
  misc_feature (293)..(293): n is a, c, g, or t
  misc_feature (323)..(323): n is a, c, g, or t
  misc_feature (419)..(419): n is a, c, g, or t
  misc_feature (462)..(462): n is a, c, g, or t
  misc_feature (482)..(482): n is a, c, g, or t
  misc_feature (521)..(521): n is a, c, g, or t
  misc_feature (551)..(551): n is a, c, g, or t
  misc_feature (620)..(620): n is a, c, g, or t
  misc_feature (626)..(626): n is a, c, g, or t
  misc_feature (894)..(894): n is a, c, g, or t
  misc_feature (1073)..(1073): n is a, c, g, or t
  misc_feature (1076)..(1076): n is a, c, g, or t
  misc_feature (1142)..(1142): n is a, c, g, or t
  misc_feature (1226)..(1226): n is a, c, g, or t
  misc_feature (1331)..(1331): n is a, c, g, or t
  misc_feature (1352)..(1352): n is a, c, g, or t
  misc_feature (1466)..(1466): n is a, c, g, or t
  misc_feature (1553)..(1553): n is a, c, g, or t
  misc_feature (2420)..(2420): n is a, c, g, or t
  misc_feature (2639)..(2639): n is a, c, g, or t
  misc_feature (2756)..(2756): n is a, c, g, or t
  misc_feature (2801)..(2801): n is a, c, g, or t
  misc_feature (2822)..(2822): n is a, c, g, or t
  misc_feature (2825)..(2825): n is a, c, g, or t
  misc_feature (2831)..(2831): n is a, c, g, or t
  misc_feature (2928)..(2928): n is a, c, g, or t
  misc_feature (3178)..(3178): n is a, c, g, or t
  misc_feature (3215)..(3215): n is a, c, g, or t
  misc_feature (3267)..(3267): n is a, c, g, or t
  misc_feature (3309)..(3310): n is a, c, g, or t
  misc_feature (3312)..(3314): n is a, c, g, or t
  misc_feature (3318)..(3318): n is a, c, g, or t
  misc_feature (3320)..(3321): n is a, c, g, or t
  misc_feature (3323)..(3323): n is a, c, g, or t
  misc_feature (3325)..(3325): n is a, c, g, or t
  misc_feature (3327)..(3327): n is a, c, g, or t
  misc_feature (3329)..(3332): n is a, c, g, or t
  misc_feature (3338)..(3338): n is a, c, g, or t
  misc_feature (3341)..(3341): n is a, c, g, or t
  misc_feature (3345)..(3346): n is a, c, g, or t
  misc_feature (3348)..(3352): n is a, c, g, or t
  misc_feature (3354)..(3355): n is a, c, g, or t
  misc_feature (3357)..(3358): n is a, c, g, or t
  misc_feature (3361)..(3364): n is a, c, g, or t
  misc_feature (3366)..(3368): n is a, c, g, or t
  misc_feature (3371)..(3374): n is a, c, g, or t
  misc_feature (3376)..(3376): n is a, c, g, or t
  misc_feature (3379)..(3379): n is a, c, g, or t
  misc_feature (3381)..(3381): n is a, c, g, or t
  misc_feature (3383)..(3383): n is a, c, g, or t
  misc_feature (3385)..(3385): n is a, c, g, or t
  misc_feature (3388)..(3391): n is a, c, g, or t
  misc_feature (3394)..(3394): n is a, c, g, or t
  misc_feature (3396)..(3396): n is a, c, g, or t
  misc_feature (3399)..(3399): n is a, c, g, or t
  misc_feature (3401)..(3405): n is a, c, g, or t
  misc_feature (3411)..(3415): n is a, c, g, or t
  misc_feature (3422)..(3425): n is a, c, g, or t
  misc_feature (3428)..(3429): n is a, c, g, or t
  misc_feature (3431)..(3431): n is a, c, g, or t
  misc_feature (3434)..(3436): n is a, c, g, or t
  misc_feature (3438)..(3439): n is a, c, g, or t
  misc_feature (3443)..(3447): n is a, c, g, or t
  misc_feature (3449)..(3451): n is a, c, g, or t
  misc_feature (3455)..(3459): n is a, c, g, or t
  misc_feature (3461)..(3461): n is a, c, g, or t
  misc_feature (3464)..(3466): n is a, c, g, or t
  misc_feature (3468)..(3469): n is a, c, g, or t
  misc_feature (3471)..(3472): n is a, c, g, or t
  misc_feature (3475)..(3476): n is a, c, g, or t
  misc_feature (3478)..(3479): n is a, c, g, or t
  misc_feature (3481)..(3486): n is a, c, g, or t
  misc_feature (3488)..(3488): n is a, c, g, or t
  misc_feature (3492)..(3500): n is a, c, g, or t
  misc_feature (3502)..(3506): n is a, c, g, or t
  misc_feature (3509)..(3509): n is a, c, g, or t
  misc_feature (3517)..(3519): n is a, c, g, or t
  misc_feature (3521)..(3524): n is a, c, g, or t
  misc_feature (3527)..(3528): n is a, c, g, or t
  misc_feature (3531)..(3531): n is a, c, g, or t
  misc_feature (3533)..(3537): n is a, c, g, or t
  misc_feature (3539)..(3541): n is a, c, g, or t
  misc_feature (3543)..(3548): n is a, c, g, or t
  misc_feature (3555)..(3559): n is a, c, g, or t
  misc_feature (3561)..(3561): n is a, c, g, or t
  misc_feature (3564)..(3564): n is a, c, g, or t
  misc_feature (3567)..(3574): n is a, c, g, or t
  misc_feature (3579)..(3579): n is a, c, g, or t
  misc_feature (3582)..(3584): n is a, c, g, or t
  misc_feature (3587)..(3589): n is a, c, g, or t
  misc_feature (3593)..(3594): n is a, c, g, or t
  misc_feature (3596)..(3604): n is a, c, g, or t
  misc_feature (3606)..(3608): n is a, c, g, or t
  misc_feature (3610)..(3611): n is a, c, g, or t
  misc_feature (3613)..(3614): n is a, c, g, or t
  misc_feature (3617)..(3621): n is a, c, g, or t
  misc_feature (3624)..(3627): n is a, c, g, or t
  misc_feature (3631)..(3633): n is a, c, g, or t
  misc_feature (3636)..(3642): n is a, c, g, or t
  misc_feature (3644)..(3644): n is a, c, g, or t
  misc_feature (3646)..(3646): n is a, c, g, or t
  misc_feature (3648)..(3648): n is a, c, g, or t
  misc_feature (3650)..(3650): n is a, c, g, or t
  misc_feature (3652)..(3652): n is a, c, g, or t
  misc_feature (3656)..(3656): n is a, c, g, or t
  misc_feature (3658)..(3659): n is a, c, g, or t
  misc_feature (3663)..(3663): n is a, c, g, or t
  misc_feature (3666)..(3668): n is a, c, g, or t
  misc_feature (3670)..(3670): n is a, c, g, or t
  misc_feature (3673)..(3679): n is a, c, g, or t
  misc_feature (3683)..(3689): n is a, c, g, or t
  misc_feature (3691)..(3693): n is a, c, g, or t
  misc_feature (3698)..(3699): n is a, c, g, or t
  misc_feature (3702)..(3702): n is a, c, g, or t
  misc_feature (3705)..(3708): n is a, c, g, or t
  misc_feature (3712)..(3714): n is a, c, g, or t
  misc_feature (3717)..(3718): n is a, c, g, or t
  misc_feature (3720)..(3721): n is a, c, g, or t
  misc_feature (3723)..(3724): n is a, c, g, or t
  misc_feature (3726)..(3741): n is a, c, g, or t
  misc_feature (3743)..(3746): n is a, c, g, or t
  misc_feature (3748)..(3750): n is a, c, g, or t
  misc_feature (3752)..(3754): n is a, c, g, or t
  misc_feature (3759)..(3761): n is a, c, g, or t
  misc_feature (3763)..(3769): n is a, c, g, or t
  misc_feature (3772)..(3773): n is a, c, g, or t
  misc_feature (3775)..(3777): n is a, c, g, or t
  misc_feature (3779)..(3779): n is a, c, g, or t
  misc_feature (3781)..(3781): n is a, c, g, or t
  misc_feature (3784)..(3784): n is a, c, g, or t
  misc_feature (3787)..(3787): n is a, c, g, or t
  misc_feature (3789)..(3792): n is a, c, g, or t
  misc_feature (3794)..(3795): n is a, c, g, or t
  misc_feature (3797)..(3798): n is a, c, g, or t
  misc_feature (3800)..(3802): n is a, c, g, or t
  misc_feature (3804)..(3804): n is a, c, g, or t
  misc_feature (3809)..(3810): n is a, c, g, or t
  misc_feature (3812)..(3814): n is a, c, g, or t
  misc_feature (3816)..(3822): n is a, c, g, or t
  misc_feature (3828)..(3835): n is a, c, g, or t
  misc_feature (3837)..(3837): n is a, c, g, or t
  misc_feature (3842)..(3843): n is a, c, g, or t
  misc_feature (3845)..(3845): n is a, c, g, or t
  misc_feature (3849)..(3857): n is a, c, g, or t
  misc_feature (3859)..(3866): n is a, c, g, or t
  misc_feature (3869)..(3871): n is a, c, g, or t
  misc_feature (3873)..(3875): n is a, c, g, or t
  misc_feature (3878)..(3878): n is a, c, g, or t
  misc_feature (3880)..(3880): n is a, c, g, or t
  misc_feature (3882)..(3882): n is a, c, g, or t
  misc_feature (3884)..(3887): n is a, c, g, or t
  misc_feature (3890)..(3890): n is a, c, g, or t
  misc_feature (3892)..(3892): n is a, c, g, or t
  misc_feature (3894)..(3895): n is a, c, g, or t
  misc_feature (3897)..(3897): n is a, c, g, or t
  misc_feature (3899)..(3900): n is a, c, g, or t
  misc_feature (3902)..(3904): n is a, c, g, or t
  misc_feature (3908)..(3909): n is a, c, g, or t
  misc_feature (3911)..(3912): n is a, c, g, or t
  misc_feature (3914)..(3915): n is a, c, g, or t
  misc_feature (3917)..(3917): n is a, c, g, or t
  misc_feature (3922)..(3922): n is a, c, g, or t
  misc_feature (3924)..(3929): n is a, c, g, or t
  misc_feature (3931)..(3932): n is a, c, g, or t
  misc_feature (3934)..(3934): n is a, c, g, or t
  misc_feature (3938)..(3940): n is a, c, g, or t
  misc_feature (3942)..(3944): n is a, c, g, or t
  misc_feature (3946)..(3947): n is a, c, g, or t
  misc_feature (3951)..(3953): n is a, c, g, or t
  misc_feature (3955)..(3957): n is a, c, g, or t
  misc_feature (3959)..(3960): n is a, c, g, or t
  misc_feature (3962)..(3968): n is a, c, g, or t
  misc_feature (3970)..(3973): n is a, c, g, or t
  misc_feature (3976)..(3976): n is a, c, g, or t
  misc_feature (3979)..(3979): n is a, c, g, or t
  misc_feature (3981)..(3981): n is a, c, g, or t
  misc_feature (3984)..(3984): n is a, c, g, or t
  misc_feature (3987)..(3992): n is a, c, g, or t
  misc_feature (3995)..(3995): n is a, c, g, or t
  misc_feature (3997)..(4000): n is a, c, g, or t
gtgtccaaagctctagtaagctagctcgcactagcctggctgccctagaaaaagcggtcgaaaagcttggcggcaccccgcgtgctggccaagagctgatggctcaaaccgtggcggaaatagccgatgagggtggacacctgctagtgcaggcaggtaccggcaccggcaaaagtttgggttatctgatcccggccatggtctacgcggtgcaaaacgagcaggtggcggtagtttccacggctaccttggcgctgcagcgccaaatcgtcaccaaagangcgccnttngcngctgaggtagttgagcaggtaaccggtaancaacccaccgtggccctacttaaaggctggcaaaactacctgtgcgtccataaggttaacggcggctacccaagcgacgatgatctatttgccgcngccggccttaatatgcgccgcaaacgtaaaggtgaagaaagcntaggtgaccaggttctgcgnctaaatgagtgggctagcctcacccaaagtggggaccgngatgatctagttcccggggttagtgaccgngcctgggcgcaggtgtctctagaccgcaccgcctgcctgggtaaaacctgcccagtctatgagcagtgntttgcntacgctgcccgtgagcaagccgctcaagcagatattgtggtcaccaaccacaccatgctgggggtggccgccgctggcaacactggcttgatccccccacaccagctgctagttgttgatgaagcccatgaactggcctcacgtgtacgcagccaaggcgccatcacgctatcagccacctccatcaaccaagccgctaaagctgcccggcgttgccaagtaattgccacagagctagagaccgccgccaaaaccctgcaggaggccntagaaaacctgccgcaggggcgcctggccgcacttactcccagcttgcaagacgccctaatcttgctagatgcagcggtgcgtcaagctctcgaagacctcaaagacggcaaaaaaccaggcgaagctcccagccctgaactagtgctagctaaaagcgagctaactaaaatcaatgangcnctctcgcggctgctatcaaattcgattgctagcgctaaagatgtgctctggtgtgaacaaaccacnagctctaaagacccagtaaggctgcgtctagcgcctatcgaggtggcctccaccatggccaacaccctgattgaagaccacagngtcatcatgaccagcgctaccctcactttgggcggatcgtttaacgctatggctaatgaggtgggtttaagctttgccggtggctgggaccagctagatgtgggntccccatttaactaccccaancagggcattctttacgtggccgcgcacctgccaaaacccacccagggcatttccccggccgcactagaagaaatgtgccaattagcgcaggctgcaaatgggggcatgctgggnttattttcttcgcgccaagccacccaggaagctgccaaatatttacgtgagcacactgatttgccggtgcttgtgcaaggagaagancagctacccactttggtggaagaatttaaggctgatgaaaacgcttgcctgctggggaccttgagcctatggcagggggtggatgtgcccggacaaacctgtcgtttggtggtgattgaccgtattcctttcccgcgccctgatgatccgctagctcaggcacgcatccaggcggtgcaagacgggggcggcaatgggttcatgcaggttagcgccaaccatgcggcgctgttattggcgcaggctgcaggcaggttgattcgctctagtagtgatcggggagtggtggcagtactggactcgcgtctgcgtacggcccgctacgggagttatctaattaaatcgatgccagatttttggcgcactactgattcaaagttggttcatgccgctttggaacgtttggcggtctaacgtcctatttggctccgctcgctgcatgcatttgatctgtcaaagtcctaagaaataattagcaatttgttttaggggcttagcaagaagagattttcgctttaggcttgtacttgtcaggtacaagggataccttgtcagaccgaattcagctttatttaggagttcaccgtgtcagacaccattaccaacgcagcacagggtggctaccctaccgcgcagggtcgcccctctaaggttgccattatcggcgccggtgcagttggttccactcttgcctacgcttgtgtcaacaagggtgttgcccgcgaaatcgttttgcaggacattgctaaggaaaaggtagaagctgaggcgatggacatcgcccagggtattcagttcacctctgccggttctgttgccggtagcgatgaccctgagatctgccgtggcgctgacgtaatcgccatnactgctggtgccaagcagaagcccggccagagccgtattgagctagccggcgctaccgttggcatcatggagaagattctgcccaagctggtcgaggttgctcctaacgctatcttcgtgctggttgccaacccggttgacgtagttacctactgcgccaagaagatcactggcctgcccgagaaccagatcttcggttccggtaccgtgctggacacngcccgtatgcgttacctggtctccctggagaccggcactgccgtacagaacatccacggctacatcgctggtgagcacggtgactctgaggtggctctgtggtcgagcgcccagatnggtggcgtgccgctaacccagtggggccccacccttgacggtggncacttcgaccaggagaagcgngancgcatngcttacgacgtagtgcgcagcgcctaccgcatcatcgagggtaagggcgttaccaactacgctgtgggtctggctgtacagcgcatcatctccgccntcctcaacgacgagcagcgcgtactgaccatttccccgctgctggagcagtggcacggcatctccgacgtgtgcatgtccgttcccaccatcgtgggccgcgagggcgctggccgtcgtctggacctgccgctgaccgtggaagagcgcgacaagctgaccgagtctgcagaccgtctgcgctctgtggctcgctcgctgggctactgatctaaatagctgatcacttaaaaaggctggcgcccgcttgnggcgtcagcctttttgtttgtgccggtttgcgttgtnctggcttgctttgtggcgcgctagcgttggttgtagcgttttttaacgacgncgccgctaaggcttttgctgacgacggcgccgctagctgagnnannngttncnntngngncnnnnaaggcnccngctnntnnnnntnngnncannnncnnnacnnnntngcncntnancannnnctngncgncnnnnntggggnnnnnggcgttnnnncgnngnagnnncnnctgnnnnncnnngcgnnnnnanagnnncnngnnggnngnngnnnnnncntcannnnnnnnnannnnngcngccacaannncnnnnttnntgncnnnnngnnngnnnnnnaccaccnnnnngncgncgnnnnnnnnggcgncgnnnatnnngganncnnnnnnnnncnnnannannaannnnnctnnnnagcnnnttnnnnnnngngngntntngtantnntccnccnnntnctnnnnnnncaannnnnnncnnncggcnncgnttnnnnccannnggnngnngnngnnnnnnnnnnnnnnnncnnnntnnntnnncaccnnntnnnnnnnggnntnnncngnggngtngnnnncnntnncnnngncaacnncnnnannnnnnngcgggnnnnnnnngncgcgnngnagcnnnnnnnnncnnnnnnnnttnnncnnntgntntntnnnngangngnngntnntnnncccnncnncnncnccaancnnnnnnanngnaggnnngnnncnnttgnnncnnncnncnnnnnnnannnngtngtntncgnccnnnnnnctntnnnn

SEQ ID NO: 1298 - DNA, 4000 bp, Escherichia coli
  misc_feature (371)..(371): n is a, c, g, or t
  misc_feature (3509)..(3509): n is a, c, g, or t
  misc_feature (3627)..(3627): n is a, c, g, or t
cttgtatttcttcattttttcttaaaaggccattattaacaaaaatacaagttaaattttttccaattgctttgcttaataattgtgcaaccacactactatccacaccacccgacaatccacaaattactttgttgtcacctacttggtctttaatttcattaattaattttaatttttgatcttttgatgaccagttttttttaattttacaaataagaaaaacaaaatttcttaataaaattttacctttattagtgtgtgttacttcagggtgaaattgtacaccataaaaattttctttaatattttcaataattgttaatttagagttttttgtagaagctataattttaaaattttttggcatntttgatacttgatcagcatggctcatccaaacatcacttctattatttttattaaaaaaattcttagttaaagtactattggatactttgtttatagtggctaaaccaaattctctatgttttgattttttaactttgccacctaatagttttgacaatatctgatgtccaaaacatatacccaggattggaattccaagttttaatatcttcttatcaaatttaaatttatcattttcataaacattaagaggtccaccagacagtattattccagcaatattatcttttgtaatttgagctatttttatttttttatgacttacaatttctgaaaaaacccctaattcccttactcttcttgcaattaattgtgtaaattgagaaccaaaatcgattattaagattttacttaaattattactaagactcatttttaggttccaaattctttaaggattctaaaatagaatttttcttatcacacaatttattgcaaatttttgaaaaattatctgctagttcttttactttggaataattagatctttttaactctatttccataagcatgtagtttgcttcttcattttttggatcaagtaataacactgtatctatatttttttgttcttctcttttgttctcttcaaaattataaatttttgctaaatacaaatatgaatctttgtccttagggttaaaaacaatacttctttgaaataaaaatttagattcttcatatttttgttcatcgtatttattttttccttcttcaaaaaagttattttctgcaaaagaagaacttccaaaatttaaaattataaataggacaattattaatttatttattgttctcattaatacttgctctcatttttaacttgatcaacattatgaaccatactttcataaaaaccagccttagttatttttacaaaatttggtttatttttaaggtttggtactttttttgcacctagatatcccatagatgattttaatcctccaattaatttataaattatacttttcacatcacctttatatttcacaaaaccttctactccttctggaacatatttagatatatctttttgtttggtttgaaaatatctatcagctgatcctttattcatcgcaccaactgatcccattcctctaaaacttttaaataacttaccattttttttaattagttttccaggtgtttctaagcttcctgcaaacaaagatccaatcattatagcatcggcacctgctgacaatgctttagctaaatcacctgaatatttaattccaccatctgaaattatttttactttattgtttttaacaccttttttaactgcaaggatcgcacttaattgtggtacaccaatgcctgcgactagcctagttgtacaaattgatcctggccctattccaactttaataatatctactcctaattttattaaaaattttgctgcttcagctgttgcaatatttccagcacatagagttgttttgtttgtttttaatttttttatagctttaataatttcagctacttttttgctatgtccatgagctgtatccacaacaattaaatcaactttttcttttaaaattgcttttgctcttttaagttctaaaggaccagctccaactgccgcaccaactaataagtttaattttttaacttttttaatttcttcaacttgttttttaatatccaaatttctatgaattacaccaatgcctcctgctttagctattgctatagccattttactctcagtaactgtatccattgcagaggataataaaggtatttttaatgttaaattagatgataatttagtgctggtatcaacttcagaaggtaaaacttctgagtattttggtgccattgtaacatcgtcaaaagtgagagcttcttttataggatccataatcatttatatatgattcccctcaaaaaaaaagtccctatcttaagattttacaaataataaaactttccttagattcttttctgctagacttgggtttaaacaccttcacttctttaaataattttttgcccaaagcaacaatttcgttaaatgatgagcctagaaaaatcttagagacaaatcgtccttctttaaccaacatttctttggaaaaattcatagcctccattgcaagttcaccagtataaattgcatctatatcttttatacccgttgtatttacagccatatcagagacaacaacatccacttttgatttgaataaagcttttattttttcttgagattctaaatcagtaaaatcacctttgatttggattgtattctcaatttcttccataccttttaagtcgattgaaaccaaccttccactttttactgttcttgaaatatattgagaccagctaccaggtgatgcccctaaatcgattacagatattccatttttaaatatcttaaatttttcatctatttctattaatttatatgctgatctggctcgatacccgtctacctgagattgtctaacataaatatctcttttttgtttattaatccagtttttagaaattctattttttttcaattaatgaccaaaccttaagctttttgataaaattttaccctctaaagtttttatatctatctttacttctctatgtaatctcatgtctttatctccatcccaaatcccagatgcaagatgtattatacccagtttatgattgggcaagtaaggctccacaaagcttttttctttttcattaaattttggtaaaagattactaactaaccaattgcaattatgaggtaggaactctgtttctaaatcgtcaatgtaaactgacatgttaatagccaattgttctgaaccaaaaatatttccagctttaagtgtttgttctaaatttttttgccaagtcgtccagccaactgaatttttttctaaagaaaaaacaccaatattaatatgtggggcgaaagcaagcttccgcgctttatctattccaatttttgactttattgcatgtttaaaattttgagatttaattattgctaattgtccaaatatccatttaactttggacattattttatatcctggtgtaaaggtttgagtaattcctaattttccatnttcacaggccttaaaataaagctctattgaattccaatcccctacccaagcgtcacaatctatccataagaatttttcataactaggaaaatattttggtaagaaagctctagatacntgactctttagccattctcttcctttaactttaaatgctggaacatcaatatcccattcagctgatttaatttcatctacttttttagataatatatttctttgttgctcggataaacctgcatctaaaatgcaaattgctgtatctttgctttgttcaaaacttttaatagaatcgaccaattcattaagtaattcaaagtaatttgagtctgccagagatacaattacattttttttcatctatagaatgtcttcaaggtcttctttagtgtcactttcaccatttaaaattttctgtttataaattttttgataactaaaatatccaactggaattaagcaaatatagattaatccacaaatgaccaaaa

SEQ ID NO: 1299 - DNA, 4000 bp, Escherichia coli
  misc_feature (179)..(179): n is a, c, g, or t
  misc_feature (479)..(479): n is a, c, g, or t
  misc_feature (482)..(482): n is a, c, g, or t
  misc_feature (866)..(866): n is a, c, g, or t
  misc_feature (882)..(882): n is a, c, g, or t
  misc_feature (917)..(917): n is a, c, g, or t
  misc_feature (1641)..(1641): n is a, c, g, or t
  misc_feature (1992)..(1992): n is a, c, g, or t
  misc_feature (2637)..(2637): n is a, c, g, or t
gattaattttccttgttttgggcaccctctacaacatgattatttccaaatggtttatgccctcacggtccattatttcctctcttaccagaaagtatcacatgggtagttttttaacagaattcaaagtgggggaagattcacccctaattgggaatgcctataaagacttggatatntcccaaaaatataatcttcaagtgtacaaaattattcgtgattcagaaaatatccgctttaatttgcaaaatattattatccgcgaaggtgatatttttctggttcatataaatgtgaaagatatgttgaaattcaaagatgaaatgaaagttctccttctaacagatgtgaaaatgaacgtggcagaattaaccgggaaaaaccatgtaattgtggaagggctcgtttcccagcaatctgcattaattggtaaaacgctccaagaatttgattttagaaatcgctatggatcctttgtnttngctgtaaagagacaacgtgaattacttcgggataaaattgcccatatccgcctgaaattttctgacacccttttaataatggttccgaaggaaaggttagaaatacttcgaacaagtaataacctcattgttttggaagaattggatattcatctcaggtatgagcgctattggtggttttctattttagtaatccctgctgtaatgttactggctgcattcggtgtaataccaattgtgaaagccgccattttgggggccattttattgttggttatgcggacactttcaatacaggatgcctatgagtctattagctggtcagttatttttctcattgcttccttagtccccatgggaattgccattcaaaaaacaaatctngatgaggtaaccgganatctcattattggaattggtacactcattggaggnggagaagggttggacccggttattattttagcagtactgtatggggttacatttattttgtcagcattcatctcaaatgtagctgtggcagtgatgcttacacccatcggtataatgttggctaccattcttaatgtggatccacgcccatttttggtggcaatctgtttcggagcctcctgtagtttcatgactccaatgggatatcaaaccaatatgatggttttcgctccagggcaataccgattgaaagatttcttccaaatgggtattccccttacattagtattttggattaccgcagtatattggattccaagattttgggcattttaatcaagggaattaattcatgctaaagttcatgttaattatattggatggctttggacttcgccaagaaaaggagggaaatgccattgcccaggcaaatactcctactttagatagaatgatgaatgactgccctctctcaaaaattgaaacctcaggaaaatttgtgggcttgccagatggaataatgggaaattcggaggtgggtcacatgaatatgggtgctggaagaattgttaagcaagatttagtccgaataaacgattccatcaaatccaatgaattaaaaaataatactcaacttcagaatgtatttaatcatgtgcaaaataatactagcacccttcatataatgggcttaataagtgatgggggagtccatagtcatttngaccattttgaatatatcctatcaacagcacgagaaagtggagtggaaaaaattgccatacatgcctttatggatggtcgtgatacttcgcctgtgagtggcattaatttcataaatacattagaaactttcattacttccgatgatcaatacagggtaacaaccgtttgcggtagatattatgccatggatagagacaatcgctgggagagagttgaaactgcatatcagatgctcatccattccgaaggagaaaaatttcctgatgcagctacagccattcaggcttcttatgataatgacattacggacgaattcataaaaccaactgttattggtgaggattgcccnattcaaaatggagatgcgctgctgtcaatgaatttcagggcagatagaatgcgccagattgttacagccattaatcattcaaaatattcccattttaaaacaaaaccattggatattttatttacatccatcactaagtataaggagaatttcccttttccggttttatttgaacctgaaaagataaataatatttttcctgaaatattagcccaaaataattatcgtcaatttcgaattgcagaaacggaaaaatatgctcatgtaacctatttttttaatggaggaagtgaacagccatttccaggtgaaactcgaaaactcataccttcgcctaaagttgctacctatgacctccagccggaaatgagcgcccatgaagtaactgatgaagtactcttcgcaattgaaggtgatcagtatgaagccatcattatgaattttgctaatcctgatatggtagggcatactggaaatattaccgcagctatctccgccatcgaaaccattgatgcctgtttggagaaaatccaacatgccacaaaagagaagaatgcagctatatttctcaccgcggatcatggcaacctggaactcatgcatgacccccagagcggaatggcacacacagcccatacaactttnccggttcctttaattttggtgggagtgaatggaaattacagtttggcagaaaggggaaaacttgccgatattgcaccaacaattttagattatttaaaaattgaacagcctcaagaaatgactggaaatagtctgctaatttctacgaatgattaaatgcggtatatttttattttcataaatgttttcggcttattggaagcacaaaattttagatatgtccctgaggattggtatatcataaccaagccgggagctattactgctattgcagaagataatttcaacctctattttgcaactgaaaatggagtatatcgttacgataaggctcgggaagatttccaatatgattatacattttctgtacaattagaatttccgaaaattacccatttttattttgattcctatcgtgattatttctggatggtgcacggacagggtataagttttaaatcttctgtgagtacaaattggcgggatatgtccctcataaattctggtattttcagtatatatgaaattggtgatattgggtcatctccagaatatttttggattcgttcgggagcagaattcatcccctttgatccattctctgggcttcctgctgattgggaggatgctcagaatgaagttgattttatagattgggggcattctagccaaggtaatgccgggtatgagttagaaatatcaaagtattccattgaaggtgattggacagttggattgcataagataacccataaagatggtcgtacaataagagtaaccatgcacatggaagatgacgaaggaaaccagtggtttggtacagattcgggttttattttaaaaggatgggttcattcttcaagattaaaaatgatttctattggcttactttccgagaatgtcacagaggcatattttgattcagaagaaaattggtggtttacagacagcagatttaaacgtacagggcagtttttatcttttaatagtctttaccaaacgaatcacactccatttattagccagtggaatgaacccacaaaccaatggacatattactaccacaatgaatctatagttattgaaaatacggatgttaattctattttgcgcatcggcagtaccatgtattttggtactatgtctgggcttctctatcttgacctgtataatcgggattggaatattataactgcaaccaatggattaaatgattctgcagtatgggatatgattgaacatgacggatccatttatttagcaacctcaaatggaattaatgaagtttctataataaatcataatgtcattcctgatagagacaataaatttgataaattaacccaatttaacatttatgata

SEQ ID NO: 1300 - DNA, 4000 bp, Escherichia coli
  misc_feature (1)..(3): n is a, c, g, or t
  misc_feature (5)..(5): n is a, c, g, or t
  misc_feature (7)..(7): n is a, c, g, or t
  misc_feature (10)..(15): n is a, c, g, or t
  misc_feature (18)..(18): n is a, c, g, or t
  misc_feature (20)..(24): n is a, c, g, or t
  misc_feature (26)..(29): n is a, c, g, or t
  misc_feature (32)..(34): n is a, c, g, or t
  misc_feature (36)..(36): n is a, c, g, or t
  misc_feature (38)..(40): n is a, c, g, or t
  misc_feature (42)..(45): n is a, c, g, or t
  misc_feature (47)..(48): n is a, c, g, or t
  misc_feature (50)..(51): n is a, c, g, or t
  misc_feature (53)..(57): n is a, c, g, or t
  misc_feature (59)..(61): n is a, c, g, or t
  misc_feature (63)..(63): n is a, c, g, or t
  misc_feature (66)..(67): n is a, c, g, or t
  misc_feature (72)..(72): n is a, c, g, or t
  misc_feature (74)..(74): n is a, c, g, or t
  misc_feature (76)..(84): n is a, c, g, or t
  misc_feature (87)..(88): n is a, c, g, or t
  misc_feature (90)..(90): n is a, c, g, or t
  misc_feature (92)..(92): n is a, c, g, or t
  misc_feature (96)..(101): n is a, c, g, or t
  misc_feature (104)..(105): n is a, c, g, or t
  misc_feature (108)..(110): n is a, c, g, or t
  misc_feature (116)..(117): n is a, c, g, or t
  misc_feature (119)..(120): n is a, c, g, or t
nnncngnttnnnnnncantnnnnngnnnnatnnngngnnntnnnnanngnngnnnnnannncngcnngcatncnannnnnnnnncanntnanagcnnnnnnaanngcnnnaaaaanntnnccaaaaaactgaccagaaaactaaatagggagaataaaaatggaaatcactataaccccgtctggccaagcatgtggcgcatcgataacaggagtggatctatctcaaccgcttgcagacgagcagatagccgaaatacgcgcggcatggctcgagcataaagtgctgagttttcctcatcagtctatgacagacgatgacctcgagcgtttcactctttcattcggcgcatttggaaacgatccctttatcgcaccaattgagggtcggaaaaatattattgctgtggaacggagagcggacgagaaggcgccgctattcgcagaaaactggcacaccgactggagctttcaaaaagcaccgccggctggaacatgtctttacggaataaaaataccttcgaaagggggcgatacactatttgcgaatcagcaaaaggcatggcatgacatgccggcatatcagcaggagaaataccgtgatcttgtcgcaatacattctgctaagtcggcgtattctccagagggcatgtacgggaaagaagatcagacgagtgatcgcagcatgaatatccggccctctgaggatgcacgcaaactgcaaacacatccgcttgtgcacaaacatcccgaaacaggcgtcgaaggtttttacagttgcctcggttatatagttggtctggtcgacaaaacagaagaggaggctttcacgcttctcaaagagctaagcgactggcagggaaaagaagagtttgtttatacccacaaatggcagccgcagatgctagttatgtgggacaaccgcgcgttgttgcatagagcaacggggggtcatgagggagaggacaggctgctgcatcgcaccaccattgccgcgtactagtgcgaaagccgcgctgccttctataactcttgaaggcagcacgttttctcgtttacttttgagggcagactaaaaacttcttgcctgtagattttgagttgtactgcgcaacgatgtcagcgtctaacgcctctgcgagggagatctcgttagtgtagtggctggcgaatgttgttttcatctcagtcgcaacgcgtgtgcgtaaacgagtcgccacttcttggccgacacgcgctaggaaattaggcaacaaccagccgccaactccccaagccatgccatagccacggttgagtgttgtgggtgaagtatcgagcccaccatacaaatacacctgcttgtgcttaaccgagccatagatgctgtatgcgcctggtgtgcgcgccgcagcagcctccatggccgagaggattgttgaggctaatgtgccgccgccagttgcgtcaaaggcgagtgtcgcgcctgttgcgtgaatagcgtcggtgaggtcggccataaaggtgtctttgctgctgttaacaacgtattttgcgcccatctcacgaagcaaggtttcttgctcgtctttacgcacaatgttgacgagatcgatgccgccgtcgagacaaatgcggttaagcatctggccgagattcgacgccgctgccgtgtgcacaagcgcagtatgaccctcgaggttcatcgtctcgatcatgcataatgcagttagggggttaacgaaactcgacgcaccgtctttcgcggtatgaccttcgagaagcggcaagcaaacagaggcatccacacagcgatactggccatacatgccgccgcccatcgcagcgactactttaccgtcgagactctttgcgagctcactagtaccggtcgcgacaactgtgccggcgccttcgttacccacggcaagcgattgcccgattcttgccttcatcaccgccatgccttgttcggaaaccggcgcggttaatactgtgtctgcaccgctgcccgacgagatcgcgcttgccatcgacgcccaaccaaacatgacaccatggtcagaaggattgattggcgtagcctcaatgcgaataagcacttcgttctcgcctggaataggcattggctgctctttgagttcgaggcgaagttcgccctcggctgtgagcgttgaaaacatctgaaggtaggtcgaatccgatgacatagcgcgcctctttgttgatttaattaaggcaaagattagaacacactttgtcgcggaatatcagccaaagaggcggagcttacaccttgtcaaaaatgggaagcgtcgcctgagttagtctttccgcgtcatagaccaaggtgcctcggcgcccattgcccgtgcgatgccgacgatagtcgcaccgttaacagtgccactcatgtcgtaaaccattggagagccatctctgtctatcctaaaagtgatttcattggttgatgccacgccctcttcgatcgcccagagacggccgttacccaaatcaaatgtgccaacgagagcatcgcccgaagtgtcgagcgttacgacagcgtttaccgcaccgaaggggctgctcatagtgaaatcccagatgccgtcggcagtgggagttgcagtggaggaagtgcttgtggcgcaagcagatagagttgagagtgaaaataagagcgatagaaagagtggttgaaagcgttgtctgaccatgggttttctccttgttgattaattttcttatagttagaattcaacgtactaatggttcctctataaaaacgcccacagtgatgaagtagattattgaacactatatccatctgaggaataacgaatagcgctcggaaaatgaagagtttctataatcgagtgcccgacaaaaatggcctcttcatttttgcgccgactgccatacgcgcgcataaaagcgccttcctcggctctgcttggaatcccaccgttaagggcaagttgaattatctgggcaacttcgtttggtttttcgcgctgcggatagtgcccggcagtagggagtaaccaataggtgctttcggcagctctgtcattcagataagtggcccatacgtgattagaaatccgtacaggattaatgtcgtcgagcagtccccagaggtaagcgacaggaatatcgcttcgagacaagttgttgagccagcgtaattcgttttctgcgcgctctaacagatatcgggctacatggataagcgcgctgtcgccatcgttaaatttaaaaatatctgcgtaggcgagcgcctccggattgccttgggtcattctaggcactgatttccgcgcttgaatgagtgcattcccacggacagggtcgagcaaggcggtttgcatgggcattaggttagcaagtggtaagaacatgccgctgttagataaaaagtggtaattaatactgtattccgcgggctgtgtgtcgagatagttgccaagaaaagcgaggccaatactgacacctctgtcatgcgtataaagagcgaaatcatcgaaactaattatctctgttacgaaataatccaaaatttcggcattctcttccagcatatagctgaaattaggcgcaggtttgtctgagaaaccggagccggggaaatctagcacagcgatatgaaaatcgttttccaacagtggaactaatttgtagaagtcgaagctcgaattaggaaaaccatggaccatgactaattgcggtttgtctttactgccaaaggtacgatagaagacattaactttagcctgctggttattctttgtcgttgaagtccactcgaaatagtcaccgccctcgaaccaggattctgctaggtctgagtgaaatacaaaatcagactcttctgccaaagaaaaaaaggagagagacgaaaaagcggcaataaaaaaagttaaaacgagcttcgctttcatagcgtacagcaccttagttaatagattaattagtagactaatcaatagttcggttaatacattgatttactgatcgatagc

SEQ ID NO: 1301 - DNA, 4000 bp, Escherichia coli
  misc_feature (1252)..(1252): n is a, c, g, or t
  misc_feature (1428)..(1428): n is a, c, g, or t
tcgtctggctgatcatcgtggtactttacggtatcaaagcatatcgcggcgagtacatcaccattcctttcgtcaccaatttcgtcaaacagcaaggctgggcttaagacccctgtcgtgcaatatttttccgccttcgaggacagatttctcgaaggcggtttctttattcctatccttggatcgttgtggctaaccttctggattacaaaagcagagattcggagtttgcgctaaaattagcccatccacttatggttgaaaccgaaactcaaaaagcgatcgatcttgaactcgcccgtgctgaccaggcgcaccaggccggaaatgagggtatggcgcgggtctgcgcccggcgggcagccggaatcgcggttcgggaatactttgtgcataaaaaccttggaattgccgacccgagtgcctttaccttgctgacccgcttacaaaagttggaatcaactccggctgatatcaagatagccgctgataatctgttgactcgcgtcacgccggactaccgtttgccaattccgatcgacctgactgcccaggcgaagctattaatcaattgggcggctgaccaaatcaaaggagatcaacttgactgactccaatccaatcatcattatgtacggaaccacctggtgcttcgactcgcgccgcgcccgccgaattttcgacgaactggaaattccttatcaatggattgatattgacaaggatcctgaagcgcgtagctacgtagaagaagtcaaccacgggttccggtcagtcccgaccattatctttccggatggcagcatgttggtcgaaccttctaatgaaatcttgcgtgagaaattaaccgaattaacccgcggctaaagtgccagcggcggctgttattttttgcctttgctgccgagaatcagccaggtcaccagaccagctaagaaacctatcccgatccataccagccaatcaaccgattgggatgtccgtccaagaactgtctgatccgagcgggtcaagcggcggctcagcgtgctaataaaatccggatccgggtctatcggccgaaagtagctatataaatcgtcttcaattccagaaatttgtgacaaatctgcctgcatccttcaccttccccctgctaaattcgatttaacaagcgaatccaccgccaccgtcgcaaaagattgcggcatccggaagttcatcttggtggaacgctcatctttgtaaaacattcatccttctccttgagaantgctcgtcagatcgcttcgcagtgaaagtagggtgcggtgatataagctcttgatggcgccttcgctgcgtcccataattcgggcgatctcgtcattggacatgtgctcaacaaacttcagaatgatcaggttttgccggtcttccggaagtttttggatggcttccaacagcacntgaacttcttgatttttaaccagagccacctctgggtaatcaccgccctggcgcagtgtgtgggtgtgatcctcgagtggcacttcccgccgacggtgactgtcgcggtgccagtttgccaccaggttatgagcgatgcggtaaagccaggcggtgaagggtaatccacggttgtggtaattgtggatgtggttcatcgcccgaaagaaaacacgctcagtcaaatcttcggcgtcgtgttggctgcccgtgcggtagtaaatatagttataaatgcgcttgacatagcgctggtaaagaacgctgaacgcattcttgtcgccttgtcctgccaggatgatggcttcgtcgtcacttaattcatccaagagagttccctgtcaggtctttctatccctaattaacccgaaattgctggataagttacatcaacgccagtaaatcaacaaacccgatggactataccagttccatcgttcccattatagcggtaaatttcgagcttttccggtaagtttctaccagacagcctggtttttggttcgggtgtacacttatcccaccccaaatattagattggtatcgatccacgaggttgcatgcaaaaaattgaattttcctggaaaacgccgaaaaacatacccatatttgcctgtgaatggaaaccggttgggcctgtcaaggctgtgatcgtattagtgcatggcattggcgagcatatcgggcgttatgagcatgttgcgcagatgttcaccgataaccattacgcctttttaggcgccgatctgattggacatggcaaatccggcgggcagcgtgggcacgtagacgcctatgatgaatatttggaaattatcgattggttgctcctcgaggctcataaccgttaccccggattacctcagtttatttatgggcatagcctgggtggtaatttagccctatattacagccaaaaacgctctccgcgtatcgccgggatgattgtctcctctccaggattggaaccaaccaatgtgccgccactaaagttggcacttggaaagctgatgtatgcgctttatccccgctttaaaatgaccaatagtttggatgtaaccggcctttcccgtgatgataatgtgatagcagcctaccaggcagatccgatggtacatccgttcgtttccgcccggttaggtatagatttactgtcgaccggcaaagtgatccgtgagaacggaggcgaaacccaaatcccgctcctgatgttgcatggtcaacaggatcgccttgtgaaaatcgcaggcacacgagagtatgccagtcatcggaccggagatgttaccttcatcgaaatcccgcagggctatcatgaacttcacaatgaacccaacaagcaagaaatcttccagatctggttagcctggctagataaagtactgaatgttgctgataaatagcgaataatagtctgagcgtgggatgctaaatatcacttgaccgggatatcccggctgaatacaatagatatggaattggcgcgccaactcattagttttttgcgcctcaatccaatatcccctaaattgcacatcctagaaggagaaagctgatggctgatttcctgacccgtggcacgcttgctgaggttgatccggaagtaagtgaactcattcgactggaagctgaacgtcagtaccggaaactcatccttatcccaagtgaaagcacggctccggtagctgtacgtgaagcgcttggctcggtttttcaaaatatatatgccgaaggatatccggatgatgagacccgcttgatgagtgaagcggaaatcctggattacaccgcccgcctcagctactaccgccgctatgccgacccgcgctattacaaaggcgtggaatatgccgatgtgatcgaatctcttgcacgccggcgctgcgcggaagtgtttgccaccgacaagttctcagccgaccaattctttgtcaacgttcagccgctctccggcgcccctgctaataacgctgtttacaccgccttgatgaacccaggtgagaccgttttgggaatgaacctgctgcacggcggtcacctgactcacgggtcatcggtcaaccgctccggcaagctgtttaaagccgtgcactacactgtcgacccgcagactgaacaaatcgattacgagcaggtggaagctctggcgctcgaacataaacccaaaatcatcattgccggctattcgtcttacccctgggtgccggactgggcgaaattccgtgccgccgccgataaagttggcgctattttcctggcagatgtttcgcatatcgcggggctgattgcagcgggagccattccctcaccagttggccatgcccatgtgatcaccttcaccacccacaaaaccctgctcggaccacgcggcgcagtcgtcatgaccacggatgctgccctgggtcgcaaactcgaccgcgccgtcttcccgggcgagcaaggtggaccgcatatgcacgccattgctgccctggcatccacattaaaaatcgccaagactgattcgttcaagaaattgcagcatcaaatcatc

SEQ ID NO: 1302 - DNA, 4000 bp, Escherichia coli
  misc_feature (1720)..(1720): n is a, c, g, or t
  misc_feature (3299)..(3299): n is a, c, g, or t
  misc_feature (3343)..(3343): n is a, c, g, or t
tcgagccggcctttctgctcctcggtcgccgcaggaaccgaaagccgcacgagcatcgagcccgaatcgtcgggcacatcggccgacaatgccggatggccgcgtccgtccttcagatggcagttctggcaagcacgcgagttgaataggggtccaagcccgtcggatgagtccgttgaagagggcgccgacacccagttcttgcggaagatgccgttgccgaccttgaagtcgagctcgcgtttgaaatccatattgccggaggatagcgagaaggcgttaggcgtgttggttgtgccgcgtgacgtggcgccgccgccgggcttgtcctcgccctcctcgagcttggtgaaatcggtggtgggggccacgacgctgcgcacggctccatcaccgccggcgccgtaggtccgcgcgatgccggcaaagagcggcagggccgcgccgaaggcaatcgcgccggcgagaagtgcgcggcgtgcgctttcctgcgatgactccttggatgactttcctgagcgatcgcgagactggggctggagtgagtacactaatcctaacgtcagaagctgatgctggtgcgcgcccccaacaccaccgcatcgtccgcgccgggcacattgcccccgggctgccagaagtattggaaatccggttgcagtgtccaaccgggcttgagttgagccgtatagcagatttccaaaagagcctcgtggttgtgaagaacggacaggcctgaatcgctatcgaagccacgcactcggtcggaaatgccggtataggcgaaaccgatgccgatggcgtcgtcggtgcgatgcggaaccattccggtgaaagtgatcccgccctctgcatagaagtctacgacattctggtcggtcggtgcgcccatgacacgcccaaacaagccgacgccctttgggtccttgctgtcgggcaggcgccaaatcagctggtcaacgatgccataaatagcccagtcgccatcgatggggcgtccgggttttcccgtcagagcaatcggcacgccgcctgaatcgaagcgctggtcgggaaatgagccaaaatgattccagcctccaacctttaccactccaggaagctgtccactttggttgtacttatatctaccctcgatcatcagaagcggagggctgtcgagactgaaatcaagcccgtcgctgttgcattcctgcgggtttgggtcgggacagttcgggtcagcaggatcgccgttgaagactccaatcataagtttcaattgatcgctgggcctaacggcaacgcgcacggcgggggtcgctaacggataggcggggccgcctcccggcagatcggcagtcgcaattgaaggccacccccaagtgccattcaagaagtacgaatagctttcggagaggataaattccatgtcggcggcgagctggccgatcttgacggcgagcttgtcgttgaagagatgctgctcgaaccacatctcgtcgagacgcgtcgcaggcgtggcctcaagattggataccggcattagaccgccgatattgtcggcggtgatactacggccgtgaatctggaaggcattcatgtgaaagcagaggcccttccacaggccgagcttcttcatgtccgcgtcgagacgcatgtcgagcacgccgtcataggtgacgccctgcctgaagcccccccagttgccgaacgactccccgtaatatgtgccgctcancatgacgccgcctttcgcgagagcctggcgcacgccgccaggatcaagcttgaacgccacatcgtcggggatgccggtgtcggtcacctcgcaatcggcgcgcgccggaggaggcgctccacagatcgcaacgacgatggcgaaaaggccgatggcccgcagcatgaaagcgctccagaccggattgctccggctaccgcgtccgcttgacgatggcattctagctagcccctcaggcgagttcggcctggcaatcacaaatttaggccccggccttcacgtttttagcccaatttcacatttgacgcgcggccgctggcgtcaatgctgttctccacccccgtcgcctaccgctttgctttgctgctgcacctcgtcgggattgtcgaggctcgccgagccttcgaatttgatggccttcaggtcgagcgttgccaccgcgcgctcgagcgacgtcgtttggtcgagcagagcgtcgattgcgtgctgaaccacggcgttgccctcatcgttgtcctcgccaatcatctggtcataggactcggtggtcagcgcccggaggtacagcgcgttcatcgcctccatggtggcgtcgagcttggccctcacctcagcatcaacctccggcgacttcgccttcaccaggtccgagatgctcgcgccggtaacgagcgacctgtcggcgcggcgataggtgccgagatagacattgcggatgcctagcgcgtcgaagaagtgcgaggcatgcgtgttgtcggagaagcagtcctgctcctcctcggggtcgtggatcataaggccgagcttcatgcgctccccggcgagctcgccgtaagagagactgccgagccccgtcatgatcgcggtgagcccagcctcgtcgccgccatccataatgtgcttgcgcgcgtcgccgccaagctcccattgcgccgccatccaggcgaggtcatcgacgagtagatcagtggcggtgcgaagatactcagcgcgccgttcgcaattgccattgctgcacttcttgaggtcgtagtcgctcgccgggcgattgccgttacccggatccgtaccgttgaggtcctggccccacagcagaaactcgatggcgtgatagccggtggcgatgttggcttcgacgccgcctgcctcttgcaggtggtcggccaggagctccttggtgatcttcgatgtatctagcttcttgccgccaacgatcagcgtcttgttggcgacgacgttggctgtatagaggtcgttctctgccgagtctatgccgtaggacgcggacacataatcgatcaggccttcgtcgagcggccaggagttcaccctgccctcccaatcgtcgacgatggcgttgccgaagcggaaagcctcggtctgcatgtacggaatgcgcgcggcgatccatgccgcacgcgcgccgcgaagattgtcctcggtcggcttggcgaggaaggcgtcgactgcgagcttgagcgtgcgcgcggtgtcgagagagtcgccgtaggccgcttgcgcgatatcggcgtaaatcttgagcacatccttcggcgtgggatcggcgaaagcgggtgangtcccggtgccggcggcaaaagcaacgcaaagagcggcggcggnaagaggccgggcaagcgcaaatcgtctgaacatcagcatcccttgttgccgaagcttgtccgcggtcttggcgagcgccagcaaacaacatgattgcgacggccctccggcctacgacctcggggccgccgcaaggttgagatgaggaggcgtccgcgctttcgcttggacgcctcgggcgccgggctgggcggccggtcgccttgtcaaaacctaccgcggagaataacatgcataaagtgaactcttttcaggagaattattgcaggcagtgcaccttagggaagtcgatgccaatttgctggtaacgctcgacgcgcttctcgtcgatgcgagcgtcacccgcgccgccgagaggctcggccggagctcctccgcgatcagccatgcccttgccaagcttagagaaatcttcgccgacgagctgttcgtgcgcgccggccagaaactcgttccgactgccaaggcggtcgagcttgcgccgacggtgcacgtcatcctagccggcatggagagcctgcttcggccgagcaagccattcgacccgtcactcgccatccgtgacttttcggtggcggcgagcgaggctgccgagctcattttgctgcaacctcttcgtcagcgcctcaagcctttggccccgagtgtgcgcgtcga

SEQ ID NO: 1303 - DNA, 4000 bp, Escherichia coli
  misc_feature (1946)..(1946): n is a, c, g, or t
  misc_feature (1951)..(1951): n is a, c, g, or t
  misc_feature (1960)..(1960): n is a, c, g, or t
  misc_feature (1963)..(1963): n is a, c, g, or t
  misc_feature (1966)..(1967): n is a, c, g, or t
  misc_feature (1970)..(1970): n is a, c, g, or t
  misc_feature (1975)..(1975): n is a, c, g, or t
  misc_feature (1990)..(1991): n is a, c, g, or t
  misc_feature (1997)..(1997): n is a, c, g, or t
  misc_feature (2006)..(2006): n is a, c, g, or t
  misc_feature (2015)..(2015): n is a, c, g, or t
  misc_feature (2024)..(2024): n is a, c, g, or t
  misc_feature (2059)..(2059): n is a, c, g, or t
  misc_feature (2078)..(2078): n is a, c, g, or t
  misc_feature (2116)..(2116): n is a, c, g, or t
  misc_feature (2132)..(2132): n is a, c, g, or t
  misc_feature (2185)..(2185): n is a, c, g, or t
  misc_feature (2210)..(2210): n is a, c, g, or t
  misc_feature (2212)..(2213): n is a, c, g, or t
  misc_feature (2261)..(2261): n is a, c, g, or t
  misc_feature (2821)..(2821): n is a, c, g, or t
  misc_feature (2829)..(2829): n is a, c, g, or t
  misc_feature (2911)..(2915): n is a, c, g, or t
  misc_feature (2917)..(2921): n is a, c, g, or t
  misc_feature (2924)..(2925): n is a, c, g, or t
  misc_feature (2927)..(2930): n is a, c, g, or t
  misc_feature (2932)..(2934): n is a, c, g, or t
aagccaaacttgacgtcttcaccaaaaactaccaaaaaggcaaatacaaaaccgccctgaacaatatcaacgccttcatcaacgaactcaatgctcaacggggaaagcatgtttctgaatccgcctatcaaatgttaaaagcctacgccgatactattgttctgtctttaaatgcccttatgtagggggttgaagtccaaccgtccgaaaacgtacgctaaggtcaggtttcacgaactagtcatggatgaagcgcttctcccagtttgtttccaagcgcccgaccagaatatgatgaactaccctgtcacggaagtcagcggcgaagatctcccgccgcttcggcttctcaaccagaaatgccaccgatgggcccggccgatacgtgcctgcagacaactcttcgtgcagacccacaagattcccctccaggttctgctcgaaacggagggcatttattgtcccacgtttgcggcggcggcaacgctgatacgcccggaagacactttccatactgaatagcggatgcccttcaaacacgaagaacctcctttaccgaaaaaaaaaggggggggacggcaagaccaccattatccaccgcggaccggccacacatagttggtattcgtcttattgtcgttgttcgcgttaccgtcgttcaggttcacgttccacgcgttgcctgtattggccgcgttcgtagtgctcgaccagtagtaattcgactggacatcagcaaacgaaaaattaatccgtccacttctcccgaccccagcaaagcgctgggtcaggaccaccggttgccgaagcccgcaaggggatacaccccgaaacgatacgccatccatggctttttcgaggtatacaccccatggggatacgaccacctgaatgaccatgcccgccagacttagcctgccaagaacaccaggtttcatccgaccaggcgggacggacgcacaatgatgaaacacgcactctcgaaaaagcctttcagccatcccgattccggcctgcctcaccgccccaaaatcaaatttccccacttttcctttccttggccccgaagtcttcagtttttatcgtttgcttcaaccaaccctcgttctgccgcgccaatcccgttaatcgttcggccagatgcaggtaacttttggcgccgccgccgaacgcgcccgaatcgttgcacagacgacacaacacctttagcttctccaactgatttcgcagatctgcgagacgctccctgcgttctgatgtgttgttcgcatctataatcgtctccagcgctgcccgcatcctgttacgcaggtctgttcccaacgtaaatttgttataacggctgaagttttgcacgattttctcgatatgtaccgtcaggtcataggcttcccgatagatcggaaggtgttcatacctggccatcagtcgcatgccttgatagctggatcacgcaaacggatgaattccgtcagtcctcgttccttgttttcgccctgcattgcaatcgccaccgaatgacccgaccttaccagtctgcccacataggcatccagcccgctcctgggaaaacctcccagcacaaccggcgcatcaacatccccggtcatctgcagcttcaaaccagtcactgccgataccgcacgtgcgtcatcggccatcacctgcatgaacgcccctacctgcatcagcaggaggcagtccgaccctgcggtggttttcaatgcattatattgttcgaccagtttctttgaaaaaaccatgaaaacacctcaaaagcttcgcccttaagaggctgtaagaaaacacaaaacattttctaacagcctcaaaaaaaaatcgcgagcagggggcttcgccccctgcacccccaaaaagaatcaaagaactcaaagcaccaaatcaccaaagaatcattgtccaccgcggaccggccacacatagtnggtantcgtcttantgncgnngcncgcgntaccgtcgtacaggnncacgcnccacgcgtngcctgtatnggccgcgtncgtagtgctcgaccagtagtaattcgactggacancagtgaagggatctcccgncgtccactgtccagtccctgccgtattcggcaacgccngattgaaatactgaanagcaatcaggctgtccagttccttccggttcggcaggcgccagtcgcccgcgntggaaccgtctgtaagaccacctgncnngtctgcaagaccagcacaatcgtccagggcctgtgcccaagttctcgntcctgccatgaaattcgcattcttcagccagatcaaccccgtcagattgtcagtcaccgtaccgttggagttatcggtgaaacgcgggttcggccaagccgcgcccatttggaggtcgccatcggagccggctggcgcagtaaaaggcaccgttgacgtctgccccgttttcggaaccgcgttgctggatgcggaagtgcccgctacgccgaaaatggtcacgcctgacttgatgttgcccgtgaccagattcgtatccgccgccgtggttttctcggttccggcatatatgccggccgggatcgtgacagtcgtggtgccgtttgtaccgtttgtgttagcggcgcctgcggcaatagtacctgtcacttccacccctgcaacatacgctttcttgcctgaacgcaaatccgtcgccgccgcatcaccactggtcgtgtcaaccacttcggtcttgcccgctacgccgaagatcgtcgcacctgacttgatgttgcccgtgaccagattcgtatccgccgccgtggttttctcgtttccggcatatatgccggccgggntcgtgtcngtcgtggtgccgtttgttccgtctgtgttagcggcgcctgcggcaatagtacctgtcacttccacccctgcaacatacgctnnnnngnnnnngcnnannnncnnntcggaggtactggcacccgcagcgtcgatggccggggccttttccatgatctggttaaggttgtgcatggtgctgccgggcccggaagttggctcggtaaagctgccagtccgtttggctcccgtgacccccgacagaagccggttgtagagatcctcgaaggtaaacatggcgctagcagagtcagacggcgcggcgggggaattcaaatcgcccgcgaaggccacggctgcaagcattcccagcatcaaaataaccagaggtgttgcgaggcgctttttcatttcgttcatggtattctccttacttgtttcatcgattgcccttgcggacaacagcattcggggggggcgtggtgattacatcacaaactgaacaccataggacgacccggaaaacttgatccagccgaagttttctgcccaggctgggccactcatggcaccggtctgcggatcaagggtcacagccgcattggtggcgctgaagttgatccagccagcggtttcgcaccaggcataacccgaaagtttcccggtgccgtccaggttcacaccccagttggtcgcattggtgttgccgtaaggggacgttgccgaagtggcggcgaatttgatccagcccaaattttcgctccaggccatgcctgacagatagccgttcgcgccgagtttggcggagatgttgccatggatcggtgccacatcgatccagccagaattttccgcccaggcatatttgttcgtcccagggatttttgcgtccatcgccacgaagttagctgttacggtgacattgccggttacgttggtgtcggtgcgcgggttatcggtgcgggcgtcgctccaattcacgaatttgaagccaaccgtggccactgcggttaccggggtgccattcgcaccgaagacgattgtctgagtcgaagttcccgtgactaagccgttagccccggcggtgtaggtcagggtatactgtgctggcgtccatttggcatagagagtgacgtttgcagcgccgatggcaaaggtcgaggcggcggcacgatcggtaccggttccgtcgg

SEQ ID NO: 1304 - DNA, 4000 bp, Escherichia coli
  misc_feature (567)..(567): n is a, c, g, or t
  misc_feature (576)..(576): n is a, c, g, or t
  misc_feature (599)..(599): n is a, c, g, or t
  misc_feature (606)..(606): n is a, c, g, or t
  misc_feature (609)..(609): n is a, c, g, or t
  misc_feature (612)..(612): n is a, c, g, or t
  misc_feature (639)..(639): n is a, c, g, or t
  misc_feature (690)..(690): n is a, c, g, or t
  misc_feature (768)..(768): n is a, c, g, or t
  misc_feature (771)..(771): n is a, c, g, or t
  misc_feature (780)..(780): n is a, c, g, or t
  misc_feature (783)..(783): n is a, c, g, or t
  misc_feature (831)..(831): n is a, c, g, or t
aatatcacattcattgattaatgatagtgtcttatacgattttagttaaatggtatgtttgttactgttgctaaccttgaaccccaaggagtatctacatcaacttttgaaccgatagagttaaaacctttatctatcgttgcaatggctatgttttttttcaatcgaggtgaggatgcagcgctagtgacttttccacatattttgttgttatttttaacttcccaaggacttgcgcaaccaccaacgaatgcttcaccttggataattaaaccaaccaccttcctagtaaccccctcagatctaattttgtggagggcattacgactcaagtattcagcactcttgtcgagttgacaaaacttttcaagtggcaattcaagtgcgttagtgtttacatccatatcattaccccaagagaatagagctgattcaactctttcaatgttatttggagagcctggtttgatgtcatattttttacctgcttccataactatatcccagagcctttcgccctgagagctatcccttaggtagagttcaaagccgccctgtttactccancctgagcgntgaacaattagaggaataccttntaattcncantcnctgaaaaagaaatacttaatatccttnatccagtcaccaaaaagatcaagcattaaaggtaagttgttcgggccttgnatagctaaaggggagacgtctggctcactaatttgaacatcccatcctaagccacatgcgagtcctcgagtccaaagnagnacgtcactntcngctattgaaagccagaagtgattgtcacccagccttaaaataattggntcattaataattccaccattttcatcggtaataagggcgtatttcccttgtccaatctgcaattttgaaaggtctctcgaagtaatatattcgacgaatctgtatgcatcacttccgcttatttctacttgacgctcagcagcaacatcccacagagtgacgttattcattaagttccagtaatcagcttcttcaccctcgtaagaggtcggcataatcatgtggttatagatagtgaatgtttgagcgccagcgcgaattgttgcctcgtaaaaaggggattttcttaagcggtctgatagcgtaaagttgacgtgtccttccatttaatactccgaggttattgagctaaactcttaatcaagtaatatgctcttgataaagataaaaaatgtatttttaccctattttattagcaattcaactataaatttttcgttgaaatattatttgtttccagccagtctttgaacttattttttatctccttaagtgttttatcatcgctagcttcgaatcttaaaactaaacatggggttgtgtttgaagccctaacaagaccccaacaattttcataatccaccctgacaccgtcgatagtattaatgttggagcctggaaaattaatgttatttgaaagttttttcattgcatcgaattgttgaccatgcttgttaaagtgaatattaatctctggagtgctaacattgacgggaatttcatcaaaaatctcggagcaggtcttattgctttttgagactatctcaagaagccttgctccggtatagagtgcatcatcaaagccataccagcgctctttgaagaaaatgtgacccgacatctctcctgcaagctcggcacctgtctccttaagttttttcttaataaaactatgtccagttctagacataataggttcgccaccattctcaaaaatatctcttgggagcattgaagtgcacttgacatcgaaaataatttttgcacctttttttcgactaaggacatcccttgaataaagcatcatctgttgatcagcccaaacgatctgtcctttattatcaaccaaacctagcctgtcaccatcaccatcaaaggcaagccctaagtcagacccagtatcaattacttctttaattaagtcctctaggttttgcggtttggatgggtctggatgatgatttggaaatctaccgtcaactaaacaaaacagcttagtaactttggctccgagcgattcaaaaagttgaggtgctatgtttcctgcgacaccatttccgcagtcgacaactattttaagctctttttctaaaacaatatcagatctgatggtgtcgatatagtcttgatcaatattgatcgaggtggaggttccagaaccaactgaaaattgttcttcaataattcttgtatacagagcttcaattctctcagcagaaagggtttctcctgcaaccatgatttttagaccattgtattcaggtggattgtgtgagccagtaaccataactcctgagcttgcacctttagtgtgagttgcaaaataaacaagtggcgatggaaccattccaatattaacgacgtggcaaccactctcaataagccctgatattaatgattcagataactctgtgctagatagtcgaccatctcgaccaacaacaacgcctcgctcacctttagcaattgactcactaccaacagcctttccaatcaatttgactatctcaggagtaagttctgtttcaacaattcctctaatatcatatgctttgaagatcgaacttaaaatattcattaaaatagtggttaaaatagaagtagcgttcattttaacaaacatttattttagataatgaaagaagatttccaagtagttgaaataactcatgactcaatgattattaagtccaatagagaagttggttgtagttcatgctcttcaaaaaatgcttgcggtactggcgttctttctgatttattttcaagctttagtttatttaaaaaacctcttcaaaatggtgtcaaagcgggcgacatgattacattagagatttcatctaaagagctatttttacgtgctagccagttgtacttaatgcctttgttggcattatttatcggtgcctctatttcaaatatcttttaccctgcaaatgacgtcattcaaacatttgtaggtttgtcttctttatttgtcgttctattatttcttaaactttcattaaagtaatttagttgtaatttttttagggataataccctcgaaagttgaaatatataagattccttattgaattaaactaaatatttatgtctcaaaaagatattgatccccaagaaactattgagtggctagaggcctttaggtcggtagccagatttgagggaaaagatagagctaaatacatacttcaaaagcttatggatatggcccatgaagacggcatggacttgccagaaggtgttaatacagcctaccttaactcgataccagtagaaaaagaatccgagttagtcgttatgcatgagattgagcatagaataaagtcaattattcgttggaatgcgatgatcatggttgtaaaagcaaaccaaacctcttccgagcttggtggtcatatcgcctcttttgcatcaagcgcaacactttatgaagttgggtttaaccatttttaccgtggaaacaatctagaccagggcgctgatttaattttctttcaggggcatatcgcgcctggaatctattcaagggcatttttagagggaagaattactgaagagcaaatgcttaattttaggcaggaggctaaccaagaaggactttcatcatacccacacccatggttaatgcctaatttttggcaatttccaaccgtttcgatgggtttaggtccaatcatggcgatttatcaagctcgctttatgaagtatcttcagcatcgagatattattaaaactgacaaaaggactgtttgggcttatataggggatggcgaaactgatgaaccagagtctcttggtgcaatctctttagccggaagagagaagcttgataatcttatttttgttattaactgtaatcttcaaaggcttgacggtcctgttcgtggtaatggaaaaataattcaagaactagaaggaatgtttcggggtgccggctggaatg

SEQ ID NO: 1305 - DNA, 4000 bp, Escherichia coli
  misc_feature (24)..(24): n is a, c, g, or t
  misc_feature (43)..(43): n is a, c, g, or t
  misc_feature (118)..(118): n is a, c, g, or t
  misc_feature (221)..(221): n is a, c, g, or t
  misc_feature (281)..(281): n is a, c, g, or t
  misc_feature (412)..(412): n is a, c, g, or t
  misc_feature (652)..(652): n is a, c, g, or t
  misc_feature (704)..(704): n is a, c, g, or t
  misc_feature (837)..(837): n is a, c, g, or t
  misc_feature (887)..(887): n is a, c, g, or t
  misc_feature (982)..(982): n is a, c, g, or t
  misc_feature (984)..(984): n is a, c, g, or t
  misc_feature (1017)..(1017): n is a, c, g, or t
  misc_feature (1086)..(1086): n is a, c, g, or t
  misc_feature (1101)..(1101): n is a, c, g, or t
  misc_feature (1171)..(1171): n is a, c, g, or t
  misc_feature (1193)..(1193): n is a, c, g, or t
  misc_feature (1247)..(1247): n is a, c, g, or t
  misc_feature (1255)..(1255): n is a, c, g, or t
  misc_feature (1985)..(1985): n is a, c, g, or t
  misc_feature (1992)..(1992): n is a, c, g, or t
  misc_feature (2235)..(2235): n is a, c, g, or t
  misc_feature (2520)..(2520): n is a, c, g, or t
  misc_feature (3517)..(3517): n is a, c, g, or t
  misc_feature (3529)..(3529): n is a, c, g, or t
tgacttatcttgaaattaagggcnaatggcatggaaattacgnttaccttgcacttgctggaacgggaaagattaatgcgatttttacacatttgaagcaggagccgcaaattaaccncattgttctttgtcttgaccaagatgaagccggatgtgcggcggatgaaagagtgcttgaaagattaaagaaaattgagtttccgggacgctgtgacataaanaaacccccagtcaaaagctgtaaggattggaacgattacattatgacgttgcagtaagtngttttccattctgaaaacaaagagaggagatattttatgaatgtcgctgaaactgttgtacgtaagaattcgcacaatttttccatccatgttactgataagggggcgttgaccttttcaatggatggggnaaaagagaaacatgcaaaagctttgaaagacggcaaactcttctttatcggtttgcaagaggtgattgtaaagggaaaaatacaggagtggaaggaaatggagctgccggaagaagattttgctctactttccgacgcacaggaaagggttattgctgctttagcggaagaacgcacaatatccggattaaaaaacgaggataaaagcactctattaaagcgtgtcgataagtggaaaanacggattcgccattatcgtaaaaatggaagaggggaactacttgattatgcngtacacgactttaccattggggcgcagtcatatcgcttctacgagcgtcgcatgaataccacttgggcgtgggatggtattattataaatccggtatacaaagtgagccattctcttgatggcattggtgcanttcctgttcataaaggggcgttgaccttttggtactactatgacgatgancaaggttggtataatgttcgtgaacttactcttaatgaaatgatttgcattgagatcatccactctcatgggatggttcgagaagggaaaatttnangaaggatcgttatgaatttgaaagaacagttcnggaatagaagagacgtttttggaacatcaaactcacgtgacggatacagaaaagtcattttcctatttnttgctttcttatttnttattctttttcgaacatttctactagagagaatcatcatagaaggtagttcgatgtatcctacgctgangaatgaagatgtgtgctttgtntggaaggtaaacaagaagccgataaggtatgagattgttacggcgaatgtgagnggaaaaantgtggtaaagcgtgttgtaggagttccgggagatgagctttcggtcagagaaggaacggtgtatatcaatggatgtccagtgtcacaggaatatgattttataacagaagaacctggagttttgagtggggggtatgttgttagaaaagatgaatacttcctactgggagataatcgggcagaaagcaatgatagccgtgtttatggtgctgtttcattgaaacaaattaagggagtagttgttgtaaggatttatccattgacacaaatagcaatgtattcattgagaagaagctacgcagagggaagtaaatagcggaggtaaattaatgtttgattttttcaaagaaatgacgttggagttatttggaacagatagtgattcggtgagagaaatagaaaaagagaaggcggaagagaagcgcaaaagtagattcatcttttctaagacaacaaaagttgttgtctatgtgctaggagttctctatcttgctattggtggttttggaatttatgttagtttacaagttgcaaaattaacgcaagacgcaactgctggatcgaacatatggcgatatgtcaaatatggccttctttctctgattgatattgctgcaatgagttgtctttttagtggaaaaaagaaaggagaaattgtagcacttgttctgatcttggtattcgttgtgacaatgtatttcacaactatgatacttcctgttatgtgagnagtccgngaacttcaaatgaaattatcttttaaggttggaggtgaatcaaatgcctaagaagaagcaaatgaaagataaatatgatggattgcatgggcaagaactgattgacgctattatgaaggatggaacctttggaaaacctgttacggaaagtcaagcgagagagaatgataagcttattgccaaaatgaacagacggtatgagaaagagcaggaaattaaatccaagatctgtttggcattgangacgattttctttacaccgttgtctattatgttttgtgttcttacttttgttttccgtgtgattggtggagttacatctgtggctctgccttttggaatttactttacttataagtgccttatgcaatggaggactaatggagttgccacagaaaggctgcgtgcttctatcgcgagcatattgtttccttttattgctagtgcttttgccatactcacagaaaaactttggaactattttgaggaaaacaagtaatgaggcaacaaaattagccttgtatgttnacatagcaagcatagcctttgtatatccactttatggatatacaaaggcgcttgttagtcgcttccgctggggcaatgccccctaaaacccccattatccggatttgacgaactccggaatttcaaaaatgacacggttgaatatcctcacggtgaggatgaagagagcggtaaaatgaaaattgttatgtactactatattgtatgttcgatagcggcagcattgtatttcgcggctgagtttgaattgaatagcgggagaaaagcgacagcttatcttttctattttgtgatttatttagatgttctatttttggcgtaaggagaagtggaatggcacaaaaacgaaatagaggaagaagtaaagcagtttacgttcgattgtttcaagaagagtggaatatccttgaaaagaaagcacggttaattggaaaaacaaaatctgattatttgagagatatcattcttcttggagaggtaaaagaaaaaccggtttggcaagatgaaaattttaagcggttactatatgagatcaacaaaatcggtaataatctcaaccagattgcttataattcaaacttgaaaaaatcaactggacgtgaagagatatatgcgttgagagaacagtacgaaagtttattgtctttatatgaagatacgttcttgtacccagaaagtgaagtgaagaatggcgacgacgaagaatcataagattacaacaagtttgaaaagagcaatagactatgcgatgaatgacaaggtcgaggacaccctcaaagatgatataagggatagcgttgcatattctattgatgataagacgggaagagtgacatatcccacttattatacaacgatgaattgcaaaccggggcatccagttaacaccttcaatcagattatttcagaatatggtaaagatgaattggaaaatggaagcgcaagaacaaaagacggtgcacctgttcttgcgtggcattatcatcaaaactttgangggcacgttgancctgcgattgcaaatgaaattggacaacgacttgcgaaagaagtatttggaaactttcctgttgtaattggtacacatacaaatacagaaaacacccacaatcatattattgtttgtgcgtgggatttagacggaagaaagtggcatcagcacaatgctgcataccgccatattcgagaagtatctgatagtctttgcgaggagtatgggctgtcggtattgcgcgatacacggaagcaaagacttgtaaaatggaaagataataatggacaagttcattattatgaaccgacagtgcgaaaaaatgaaattatcaggcagagagaatccggagaaatgacaacagatgatgttggaagttacagaaataccatcccttatgaaatggctgtaagcaaagaagaaaccaattgtgaaattgtaaagagagacattgataagttgcttccggttgccacttcttatgagcac

SEQ ID NO: 1306 - DNA, 4000 bp, Escherichia coli
  misc_feature (1473)..(1473): n is a, c, g, or t
  misc_feature (1486)..(1486): n is a, c, g, or t
  misc_feature (1985)..(1985): n is a, c, g, or t
  misc_feature (2141)..(2141): n is a, c, g, or t
  misc_feature (2247)..(2247): n is a, c, g, or t
  misc_feature (2259)..(2259): n is a, c, g, or t
  misc_feature (2935)..(2935): n is a, c, g, or t
  misc_feature (2983)..(2983): n is a, c, g, or t
  misc_feature (3065)..(3065): n is a, c, g, or t
  misc_feature (3134)..(3134): n is a, c, g, or t
  misc_feature (3163)..(3163): n is a, c, g, or t
  misc_feature (3426)..(3426): n is a, c, g, or t
  misc_feature (3951)..(3951): n is a, c, g, or t
ttgaaagaaaaaatctcctaaatccaggaaagaaaccggaaaaatcatatatagaaaaatgcttaggaaataaagagggtctgattgttgcagcttctgattatattaaaacttatgctgatcaaataagaccttacatttccagatctttttattcttttggaaccgacggatatggcagaagtgatggtagaaaaaacctgagaaaattttttgaagttgataaagaatatattgtaacttatgcattaagtgcattggctaaagaacaactcatttcttcaaaatatgctgaagaagcaatgaaaaagtataagatagataaagataagcctattccaacggtattgtaaagatgtctgataaaaaacaaatcattagtgcaagtccaaaagtaagaaagtttgcaagagagctaggagctaacctatatcaaatacatggatcgcagagggaaggaagagtttctgaaaacgacgttaggtcttttatcaaagaatcgctttcgggagaaattgcaaaaaaacgaactgtaacacctcaagaatatgagcattcagaatttggcgaaattgatgtccagccaattcctagaatcaaaaaaattgctagatcacatttagaaaaatcttggaatgaaattccgcacgttacccaccatgatgaagcagatattactgaaatggataaatttagaaaaactttaagagacttgtatacgggagaaaaaatttcaattacaccattgacgtttattataagagcggttgtaaaagctttaaaagattatccaaattttaacgcttctttagatttagaaaatggaaaagtaatctataaaaaatatttccatgtaggaatagcagtagatactccacatggtttaatggttcccaaaattagagatgcagataaaaaagatataacggcattaggaaaagaattaaaaaaggtaagtacactttgcaaagaacttaaaattgataaaaaggaattttttggaggatcaattacaatttcaagcttaggaaatatcggaggaagtttttttactcctatcattaatcaacctgaggttgctattcttggtgttggtagagcagaaactaaacaagtatttatggatggaaaatatcaaagtagaatcatgcttccattgtcgctgtcttacgaccacagaatcattgatggagctgaaggcgctcgtttttgtgtacatttaagagaaagtttaggaaaggattttgcttataaattagcagtatagtccttccccaatgaaaaaaacaatatcgcttatttgtttagttgtttgtaccttcatttgggggacgacgtttattgctcaagatacgggtatggataatataggcccgtttacttttaactctgttagattttttgtgggctttttaacagtaactccatttgttttattattagagagaaaaaaaattaatgaacaaataaaanctaaaccaaaaantttttcaaaacttataataattattggagtatttttatttttcggaactgtattccaacaagtttcattgctttacaccgatgtagccaattctgctttcttcactattttttatgtaccaatggttccaatcattgtttatttcttattttccaagaaattacattggtctatatggccttctgtattagcgtgtataattggaggctatcttttaagcgacattagtaatgccaatattagatttggcgatggtttagtattaatcggcgctttattttgggcccttcacattatttatataggaaaaataatagaacactttgatttacctttttttattgctttattacaaaatctgattgttgccacattatcctttttattagcaattatatttgaggaaatagatatttcaaaaattaaattggaaacttttgaaatcttatacgcgggcatactatccggcggtgctgcatttgctttacaaatttttggncagagaaatattgcaccagctccagcagcaattgttatgtcacttgagggagtttttgcagcaattgctgcatggttaattttaagccagattttaggtttaaataatattattggttgtacgctgatccttggaggtgttttattgtctcaggtngcaccaatttatgaaaaaaattataagtaagcaataaacagcaatagtaatgaaagtaaaattctataaattacaaatatattcaaactaaattttttaatatagnttagaaagactncgattgtaaaatatgaaaaaataaaagaaaatataacagcgataattgctaaaaagttaagttcagcgctacccaccttgtaaatattataaatccctaaaagactagcggccgctaaagttggtattgataagaaaaatgaaattttagctgaatcaaacctattaaatcccaatagtcttcctgaggtgatagtaattccggttctgctaactccaggtattaaagctataacttgaaacaaaccaataataattgccgatttattattaaattctgtatcaattttttttgtaattttaaccttatcactaacatataaaagaaggccaaatatcaaacttgtccatccaataatttctaagcttcttaaatgattaattaatcctgtttgataaagaatgtaaccgacaggaattattggaatggtgcttatgagaattttgattaagaaagttttattttgaatgaaattaaataagtcttttctaaaataaaatatgattgctattaaggacccaagatgtaagcagatatcgattaataagttttgattgttaaatgcataatattttgaaactaaaactaagtgagcaacagaacttactggtaagaactcagaaataccttgaatagccgctaaaattaaaatttctatggatgaaagcattgattncaggcattgcataacagatatgcaaaaataaatcattaatttattggntttttcaatatataggtcagcttttatgtcctaaaaatccttttagccttatttttattggtataaaagataacggttatanggaaaatattatgtcggataaaatgcttaaatttgtaaacgttggaatgcaaatgccagctaaaagagncggtggtttaagaactaaagattttaaanaaatctatgatcaatttattcacgagaaagctaaagaacaatcgagccgatgttcacaatgtggagttcctttttgtcaagttcattgtcctttgcataataatattcctgactggttaaagttgaccgccgaagggaggcttcaagaagctcatgaattagttcatagcacaaataatatgcctgagatttgtggaagcatttgtccgcaagatcgtttatgtgaaggtaattgcgttattgaaagagcaggacatggaacngttacaatcggatctgttgaaaaatacataacagatactgcatgggaaaaagggtggattaaaccaattaaagttttgaaagaaatagatcaatccgttggtatcattggagcaggaccagcgggattagcttgcgcagaagagctaagaaaatcaggatataaaataactatttacgatcgatacgaccgaccaggtgggcttttgatttacggaataccaaactttaaactagaaaaatttactgttgaaaggagaaccaatcttttaaaagagagtggaataaagtttaaacaagattttgaggttggaaaagatatatcgctcgatgaattaagaaaaaaacatgatacaatacttattgcaactggcgtttataaacctcgagaaatcgatttgccgggctctgatttaaaaaatatttttccagctatggaatttttaacggcatccaatcgaaaaggtttgggagatagagtaaacaattttgataacgggacactcaatgctgaaggcaagaacacnattataattggcggaggtgataccgggatggattgcgtgagaactgcag

SEQ ID NO: 1307 - DNA, 4000 bp, Escherichia coli
  misc_feature (816)..(816): n is a, c, g, or t
  misc_feature (826)..(826): n is a, c, g, or t
  misc_feature (2992)..(2992): n is a, c, g, or t
  misc_feature (3019)..(3019): n is a, c, g, or t
  misc_feature (3055)..(3055): n is a, c, g, or t
  misc_feature (3073)..(3073): n is a, c, g, or t
  misc_feature (3115)..(3115): n is a, c, g, or t
  misc_feature (3118)..(3118): n is a, c, g, or t
  misc_feature (3124)..(3124): n is a, c, g, or t
  misc_feature (3181)..(3181): n is a, c, g, or t
  misc_feature (3212)..(3212): n is a, c, g, or t
  misc_feature (3217)..(3217): n is a, c, g, or t
  misc_feature (3283)..(3283): n is a, c, g, or t
  misc_feature (3286)..(3286): n is a, c, g, or t
  misc_feature (3361)..(3361): n is a, c, g, or t
  misc_feature (3469)..(3469): n is a, c, g, or t
  misc_feature (3478)..(3478): n is a, c, g, or t
  misc_feature (3487)..(3487): n is a, c, g, or t
  misc_feature (3499)..(3499): n is a, c, g, or t
  misc_feature (3502)..(3502): n is a, c, g, or t
  misc_feature (3511)..(3511): n is a, c, g, or t
  misc_feature (3514)..(3514): n is a, c, g, or t
  misc_feature (3538)..(3538): n is a, c, g, or t
  misc_feature (3574)..(3574): n is a, c, g, or t
  misc_feature (3595)..(3595): n is a, c, g, or t
  misc_feature (3616)..(3616): n is a, c, g, or t
  misc_feature (3622)..(3622): n is a, c, g, or t
  misc_feature (3631)..(3631): n is a, c, g, or t
  misc_feature (3634)..(3634): n is a, c, g, or t
  misc_feature (3661)..(3661): n is a, c, g, or t
  misc_feature (3682)..(3682): n is a, c, g, or t
  misc_feature (3730)..(3730): n is a, c, g, or t
  misc_feature (3736)..(3736): n is a, c, g, or t
  misc_feature (3748)..(3748): n is a, c, g, or t
  misc_feature (3760)..(3760): n is a, c, g, or t
  misc_feature (3787)..(3787): n is a, c, g, or t
  misc_feature (3850)..(3850): n is a, c, g, or t
  misc_feature (3859)..(3859): n is a, c, g, or t
  misc_feature (3874)..(3874): n is a, c, g, or t
  misc_feature (3880)..(3880): n is a, c, g, or t
  misc_feature (3886)..(3886): n is a, c, g, or t
  misc_feature (3889)..(3889): n is a, c, g, or t
  misc_feature (3904)..(3904): n is a, c, g, or t
  misc_feature (3913)..(3913): n is a, c, g, or t
  misc_feature (3934)..(3934): n is a, c, g, or t
  misc_feature (3937)..(3937): n is a, c, g, or t
  misc_feature (3943)..(3943): n is a, c, g, or t
  misc_feature (3949)..(3949): n is a, c, g, or t
  misc_feature (3975)..(3975): n is a, c, g, or t
  misc_feature (3990)..(3990): n is a, c, g, or t
ttattgtcatcggcacgcacagtgtagacaaagtcaatcgtgtcttattctttgtgatgattgccacttttatcttagtactcgcattaatgctaccaaacattaaatttgataacttaatggcgatgcccattgataacgccttaattatttctgcaagccctgtatttttcacggcatttggcttccacggttcgattcctagcttaaataaatacttagacggtaatgtgaaatccttacgcattgcgattttagttggttctggcatcacgttatttgcttactttttatggcagctttcgacgcacggcttactcagccaaaatgagttcttacaaattttacgcgaagacgccacattaaatggcttagtgaaagcaaccttagaaatcacccaaagcccaattattgcaaatgcggtaaaaatcttctccactttggcgttggtaacctcattcttaggcgtggcattaggcttattagaatgtattgaagacttgctcaagcaatcttttaatattcatgcaggacgcatttcattaggtttaatgaccttcattccaccggtactattctcccttttctatccagaaggttttattctcgcactgggttatgccggtcaaatgtttgcgttctacgcggtagttttaccggtggcattagtctggaaagcacgctcaatttatccaaacttgccatatcgcgtatggggcggtaaagcgttgttagtgatcatattgatgcttggcgtgattattacttcaattccttttgctatccgagcgggttacttaccttttgttgtaggtnaaaatggaanaaaaaagaccgcacttttaaggtgcggtcttttttatttattttcgtataaatgggtgactaactgaccatttaaatattcaccgacatacacttggttaactgcaagattctgtttttctaactccgatttaacccattcctcgtcacgcccaacgacttctaaaatatcgttatctaattgcccatcaataattaatgggtaacgtaaattttcatcgccatattgaataatggaaagttgcccattttgttcgagtacagcacgttttacactattaatttcataaataccggcagcacgtaacttaaacatgagatcatgagcggtaataccatttctcatacattcagccgtctgaaccttaccatttaaaatgacccaaacaggtttaccatcaatcaaggatttaacaaattgattatgatttttgataaaacgcagggtaaaaatcaataacgtccaaagtacgagtacgagagagaattggagcactccaatactatcactataaattaccccaccaataataccgcccagcacgtaattttgtacctgatccattgcggaggtcggggcgagattacctttacccattaaattgatttgaagtacgagtccaataatacccatggccaatttcaagcctaataatgtatagccatccattagttttcctccttatcaataacagtaacattagggtttactaagttaattggggataaggtatatgcggtaaaatcattattaaaatggacttcgaaatactgatcccgaatatttaaaatcatgccgttacttaatgtacggctattggtacgaatatcttctttctgtaaattttgactgtctttcaccgaatttaaaaatgtcaccacgcgagaggtatcagctgcatagacttcacttcgctcatattggttatattgcacaccgagcaagaaaatgattaataaaagaaaaatgatactgagatcacggtatttggtttgtaaccgatgacgcaaatataagcttgtcaccacaaacaatgcacctaacgagacaaaaatggcgatatatttaagataaccttgaaaagacatcgcattttctaaaaaagcaaaagagaaaaaagacattttgcattcctaattttgaagagaaaaacagactgccaatgtagcacaacgaaaactgactagccatttttatcacataaattaaattcgtttttccgaaaaatcccttttataatgaccgcacttttgaaacaaaaagagaaaaatatgaaagcaattcagcccgaagatcagggatattggctgttcaccaaaggatcgatgatttattggcaggaaaatgatctgcctttcggatcagcaaaggaactcggcctcacaacacaaaaagcaatgttgctcgggaaatggaaatcacaacctttatggcttgtggcagaaaatgagcaagatgaacgagaatatctttccttacgaagtttgttgtccttactgactgaagattttcatttattaagccgaggcgtggaaatcaatcattttctgaaaacccaccaattctgcggaaagtgcggccaaaaagcggaacaaacccacgatgagctagcggttcaatgcacaagttgcagctatcgtacttacccagttatttgcccttcgatcattgtcgccgttcgccgtggcacagagattttattagccaaccataaacgccattacacaccaggcaaagccggtatttacaccacgctagcaggttttgtggaagtaggtgaaaccttcgaagatgccgttcgtcgcgaagtgtttgaagaaaccggcattcgcattaaaaatattcgctatttcggtagccaaccttgggcattcccaaattcacaaatggtgggttttttagctgattacgacagcggggacattcaactgcaagaaacggaactgcatgatgcacaatggttttctagcgctgcccccttgccagaattaccgccaacaggtactatcgcactcaaattaattaatgctacgcttgagctttgcaaagcggaataaaataaataaaggaaagcccatgtctgaattaaaaaatgatcgttatttaaaagccttattacgcgaaccagtggatatgacccccgtatggatgatgcgccaagcgggncgctatttgcctgaatataaagcaacncgtgcagaagcgggcgattttatgtctctttgccgnaatgcggatttagcttgngaagtcaccttacagccacttcgtcgctatgctttagacgcngcnattttnttctcagatattttaactattcctgatgcaatgggcttaggcttaagttttggtgcnggtgaaggcccgaaatttgctcatccaattnaaaanaaaagtgcggtcgaaaatttaccgattcctgaccctgaaggcgaacttcaatatgtgatgaatgcngtncgcacaattcgtcgcgaactaaaaggcgaagtgccactgattggtttctctggtagcccgtggacactggcaacntatatggttgaaggtggtagcagcaaaaccttcaataaaatcaaaaaaatgatgtatgccgaaccgcaaaccttgcatcttttattagataaagtggcggattccgtnattttatanttaaacgcncaaatcaaagcnggngcacaagcngtnatggtatttgatacttggggcggngtgttaggtcatcgtgaatatttagacttctctctncaatatatgcataaaatcgtngatggtttaattcgtgaacangatggncgtaaagtnccngtgactttatttactaaaggcggcggnttatggttagaagccatggcnaatacaggctgtgatgcgctaggattagactggacagttaatttggcngatgcnaaagcgcgtgtnggtcataaagtngcgctacaaggcaatatggatccaagngtgttatatgcacctgcagagcgtattgagcaagaagtgcggtcaattttagctgattttggncaaggcagnggacatgtatttaanttaggncatggnatncaccaagatgtgccngaaagtgcnccaaaaatcttcgtggatgcnatncatganttctcnaaagcctatcataaataagcgagaanaaaatgcgaaatccnattcacaagc

SEQ ID NO: 1308 - DNA, 4000 bp, Escherichia coli
  misc_feature (1524)..(1524): n is a, c, g, or t
  misc_feature (1877)..(1877): n is a, c, g, or t
  misc_feature (1989)..(1989): n is a, c, g, or t
  misc_feature (2027)..(2027): n is a, c, g, or t
  misc_feature (2163)..(2163): n is a, c, g, or t
  misc_feature (3211)..(3211): n is a, c, g, or t
  misc_feature (3589)..(3589): n is a, c, g, or t
  misc_feature (3730)..(3730): n is a, c, g, or t
  misc_feature (3914)..(3914): n is a, c, g, or t
tgtgcattttgaagggcgagtcccgcatgctctctcaagggatgaaagtgaattttcgggaacctctcttgcgccaagcgtacatcgtaaggcgaggtacaaagataggccagcgcatttgcagcatcgcttgccattctgctggggtaggcgtacaaaaactctttgagttcttggggggtgtcggcggtgatccaccgcgcccccgtgtacgggcagccttcgagtcgcacatcgcagtcgtactcggctttgagtcggtgttgaaccacttcgaactgaagttggccgatggcgcccaggagcatcaacccacccgcatcggggcgaaacacttgtatcgcaccctcttcgcccaattgagccaagcccgtttgcagttgcttggttctgagaggattttttaaaatcacggtcatgaagagctcgggtgcaaaaaaaggcaaacctgtgaactgcaaggaggcgccatcggtgatggtgtcacccaattgaacgccaccatgggtggtaaagccaatgatgtcaccggcataggcctcctcgacggcttctctgcgttggctcaaaaaggtcacgaccgaggtgggtctgagctctttggaggtgcgttgcactttgagcttcatgcccggtgcgtagcggcctgaggccacccggacaaaggcgatccggtctctgtgtgaggggtccatgttggcttgaactttgaacacaacacctgagaattgtgtttggtcgggttcaatggttttgagttgcgtttggccttgcgcgatgacggtgctttgtctggcttgtggcgctggtgccaagtccaccaaggcatccaagacctccatcacgccaaaattgttcacaccagaaccaaagaagaccggggtttgttggcctgatagaaaggcttctcgatcaaaggcgggggaggcccccgtggccaactccatgctttctaatgcggtggtgaattcgtgaccaaagcgctctttcaagcgagccagttcggtcaagggaacggtctcaaagtcttgtgggcgtctttcggagccggactcaaagaccttcatgctttgcgtgcgcaagtcaatgatgccgccaaaggacttgccctgcccaactggccaggtcatgggcacgcagggcatgcccagttcacgctcgacttcgtccaaaatgtccaaggggtcgcgcacctcgcggtccattttgttgacaaaggtgatgatgggcgtgtcacgcgttcggcaaacttcaatcagtcgcctggtttgtgcttcaacgccattggccgcatcgatcaccatcaaggcagagtcgacggctgtgagcacgcggtaggtgtcttctgaaaagtctttgtgacctggggtgtcgagcaaattgatcacatggtcgcggtagagcatttgcatgaccgaggaggccactgagatgccgcgctgcttttcaatctccatccagtcgctggtggcatgtcgactggcttttctggctttgaccgagcccgcaatttgaatggcaccngagaacaagagcaatttttcggtgagcgtggttttacctgcatctgggtgagagatgatggcaaaggtgcggcgacgtttgacctcagcggtcagagaggcgacttgcatggtgcgcaatcattgaaaaaatgaaacgatgaaaaggccaatttgaagcgacaagggcagatcccaagcagatcctagacatccgatgatctaggtgtgccagcccaactcccgaggattcgctgtgtcttggcttgggtgtgttgctcttcaaagaagaaagagaagtattttaacccttgtgcgacccaagtctgaagggtgccgatggcttgacccgccgaaggggaaaaccgcaaagancgcatttgggagatgcgccgcaaagggttggagcaccccccaagacccttatttttggggtttattgtgcccccagagctcttgagccttggcacttgggttaaaataatgncaccgaggagcgatgcaactctgtcgcagcgaaaaaangctttagatgttttacaacacgaagcctctttctcgcgggactgacaaagtgaggctcggtcacttttttcaaacggcgctcacccactgctagttgtgaggtgaggtgcccgtctcctttttctcgacaaggctnggatctcgtttgcttttgtgatttcacaagcgaaccgccttccttgctggcagtggttttttatcatccgatggagttaaaagacatgaacgctgtgatcaaacctttacatgccaacgatgccgtggtggccgatttgtccttggcggattggggtagacgagaaattaaaatcgctgaaaccgaaatgccaggcctcatggccattcggcaggagttcagtgcaagcaaggcgctcaaaggcgcacgcattacaggctctttgcacatgaccattcaaacagctgttttgattgaaaccttgcaagccttgggcgcgcaagtgcgttgggcttcttgtaacatttattcaacccaagaccatgcagcggctgcgatcgcggctgcaggaacccccgtttttgccaaaaagggcgagaacttgaccgagtattgggattacacacaccgtatttttgaatttggagcggcccatacagaagacgaaggccccaacatgattcttgacgatggtggggatgcaacgcttttgatgcacttgggtaaaaaggcagaaaaagacctctccttgttaagccacccaagcagcgaagaagagatttgtttgtttgcgtcgatcaaagaaaaattggcccaagatccctcatggtacagccgcaaaagcgccaagatcattggcgtgacagaggagaccacgacgggcgttcatcgcttgaatgaaatgtctgccaagggcgatttgatgttcagagccatcaacgtcaatgactcggtcaccaagagcaaatttgacaacctgtatggctgcagagagtctttggtggacggcatcaagcgcgcaaccgatgtgatgattgcaggtaaagttgccgtcgttgctggctacggagacgtgggcaaaggcagtgcgcaggctttgcgtgcgttgagcgctcaagtatgggtcaccgagattgaccccatcaacgcattgcaagcggccatggagggctacaaagtggtcaccatggattacgcaagcgacaaggccgatatttttgtcacggcnacgggcaacaaacacgtgatctcccacgagcacatgctcaaaatgaaagaccaggcgatcgtttgtaacattggacactttgacaatgaaatcgacatcacggccatggaacaataccagtgggaagaaatcaagccccaagtcgatcacattcatttgccttcaggccacaagatcatcatgctcgccaaaggacgtttggtcaatttgggctgtggcacagggcacccaagctttgtgatgagctcatcgtttgcaaaccaaacgattgctcaaatcgagcttttcaaattccaagaccgttacgagaacggtaaagtgtatgtgttgcccaagcacttggacgagaaggtggccaggttgcatttggcgaaggtnggagcaatgttgacggaactcaccgatgagcaagccagctacattggcgtgaacaagcaaggtccttacaaggccgacgcctaccgctattgatccaagtaggtgcaagcgtggcttttgaaccagtcaccttgcatcccnctttgtccaaggggcaagcttttgctggggttctcaaacattttttcccgctcccatgaatccaaccctcagtgttgaattttttccgcccaaaacgcctgaaggtgccgagcgtttgaagggggtacgacaagagttgtaccgcatcaagccacaattttgttcggtcacttacggtgccggnggctctacccagtcggggactttgagcacggtggcccaaatacaagccgagggacaagaggcggccgcacacctgtcttgcgtggg

SEQ ID NO: 1309 - DNA, 4000 bp, Escherichia coli
  misc_feature (2518)..(2518): n is a, c, g, or t
  misc_feature (2931)..(2931): n is a, c, g, or t
  misc_feature (3597)..(3597): n is a, c, g, or t
  misc_feature (3660)..(3660): n is a, c, g, or t
tcgacgaaggcatctgcctcaccgccacgctcgacatcctcaaggcgatcgcgcgcggcaacgggccggagagcgccatcctcgcgctcggctatgccggctgggcgcccgggcaattggaaaacgaaatccaggcgaacggctggctgcattgcgccgccgatccggaattgatcttcggcaccgacaccgacggcaaatacgacaaggcgctgcgcaagatcggcatcgatctgggccagctgtcgagcgaatccgggcacgcttagttcttcactgtcgtcccggccaagcgagcgttagcgagcgcgagccgggacccatggccaccggactatcgatgggctgcggagtatgggtccccgccttcgcggggcatgacattttaataatgatctagcgcgcgacttcgagcttttcgctgctgagcagcccgcccgccgcctgcgcgctcatcggctcgccgaaggcgaagccctgcgcgtattcgcagcccatctggtagagttcgaccgcgtcggaatcagtctcggcgccttccgccaccacttccatgccgagatcgtgcgcaagcgcgatgatcgagcgcaggatcaccggccgcgtgccgcgcgcggtggtgcgcacgaacgactggtcgatcttgatggtgtcgaacgggaagcgctgcagataggcgagcgaggaatgtccggtgccaaaatcgtcgagcgatagcccgacgccgagctccttgatgcgcgtgagcatctgcgcggcgtgctcgggattttccatcaccagcgattcggtgatttccagcttgaaggtgccgcgcgccagcgtcgagcgcgacagcacgccgcgcaggtcctggatcaggtcgtggcgcagcaattgccgcgacgacacgttgacgctggcgaagatcggctcgcgcgcgcggctggcggcctgccagattgcgagttggcgcgcggtgcgttcgagcacgaacaggccgaggtcggcgatcaggccgatttcctcggcggtggtgatgaactcggccggcgacaagcggccaagcttgggatgatcccagcgcgccagcgcctcgaaaccggcaatggcgcgatcctccagccgcacgatcggctggtagagcaccttgatctcctcgcgctcgatggcgcggcgcaattccgattccatggtcagccggtcggtcttgcgcgagcgcatggccggcttgaagatttcgatgcggtcgccgccgatccgcttggcgtgatacatggcgagctcggcgtccttgagcacttcctcggtgttgcgcgactggtcttcggcgagcgccagcccgatcgaggcggtgatgaagatttcgcggtcgttgaagccgatcggcgcgcgcaaggtgcggcgcatggtctcggcgaaggccacgatgcgcgcgggctcgcgttccgacagcaggatcaaggcgaactggtcgccggatagccgcgccagcgtgtcctgcggcttgagcagacgggcgagccggcgcgcgatggtgagcaggacggaatcgccgaccgcgatgccgaccgaatcgttgacctgcttgaaacggtcgagatcgatcaccagcaccgacggccggaattggctgtcggagcgggcgaagccgaaggccgcctccatgcggtcgatgaacagttcgcggttgggcaggccggtgagattgtcgtgcaccgcgtcgaacagcaatcgctcctcggccttcttgaaatcggtcacgtcggtgagtgtgccgaccaggcgcaccacttcgccgtcggagccgaccaccggccgtgctttgagcgagaaccacaggtaatggccgtcgaccgcgcgcagccggaaagtctgactgaggcgtccgcgccgctgctccacggcgctgtcgagcgaggcgcggaagcggtcgcgatcgagcggatgcagcacctcgagccagtccgccgccggtccttccagcgtgccgcgcttgaggccgagcagttgttctgtttccgggctggtgtaaaccttgtcggcggagacgtcccagtcccagatcagatcgccggcgccggtgagcgccagcgcgcggcgttcgacgtcggaaacgatgccgtgggtaatgccgccggcgaaggcgtgctgcatcaccgtgaatccgatcagcatcacgatcagcaccaggccgccgagcagcgccgggccgatgatgtcgttggtgacgacgccggtcaccgcaaagcctgcgcccagcgtccacaccaccagcaagagccaggtcggaatcagcagcacggcgcggtcgaagccgtgggtggaaagatagatcaccaatgcgagcccaaaaacggcaatgccgacgagcgacatgcgggcgatgccggcggcaaccgccggatcgaacaccgccaccgcgatcagcgcggcgagtactgcgagccagccgatggtgatgtgggcgtagcgcacgtgccagcgcgacagattgagataggcgaacaggaacaccagcagcgtcgccgacaggatngcctcgccgcaggcgcgccagacgcgctcggcgccggccgacatgtcgaacaccttgccccagaatccgaagtcgatgccgatatagatgagcaccgcccagccgagcgcggcggcggctgggaacatcaccgaacccttgaccacgaacaggatggtgaggaacagcgccagcagtccggcgatgccgatgacgatgccgtaatacagcgtgaaggagttgaccttgtccttgtaggcgtccggctcccataaataaatttgcgaaagcttgtcggtgcgcaattcggcgacgaaggtgatgacggtgccgggatcgagcgtgacgcgaaaaatatcggcggtcgtgttctcctgccgcagcggacggtcgcccgagctcggcgtgatggaggcgatgcgtgacaagcccangtcgggccagaacaggccggagccgaccatgcggtaatgcggcacgacgatcagccggtcgatctgctcgtcggaattgttggtgagcgcgaacaccgcccaattggtattggcttcgcgcgcgcgcacctcgatgcggcgcacgatgccgtccggaccgggcgcggtggagacctggatgcggtcgccgtcggtcttttgcacgtcggtggcggcggtgagatcgatggccgcggcatcgagccgcacgttcacggattcgacggcaagcgcggcgggcgtcgtcagcagcgaggcggcgagcgcgagcacggtgacaagcgcgcagcggtgcgagatcaatcgagaacccccggccgcagcagtgccagtcatgctgctgatccagctccgccgacggtaaaaatctgcaagcaaattcaccctgcccgattttgcttcgacattgcgccgatttcgcggccctggcgccccttgcgcacctgccaggagtatcggctccgctcccggcgggcaagagatcgaccgcgctttcaaagggttagcacgatcttgccgatatgcgcactggtttccatcagcgcatgggcggcggccgcctctttgagcgggaaggtcttgtagatcaccggtttgaccttgcccttggcgatcatcggcagcgcnttgtcttcgaccgcgcgcgcgatggcccctttgtcggcgaccgagcgcgagcgcagcgtcgancccgtgtgatgcaaccgcttgagcatgatgcggcggaaatccaccgtcgtcttcggtgagccttggaatgcgatctgcacgatgcgcccctccaccgcggccgcttcgtaattgcgcgcgatgtaatcgccgccgaccatgtccagtataacgtcggcgcccttgtcgccggtggccgccttgcaggctgcgacgaagtcatcggttttatagttaatggccacgtcggcgccgagcttgcggcaggcggcgcatttttccgtcgtgcccgcggtggtgatcacgcgcgcgccgagcgccttggcgagctggatcgccgtggtgccgatgccggacgagc

SEQ ID NO: 1310 - DNA, 4000 bp, Escherichia coli
  misc_feature (424)..(424): n is a, c, g, or t
  misc_feature (427)..(427): n is a, c, g, or t
  misc_feature (429)..(429): n is a, c, g, or t
  misc_feature (431)..(433): n is a, c, g, or t
  misc_feature (435)..(436): n is a, c, g, or t
  misc_feature (438)..(438): n is a, c, g, or t
  misc_feature (441)..(442): n is a, c, g, or t
  misc_feature (444)..(444): n is a, c, g, or t
  misc_feature (451)..(451): n is a, c, g, or t
  misc_feature (461)..(461): n is a, c, g, or t
  misc_feature (464)..(464): n is a, c, g, or t
  misc_feature (466)..(467): n is a, c, g, or t
  misc_feature (471)..(471): n is a, c, g, or t
  misc_feature (473)..(473): n is a, c, g, or t
  misc_feature (475)..(475): n is a, c, g, or t
  misc_feature (481)..(482): n is a, c, g, or t
  misc_feature (484)..(484): n is a, c, g, or t
  misc_feature (487)..(487): n is a, c, g, or t
  misc_feature (489)..(489): n is a, c, g, or t
  misc_feature (493)..(493): n is a, c, g, or t
  misc_feature (495)..(495): n is a, c, g, or t
  misc_feature (497)..(497): n is a, c, g, or t
  misc_feature (499)..(499): n is a, c, g, or t
  misc_feature (503)..(505): n is a, c, g, or t
  misc_feature (507)..(509): n is a, c, g, or t
  misc_feature (511)..(512): n is a, c, g, or t
  misc_feature (516)..(516): n is a, c, g, or t
  misc_feature (525)..(525): n is a, c, g, or t
  misc_feature (536)..(536): n is a, c, g, or t
  misc_feature (540)..(541): n is a, c, g, or t
  misc_feature (543)..(543): n is a, c, g, or t
  misc_feature (549)..(550): n is a, c, g, or t
  misc_feature (555)..(555): n is a, c, g, or t
  misc_feature (567)..(567): n is a, c, g, or t
  misc_feature (573)..(574): n is a, c, g, or t
  misc_feature (576)..(576): n is a, c, g, or t
  misc_feature (581)..(582): n is a, c, g, or t
  misc_feature (586)..(586): n is a, c, g, or t
  misc_feature (588)..(589): n is a, c, g, or t
  misc_feature (591)..(591): n is a, c, g, or t
  misc_feature (593)..(593): n is a, c, g, or t
  misc_feature (598)..(598): n is a, c, g, or t
  misc_feature (603)..(603): n is a, c, g, or t
  misc_feature (605)..(605): n is a, c, g, or t
  misc_feature (610)..(610): n is a, c, g, or t
  misc_feature (616)..(617): n is a, c, g, or t
  misc_feature (621)..(621): n is a, c, g, or t
  misc_feature (624)..(624): n is a, c, g, or t
  misc_feature (627)..(627): n is a, c, g, or t
  misc_feature (631)..(631): n is a, c, g, or t
  misc_feature (639)..(639): n is a, c, g, or t
  misc_feature (644)..(646): n is a, c, g, or t
  misc_feature (648)..(648): n is a, c, g, or t
  misc_feature (650)..(650): n is a, c, g, or t
  misc_feature (652)..(653): n is a, c, g, or t
  misc_feature (656)..(656): n is a, c, g, or t
  misc_feature (669)..(669): n is a, c, g, or t
  misc_feature (672)..(672): n is a, c, g, or t
  misc_feature (677)..(677): n is a, c, g, or t
  misc_feature (679)..(679): n is a, c, g, or t
  misc_feature (681)..(683): n is a, c, g, or t
  misc_feature (685)..(685): n is a, c, g, or t
  misc_feature (687)..(688): n is a, c, g, or t
  misc_feature (701)..(701): n is a, c, g, or t
  misc_feature (706)..(706): n is a, c, g, or t
  misc_feature (712)..(712): n is a, c, g, or t
  misc_feature (715)..(717): n is a, c, g, or t
  misc_feature (720)..(720): n is a, c, g, or t
  misc_feature (724)..(724): n is a, c, g, or t
  misc_feature (727)..(727): n is a, c, g, or t
  misc_feature (733)..(735): n is a, c, g, or t
  misc_feature (737)..(738): n is a, c, g, or t
  misc_feature (740)..(740): n is a, c, g, or t
  misc_feature (744)..(746): n is a, c, g, or t
  misc_feature (748)..(752): n is a, c, g, or t
  misc_feature (754)..(754): n is a, c, g, or t
  misc_feature (762)..(762): n is a, c, g, or t
  misc_feature (767)..(767): n is a, c, g, or t
  misc_feature (775)..(776): n is a, c, g, or t
  misc_feature (779)..(779): n is a, c, g, or t
  misc_feature (782)..(782): n is a, c, g, or t
  misc_feature (784)..(784): n is a, c, g, or t
  misc_feature (787)..(787): n is a, c, g, or t
  misc_feature (792)..(792): n is a, c, g, or t
  misc_feature (801)..(802): n is a, c, g, or t
  misc_feature (804)..(804): n is a, c, g, or t
  misc_feature (807)..(808): n is a, c, g, or t
  misc_feature (811)..(811): n is a, c, g, or t
  misc_feature (813)..(817): n is a, c, g, or t
  misc_feature (821)..(824): n is a, c, g, or t
  misc_feature (826)..(826): n is a, c, g, or t
  misc_feature (830)..(831): n is a, c, g, or t
  misc_feature (834)..(836): n is a, c, g, or t
  misc_feature (838)..(838): n is a, c, g, or t
  misc_feature (845)..(845): n is a, c, g, or t
  misc_feature (848)..(848): n is a, c, g, or t
  misc_feature (853)..(853): n is a, c, g, or t
  misc_feature (859)..(862): n is a, c, g, or t
  misc_feature (865)..(865): n is a, c, g, or t
  misc_feature (869)..(869): n is a, c, g, or t
  misc_feature (874)..(874): n is a, c, g, or t
  misc_feature (901)..(901): n is a, c, g, or t
  misc_feature (925)..(925): n is a, c, g, or t
  misc_feature (929)..(931): n is a, c, g, or t
  misc_feature (935)..(938): n is a, c, g, or t
  misc_feature (940)..(940): n is a, c, g, or t
  misc_feature (944)..(944): n is a, c, g, or t
  misc_feature (948)..(948): n is a, c, g, or t
  misc_feature (950)..(950): n is a, c, g, or t
  misc_feature (953)..(954): n is a, c, g, or t
  misc_feature (965)..(966): n is a, c, g, or t
  misc_feature (971)..(971): n is a, c, g, or t
  misc_feature (973)..(973): n is a, c, g, or t
  misc_feature (976)..(976): n is a, c, g, or t
  misc_feature (978)..(978): n is a, c, g, or t
  misc_feature (986)..(986): n is a, c, g, or t
  misc_feature (988)..(988): n is a, c, g, or t
  misc_feature (992)..(992): n is a, c, g, or t
  misc_feature (995)..(995): n is a, c, g, or t
  misc_feature (1000)..(1001): n is a, c, g, or t
  misc_feature (1008)..(1009): n is a, c, g, or t
  misc_feature (1011)..(1011): n is a, c, g, or t
  misc_feature (1013)..(1013): n is a, c, g, or t
  misc_feature (1016)..(1022): n is a, c, g, or t
  misc_feature (1024)..(1024): n is a, c, g, or t
  misc_feature (1029)..(1030): n is a, c, g, or t
  misc_feature (1035)..(1036): n is a, c, g, or t
  misc_feature (1038)..(1038): n is a, c, g, or t
  misc_feature (1041)..(1042): n is a, c, g, or t
  misc_feature (1044)..(1046): n is a, c, g, or t
  misc_feature (1048)..(1055): n is a, c, g, or t
  misc_feature (1057)..(1058): n is a, c, g, or t
  misc_feature (1061)..(1062): n is a, c, g, or t
  misc_feature (1064)..(1064): n is a, c, g, or t
  misc_feature (1071)..(1073): n is a, c, g, or t
  misc_feature (1075)..(1076): n is a, c, g, or t
  misc_feature (1081)..(1081): n is a, c, g, or t
  misc_feature (1084)..(1084): n is a, c, g, or t
  misc_feature (1087)..(1089): n is a, c, g, or t
  misc_feature (1091)..(1092): n is a, c, g, or t
  misc_feature (1095)..(1095): n is a, c, g, or t
  misc_feature (1097)..(1097): n is a, c, g, or t
  misc_feature (1099)..(1099): n is a, c, g, or t
  misc_feature (1101)..(1108): n is a, c, g, or t
  misc_feature (1110)..(1110): n is a, c, g, or t
  misc_feature (1112)..(1112): n is a, c, g, or t
  misc_feature (1114)..(1116): n is a, c, g, or t
  misc_feature (1118)..(1119): n is a, c, g, or t
  misc_feature (1121)..(1121): n is a, c, g, or t
  misc_feature (1125)..(1125): n is a, c, g, or t
  misc_feature (1127)..(1127): n is a, c, g, or t
  misc_feature (1129)..(1131): n is a, c, g, or t
  misc_feature (1135)..(1138): n is a, c, g, or t
  misc_feature (1140)..(1140): n is a, c, g, or t
  misc_feature (1143)..(1143): n is a, c, g, or t
  misc_feature (1145)..(1145): n is a, c, g, or t
  misc_feature (1147)..(1150): n is a, c, g, or t
  misc_feature (1156)..(1156): n is a, c, g, or t
  misc_feature (1158)..(1158): n is a, c, g, or t
  misc_feature (1161)..(1163): n is a, c, g, or t
  misc_feature (1166)..(1167): n is a, c, g, or t
  misc_feature (1170)..(1170): n is a, c, g, or t
  misc_feature (1172)..(1173): n is a, c, g, or t
  misc_feature (1176)..(1176): n is a, c, g, or t
  misc_feature (1180)..(1180): n is a, c, g, or t
  misc_feature (1182)..(1182): n is a, c, g, or t
  misc_feature (1185)..(1186): n is a, c, g, or t
  misc_feature (1188)..(1193): n is a, c, g, or t
  misc_feature (1195)..(1202): n is a, c, g, or t
  misc_feature (1204)..(1205): n is a, c, g, or t
  misc_feature (1207)..(1208): n is a, c, g, or t
  misc_feature (1210)..(1215): n is a, c, g, or t
  misc_feature (1218)..(1218): n is a, c, g, or t
  misc_feature (1655)..(1655): n is a, c, g, or t
  misc_feature (1985)..(1985): n is a, c, g, or t
  misc_feature (1989)..(1989): n is a, c, g, or t
  misc_feature (2821)..(2821): n is a, c, g, or t
  misc_feature (3264)..(3264): n is a, c, g, or t
ctctccgtacttgcagggctgccaacaagaatctatcagacaattcacgaaggggggctagcctttctcgtggtcatttcaccaaaagaaaaagcaccaggaatcccaaaaacgtccgtcttgacatggcggaggtcgccgatagttgctctacgtgcatgaagtttcattttggtccagcattgacaaaaaatcaagcaagacgcaaggactaccctgatcttaattaccctgattgaaatccttcgggtattactgctcctgcatctcctgctgagcagttggggacagcagctattaaattgtgcatgcgttcgtacggcactgacacgaacagtatgtctggctcaaatccctgctgttttcgtgccgtccaatcacccatcgttatgttcgtgcatccagtcattacgggatatgttanagngntnnngnntnatnntnctatganttgttgttgnggngnnatgncntnccagtnngngtncnaggntntnanccgnnncnnntnntctnggttacacngaaacaacacnatgnncngtcttnntgttnttttttcaagcngacatnncnctaannggtncnncnanccggnaggcngntgaancgtcanntttnacnttntctngaatgatncaatnnnantngnnagnctctctccttttnttnggaancncnnnantnnccttttttgttgncccgnaatttncgnnnaancacnatntctacnnncnncngggnnngnnnnnancttttcgncaatnacaaaacnntcnccntncgnagcangtttcaacnncntannaancnnnnntttnnnntncaannccnnngnaacttcntcnttggngaacgnnnntgncagnggttncttttttaaacccagcactttttttantagttctgcttgttctctaaactncatnnnctannnncnttantagntnatnnaatctggttanntaatnantangnctaacaanantaanacncccgnnaacatanntncnatnnnnnnnangaagnntaaanngnttnntnnntnnnnnnnntnntannancggacgnnncnncaatnttncannnanntgncntngnnnnnnnnangnannngnngntggnangnnntccnnnngnttncncnnnngccgtnantcnnnatnnaancnnttnttgntngannannnnnncnnnnnnnngnngnngnnnnnnccngctattttttgaattttcgctctaaacgcgcgctcagcagcagaaacgcgcccgtaaaaacgagcaagacaagggagtccacaagcaccccgtagacagtctttccctgaaacgcgtatgtaaccaggtcatttgcgtaggtgagcggagaaaacgccgccacagcctgtccccacgtcggcaggctttcaagagggataaagaggccgctgataaagatcagtggaaggcgaacgacgttgagcgccatcatgatatcgccggggttttccgttgggagcatggcgaatagtatccccagcgttgcaaagcagaacgccgggagaacgacaccgaggaataagccggtgaagctgacgatctgtgctgcaagccacgcgaggccgataataagaggaatgattgccacggcaacactaaacaaaaagccgctgagnatcttgccaagtgtgattgaataggctgatatcggtgccgatcgcaggcgttcgaacgtcctcactcgccgctcagtcgggatgaccatgggccctattgacgaggcgctgaagattatggtgatcgagagcaagcccggaagcagggttatcgccgggacgtttcttcctatcgcgaatgagaagaatatgacaaaggggaacatgatcccaaacattataggcgggggcttgaggtagtagatccgcatgtctttcttcgcgattgcccaggctgcgtcgatattgactcgcaactggctagccgccgatacgtttgcgctcatccanctcncccccgcattcacttctcccccgaggtggctcttatctccgtaagtcgcacgaacacgtcctcgagacttggcccgaatgtattgacgcttaggggccgcaagttattcttcgttgcatactcgcacaagcctgaaagggctcccgccgggtcatgggtgtagagcctgaatttgtcgccggctttgtgcacctcgctgatcaaagggaggttttgcaggtcgtgcacgatctcggaaggcgttcgttcaaaggctacctcgattgactgtacgctctcaatggtcgtttttagcttctcgggggcatcaatggcggcgattttccctttgtggataattgcaacccgctcgcacgtcacgctggcctcttcgatattatgtgtggtcatgaagatggtgacgccctcttcgttcagctgtttcatcacgtccttgataatcaaggtgctgtggacgtccagccccgaggtgggttcatcaagaaacagcaggcgcgggttgctcatcaaccccatcgccagcgtgatacgacgcttcatcccctttgaaaaacccttgaccttctcagttctgcggtcgaaaagatcaaagaggttgagaagttccgttgcccgctttgtcctctcgcgtcttccgacgtggtagagctccgcggtgaagataaggttgtcccacgcaggcagatcgtcatagatgttggagatctcggggacgatgcccaattgtctcttggcggcaagggcctcacgttggatgtcatagccaaataacgctgcgctgccctcgcttggctctgttaagccggtgagcatattcatcgtggtggttttnccggcgccattggggcctagaaagccaaatatctcgcccactcgtacattgaaactgacgtggtcaacgactggtatattgttgtagtacttcgtaagaccggaaacggcaacggcgttttccaaagggcatcatctcagccaaacaagtctatcggaacatgtgtaattaggcctcttcgcctgtgtaattggcttcctctgtgtcttttttcaagcgtaatacctcgaaatttgagtcccggattctaggcgcgaatcattgtcagaagcatcttgaaacggtttacggcttgaagcgcatgagggatgtttgcgggcaagacgaccatgtgtccctcactagcatggacagcattgcctccgatggtaatctcagcatcgccatcgatgatctgcacaaccgcatcgtacggcgcggcatgctcgctcaagccctgcccngcatcgaacgcaaacagcgtgatagtgcccgctttcgtgtcgatcagggtcttgcttactatcgaatcagccgaatattcgacaagtgtttttgtatcaactgctttacctttgtacatttcaatttggctcaagagtgtgcctccaaaatactaaccatcaaaacggttcttagttaaatgctgctttagaaattgccgtagcgttcaacaaccccctatgcgcattggtgtttctgttcatcagcgccactttgtcctttcgtcacttgggcaaataggtggtgagagtaaacaacgaagttgatgtacgcctcgacgaattcccgtcccgctctgacgtcgtttacgccatagttctttgttgaaatggtgcgtttaaaccgttgctgcaaatcgtcttcgatagcgcgcagaacgaagctaatcgcgtcagtcgcatcatttgtttcgatggccttttccgcccgtggcacgacagggccccaatcaagcccagccggtttgaggcccgtgaacggcgccccttcgcctgctctatgcaaacgtacaacgttttcgaaaaaccattcatcggccagagcttgcgcttctgggcctttctttctcacctcgagggtcttttcgaacacatctttcagctcactttctgcactctctggtacccagatgaggacaaaattcacatttcccgtgtctagcgctactcgtgcagcactgacaactggaccatctct

SEQ ID NO: 1311 - DNA, 4000 bp, Escherichia coli
  misc_feature (3719)..(3719): n is a, c, g, or t
tgggttcgttcattcgcacagtctcctgtcaagggggacgcaaaggaggctttgggtcatgcctgcgcctcttttgcagcttggcgcctgttgcgcatcaatatatccatggccgccatgcgcactgccacacccatctcaacctgttcttgtatgacgctgcggttcaaatcgtcggcgatttccccgtcgatttcaacgccgcggttcattgggcccgggtgcataacaatggcatctggcttggcgtggctcagtttctcagcattcaaaccatagcggtgataatattcgcgttcggaggggatgaagccgccgtccatacgctcgcgttgcaggcgcagcatcatcaccacatccacatccttcaaaccctcttgcatatcgtgaaagacttccgcaccaaactctccaattcccgccggcatcagcgttgctgggccgataaggcgaatgcggttttccattttgcccagcaaaatgaggttagagcgggccacgcggctgtgggcaatgtcgccgcaaatggcgatgttgaggcgatgcaagcggcctttggatcggcggatggtgagcgcatccagcagggcttgcgtggggtgttcatgccgcccgtccccagcgttgagcaccgcgcaattgactttctgcgccaagagatcgacggcgccagaatgcggatggcgcaccaccagaagatcggggtgcatggcattgagtgtcagcgctgtgtcgatgagggtctcaccctttttgattgagctggcttgcatggccatattcatcacatccgcccccaatctcttgcctgcgatttcaaagctggcttgagtgcgggttgagttttcgaaaaacatattgatctgagtgcagccagccagggctttactgtcgcgcgcacgggatctgttttgatcggcataatgatctgccaaatctaatatttcggtgatgctttggggatgtaggggttctatccccaatagatgctgaagctgcatatagacctctccggttggcgttttatagaaagagtggcggcccacggcaagggcagggggcaaggaaatgtcatttgagcctgaggcgggttatttttgacgcgctgcgtcactgattgaatgatttaccttcctctcagaagggcatagtttgaggccatggatcaattggattggcatatggcacgcgccgcgttgcagtggcaggcagagctcggagtgagcgatgccgtgggtgatgtgcccattgaccgctatgaggtgccggcgcaaaaccccaaacgatccactgcagcggcggcacccaccgaggcgccacaggctgcggagcggcctccggctgtgatggcagccgcgccggctgtggaccctgttgcagtagccgaagaggctgcagctgcggcgggggatttgccggcgttgaaacttgcgctgcaaaatttttcccattgtgatttgcgccgcggagcccgcaatttggtgtttggtggcggcagggctggggctcgggtgatgatcttggaagatgcgcccgggcgggcggaggatctgcaaggtctgccttttgccggcccggccggtcaattgctgggcaaaatgtgcgccgctattggtttggatcgggccgaggaagtctatgcagcctcagtgattccttggcgcccaccgcaggaccgagaggccagcgcggctgaaatcgccatgatgcagcctttcttgcgccgtcatatcatcttggccgcgccgcaggttgtcatatgtatgggcaatatcagttgtcaggcggttttgggcaaacgcggcctgagcaagctgcgcggagcctggcaagagggttttgccctgccagttttgccgatggtgcatccgcagggcctgttgcgccagcctaatcggaagaaacaggcatggcaggatttgttgatgctcaaggcttggctgcgcgcgcaatctgaagggggcaagacatgaccgatgcaccagcaaaaatagagtttatcgcggtgcgcatcgcggttttaaccctgtccgacagccgcagtttgagtgatgataaatccggcgacacgctggttgcgcgcttgcaagcggccggacatatcctggccgaccgtgacattctccccgatgatcgcgcagcgattgccgaaaaattgcgtcaatggtcgcgcgatccgtctattgatgtggttctgagcacgggcggcactgggctcacgggccgtgatgtgagcgtcgaggcacatcgggatgtctatgaaaaagagattgacgcgttctcaactctcttcacctttgtttccatgcaaaaaattggcacatctgcggttcagagccgagcaacgggcggtgtggccaatggcacttatatgtttgcattgccgggcagtccgggcgcctgcaaagatgcttgggacgaaatactcgtcaagcaattggatataagacataaaccctgcaattttgtcgaaatcatgccgcggcttgatgagcatctgcaaagaaaataagccccgctgtcgaatctgcgtgacgcggagaagttttgtactagaacaactgtaatgatgatcgagagggctgtcgtatgcggtttctacgcaaaagtttaatggggttgttcttactggcggcgactctggcgctgtttgcctatgccatcatgatggttcggggcgcgattgagaacaaaggtgacgatcagcggcgcggtggcggtggtcgtgagagaatttttgcagtgaatgccgtgccctttgagccgggccagcatattccggtcctacaggtctttggcgaggtgcaaagccagcgtagccttgatattcggccggcggttggcggaacggtcattgagttgcacccgaattttcaaaatggcggttctgttttggagggcgatgtactcctgagaattgatccgtcaaatgcacaaaccgccttggctttggtacaggccgatatggccgatgctcaagcggatttgcgagaggcgatgcgggcgctagacttggccaaggatgagatcagcgccgcgcaagagcaagccgccctgcgccaaaaagcattggcccggcaacaagatctcgtgacccgtggggtcggcactgcggcctctgtggaggctgcggaactggctgcttcctcggcgcgccaatccgttctggcgcggcgccaagctttgcaggccgctgaggcgcgtttggatcaagcgcgtgcgcgggtcatgcgggtggatatttctctggcggaagcggagcgcaatctgcgtgacaccgttgtacgcgcggccttttctgggctgctggccaatgtcactgttctgcagggcggaactgtgaccaacaatgaaaaaattggtcaattggtggatccattggctctggaagtggcctttcgtgtgagcacctcccagcatcggcgtctgctcgatgatgcgggcaaattgcgagcggctgaggtcacggtgacgttggatctgctcggcgcggagatgagctcaagcggccagatcacccgcgaagctgctgtcgtgggcgaaggtttgacggggcggcttctctttgccagccttgcaacctccaagggtctgcggccgggtgattttgtgactgtaaacataacggagcccgccttgaattgggttgcccgcctgccggccacggccgtgagcgggaataacaaggttctggttgtgggcgaagatgagcgcctgtnggaggccgatgtgacccttgtgcgccgtcagggggatgatgttttggtgcgctcgcgtgagctgagcggagcgcaaattgtagcggaacgatccccattgctgggtgcgggcatcaaggtgcgcgtgctgagcgctgagggagatgcgccgccggcggccccggagaccatcgcgcttgacccggagcggcgcgccaagttgattgcctttgtcgaggccaataaacgcatgcccaaacaggccaaggagcgggtcttggcgcagttgcaagagcccgaag

SEQ ID NO: 1312 - DNA, 4000 bp, Escherichia coli
  misc_feature (2231)..(2231): n is a, c, g, or t
gtatgaatggccccagcagtggctgctggtagatttccttgcgtgacacgttgtagatcttgcgcggcaccgcggcggcggcaagcatgggatccagatagctgcagtggttaccgcagatgagtcctggtccgtgcctcggtacattctcaagcccaatgacgtggagtttgaagaaggtcctgaaccagagcctgcctatcgggacaaccagctcatacagcatgctcaagcctcctgcgatactcggccaggatcgcctgcacgactccatcggagccgtcagcagagttgtccagcttgacgtgctcctctgtgcatcgaagaggcgagtcttctcgggacgagtctatcgcatcacgttccttgatgttggtcagcacggctccgtagtcggccgggctaccctgacgctccagctgggcgactcgccgcctggcgcgaacatccgggtccgcagtaatgaacaccttcagaaatgccttgggaagaaccgtcgttcctatgtcccggccaaccatgacaatatcctggagcaaggcgatgcgtcgcaactccctgttcacggctgcccgtacctgtggcaccgcactgacaggcgacacgaggctgtctactctcgggtcgtggagggacaaccggagaacgcgcccgtcaaacagaaccgtaccgccgggctcgtagcttatacaacgctcgaggatatccaaaaggcgatcgctccgcagacaacggtcagacggaaactgctcggcatatgcagcggtgaacactcggtacaacagcccagagtcgacgagcatgaagccaagctcatcggccacacgcagtcccaccgatgtcttgccagatccagacggcccgtcgatagcaatgtctcggttcacgaaacctctctcaagagtgccgcattcacgtccgcagaagagatactgccttcgcgcagcatggaccacgaccccgctgtcaatctgataaccgtcgatggccggccttccggacgccgtcggctgtccaggaccagatccgcctgttccagcaatccggcggccccaggcgcgtccagacgctcaatgacactctcaccgctctcattcagacttgtctgcgccatcacgaggccgccgacaagcaagcgaaggagtccagtgtggcggggcacccggaaaccgatgctggatgcttctgggtagggcaggggctgtgtgtggcaaccactccccgcaacatcgacgacgatggtaagcgctccgggccagaatgccctggcaagacgctgggccatcacatgtgccgcaggctcgatccacggcaggacacgatcgatatcaggtacgaacacgggcaacgccttggcaggtttgcgatgctttgctgcgaacaccctggcaaccgaagatacgcacgccgcgttgcagccaatgccatagacggtgtccgtcgggaacactgcgacggctcccaaagcaatgcgctcggacagccgccgaacatcggcgtctgagcaagtgtccaataggacaatcgcaggaagagacatctaccgcctccgaaaataggacggatcgagcttgggctctttcccggccctcaaccgaccgatgttcgcggcatgccgaacgatgcccaacacagcaagcagggcgtaaatcagaataagtttcggcggctgtctcagaataagcgcggcaactggaagagtggcgaacacggccactgatgccagcgaaacggtattgcggagcgccatgacgacaagccagatgcccaactccacgagagcgacgggccagctcagaacaaacacaactccgaaggtcgtagcaacacccttccctcccttgaatccggcaagaacggagaaatcatgacccatgaccacggcaacagccgccacaagcagtgcttcgcgcgatatggctggaaagaaccttgtcagcacgagcagaaggagtactgccttcagaaagtcgccagcaaaagcgaatgcggcaggaacagggcctgcggtgcgcaacacattcgtagctcccatgttcctgctgcccaccttcgtgatgtccacacccttgattattttggcgaagatgtagcttaacggcagagaaccgacgaggtatgcaacggcaaaaaccgcaagatcacgcaagatgtagttgaacgtgttcattttgctcgacgcgcctccgcgtagcgcggcaaccccctgaggtcaggcgaccagcgtcccncctgcagtccataccgcttaaacagcttcagtatgccctgttccagtccatcgtcaatctccagcagcagcaggccaccgggtcgcaaccagtcgcaagcctgtgcaatgatccgtttgtagaaaaccatgcctgacgtaccgccatagagtgcccggaccggttcaaagggcgaggacgcgtgcgccgagaacagacgctgctcacggacataaggaggattgctgacaatgacatcggtgcgactgtggaaatcggtgagagcaagaccccacgctgccagtacgttgccctggacgaacctgactcgctctgacagacccgcgtccaaggcggattcgcgggaacacgatatagatacagggtcgagctccagtcccacgaccgctacctgtggcagtctggcggccagtgccagagcgatagcccccgaaccggagcaaaggtccagtgcgatggggcgggggcgatcctgctcgataatgaagtccccggcgatctccaccagacgttccgtctccgaccgaggcacaagaacgccctcccgcactcgtacgacgatatcacagaaagcggcatagccggtgagatactccgcagggcatccatcggccagttgttgggcagcatgctccacagatatctgcatgccatgcttagcaggtagagccagttggatgagcagatctgaacggctccatcctctgctcgccgcaacaacgtactgcagttcaccgtgtttttgcaacgagagctgagcgcgctgctcagcatgcgcaagtacttctcgcagagtcaatcgtcgttgtcctgcacaatgggcgtctcaagagtcctctcccgggaagcccggtgaagagcgtcgactactggatcgaggtttccctccatgatgagaggcaaattgtacagggacagaccaatccgatggtcagtcaggcgaccttgaggaaaattgtaggtacggatacgcatgttgcgcatgccactgccgatctgagccctacgctcattgatcatctcactgtcggccttttctttcatgaactcatagacgcgggatcgcagcaccttgagagccttctccttgttcttcagctgggacctctcatcttggcatgacgcagtgatgcctgttggaatgtgcgtcatgcggacagccgtctctaccttctgaacgttctgtcctccatgtccagacgcatgaaacagctcaagcctgatgtcgtcgtcgtcgatatgcacgtcgacatcttcagcttcaggcagcaccgctacggtagcggtggatgtgtgaatgcgcccagaagcctccgtctcagggacacgctggacgcggtggacgccactctcgaacttgaagagcttgtagcttcctaccccaagcaccgagaagatgatttccttaaaccccccgatctcggtttggtgactcgagatgacctctatcttgaggccatgctgacttgcgaagtacgagtacatgcgaaacagatcggcggcaaacaaggccgcttcgtcgccaccaactcctccccggatctcgatgatgatattcttgtcgtcatccgggtctttgggaatgcgttcttcctcgatctgagcgtgaacagcttccagtccccgccgaagtcggaccttttcttctgcgatcatggcagcgaactcggaatccgttccctctacaagaagcgcatcgttgtcggcaagctgagccctcagagattcttcgcgagtgagaagctccaacagggagtccatcatgcggc

SEQ ID NO: 1313 - DNA, 4000 bp, Escherichia coli
  misc_feature (1)..(4): n is a, c, g, or t
  misc_feature (751)..(751): n is a, c, g, or t
  misc_feature (922)..(922): n is a, c, g, or t
  misc_feature (1112)..(1112): n is a, c, g, or t
  misc_feature (3069)..(3069): n is a, c, g, or t
  misc_feature (3071)..(3071): n is a, c, g, or t
  misc_feature (3074)..(3074): n is a, c, g, or t
  misc_feature (3079)..(3079): n is a, c, g, or t
  misc_feature (3084)..(3084): n is a, c, g, or t
  misc_feature (3088)..(3090): n is a, c, g, or t
  misc_feature (3093)..(3093): n is a, c, g, or t
  misc_feature (3095)..(3095): n is a, c, g, or t
  misc_feature (3101)..(3101): n is a, c, g, or t
  misc_feature (3108)..(3108): n is a, c, g, or t
  misc_feature (3111)..(3111): n is a, c, g, or t
  misc_feature (3113)..(3113): n is a, c, g, or t
  misc_feature (3115)..(3118): n is a, c, g, or t
  misc_feature (3122)..(3122): n is a, c, g, or t
  misc_feature (3127)..(3127): n is a, c, g, or t
  misc_feature (3131)..(3131): n is a, c, g, or t
  misc_feature (3133)..(3133): n is a, c, g, or t
  misc_feature (3137)..(3138): n is a, c, g, or t
  misc_feature (3140)..(3140): n is a, c, g, or t
  misc_feature (3142)..(3142): n is a, c, g, or t
  misc_feature (3146)..(3146): n is a, c, g, or t
  misc_feature (3148)..(3148): n is a, c, g, or t
  misc_feature (3152)..(3154): n is a, c, g, or t
  misc_feature (3156)..(3156): n is a, c, g, or t
  misc_feature (3159)..(3159): n is a, c, g, or t
  misc_feature (3163)..(3164): n is a, c, g, or t
  misc_feature (3168)..(3168): n is a, c, g, or t
  misc_feature (3170)..(3170): n is a, c, g, or t
  misc_feature (3175)..(3175): n is a, c, g, or t
  misc_feature (3245)..(3245): n is a, c, g, or t
  misc_feature (3293)..(3293): n is a, c, g, or t
  misc_feature (3297)..(3298): n is a, c, g, or t
  misc_feature (3300)..(3300): n is a, c, g, or t
  misc_feature (3302)..(3303): n is a, c, g, or t
  misc_feature (3305)..(3305): n is a, c, g, or t
  misc_feature (3307)..(3310): n is a, c, g, or t
  misc_feature (3312)..(3312): n is a, c, g, or t
  misc_feature (3314)..(3314): n is a, c, g, or t
  misc_feature (3318)..(3318): n is a, c, g, or t
  misc_feature (3321)..(3321): n is a, c, g, or t
  misc_feature (3323)..(3325): n is a, c, g, or t
  misc_feature (3327)..(3327): n is a, c, g, or t
  misc_feature (3333)..(3333): n is a, c, g, or t
  misc_feature (3336)..(3337): n is a, c, g, or t
  misc_feature (3341)..(3341): n is a, c, g, or t
  misc_feature (3354)..(3355): n is a, c, g, or t
  misc_feature (3361)..(3361): n is a, c, g, or t
  misc_feature (3364)..(3367): n is a, c, g, or t
  misc_feature (3369)..(3369): n is a, c, g, or t
  misc_feature (3371)..(3371): n is a, c, g, or t
  misc_feature (3373)..(3373): n is a, c, g, or t
  misc_feature (3375)..(3375): n is a, c, g, or t
  misc_feature (3377)..(3377): n is a, c, g, or t
  misc_feature (3383)..(3383): n is a, c, g, or t
  misc_feature (3386)..(3386): n is a, c, g, or t
  misc_feature (3392)..(3392): n is a, c, g, or t
  misc_feature (3404)..(3404): n is a, c, g, or t
  misc_feature (3407)..(3408): n is a, c, g, or t
  misc_feature (3412)..(3412): n is a, c, g, or t
  misc_feature (3420)..(3421): n is a, c, g, or t
  misc_feature (3424)..(3424): n is a, c, g, or t
  misc_feature (3427)..(3427): n is a, c, g, or t
  misc_feature (3434)..(3435): n is a, c, g, or t
  misc_feature (3437)..(3438): n is a, c, g, or t
  misc_feature (3440)..(3440): n is a, c, g, or t
  misc_feature (3442)..(3446): n is a, c, g, or t
  misc_feature (3448)..(3448): n is a, c, g, or t
  misc_feature (3450)..(3451): n is a, c, g, or t
  misc_feature (3453)..(3453): n is a, c, g, or t
  misc_feature (3456)..(3457): n is a, c, g, or t
  misc_feature (3464)..(3464): n is a, c, g, or t
  misc_feature (3469)..(3469): n is a, c, g, or t
  misc_feature (3471)..(3471): n is a, c, g, or t
  misc_feature (3475)..(3475): n is a, c, g, or t
  misc_feature (3478)..(3478): n is a, c, g, or t
  misc_feature (3480)..(3482): n is a, c, g, or t
  misc_feature (3486)..(3486): n is a, c, g, or t
  misc_feature (3490)..(3490): n is a, c, g, or t
  misc_feature (3493)..(3494): n is a, c, g, or t
  misc_feature (3496)..(3498): n is a, c, g, or t
  misc_feature (3501)..(3503): n is a, c, g, or t
  misc_feature (3506)..(3507): n is a, c, g, or t
  misc_feature (3515)..(3516): n is a, c, g, or t
  misc_feature (3519)..(3519): n is a, c, g, or t
  misc_feature (3524)..(3525): n is a, c, g, or t
  misc_feature (3529)..(3529): n is a, c, g, or t
  misc_feature (3533)..(3533): n is a, c, g, or t
  misc_feature (3536)..(3536): n is a, c, g, or t
  misc_feature (3539)..(3542): n is a, c, g, or t
  misc_feature (3546)..(3551): n is a, c, g, or t
  misc_feature (3553)..(3555): n is a, c, g, or t
  misc_feature (3561)..(3561): n is a, c, g, or t
  misc_feature (3563)..(3563): n is a, c, g, or t
  misc_feature (3566)..(3566): n is a, c, g, or t
  misc_feature (3569)..(3569): n is a, c, g, or t
  misc_feature (3572)..(3572): n is a, c, g, or t
  misc_feature (3574)..(3574): n is a, c, g, or t
  misc_feature (3582)..(3583): n is a, c, g, or t
  misc_feature (3586)..(3586): n is a, c, g, or t
  misc_feature (3593)..(3593): n is a, c, g, or t
  misc_feature (3596)..(3596): n is a, c, g, or t
  misc_feature (3599)..(3599): n is a, c, g, or t
  misc_feature (3604)..(3604): n is a, c, g, or t
  misc_feature (3607)..(3607): n is a, c, g, or t
  misc_feature (3610)..(3610): n is a, c, g, or t
  misc_feature (3615)..(3616): n is a, c, g, or t
  misc_feature (3618)..(3618): n is a, c, g, or t
  misc_feature (3622)..(3622): n is a, c, g, or t
  misc_feature (3625)..(3625): n is a, c, g, or t
  misc_feature (3627)..(3627): n is a, c, g, or t
  misc_feature (3629)..(3629): n is a, c, g, or t
  misc_feature (3631)..(3631): n is a, c, g, or t
  misc_feature (3634)..(3635): n is a, c, g, or t
  misc_feature (3637)..(3638): n is a, c, g, or t
  misc_feature (3642)..(3642): n is a, c, g, or t
  misc_feature (3644)..(3644): n is a, c, g, or t
  misc_feature (3649)..(3650): n is a, c, g, or t
  misc_feature (3660)..(3661): n is a, c, g, or t
  misc_feature (3669)..(3669): n is a, c, g, or t
  misc_feature (3672)..(3672): n is a, c, g, or t
  misc_feature (3675)..(3676): n is a, c, g, or t
  misc_feature (3686)..(3686): n is a, c, g, or t
  misc_feature (3688)..(3690): n is a, c, g, or t
  misc_feature (3692)..(3692): n is a, c, g, or t
  misc_feature (3694)..(3696): n is a, c, g, or t
  misc_feature (3700)..(3700): n is a, c, g, or t
  misc_feature (3704)..(3704): n is a, c, g, or t
  misc_feature (3707)..(3707): n is a, c, g, or t
  misc_feature (3709)..(3710): n is a, c, g, or t
  misc_feature (3712)..(3712): n is a, c, g, or t
  misc_feature (3716)..(3716): n is a, c, g, or t
  misc_feature (3719)..(3719): n is a, c, g, or t
  misc_feature (3721)..(3722): n is a, c, g, or t
  misc_feature (3725)..(3725): n is a, c, g, or t
  misc_feature (3727)..(3727): n is a, c, g, or t
  misc_feature (3730)..(3731): n is a, c, g, or t
  misc_feature (3733)..(3735): n is a, c, g, or t
  misc_feature (3738)..(3738): n is a, c, g, or t
  misc_feature (3743)..(3743): n is a, c, g, or t
  misc_feature (3747)..(3748): n is a, c, g, or t
  misc_feature (3751)..(3751): n is a, c, g, or t
  misc_feature (3753)..(3753): n is a, c, g, or t
  misc_feature (3755)..(3759): n is a, c, g, or t
  misc_feature (3761)..(3761): n is a, c, g, or t
  misc_feature (3763)..(3768): n is a, c, g, or t
  misc_feature (3773)..(3773): n is a, c, g, or t
  misc_feature (3777)..(3779): n is a, c, g, or t
  misc_feature (3781)..(3781): n is a, c, g, or t
  misc_feature (3784)..(3784): n is a, c, g, or t
  misc_feature (3786)..(3787): n is a, c, g, or t
  misc_feature (3790)..(3790): n is a, c, g, or t
  misc_feature (3792)..(3792): n is a, c, g, or t
  misc_feature (3795)..(3795): n is a, c, g, or t
  misc_feature (3798)..(3798): n is a, c, g, or t
  misc_feature (3801)..(3801): n is a, c, g, or t
  misc_feature (3804)..(3804): n is a, c, g, or t
  misc_feature (3806)..(3808): n is a, c, g, or t
  misc_feature (3816)..(3817): n is a, c, g, or t
  misc_feature (3819)..(3819): n is a, c, g, or t
  misc_feature (3824)..(3825): n is a, c, g, or t
  misc_feature (3827)..(3829): n is a, c, g, or t
  misc_feature (3835)..(3835): n is a, c, g, or t
  misc_feature (3840)..(3841): n is a, c, g, or t
  misc_feature (3844)..(3844): n is a, c, g, or t
  misc_feature (3851)..(3851): n is a, c, g, or t
  misc_feature (3860)..(3861): n is a, c, g, or t
  misc_feature (3863)..(3863): n is a, c, g, or t
  misc_feature (3868)..(3868): n is a, c, g, or t
  misc_feature (3873)..(3874): n is a, c, g, or t
  misc_feature (3876)..(3876): n is a, c, g, or t
  misc_feature (3878)..(3879): n is a, c, g, or t
  misc_feature (3883)..(3883): n is a, c, g, or t
  misc_feature (3885)..(3885): n is a, c, g, or t
  misc_feature (3894)..(3894): n is a, c, g, or t
  misc_feature (3899)..(3899): n is a, c, g, or t
  misc_feature (3901)..(3902): n is a, c, g, or t
  misc_feature (3905)..(3909): n is a, c, g, or t
  misc_feature (3911)..(3913): n is a, c, g, or t
  misc_feature (3917)..(3917): n is a, c, g, or t
  misc_feature (3920)..(3920): n is a, c, g, or t
  misc_feature (3923)..(3923): n is a, c, g, or t
  misc_feature (3926)..(3926): n is a, c, g, or t
  misc_feature (3928)..(3929): n is a, c, g, or t
  misc_feature (3931)..(3931): n is a, c, g, or t
  misc_feature (3933)..(3933): n is a, c, g, or t
  misc_feature (3937)..(3937): n is a, c, g, or t
  misc_feature (3941)..(3942): n is a, c, g, or t
  misc_feature (3947)..(3947): n is a, c, g, or t
  misc_feature (3949)..(3949): n is a, c, g, or t
  misc_feature (3951)..(3951): n is a, c, g, or t
  misc_feature (3957)..(3957): n is a, c, g, or t
  misc_feature (3960)..(3961): n is a, c, g, or t
  misc_feature (3965)..(3965): n is a, c, g, or t
  misc_feature (3967)..(3967): n is a, c, g, or t
  misc_feature (3970)..(3970): n is a, c, g, or t
  misc_feature (3972)..(3972): n is a, c, g, or t
  misc_feature (3974)..(3977): n is a, c, g, or t
  misc_feature (3979)..(3980): n is a, c, g, or t
  misc_feature (3984)..(3986): n is a, c, g, or t
  misc_feature (3988)..(3988): n is a, c, g, or t
  misc_feature (3990)..(3990): n is a, c, g, or t
  misc_feature (3992)..(3992): n is a, c, g, or t
  misc_feature (3994)..(3994): n is a, c, g, or t
  misc_feature (3996)..(3996): n is a, c, g, or t
  misc_feature (4000)..(4000): n is a, c, g, or t
nnnncacccacagactccgttacaccgagttgtgctgtccatgacacgccgcccttctcgccgcaattcagcacggcgagacataggcgagacccacaggcaacgtcactcatccgttcagaaggctcataattcgagtgtgcaggcatatgggccttgggagcatatgcaacaggaaattggcacaatacgaggagagcaatagggatggaagaaggcaaatagtttcttgtgtacaaccgcggcgcgcgcgtccatcgctcgcgtctccacggtcatctggacgtccgacctcttcatcgtgcccatggagtcgctctacttggtgacgcagagtgcaatgtaaaggaaccagagcaagacaaggaaccccgcggtgagcatggccaggtggggagggccgccgatctcgaagcccaacacggcgcggcgcagcagcagcactgcgagggtcgtggtgccgcagatcagaaagacgcccaccgaatagcccagatcgcctgcgggcactgcgaacgcaacgggcatgccaggcgagtaccacggctcttcagagtagcgcgcgcgccagctggcctctttgtcggggctgaacaggactccccagtagaccgcggccattgcccagggcagcccgaggccgaggaagacgttgacgctattggagccggtgatgttgccaatcgacgcgtcggcatactcctcattcgcggcggcggtcttgctcgcaaacgtgtcgggcagagaggtncccatcgcgacgagagtgatcgcggtcgtcgaggccttgatgcccatgcagcagcccagatgcgccgcaacgtcgccgatgacggcggtcaggatgccaatgatggacaggacgacccagaagcacgtccagccaccgtgcagccgcggcggcggcgcaaaggcgcagatnaagcgccagggcatcgcgagcacgtacagcagcgcctcgattgggctctcaccgtcgtagcggatcacgtcatcgaattgagctctccacgagaagccgacaacctgcatctcatcggcgttgataccgaggcgcaccaggaggccctcgcaaccgacctcatgatcgtcgcatttgatgttgaccgtcncgagcgcgcgctcgggcccgccgttgcactcttccgagaagcgagcgccgccctgggcgcctgagaagatcagcttgaagtcctcatcgccctcaaaggagctatcgttgacgatgttcacggtgacggagcgctcggtcacaccgtcgccaaactcaagcagctggtccacgatgggctcgtagtcgttcggtgcgatcgccgtgccgtcctgcgtcgagacaaggcagctcactgtgcccctgctcccgtcgatgcgccgcaccttgatggaataactgcctttgtgctccgggacctcgattaagtccttgttgagaatgaagacaccgggcgcgttcccgtccttgatgcgcgccgcgcacatggtaacagcgcctagcatgttgcccgcggacggcgccgagagctccaccgtgaagatcacgctgctgctcggcttcgccttgtcatcctccgaaatctcgaaccgcagattggcaagcagctggcccggcccaaattcgacggttcccttggcgactgttccgcccccctccgtgcacgtgtacgagactgacgcgggcgccagcacgctgccgtggcgcaccacgtgcacgtcgacccaaggctggaatgcggtggacgcggcgttgcacatcaccttcgagtgggcaaactcgaagacgcccttgttctcgagactcttttggttcaggttctcgtggggcagagacagtccaaactccttggcaatgtcctcgcgcgtcgccgcacccgtcgcttcgcgcgtcgcgccgatgcggtacgcggcatacgtcttcttagtggcggcagtggctttcgaggaagtctccacgcgacgcatacgtttccaggaagtctccgagactttcttgcctcggcagcaacgcctggagagggcggtgaaagacaagttattgaaggcgccgatgtcggtcatataggagagctggacgaaaatgaagaagaggacgaaggtgaagacaccctcgaacatcgtgacgatgtcgggcgtggcgatgacaaggatcacgtacaaccaaatgtacgccaggatagaccacgtggcggtcatgtagaagacgtttgtgtccttgatgtaccgcccctcgccattcgggatcgccatcacgcacaccgccgagatgaccatcaggttgaacgcggccgagcccacgatcgtcgacgggccgagctcgcccgcgtaaaagcccgagctcacgatctcgatgatcgagagcaggatctcgggcgaggaggagccgagggccatcagcgtgagattggcgacggtcggattccacacgcgcgacgtcacggacttcgtacggccgtttggcagcgtcgtgcgcgtcgtagtctcctgcgaggtgatggcctcgatcgcctccatgaagaggtcggccacgattgcgactgcgaggaacatccagagcagaatcgtcaggaagagcgcggcgttcgcgggcgtctgcacgggtcccgtgatcagcaggccgtctttgcatgtctccggctcagaatcgctgccgaaccaccagggcacaaagctctcgacggcagcatagatgccgaggctcttctcgacggcggtgaactcaggagtatcctcatcgtcgcgtgttaggtaggtcgccgcgtaggcaaccgccataaaggcgaggaccgcgagggcgcagcacgcaggcgtcacgtacttcacgaagctgctgggggcgctgctgtcatcctgaatctccatgttggatccaatcggctccctcttggctgcagcggcggctggggacccggcacgtgcaagggcgtcgctcctgggcgcgttcttgcttagcagcggcgaagcgtcctgcatgaacgatttcgggggggagccgccggagttgttgtagtccttcgcgggagagcccctcttgggcggcattgttaggcctgcagcccaaacgcttggtgtgtntncgngcaanaccanaaannncananaccctncaacgantananannnnaaanagaanttgngntttnncnanattnanaatnnngnganaagnnaacntnaactngaacttgaacttgaatacaagacaagtcaagcagtctgttgtgctcgtagtgacttgatttgactatttngcaggtgctctgcacggcgctaaacctgctttataccattatacgtgnccgnngncnnancnnnncncnccanggncnnngnggaganacnngtancacggctcagggnncacacncannnncncngngncnttgccnctncccctnccgttgcgggtntgnnccantacacatnntantgntcgtccnngnncncnnnnngngnnancannagaaagnggcgngngccnggngnnncggnctcngcnncnnncgnnngcnncgccagcnngancgagnngggngcgnacncgnnnnatgnnnnnncnnnatcgangncgncgnccncntcgcggtnnggngagagcncangcncccantcncgngaganngnggcnccncngngnggnncnncaangnccgcnngcggcgcgcnnggggcgcnctngcnnccgccgcccncnnncncnnnccgnggcncgncnncnagcncangnnccngnctnncnnngcnctcgngaannacngncnnnnncntnnnnnngtcgncgcnnngnctncnnctncngcnacngcngcngnnngcggcagnngnctgcnncnnnagctgngcctnntcnttgcggngcgcgcgcnngngctcnagccnnananncccngngccgctgcncgcgngnnggnnnnngnnngtgngcncgngtncnngnanctcnaaannctcangntngaggcnggnngcgngnggngngnnnngnncgannngngngncngncagn

SEQ ID NO: 1314 - DNA, 4000 bp, Escherichia coli
  misc_feature (248)..(248): n is a, c, g, or t
  misc_feature (320)..(320): n is a, c, g, or t
  misc_feature (347)..(347): n is a, c, g, or t
  misc_feature (350)..(350): n is a, c, g, or t
  misc_feature (353)..(353): n is a, c, g, or t
  misc_feature (368)..(368): n is a, c, g, or t
  misc_feature (404)..(404): n is a, c, g, or t
  misc_feature (420)..(420): n is a, c, g, or t
  misc_feature (578)..(578): n is a, c, g, or t
  misc_feature (587)..(587): n is a, c, g, or t
  misc_feature (593)..(593): n is a, c, g, or t
  misc_feature (602)..(602): n is a, c, g, or t
  misc_feature (612)..(612): n is a, c, g, or t
  misc_feature (743)..(743): n is a, c, g, or t
  misc_feature (830)..(830): n is a, c, g, or t
  misc_feature (845)..(846): n is a, c, g, or t
  misc_feature (872)..(872): n is a, c, g, or t
  misc_feature (1757)..(1757): n is a, c, g, or t
  misc_feature (2509)..(2509): n is a, c, g, or t
  misc_feature (2533)..(2533): n is a, c, g, or t
  misc_feature (2605)..(2605): n is a, c, g, or t
  misc_feature (2614)..(2614): n is a, c, g, or t
  misc_feature (2617)..(2617): n is a, c, g, or t
  misc_feature (2621)..(2621): n is a, c, g, or t
  misc_feature (2632)..(2632): n is a, c, g, or t
  misc_feature (2638)..(2638): n is a, c, g, or t
  misc_feature (2863)..(2863): n is a, c, g, or t
  misc_feature (2872)..(2872): n is a, c, g, or t
  misc_feature (2923)..(2923): n is a, c, g, or t
  misc_feature (2956)..(2956): n is a, c, g, or t
  misc_feature (2965)..(2965): n is a, c, g, or t
  misc_feature (3082)..(3082): n is a, c, g, or t
  misc_feature (3115)..(3115): n is a, c, g, or t
  misc_feature (3160)..(3160): n is a, c, g, or t
  misc_feature (3171)..(3171): n is a, c, g, or t
cgcaagcccacctccacctcatcgatgcgatttgggaaggggccgtttcgctggacacggcccgtgcccgattcaccgagaaccagatcaacgacccgcttcgattgaccatcggtgaaggttccttcctgaagaacgtctccgttgccctcggttttgacggggaactgcccgacgaagacacgccgttcgaccccgaggcgttcttcgctgccggcaacgaagtcaacgaagcgcggatgcgcctnaccgaggggaagttgtcgaacctcaaggtgctcggcattgacatcggccgaatgttgcgccaaatcggcaancgagtcggtcaagaaatcgccttttcnctncgntctatagaaaatganatcgagtttttggacgagatgatggattggtgggancacgctggactgggcntgctccagtacgatgttgacccgcaattccacgtggtggtcggcttgaaccatcccccggtcgatgaccccgatgcgctgcccatgtggcagatggacgacggcatcatcgaaggagcgctttccacccgatttgcaaaggacgccaacgtggtcatncagcgcgtngacggnaccgggacnaaggacgatntgtggcactatctgattcaccgtcacgaattgaacaccatcgaattgagcgattgaggctgttgacccatgaaactcctcacgttcatccagtttttccgacaacttcgtggaaagaggccggttgacatngaacgcatccaatccatgggcttgcttgcggtcaaactcggacaaatcttcgcccttcgtcccgatttgattgaaccgcaaaggtgnattgaactccagcgnntgtacagccgggcagcgaccattccngaagaggattcgcaggcgcttctcgagaagttcgcccctcccggattcaacgagcatttccaacacattgagccccgtccgtttgctgctgcaagcatcggacagattcaccgggcggtgctaaaggacggcacgaaggtggttgtgaagatcatcaaagccgattttgaagcctcgttccgccgtgatgtccgccgaatgaagaggtggattcgcttgggcttgttcttcaacccgcgacttcgaaaagtcggcaaccccatcgggctgcttgcccacatcgaagactacacgttgcgggaactcaacctcacgaacgaaatcatcggacgaaacgatctcctggccaaggccgatgaagttgaagcgcacttctccatgccgaaattgaggttccccaagatgtgggaggacctctcgaaccagcgcgttctggtcatggaggaaatcacttcgcccacgcttgaagaccaccttgaaggaggaacgatggcgtgggaggacatgcttgaactgtttcgaattcacggtgcgttcatgtttggcctgggaacctttcacggagatttgcaccccggcaacgccatgatgaacgaggagggcgagttcttcttcatcgacacgggggccatttgtcacgccccggaacacgtacgaaacgccttgtttggcttcttttacttcctcgccaaaggggagctccgaaatgcgtttgacgccatgctgaccatggcggccgtccgcccaaccggcgttactctcgaaacgtattaccgctccatgggcgagttgtacgatggattcgtgggcacctcggtcagtgaggtttcgttgaccgagcagatgatgaagaccgtgaaggcggctgttcttgccggatgcgcntttggcgaagaggcctttcccatcattcgctcgttgatgtacatggacggcatggtcctgaagggtcatccgaacgttgacttgatcagttcgatgggtccgtatctggacgagttctcggtccttatcgacccgcacgccatcatcaaatcaaacgcttgaagtgttatttttgaggttttttttacgaacaaaaacccgcctttatatgtccaacccggggtcgtatgggtatgtccgccgccgctacgcccagcgtcgccatcataggagccggtcccggaggtcttgcgtccgcactgctcctcgcaaaatcaggcgtcaacgtgaccgtgttcgaacgctcgtccgccgtcggaggccgaaacaaagtcttcgaccgtgacgggttcaaattcgacctcggtccaacctttttccactatcctgaggtcattgaagacatcttcaaggccatcggaatggacgcccacgaggaactcaacctccacaagttggagttgaactaccgcctcatcttcggccaaggcggtgaacttgattgcaccagcgaccttgacgtgatgaccgaacgcatccgagaattgtccggcgaccaaaacgccaatgccttccgacgctacgtgaaggacaaccgaatgaaactcgagaaatccaaagcgtgtctgcaagaaccctggtacggaccctccgacctgctctctaagcgagcgatgcgtgtggctggggtgctccgtcctcaacgatcggtngcgaaagatttgatgaaactcttngacgacgaccggttgatgttggccatgtcgtttcaaacgaaatatctcggcatgtcaccgttcaattgcccnagcctgttnacnatgntggccttcctngagtangaatacggcatcttccacccgctcggtggattgggcagcgtcagcgagcgcatggctgccattgccaaagacctcggtgtcaccttccgaatgaacgaggccgtggaatccgtcatcatggacgggaagaccatcaccggcgttcgaaccgcaaagggtgacttcatggccgaccgagtggtcatgaacgctgactttgccaacggcatgacgcagcttttcccngacaaggtncgcaagaagtggtccaacaagaaattggacagcaagaaatactcgtgctcnaccttcatgctctaccttggcgttgaccggacntacgacganctccctcatcaccagatctacgcttccgccacctacgagaacaacctcgaagacatcgaaaagcaccaccgcctcacgtgggacgacccgtcggtgtacgttcaaaacgcatccgtnaccgacccgagcctcgctcctgaagggtgttcnaccgtttacgccctcgttccggtgtcgcacgttcacgaaaacatngactggtccanagaaaaagacgcgtaccgtgaccgcatcttggaacaaattgagtccaaactcggctttgagaacctcaaagaccacatcgtgacggagatggtcatcacccccgaggattggggcgaccactgctaccgtggagccgtgtttaacctcgctcacggcctcgatcagatgctttggcgtcgaccgaagaatcagtttgacgaaatcaacaacctctaccttgtcggcggcggcacccacccaggaagcgggctccccgtcatctacgaatccgctcgcatcagcagcaaattgttgctcgatagcctcggcatcatcccggattggaacggcgtagacacgtggttcgagagccgaaagcgatccaagcagggccgtgcggcggtcaacaaaacctcaaaagagccttcgagcggaacaccaacatctgcctgaggtgagaccgtgaaaacgctgcttctcaacaacgcctacgattattgcgaagccgtttgccgagaagcctcgaccaccttctactcgtcgttcagtgctcttcaactcgagaagcgcaaagctgtccatgccgtctatgcgttgtgccgttgggtggacgacatcgtcgacggtgacgaagaacccaacgtgacccactcgccgcaacttgaggttgcgacggacgctcgccaagccatcgttgaggagattcacgcaggaaaaacgccggtgcttccagcagacgaacaccgacaacggctgatggcgctcaccgaaattcggatgaaactcaatcaggtctacgacgagagcatcaccgccaacgaccaccccatcttcatcgcccttcaggac

SEQ ID NO: 1315 - DNA, 4000 bp, Escherichia coli
  misc_feature (497)..(497): n is a, c, g, or t
  misc_feature (629)..(629): n is a, c, g, or t
  misc_feature (800)..(800): n is a, c, g, or t
  misc_feature (1280)..(1280): n is a, c, g, or t
  misc_feature (1956)..(1956): n is a, c, g, or t
  misc_feature (2000)..(2000): n is a, c, g, or t
  misc_feature (2012)..(2012): n is a, c, g, or t
  misc_feature (2022)..(2022): n is a, c, g, or t
  misc_feature (2029)..(2029): n is a, c, g, or t
  misc_feature (2031)..(2033): n is a, c, g, or t
  misc_feature (2041)..(2041): n is a, c, g, or t
  misc_feature (2043)..(2043): n is a, c, g, or t
  misc_feature (2058)..(2070): n is a, c, g, or t
  misc_feature (3090)..(3090): n is a, c, g, or t
  misc_feature (3401)..(3401): n is a, c, g, or t
  misc_feature (3534)..(3534): n is a, c, g, or t
  misc_feature (3566)..(3566): n is a, c, g, or t
  misc_feature (3588)..(3588): n is a, c, g, or t
  misc_feature (3624)..(3624): n is a, c, g, or t
  misc_feature (3626)..(3626): n is a, c, g, or t
  misc_feature (3641)..(3641): n is a, c, g, or t
  misc_feature (3649)..(3649): n is a, c, g, or t
  misc_feature (3654)..(3654): n is a, c, g, or t
  misc_feature (3657)..(3657): n is a, c, g, or t
  misc_feature (3660)..(3660): n is a, c, g, or t
  misc_feature (3662)..(3662): n is a, c, g, or t
  misc_feature (3670)..(3672): n is a, c, g, or t
  misc_feature (3674)..(3674): n is a, c, g, or t
  misc_feature (3681)..(3681): n is a, c, g, or t
  misc_feature (3685)..(3685): n is a, c, g, or t
  misc_feature (3687)..(3687): n is a, c, g, or t
  misc_feature (3691)..(3691): n is a, c, g, or t
  misc_feature (3695)..(3695): n is a, c, g, or t
  misc_feature (3697)..(3701): n is a, c, g, or t
  misc_feature (3703)..(3704): n is a, c, g, or t
  misc_feature (3714)..(3718): n is a, c, g, or t
  misc_feature (3720)..(3722): n is a, c, g, or t
  misc_feature (3729)..(3729): n is a, c, g, or t
  misc_feature (3731)..(3735): n is a, c, g, or t
  misc_feature (3737)..(3737): n is a, c, g, or t
  misc_feature (3739)..(3739): n is a, c, g, or t
  misc_feature (3743)..(3743): n is a, c, g, or t
  misc_feature (3745)..(3746): n is a, c, g, or t
  misc_feature (3749)..(3749): n is a, c, g, or t
  misc_feature (3751)..(3751): n is a, c, g, or t
  misc_feature (3753)..(3753): n is a, c, g, or t
  misc_feature (3755)..(3761): n is a, c, g, or t
  misc_feature (3764)..(3764): n is a, c, g, or t
  misc_feature (3766)..(3768): n is a, c, g, or t
  misc_feature (3771)..(3771): n is a, c, g, or t
  misc_feature (3773)..(3773): n is a, c, g, or t
  misc_feature (3775)..(3775): n is a, c, g, or t
  misc_feature (3778)..(3778): n is a, c, g, or t
  misc_feature (3780)..(3781): n is a, c, g, or t
  misc_feature (3784)..(3784): n is a, c, g, or t
  misc_feature (3789)..(3790): n is a, c, g, or t
  misc_feature (3792)..(3793): n is a, c, g, or t
  misc_feature (3795)..(3795): n is a, c, g, or t
  misc_feature (3797)..(3797): n is a, c, g, or t
  misc_feature (3801)..(3803): n is a, c, g, or t
  misc_feature (3805)..(3808): n is a, c, g, or t
  misc_feature (3810)..(3810): n is a, c, g, or t
  misc_feature (3813)..(3813): n is a, c, g, or t
  misc_feature (3815)..(3817): n is a, c, g, or t
  misc_feature (3819)..(3819): n is a, c, g, or t
  misc_feature (3821)..(3822): n is a, c, g, or t
  misc_feature (3827)..(3828): n is a, c, g, or t
  misc_feature (3830)..(3830): n is a, c, g, or t
  misc_feature (3832)..(3834): n is a, c, g, or t
  misc_feature (3836)..(3838): n is a, c, g, or t
  misc_feature (3841)..(3842): n is a, c, g, or t
  misc_feature (3846)..(3846): n is a, c, g, or t
  misc_feature (3850)..(3850): n is a, c, g, or t
  misc_feature (3853)..(3854): n is a, c, g, or t
  misc_feature (3858)..(3862): n is a, c, g, or t
  misc_feature (3864)..(3866): n is a, c, g, or t
  misc_feature (3870)..(3872): n is a, c, g, or t
  misc_feature (3874)..(3874): n is a, c, g, or t
  misc_feature (3876)..(3877): n is a, c, g, or t
  misc_feature (3881)..(3881): n is a, c, g, or t
  misc_feature (3885)..(3885): n is a, c, g, or t
  misc_feature (3887)..(3887): n is a, c, g, or t
  misc_feature (3890)..(3891): n is a, c, g, or t
  misc_feature (3894)..(3894): n is a, c, g, or t
  misc_feature (3897)..(3900): n is a, c, g, or t
  misc_feature (3903)..(3906): n is a, c, g, or t
  misc_feature (3908)..(3911): n is a, c, g, or t
  misc_feature (3918)..(3919): n is a, c, g, or t
  misc_feature (3925)..(3925): n is a, c, g, or t
  misc_feature (3927)..(3928): n is a, c, g, or t
  misc_feature (3931)..(3931): n is a, c, g, or t
  misc_feature (3934)..(3935): n is a, c, g, or t
  misc_feature (3937)..(3939): n is a, c, g, or t
  misc_feature (3942)..(3943): n is a, c, g, or t
  misc_feature (3946)..(3947): n is a, c, g, or t
  misc_feature (3949)..(3951): n is a, c, g, or t
  misc_feature (3953)..(3953): n is a, c, g, or t
  misc_feature (3961)..(3963): n is a, c, g, or t
  misc_feature (3967)..(3967): n is a, c, g, or t
  misc_feature (3969)..(3969): n is a, c, g, or t
  misc_feature (3971)..(3972): n is a, c, g, or t
  misc_feature (3974)..(3975): n is a, c, g, or t
  misc_feature (3978)..(3979): n is a, c, g, or t
  misc_feature (3981)..(3983): n is a, c, g, or t
  misc_feature (3987)..(3987): n is a, c, g, or t
  misc_feature (3989)..(3990): n is a, c, g, or t
  misc_feature (3992)..(3994): n is a, c, g, or t
  misc_feature (3996)..(3997): n is a, c, g, or t
  misc_feature (4000)..(4000): n is a, c, g, or t
ttgcaggtttagtgcgtgttcctgctggcgaatcttatcaggaaatgatacgtttggtgtatcagcacaacgatattgttgacgtttctatccattcgctttacaaaattagtaagtatcgccgtgcagatagtggcgatgctgccccacgtctttcagttctcggctctggagcttgggatagacttaaggaaaaagcaaagaaacgcattaaggatattgcccgcgatttaataaaactatacgctaaacgtcgccatgaaaaaggctattctttctcgcccgactcgtatatgcagcatgaattggaggcttctttcctttatgaagatacacccgatcagctgaaagcaacgcaagacttgaagcaagatatggaaagttctcgtccaatggatagattagtttgtggagacgtaggttttggcaagacagaagttgcagtgcgcgcagcttttaaagctgcaaccgatggaaaacaagtggcagtgctcgtnccaactacggtactcgcattccaacattatcaaactttcaagaagagactaaaggatatgcctgttacggtagactatctttcgcgagcaagaacagctaaacaaaccaaacaagtattggcaaatttagcngaagggaagatagatattcttgtgggaacgcataagctgataagcaaaaatgtgaaatggaaagatattggcttacttattattgacgaagagcagaagtttggtgtatcaacaaaggaaaaactacgccaactgaaaagtaatatcgacacacttactatgtcggcaacncctattcctcgtactttacaattctctttaatgggagcaagagatatgagtattatgcgaactccaccgcccaaccgttatcctattcaaacagaaattgcaactttctcggcagacgtaattgcagatgcaataaactttgaaatgagtcgcaacggacaagtattttttgtgaacgaccgaatagcaaacttgcccgaattagcaagccttatcaagaaaaatgtgcccgattgtcgtgtagcaataggacatgggcagatgaaacccgaagagttggaagaaattattattggttttatgaaccacgattacgatgtgttgctttcaacaaccattgtcgaaaacggtatcgacatatcaaacgccaacaccatcataataaacgatgcacataagttcggactttcagaccttcaccaaatgagaggacgcgtgggacgttctaataaaaaagctttctgttatttgcttgcaccnccattggcagctttaaatccagatgcacgccgtcgtttggaggctttagaaacattttccgaccttggtagtggtttcagtttggcaatgcaagacctcgatattcgtggcgcaggcaatcttcttggagctgaacaaagtggatttatggaagatttaggctacgaaacatatcagaaaatattgaatcaggctgtaactgaacttaagaacgatgagtttcaagacctttatacggaggaaatggcagaaggaaaacagctctctggcgatgattttgtagacgattgtgccgtagaaagcgacctcgaaatgtatttccccgatacgtatgtacctggaagttcagaacgaatgttgctttatcgcgaactcgataacattgaaaacgatgtacaattagacgcctatcgcaaacgattggaagaccgtttcggaccaattccacgtcaaggaatagaattaatgcaagtagtttcgctccgccgattgggtaaacaccttggttgcgaaaagcttattttgaaacaaagcaccttgcaaatgcaatttgtgtccaatctaaacagtgcatactataagagtaacgccttcggaaaatgtatcgattatattgctgcaaaccctcgccgttgcaacattaaagaaaaaaacggcaaacgctcaatggtagttncaaacgtaaagacagttggcgacgccgttttcgtgctgcgtganatagacaaaggntaaatttatncaatagntnnnttctaaangnaaagccgcatatctnnnnnnnnnnnnnagatatgcggctttattctttttatttattcggctgttacactaacagttgatgcaactgtaccttgcacctcatagcctgctggcatcacagcttttgttcctggtataaaaatacaaggccaaaataaaagacctgtaacgacagctaaaggggttctattctttcctgaaatcctaacatctgtattagagaagaaaatctgttctccgtcagcaagtgttagtccactaatgttaatgcctaaacgcccttttgttcctgctaaagaacttttccttgcttcagtaaccttaccttttacgagtgttcctcgtggaattgcacaacaatcatttacataaacgtcctgtgaaacacggaagtcaactgtttgaccttcttctacttcccttgccaatactgtattaacagattgcagtgggacaatagtaccagctttaattgtaacttgttttccttgagcaaatgtgtgtccgatgctcaaaaggcagactgagattaacaaaaatacttttttcatattttaaattaatggattggcagtcccaaacaatctcatttatcatttctaatgtagaagcgtggaactgtatatccatattctttgtgataaggtggtaggaataccctgcaaacagaaatgagtataacagccccacgctatatgcgtggaggccattacgccgtttcttgtttgcttgtgattataagtttcctacgcttttatcacacaagaagaagacataacgcctcttttatttaataaaaaaatatggaaagagaatatttctcaatccatttgcaaaattaattaaaaactatttaaaaaccaaacgaatgaaataaaaatacgttcgacaccgttttactggtatattctttgtactatttttacgacaaatcaatacattatggaaataaaacgagaagacgtaccatacaattacacacattgcatagccacaaaacagcagtgtaaacgggctgaacaatgtttgcgggcactggcaatgaagntggaacgtagagaaaacgacaacgaaattatagaaattgtagacccgcgctatatgcaaactcgcacagaaacacaaccttgccagtggtttgtagaagcaaagccgaaacgttttgccaaaggaatgcgacacatttacgacgaagttccggcaaagaaattaaaactaatgcgcgaagaggtgcaatattgctttccatctcgatcgttttactttaaagccaggcgaggcgataagctgatttcggagaatcagcaagccgaaatagcagaagtattcaaagccatttgcccagatttagagccgaanttcgatgaattcattgatagtttcgagtggaacccctaatggtttcactcttttttatgcaacgtttactctcgaacacacggtacttttaacagaaaagtatatactttataaattgtctctccatagaaantcacagtttcgtaggtatgaaacttatagttnctgcgtataaactcacagtttngtaggtatgaaacttatagttcctgcgtataaactnanagtttcgtaggtatnaaacttanagttnctncgnanaaactgannntnatgtagnaaananattnccanannnnncnnagaaattgannnnnannnagcaaanannnnncnanatangnntananantnnnnnnnaangnnncanananatntnnatntatgnntnnantntctnnntnnnngnccnannnananntctanntntnnnannnatnncttntaantcnnccannnnnannntctnnnantnnaaanaatntngtnnaantcnnnnaannnnannnntaaaaannaacaancnnttngtnnannnccnntanntnnntngttaaaannngacntncnnanngtnnannnccgntnngnnnanngan

SEQ ID NO: 1316 - DNA, 4000 bp, Escherichia coli
  misc_feature (1)..(6): n is a, c, g, or t
  misc_feature (8)..(9): n is a, c, g, or t
  misc_feature (11)..(15): n is a, c, g, or t
  misc_feature (18)..(18): n is a, c, g, or t
  misc_feature (20)..(20): n is a, c, g, or t
  misc_feature (22)..(28): n is a, c, g, or t
  misc_feature (31)..(33): n is a, c, g, or t
  misc_feature (37)..(37): n is a, c, g, or t
  misc_feature (39)..(43): n is a, c, g, or t
  misc_feature (45)..(46): n is a, c, g, or t
  misc_feature (49)..(49): n is a, c, g, or t
  misc_feature (51)..(52): n is a, c, g, or t
  misc_feature (54)..(54): n is a, c, g, or t
  misc_feature (56)..(60): n is a, c, g, or t
  misc_feature (62)..(63): n is a, c, g, or t
  misc_feature (65)..(66): n is a, c, g, or t
  misc_feature (69)..(69): n is a, c, g, or t
  misc_feature (73)..(74): n is a, c, g, or t
  misc_feature (76)..(76): n is a, c, g, or t
  misc_feature (79)..(81): n is a, c, g, or t
  misc_feature (83)..(86): n is a, c, g, or t
  misc_feature (88)..(88): n is a, c, g, or t
  misc_feature (90)..(96): n is a, c, g, or t
  misc_feature (98)..(105): n is a, c, g, or t
  misc_feature (108)..(112): n is a, c, g, or t
  misc_feature (114)..(114): n is a, c, g, or t
  misc_feature (116)..(120): n is a, c, g, or t
  misc_feature (122)..(123): n is a, c, g, or t
  misc_feature (125)..(125): n is a, c, g, or t
  misc_feature (127)..(128): n is a, c, g, or t
  misc_feature (130)..(132): n is a, c, g, or t
  misc_feature (134)..(135): n is a, c, g, or t
  misc_feature (137)..(137): n is a, c, g, or t
  misc_feature (140)..(141): n is a, c, g, or t
  misc_feature (144)..(144): n is a, c, g, or t
  misc_feature (147)..(148): n is a, c, g, or t
  misc_feature (151)..(151): n is a, c, g, or t
  misc_feature (153)..(157): n is a, c, g, or t
  misc_feature (159)..(160): n is a, c, g, or t
  misc_feature (163)..(164): n is a, c, g, or t
  misc_feature (166)..(166): n is a, c, g, or t
  misc_feature (168)..(172): n is a, c, g, or t
  misc_feature (174)..(174): n is a, c, g, or t
  misc_feature (176)..(177): n is a, c, g, or t
  misc_feature (180)..(182): n is a, c, g, or t
  misc_feature (184)..(185): n is a, c, g, or t
  misc_feature (187)..(192): n is a, c, g, or t
  misc_feature (194)..(196): n is a, c, g, or t
  misc_feature (199)..(199): n is a, c, g, or t
  misc_feature (201)..(205): n is a, c, g, or t
  misc_feature (207)..(208): n is a, c, g, or t
  misc_feature (210)..(210): n is a, c, g, or t
  misc_feature (214)..(215): n is a, c, g, or t
  misc_feature (218)..(219): n is a, c, g, or t
  misc_feature (221)..(229): n is a, c, g, or t
  misc_feature (234)..(235): n is a, c, g, or t
  misc_feature (238)..(238): n is a, c, g, or t
  misc_feature (240)..(241): n is a, c, g, or t
  misc_feature (243)..(244): n is a, c, g, or t
  misc_feature (246)..(255): n is a, c, g, or t
  misc_feature (257)..(257): n is a, c, g, or t
  misc_feature (260)..(261): n is a, c, g, or t
  misc_feature (263)..(265): n is a, c, g, or t
  misc_feature (269)..(272): n is a, c, g, or t
  misc_feature (274)..(274): n is a, c, g, or t
  misc_feature (276)..(276): n is a, c, g, or t
  misc_feature (278)..(282): n is a, c, g, or t
  misc_feature (284)..(284): n is a, c, g, or t
  misc_feature (286)..(292): n is a, c, g, or t
  misc_feature (294)..(296): n is a, c, g, or t
  misc_feature (298)..(300): n is a, c, g, or t
  misc_feature (303)..(304): n is a, c, g, or t
  misc_feature (306)..(306): n is a, c, g, or t
  misc_feature (308)..(308): n is a, c, g, or t
  misc_feature (310)..(310): n is a, c, g, or t
  misc_feature (312)..(318): n is a, c, g, or t
  misc_feature (321)..(323): n is a, c, g, or t
  misc_feature (325)..(326): n is a, c, g, or t
  misc_feature (331)..(332): n is a, c, g, or t
  misc_feature (334)..(336): n is a, c, g, or t
  misc_feature (340)..(341): n is a, c, g, or t
  misc_feature (343)..(343): n is a, c, g, or t
  misc_feature (345)..(345): n is a, c, g, or t
  misc_feature (347)..(347): n is a, c, g, or t
  misc_feature (349)..(351): n is a, c, g, or t
  misc_feature (353)..(353): n is a, c, g, or t
  misc_feature (357)..(360): n is a, c, g, or t
  misc_feature (362)..(362): n is a, c, g, or t
  misc_feature (364)..(366): n is a, c, g, or t
  misc_feature (368)..(368): n is a, c, g, or t
  misc_feature (370)..(370): n is a, c, g, or t
  misc_feature (372)..(373): n is a, c, g, or t
  misc_feature (375)..(378): n is a, c, g, or t
  misc_feature (381)..(382): n is a, c, g, or t
  misc_feature (384)..(384): n is a, c, g, or t
  misc_feature (388)..(388): n is a, c, g, or t
  misc_feature (390)..(390): n is a, c, g, or t
  misc_feature (392)..(401): n is a, c, g, or t
  misc_feature (403)..(404): n is a, c, g, or t
  misc_feature (407)..(409): n is a, c, g, or t
  misc_feature (411)..(413): n is a, c, g, or t
  misc_feature (416)..(416): n is a, c, g, or t
  misc_feature (418)..(419): n is a, c, g, or t
  misc_feature (421)..(427): n is a, c, g, or t
  misc_feature (429)..(433): n is a, c, g, or t
  misc_feature (437)..(437): n is a, c, g, or t
  misc_feature (440)..(440): n is a, c, g, or t
  misc_feature (442)..(443): n is a, c, g, or t
  misc_feature (445)..(445): n is a, c, g, or t
  misc_feature (447)..(447): n is a, c, g, or t
  misc_feature (450)..(450): n is a, c, g, or t
  misc_feature (453)..(457): n is a, c, g, or t
  misc_feature (459)..(459): n is a, c, g, or t
  misc_feature (461)..(465): n is a, c, g, or t
  misc_feature (467)..(469): n is a, c, g, or t
  misc_feature (471)..(471): n is a, c, g, or t
  misc_feature (474)..(474): n is a, c, g, or t
  misc_feature (478)..(478): n is a, c, g, or t
  misc_feature (481)..(482): n is a, c, g, or t
  misc_feature (484)..(486): n is a, c, g, or t
  misc_feature (488)..(488): n is a, c, g, or t
  misc_feature (494)..(497): n is a, c, g, or t
  misc_feature (499)..(503): n is a, c, g, or t
  misc_feature (505)..(506): n is a, c, g, or t
  misc_feature (509)..(509): n is a, c, g, or t
  misc_feature (512)..(512): n is a, c, g, or t
  misc_feature (515)..(515): n is a, c, g, or t
  misc_feature (517)..(517): n is a, c, g, or t
  misc_feature (526)..(527): n is a, c, g, or t
  misc_feature (529)..(533): n is a, c, g, or t
  misc_feature (535)..(536): n is a, c, g, or t
  misc_feature (538)..(538): n is a, c, g, or t
  misc_feature (540)..(543): n is a, c, g, or t
  misc_feature (545)..(547): n is a, c, g, or t
  misc_feature (549)..(552): n is a, c, g, or t
  misc_feature (555)..(555): n is a, c, g, or t
  misc_feature (558)..(559): n is a, c, g, or t
  misc_feature (562)..(566): n is a, c, g, or t
  misc_feature (570)..(570): n is a, c, g, or t
  misc_feature (573)..(573): n is a, c, g, or t
  misc_feature (577)..(577): n is a, c, g, or t
  misc_feature (579)..(579): n is a, c, g, or t
  misc_feature (585)..(585): n is a, c, g, or t
  misc_feature (588)..(589): n is a, c, g, or t
  misc_feature (592)..(592): n is a, c, g, or t
  misc_feature (597)..(597): n is a, c, g, or t
  misc_feature (599)..(599): n is a, c, g, or t
  misc_feature (601)..(602): n is a, c, g, or t
  misc_feature (604)..(604): n is a, c, g, or t
  misc_feature (606)..(607): n is a, c, g, or t
  misc_feature (609)..(609): n is a, c, g, or t
  misc_feature (613)..(613): n is a, c, g, or t
  misc_feature (615)..(615): n is a, c, g, or t
  misc_feature (617)..(618): n is a, c, g, or t
  misc_feature (620)..(621): n is a, c, g, or t
  misc_feature (625)..(628): n is a, c, g, or t
  misc_feature (630)..(630): n is a, c, g, or t
  misc_feature (632)..(632): n is a, c, g, or t
  misc_feature (634)..(635): n is a, c, g, or t
  misc_feature (637)..(637): n is a, c, g, or t
  misc_feature (640)..(640): n is a, c, g, or t
  misc_feature (654)..(655): n is a, c, g, or t
  misc_feature (657)..(657): n is a, c, g, or t
  misc_feature (659)..(659): n is a, c, g, or t
  misc_feature (662)..(664): n is a, c, g, or t
  misc_feature (666)..(666): n is a, c, g, or t
  misc_feature (668)..(670): n is a, c, g, or t
  misc_feature (674)..(677): n is a, c, g, or t
  misc_feature (681)..(682): n is a, c, g, or t
  misc_feature (686)..(688): n is a, c, g, or t
  misc_feature (695)..(695): n is a, c, g, or t
  misc_feature (702)..(705): n is a, c, g, or t
  misc_feature (707)..(708): n is a, c, g, or t
  misc_feature (710)..(710): n is a, c, g, or t
  misc_feature (712)..(713): n is a, c, g, or t
  misc_feature (719)..(720): n is a, c, g, or t
  misc_feature (722)..(722): n is a, c, g, or t
  misc_feature (725)..(731): n is a, c, g, or t
  misc_feature (733)..(736): n is a, c, g, or t
  misc_feature (738)..(740): n is a, c, g, or t
  misc_feature (742)..(743): n is a, c, g, or t
  misc_feature (745)..(747): n is a, c, g, or t
  misc_feature (749)..(749): n is a, c, g, or t
  misc_feature (751)..(757): n is a, c, g, or t
  misc_feature (759)..(759): n is a, c, g, or t
  misc_feature (761)..(762): n is a, c, g, or t
  misc_feature (764)..(770): n is a, c, g, or t
  misc_feature (772)..(774): n is a, c, g, or t
  misc_feature (776)..(778): n is a, c, g, or t
  misc_feature (780)..(780): n is a, c, g, or t
  misc_feature (782)..(792): n is a, c, g, or t
  misc_feature (794)..(794): n is a, c, g, or t
  misc_feature (796)..(798): n is a, c, g, or t
  misc_feature (800)..(800): n is a, c, g, or t
  misc_feature (802)..(803): n is a, c, g, or t
  misc_feature (806)..(807): n is a, c, g, or t
  misc_feature (809)..(809): n is a, c, g, or t
  misc_feature (812)..(813): n is a, c, g, or t
  misc_feature (815)..(818): n is a, c, g, or t
  misc_feature (820)..(827): n is a, c, g, or t
  misc_feature (830)..(830): n is a, c, g, or t
  misc_feature (833)..(839): n is a, c, g, or t
  misc_feature (841)..(841): n is a, c, g, or t
  misc_feature (844)..(844): n is a, c, g, or t
  misc_feature (847)..(847): n is a, c, g, or t
  misc_feature (849)..(850): n is a, c, g, or t
  misc_feature (853)..(853): n is a, c, g, or t
  misc_feature (856)..(859): n is a, c, g, or t
  misc_feature (861)..(865): n is a, c, g, or t
  misc_feature (867)..(871): n is a, c, g, or t
  misc_feature (873)..(873): n is a, c, g, or t
  misc_feature (875)..(876): n is a, c, g, or t
  misc_feature (879)..(881): n is a, c, g, or t
  misc_feature (883)..(888): n is a, c, g, or t
  misc_feature (890)..(892): n is a, c, g, or t
  misc_feature (895)..(895): n is a, c, g, or t
  misc_feature (897)..(900): n is a, c, g, or t
  misc_feature (904)..(906): n is a, c, g, or t
  misc_feature (909)..(909): n is a, c, g, or t
  misc_feature (919)..(919): n is a, c, g, or t
  misc_feature (921)..(928): n is a, c, g, or t
  misc_feature (931)..(933): n is a, c, g, or t
  misc_feature (935)..(935): n is a, c, g, or t
  misc_feature (937)..(938): n is a, c, g, or t
  misc_feature (940)..(942): n is a, c, g, or t
  misc_feature (946)..(947): n is a, c, g, or t
  misc_feature (950)..(950): n is a, c, g, or t
  misc_feature (953)..(956): n is a, c, g, or t
  misc_feature (959)..(959): n is a, c, g, or t
  misc_feature (964)..(964): n is a, c, g, or t
  misc_feature (967)..(968): n is a, c, g, or t
  misc_feature (970)..(970): n is a, c, g, or t
  misc_feature (977)..(977): n is a, c, g, or t
  misc_feature (981)..(981): n is a, c, g, or t
  misc_feature (989)..(989): n is a, c, g, or t
  misc_feature (995)..(996): n is a, c, g, or t
  misc_feature (998)..(1000): n is a, c, g, or t
  misc_feature (1003)..(1003): n is a, c, g, or t
  misc_feature (1005)..(1007): n is a, c, g, or t
  misc_feature (1013)..(1013): n is a, c, g, or t
  misc_feature (1017)..(1020): n is a, c, g, or t
  misc_feature (1022)..(1022): n is a, c, g, or t
  misc_feature (1025)..(1026): n is a, c, g, or t
  misc_feature (1031)..(1032): n is a, c, g, or t
  misc_feature (1034)..(1035): n is a, c, g, or t
  misc_feature (1038)..(1039): n is a, c, g, or t
  misc_feature (1051)..(1051): n is a, c, g, or t
  misc_feature (1058)..(1058): n is a, c, g, or t
  misc_feature (1060)..(1060): n is a, c, g, or t
  misc_feature (1066)..(1066): n is a, c, g, or t
  misc_feature (1069)..(1069): n is a, c, g, or t
  misc_feature (1072)..(1073): n is a, c, g, or t
  misc_feature (1075)..(1075): n is a, c, g, or t
  misc_feature (1081)..(1081): n is a, c, g, or t
  misc_feature (1099)..(1099): n is a, c, g, or t
  misc_feature (1106)..(1106): n is a, c, g, or t
  misc_feature (1121)..(1121): n is a, c, g, or t
  misc_feature (1126)..(1126): n is a, c, g, or t
  misc_feature (1132)..(1132): n is a, c, g, or t
  misc_feature (1135)..(1135): n is a, c, g, or t
  misc_feature (1156)..(1156): n is a, c, g, or t
  misc_feature (1159)..(1159): n is a, c, g, or t
  misc_feature (1183)..(1183): n is a, c, g, or t
  misc_feature (1186)..(1186): n is a, c, g, or t
  misc_feature (1189)..(1189): n is a, c, g, or t
  misc_feature (1201)..(1201): n is a, c, g, or t
  misc_feature (1212)..(1212): n is a, c, g, or t
  misc_feature (1219)..(1219): n is a, c, g, or t
  misc_feature (1222)..(1222): n is a, c, g, or t
  misc_feature (1234)..(1234): n is a, c, g, or t
  misc_feature (1237)..(1237): n is a, c, g, or t
  misc_feature (1243)..(1243): n is a, c, g, or t
  misc_feature (1252)..(1252): n is a, c, g, or t
  misc_feature (1267)..(1267): n is a, c, g, or t
  misc_feature (1279)..(1279): n is a, c, g, or t
  misc_feature (1282)..(1282): n is a, c, g, or t
  misc_feature (1285)..(1285): n is a, c, g, or t
  misc_feature (1294)..(1294): n is a, c, g, or t
  misc_feature (1297)..(1297): n is a, c, g, or t
  misc_feature (1300)..(1300): n is a, c, g, or t
  misc_feature (1306)..(1306): n is a, c, g, or t
  misc_feature (1324)..(1324): n is a, c, g, or t
  misc_feature (1333)..(1333): n is a, c, g, or t
  misc_feature (1339)..(1341): n is a, c, g, or t
  misc_feature (1343)..(1343): n is a, c, g, or t
  misc_feature (1345)..(1345): n is a, c, g, or t
  misc_feature (1348)..(1349): n is a, c, g, or t
  misc_feature (1357)..(1357): n is a, c, g, or t
  misc_feature (1360)..(1360): n is a, c, g, or t
  misc_feature (1366)..(1366): n is a, c, g, or t
  misc_feature (1369)..(1369): n is a, c, g, or t
  misc_feature (1372)..(1372): n is a, c, g, or t
  misc_feature (1384)..(1384): n is a, c, g, or t
  misc_feature (1406)..(1406): n is a, c, g, or t
  misc_feature (1408)..(1409): n is a, c, g, or t
  misc_feature (1413)..(1413): n is a, c, g, or t
  misc_feature (1417)..(1417): n is a, c, g, or t
  misc_feature (1426)..(1426): n is a, c, g, or t
  misc_feature (1430)..(1430): n is a, c, g, or t
  misc_feature (1432)..(1432): n is a, c, g, or t
  misc_feature (1436)..(1436): n is a, c, g, or t
  misc_feature (1440)..(1441): n is a, c, g, or t
  misc_feature (1447)..(1447): n is a, c, g, or t
  misc_feature (1450)..(1450): n is a, c, g, or t
  misc_feature (1453)..(1453): n is a, c, g, or t
  misc_feature (1459)..(1459): n is a, c, g, or t
  misc_feature (1469)..(1469): n is a, c, g, or t
  misc_feature (1473)..(1474): n is a, c, g, or t
  misc_feature (1477)..(1477): n is a, c, g, or t
  misc_feature (1484)..(1484): n is a, c, g, or t
  misc_feature (1487)..(1487): n is a, c, g, or t
  misc_feature (1489)..(1489): n is a, c, g, or t
  misc_feature (1493)..(1493): n is a, c, g, or t
  misc_feature (1495)..(1495): n is a, c, g, or t
  misc_feature (1498)..(1498): n is a, c, g, or t
  misc_feature (1501)..(1501): n is a, c, g, or t
  misc_feature (1546)..(1546): n is a, c, g, or t
  misc_feature (1561)..(1561): n is a, c, g, or t
  misc_feature (1576)..(1576): n is a, c, g, or t
  misc_feature (1585)..(1585): n is a, c, g, or t
  misc_feature (1589)..(1589): n is a, c, g, or t
  misc_feature (1591)..(1591): n is a, c, g, or t
  misc_feature (1609)..(1610): n is a, c, g, or t
  misc_feature (1621)..(1621): n is a, c, g, or t
  misc_feature (1626)..(1626): n is a, c, g, or t
  misc_feature (1629)..(1629): n is a, c, g, or t
  misc_feature (1631)..(1636): n is a, c, g, or t
  misc_feature (1638)..(1638): n is a, c, g, or t
  misc_feature (1645)..(1646): n is a, c, g, or t
  misc_feature (1648)..(1649): n is a, c, g, or t
  misc_feature (1651)..(1653): n is a, c, g, or t
  misc_feature (1678)..(1678): n is a, c, g, or t
  misc_feature (1721)..(1721): n is a, c, g, or t
  misc_feature (1733)..(1733): n is a, c, g, or t
  misc_feature (1736)..(1736): n is a, c, g, or t
  misc_feature (1748)..(1748): n is a, c, g, or t
  misc_feature (1826)..(1826): n is a, c, g, or t
  misc_feature (1829)..(1829): n is a, c, g, or t
  misc_feature (1853)..(1853): n is a, c, g, or t
  misc_feature (1886)..(1886): n is a, c, g, or t
  misc_feature (1952)..(1952): n is a, c, g, or t
  misc_feature (1974)..(1974): n is a, c, g, or t
  misc_feature (1988)..(1988): n is a, c, g, or t
  misc_feature (1997)..(1997): n is a, c, g, or t
nnnnnnanncnnnnnggnancnnnnnnnccnnncagntnnnnnannagnanngnannnnncnnannaanctgnngnatnnngnnnngnannnnnnnannnnnnnngannnnnanannnnncnntngnnannntnngngannttncannatncnnnnngnngtnngncnnnnntntnnaannntnnannnnnncnnngtngnnnnnanngntccnncanncnnnnnnnnnactannagntnncnncnnnnnnnnnnanggnnannnagtnnnncncnannnnnangnnnnnnnannngnnngtnngnangncnnnnnnntgnnncnnttctnncnnngaanncngntntnnntnttcnnnntncnnntncngnntnnnnaannanaacngntnnnnnnnnnngnncannncnnncancnntnnnnnnnannnnngccngcncnntncngangcnnnnncnannnnngnnnanctngttntcnntnnngnaacgtnnnntnnnnngnnganaantcntntgggcatcnncnnnnnanncngnnnnannntnnnngcnggnnacnnnnnaaantangcananattcantcnnccnactgncngnnananntntccngntnngnncggnnnncnanannantgnaggaagaaatgagnnananacnnnanannntgcnnnnttcnntggnnnaggaaanggagcgnnnnannangnncaacanncncannnnnnncnnnnannngnngnnncngnnnnnnnangnngnnnnnnncnnngnnntngnnnnnnnnnnnangnnnangnnggnncngcnngnnnncnnnnnnnnccngtnnnnnnntnccnccncnnccncgnnnncnnnnncnnnnntngnngcnnngnnnnnnannnagnannnngatnnngangatgatgaanannnnnnnngcnnngntnntnnnggtnncantgnnnnctngcatngcnncncctgctnttgnctatggcngtgagnntnnngangnnntggaanagcnnnncntgnnttctnncnncgnngaagaagatgtngtcaccntnaccganganganncnggtgcnctgaccccggagggcaanctgacgntggtggacgattacnacacnagttantcngatggcagcgggcagcagttnatnacgctggtgtcgaagtctggcaanacnttntatctggtcatngaccgcaacgncaagggnganaacaccgttcanttnatgaancttgtggangaagccgaccttctntccctgatggangangangatgccgangcntanaccgcngaaaaagaagcggcggcncaggcagancaggannncnancannccgaggangangcgaanaangcngcggaagaagcngtggcatccggttctgaacagncnngtgncaanaaagttacnaagnangctnctannttcttnggngtnctggcnctggtcggtntggnngcnggcggtngcntntacncnttnatnaagcagaagcagaaaaagcaggcagaaaaagaagcccttgacccngatgcaaactacacngaggacaagggcgantttgaaatncctntngaggatgagccggaggannccggcgaggangatancgnannnnnntnattttanngnngnnntttgccgccttacatattgcaatcngaaacagattggagggattcttatcgcaaaattgatcgtggcngagaaaccgtcngtngccatgtcctangccaaagtcctcggtgccaccagccgtcaggacggctaccttgagggcaacggctatctggtaagctggtgcgtgggncanttggtggaactggcaccgcccaangtctacgatgccaaatacgtcaagtggagcatngcagacttgcccatcctgccgcaaaagtggcagtatctggtgtctgcgtccaccaaaaagcagttnggtatcctgcaaaagctgatgnaccgcccggacgtngacagcatngtgaacagttgcgatgcagggtagtgcggttaggtgactcaagagaaagaaaaaagagacctcatctcgtcaaaaatcaaatttcaaaatcattaaaggagctattcaaatgaaacgaaatcagaatttcgaccataatcactctcaaaaactgctttccttccgctacaacatagacaccaaccgagtggaagcccggttcacggatggctctgccgtcgccaacaggatgcccaactgcctcagaacatcctcaacccgctactttacagtggggttgacacggaggattgagtgtcatcgttttttcatggctaccgccgaaaatcattgtaacgtattttgtgttacaaattggtcaagcgaatgattatgattaaaattctcttactcgcacaataagtcatttgataaactggttaaaatgccaaataatttcaaatcatagtccaacacacaacaaatgtggtataataacaatatatttaatgctttaactgtgtttgcaaaaaggaaaagaagataagtatggagattacatggttgaaaaatgaagataatgccattcaatacgtctatgcctctgctgttccccaaaaaataccattagacatttttaaagaaattgttcagagcagtaaagaaaactgtctacctgaattttatgtgatatctgaacagggaaagtatatcggatatattttattattggccgataaaaaagaagacatccctaaaccttttacatttcttgcatgtcataatggcgatactctgccaaaagaaactcacaaaaaaatattggaatttatcggcaaacggtgtcgtgtaaacaactggaataaactcgcttggttggccgaacaagaaatccagcaattgtgatatcatcgttttttaagctatctctctataaaaactccttaaagacataaaggcaaacttgaataaataaatttatctaaaagccccacctacaatagatattccaaatcgaagaatctactgcaggtggggcttgttctatgtgataagctattttgtaaaaatcaaatacgtagattatatggcagaatcatttggtgacactgaaagctaatgttgcgccatcaacgacactatacatatcgccgttagccgcagtagcaattccagtaaactcaacctcccattttcctttagagagtccatattttacatcttccgtaccgattgtgccgtatgcagaaatggcatgatcaaaggttccaaagggtgtaccaagtttattgaaatgcaggttaccttcaaaggaaacaattactgcacccggaacggtaatcgtccattggatatacccttcagacagataatcaagtgtacatgaaccagcatcgccccagaaggtttcgcgagaaattgggacaagtttgaatgttgcagagtttacagttgttcctttatcaatttcgatactagattttttggaagaaagtgctacaacgcctggttcaactgcaacagcagcaggcatcaaaactgtgttgaaaacaaccaacgcagcactcgttccagccattttaaggaattcatttcgggtcatctttttcatgtcgatttgctccttatattttattgactgttacaagtcacccagctacaatttggattctttttcgcttaattctgcactggaatcacctcttacaaaattttagtatattggcatcatcgtgatcaaaagcaatatcactaacagccacctcatcacactataaagccgcaaattttcaactcaggtgtatgctcatcggcaaataaatgtgaaccatacgaatgccgctgttaaacaacctgccaaaaccactaaaatacaacttgccaactttggctcaatagcaactttttgattttcgcacagcgcaaatttctgaagttcctgaaatgttgtttgattgacattgccgtgtattgctttccatgcaacgaaatgatttgtaatcagaagataatctgaaacgatt

SEQ ID NO: 1317 - DNA, 4000 bp, Escherichia coli
  misc_feature (721)..(721): n is a, c, g, or t
  misc_feature (752)..(752): n is a, c, g, or t
  misc_feature (766)..(766): n is a, c, g, or t
  misc_feature (815)..(815): n is a, c, g, or t
  misc_feature (1669)..(1669): n is a, c, g, or t
  misc_feature (2418)..(2418): n is a, c, g, or t
  misc_feature (3829)..(3829): n is a, c, g, or t
  misc_feature (3983)..(3983): n is a, c, g, or t
  misc_feature (3986)..(3987): n is a, c, g, or t
  misc_feature (3989)..(3993): n is a, c, g, or t
  misc_feature (3995)..(3995): n is a, c, g, or t
  misc_feature (3998)..(3998): n is a, c, g, or t
tgaagatcgccccggacctgagcgacgaggacgtggccgcgatcgcggacctcaccctcgagctcggtctcgacggagtggtcgcggtgaacacgacgatcgcgcacgacctcgggcccggcgggctgtccgggccgccgctgctggcccgcggcctcgaggtggtcgcgcggctgcgcacgcggctcggcgacggcccggtgatcatcggtggcggcgggatcaccacggtcgaggacgcgcagcggtacctcgacgcgggcgcgaccctcgtccagggctacaccgggctgatctaccagggaccgttctggggttcgcggatcaatcgcggcctcgctcggctcgggacggcatgatgcgaccgccccagtggacctggcggttcaccgaggccgacggtgaggtgctcaaacccccgatcagcccgacgttctcgaaccggttcgacgccgaggcctggctgggcgagcactggagagccgtcgccgctgagggcgtgttcgcggcagtcgtgctgatggacgggaagcccatttcggctccgatcgagctctccgagccgcgggacctatagagcgaccggaaccgatatcagttcgtcggcaacgcccgtggcccctcaggattgcgcgggtgagccgtagcaccgggacgagcatcccgaccgcgaccttcctgccgggccgcgaagacggtgccgcccggcgccgcagcccgnttgagccgtcaggccacgcgacccttcgggntcatcgtgaccgtnagtgccgggtcgcgctcgaccgagtcacccaggatgtcgtcgatccggntcatgagctccgccgggatcatcacgccggaggccttgacgttctcggtgacctgctccgggcgcgaggcgccgatgatcgcaccggccacgttggagttctgcaagacccacgccacggcgagctgagccatcgagagaccgagctcgtccgcgaccggccgcagcagctggacgcgctcgagcagctccggctggtcgaggaagcgcttgaccatcatcgcgccgcccttctcgtccgtggcacgcgagccggcgggcggctgctgactgggcttgtacttgccggtcaggattccctgggcgaccggggaccagacgatctgggagagcccgagctcctcagaggtggggacgacctccgcctcgatcactcgccacagcatcgagtactgcggctgcgaggagatgagctggaagccgagctccttggacagcgcatggccggcccggatctgctcgacgctccactcgctcaccccgatgtacagcgacttgccggcgcggacgacgtcggcgaaggcctgcatcgtctcctcgagcggcgtctcgtagtcgaagcgatgtgcctggtagacgtcgacgtagtcggtctgcaagcgacggagcgagccgttgatggcctcgaggatgtgtttgcgcgagaggcccgtgtcatttgggccaccgggaccggtcggccagtacaccttggtgagcacctcgagcgattcgcgccgttggcccttgagcgcctcgccgaggaccgtctccgcgacggtgttggcatagacgtccgcagtgtcgaaggtggtgattccggcgtcgagtgccgcgtggacacaggcgtgcgcggcgtcgttctcgacctgtganccatgggtgagccagtttccgtacgcgatctcggagatcttgagaccgctcttgcccagatatcggtaagcaaccatgcggtcagcctaggcctggtcagcgcgggtgctgaccacgcttcaccagcgccttggggagccgcacccgacggatctgcatcgagcggagcacggcatacatgagcgagccacgttcgatcttgtccgccccgaacttcgcggccaggtggcccttgatgaccctcgtcatgacgatcgcgtcgacgatcgtcagcagcacgaggccgtagaggacgaccgtgatcatgaacgccgcggccggaatctgggcgaacaacatcgtcgcgaacacgatgccgagcgcgatcggcaagaagaactcgccgggagaccaacgcgcgtcgacgtaatcgcgaatccaccgacgctgcggccccttgtcgcgcgccgggaggtagcgttcgtcgcccgtgcgcagcgcctggtactcgcgctcgcgcgcgctccgggcctttccgcgctcggtctgcgcggcgagcttgcggtccgctgggacgagcgggcggcggttcgccgcctcggcctgcttgcgcttcggcgtcggtcgtcccttgccggccggctcggactcgatggcgtcgtgggccgtggacgccgcggcgtcgggcgctggttcctgcttgcgggtgaacacgggccaagcgtagtcgaggtgcgtactacggtggtcgggtgaccgaaacccctggnacctcgaccggggccggcgccccgttcgcccccgacacgctccgttcgcgggtcgcaaacgacttccccgcactgcggacagagctcgaggcgctggtgcgaatccccagtgtttccagcccggccttcgaccagacgcaggtgcgccggagcgccgaggcggtggctgcgctcctcggtggcgcgggcctgccggaggtgcgcatcctctccgtgacgggcgccgacggccgcgccggaacgcccgcagtggttgcgcgtcgtcccgggccggacggcgcccccagggtgctgctctacgcgcaccatgacgtccagccgccgggtgccgacgaggagtgggacacgcccgcgttcactccggtggaacgcgacggacggctctacggacgcggtgccgcggacgacaaggccggcctgatcgcgcacctcggggcgatccgcgctctcggtccggatctcccggtcgcattgacggtcttcgtcgagggtgaggaggagatcggctcgccgaccttcaaggaattcctgctcgaataccgcgagctgcttgcggcggacgtcatcgtcgtcgcggactcggtgaactggcgggtcggcgtcccggcgctgaccacgagcctgcgcgggctggccgactgcgtggtcgaggtcgccgtgctcgatcacgcgatccactcggggatgttcggcggaccggtgctcgacgctctgacggtgctcgcgagactgatcgcgaccctgcacgacgacgccggtgacgtcgcggtggccgggctcgggcgggcagcggaccccaccgtggactacaccgaggcggacctgcggtccgacgccggtctgctcgacggggtccggctcgccgggtcgggctcgatcgcggcggcgatctggaccagaccggcgatcgcggtgatcggcatcgacgggacgagtgtcgccgaggcctccaacacgctcgcaccccgcgcccgcgccaagctctcggtccgggtggcgccgggcggcgacgcggcggaggccctcgccgcgctgaccgagcacctcgagcggcacgcgccgttcggcgcacacgtcacggtgacggccggtgataccggcgaaccgttcctggcaccggccgactcgccggcgatgcgggcggcccgggcggcctttgaggcggcctggggcgtgccgccggtcgacgtcggcctcggcggctcgatcccgttcatcgcggacttgatccgcgagttcccggacgcggcgatcctggtgaccggggtcgaggaccccgattctcgcgcgcacggcgcgaacgagtcggtgcacctcggggagctgcagaaggtgatcgtcgccgaggccctgctgctacagggcttgcccggcgcgctcgctgccggggcctgagccaggcgcaccggcngcccggtcctggaccgggggagccgggtcgtactggatgccgcgccgcaccccgcgggcggcctccacgctctcgagccgatggaccaggtgcggggccatgtcgatgccggccgagacgccggcctagatgccggccgagacgccggcctagntgnngnnnnngncgncg

SEQ ID NO: 1318 - DNA, 4000 bp, Escherichia coli
  misc_feature (28)..(28): n is a, c, g, or t
  misc_feature (77)..(77): n is a, c, g, or t
  misc_feature (106)..(106): n is a, c, g, or t
  misc_feature (305)..(305): n is a, c, g, or t
  misc_feature (407)..(407): n is a, c, g, or t
  misc_feature (548)..(548): n is a, c, g, or t
  misc_feature (605)..(605): n is a, c, g, or t
  misc_feature (737)..(737): n is a, c, g, or t
  misc_feature (1193)..(1193): n is a, c, g, or t
  misc_feature (1241)..(1241): n is a, c, g, or t
  misc_feature (1318)..(1318): n is a, c, g, or t
  misc_feature (1398)..(1398): n is a, c, g, or t
  misc_feature (1400)..(1401): n is a, c, g, or t
  misc_feature (1403)..(1403): n is a, c, g, or t
  misc_feature (1410)..(1410): n is a, c, g, or t
  misc_feature (1424)..(1425): n is a, c, g, or t
  misc_feature (1431)..(1432): n is a, c, g, or t
  misc_feature (1435)..(1435): n is a, c, g, or t
  misc_feature (1464)..(1464): n is a, c, g, or t
  misc_feature (1471)..(1472): n is a, c, g, or t
  misc_feature (1474)..(1474): n is a, c, g, or t
  misc_feature (1476)..(1476): n is a, c, g, or t
  misc_feature (1480)..(1480): n is a, c, g, or t
  misc_feature (1489)..(1491): n is a, c, g, or t
  misc_feature (1494)..(1494): n is a, c, g, or t
  misc_feature (1506)..(1506): n is a, c, g, or t
  misc_feature (1522)..(1522): n is a, c, g, or t
  misc_feature (1531)..(1531): n is a, c, g, or t
  misc_feature (1547)..(1547): n is a, c, g, or t
  misc_feature (1555)..(1555): n is a, c, g, or t
  misc_feature (1592)..(1592): n is a, c, g, or t
  misc_feature (1601)..(1601): n is a, c, g, or t
  misc_feature (1634)..(1634): n is a, c, g, or t
  misc_feature (1645)..(1645): n is a, c, g, or t
  misc_feature (1651)..(1652): n is a, c, g, or t
  misc_feature (1663)..(1663): n is a, c, g, or t
  misc_feature (1990)..(1990): n is a, c, g, or t
  misc_feature (2398)..(2398): n is a, c, g, or t
  misc_feature (2599)..(2599): n is a, c, g, or t
  misc_feature (2926)..(2926): n is a, c, g, or t
  misc_feature (3346)..(3346): n is a, c, g, or t
  misc_feature (3597)..(3597): n is a, c, g, or t
  misc_feature (3786)..(3786): n is a, c, g, or t
  misc_feature (3975)..(3975): n is a, c, g, or t
cagtcgtccgataccggctgagcaggcnacactgctgctggcgtcggcggatgcagagggattcatccaggaagccnccgtctccgttattgagccagacccggangctcagctggcacagcgataaaaaaacgggcccggcagcgtgtgccgggccgcacgggcatcagaactgatagatcagacccacggccgtaatatcatccgtggccagattaagcgggttgttgtctttcaacaggttgatgcggtattcgccatagaccgacatattcttgttgaagtagtaggtcgcacccaccgcngtgtatttgacaatgtcggcgtcgccgatattctcaatctctttacctttcgatgagacgtaacccacagacggacggaaaccattcaggaactgatactgngcaacggcttcaaagttctgcgccttgtttgcgaaaccgttggtgatcggcgtggcgttcagggtttcaccatacatcgcggccagataaacctggttcgcatcatatttcactgaggtcgcccagtgctgcgctttttcnccttcaccgcgtggggcggcgttctgcgccgttgtgcgatccaggctggcaaaggcnccggcgaagctcaggccgaaatcgaagtcataagaggcagagagggcaaagccatcgccgttagaacgacgtacgccgtcggtgttagcgctgcgatcgtttttaccctgatactgcgcggcaacgtttaanccctgaaccaggccaaagaaatcgctgttacgccaggtcagcacgccggttgagcggccagagaggaaggcgtcggtgtagccggaatcgccgccaaagaagggcagcatatcggtgtaactcagcgcgtcatacaccaggccgtagttacgtccataatccagcgcaccggcttcgccaaacttcaggccagcgtaacccaggcgggtacggttgccgctctgcgcatcgctgccttctgagttgtgcaggctgtactgatactgccagaaaccgtagccggtcagctgatcggtaatctttgtttcgcctttaaaacccaggcgggaataagaggaggtatcaccgttgttcttatcgtcgtcagaaaagaggtgcgacacgttaatcttgccgaccagatccagcttatttccatccttgttataaatttctgcggcctgcactgaagagagnccgagcagtaacggcatgacagccgccagtaaagtgcgcttcatcatntattcattaccctgtattcattaattattatgccccggctgcggggtgaaaagaaaatgacacaaaaagttaaaatnacaaagcgcaataaaagtaacaaaatgtgatatgcatattcagtaaaggaaaatgcgtgtctgaaagacgattaaattcngnngnaataagnatttcttctgatgnnttttanngtntttaataaaaaagtgatgattatcagtgnttaattnntngntgtngcttttctnnnccnggcattttgtangtttttaaatcatcantcccgctgnttaaattatggataangcattaangcaaataagcgataagggttttattctaaccattagnctgcgtagnaatatctgttcatctttatttcaaaggttattncgctgccaatnatcacnncgggaataatncagaagaaatcgttttcattttatttttccgcataaaaaataatcaggccagacgtcgatctgcccgcttaaatgaaaagattctgttaaatcctggcatgtcgtcatcctctctcgctgaatattctgcgcctcatcctgcaccgtcgcgaggcaggctgcgctaaaacagggcactcttcgggccttttgcggagtgattgtttatcagcgatcacaaaagcgatatttcatcccgcgattgcataattccgctatttaaaacccggctctgccgctgcaatcagacaattattcactatatatgcaaaaaaagtgaatagcagnggcgtgtaacttattgatattgcgtcagggtgacgattttatgcagttaattctctggctggcacgttaactgcactctacagtagggctgcattacaacatcccttaacaattttaaaacaatagctttacccgaccgggaaagcaggagaatgggttatggcactgcacgtttcacgtcacgatttcgatcaatggatgatgccggtttatgcacccgcgacatttgtcccggttcgcgcggagggctcaaccgtctgggatcagaatggcaaagactacgtcgacttcgccggtggcatcgccgtgaatgcgttagggcatgcgcatccggcattacaacaggcgttgcaggagcaggccgcccgtttatggcacaccggcaatggctacaccaatgagccgatnctgcgactggcgaagcagttaattgatgccacctttgctgaccgggtctttttctgtaactccggtgcggaggccaacgaagcggcgctgaagctggcgcgcaaagtggcccacgatcgggtcggcccgcagaaaagtggcattgtggcatttaagaatgcgtttcatggccgcacgctgtttaccgttaccgccgggggncagcccgcttactctcaggattttgcgccgctgccacctgccatccagcacgccccgtttaatgacctggcggccgcggcggaactcattaatgaccagacctgcgcagtgattgtggaacccatccagggggagggcggcgtgctgcctgccgatccggcgttcctgcgcggactgcgtgaactttgcgacaggcatcaggccgtgctgatttttgatgaagtgcagagcggcgtgggccgcaccggttcgctttatgcctatatgcactacggcgtcacacccgatgtcctgaccagcgccaaagcgctcggcggtggcttcccnattggggcgatgctgacgcgcgacgatctggcgagcgtgatgggtgtcggcacacacggcaccacctatggcggtaatccgctggcgggcgcggtggccggtaaagtgatggaactggtcaatcagccggactttatgacgggagtgacagagcgtcaccagtggatcgtctcggctctggcggagatcaaccagcgtctgcagctgtttaaagaggtgcgcggcctgggcctgctgataggtgcggtgctgagcgatgcgtatgccggcaaagccaaagcgattaacctggctgccgctgagatgggcgtcatggtgctgattgcgggcgcgaacgtggtgcgttttgccccggccctgaacatcagcgagcaggaggtgaagctgggtatggcacgctttgccgaggcctgtgaaagnctggtacgagggtccgcatcatgatggtaatccgtccggttgaacgcgatgatttaagccagctgatgacgctggcaggcaaaaccggcggcgggctgacctcgctgccggtcgatagcgccacgcttcaggcgcgaatcgatcgatcgctgcaaacctggcaggatacgctgccgcgcgctgagcagggctacgtctttgtgctggccgacagtgaagataatcgcgcggtgggcatctgcgccattgangtggcggtgggcctgcaggacccctggtataacttccgcgtcggcacccaggtgcacgcgtcgaaagagctgaacgtctacgccgcgctgccgaccctgtcgctgagtaacgaccacaccggcagcagcgagctctgcaccctgtttctcgaccctgagtatcgtgacggcaaaaatggctatctgctntccaaatcacgcttcctgtttatggctaacttccgtgaccgttttatggagcgggtagtcgcggagatgcggggcgtcagcgatgagcagggccactcacccttctgggagagcgtcggcagccgcttcttctcaatggacttcagcaaagcggacttcctcagcggcaccggccagaaagcctttatngccgaactgatgccgaaacatccgc

SEQ ID NO: 1319 - DNA, 4000 bp, Escherichia coli
  misc_feature (1988)..(1988): n is a, c, g, or t
  misc_feature (1995)..(1995): n is a, c, g, or t
accaccattgaggtttctgcttcaccggagaaccacccacctctgcggcaatgaccatggcagaacgcgaaacccctcacaccagaacgtgaccaccatggcagtcacctccgtgacaaagatcgatgctacctatgttgtaaaaccaccgtgacgatcacgaagccatcgtgaggcactcccacctgcgacgccacaacctgaaatgccaaaataaaaaaaacgaaacggatttcatgaaagcaaattttttcatgaaacagattttgatattcgtttcatactctagttccggagccgtcgtcggcaacaacgtgaggcgttcaacctctcttgttcttcttcttccccataggtgcgcagtggaggttcttcaccacctccatcatatgacacactaccaccaccgtgaaccacggtgatcagaagctccgtcaccattgccaaactaccaccttatctccatgccaaacatgggagtcccacggttcggacatatgggaggattccgatttgtccctctgtttcttatttttctctttcattttgttgattgatcagtggaagtttgatagtggaggtgagataaggattggtgattttttggtatttctagaatgaggaagaaggtggtgatggtgaaggtgttgataatggttgtgattaatgtgtgggttaaggttatgtgatagaatttattaatgtgtatttgaagaatgaaaagatgatgaatgggttgaagattgaggtggaagatggatgatgtaacaacatattgacaatatttctagaatggagatgaagatggtggtctatggaggtgccgaggatggtggtttgttatttaagtggtggtttggaatggatgaaaggaggaatatctaagtgaagttggattctcttgtgatgaataacggtgtgttggtttggaggtagaagaatgggtctccatgatcccttggagatggtgcggagatcaaaaccccacctctcccctctggtttgtttttggtgttcaatatgaagatccatgagttgtcatgatcatgatgaatggataaaagaaaagtggatatgtgcctaatggaggggtatggagaaaagaatccagaggggacgtgttagggagtcttggaagaaataagatttctgatttcttataagaatgaagatagttaggttgaagcgtgagtgtgacagaagaagatagattaaagatggagatatgagttgaaggagaaaaaatattttcagtatttactgtgggtcaacttaatatttactgcaggacaacttaggaattataatatatgtttggaggtacaggagaatctattggaggtatagggagaagctcccatcaacgaattgaaggtggaaattcagttcttcgataacccaattcttaacaagcccattaaacagatccatttggagatttattttgccactgaatttagaaaaatatttcatttaacccttgaggcataacatttatgggcacaatggagttaggtctaacttgacatatttttttaagaattaggatcataataataaaatatataattttatcttaaaaattcatataaaataaataaattaataccttatttaataattcttgcaaatcttcacacatgagaggaccgaattgagtaattaataatgcatgtaaaaaaagaagaagttatattaaaaaccaaattttggtaagaacaacatagtttatcctaaaatgttgatatatctaatcattaaaaataaaaaagaaaaattgtaaattgtaaaatttgcattcattttactcttttttcattaattttgtgaaaactacataatttcttttatttacgttttcatttatttccattttatttttattaaaaacaaagaaaaaacaaaaaagaatattcaacttgtaatgcacacccttaataaaggaaaatctcttttatacacaattccatactatttttatatttttntaattanttatatatatatatatatatatatatatatatatacttttttattattgttctcttttaaattcaattaactttattttctcagttttaatgtctacaaaaaaatatttacaataaaattaattggtttatttttataacttttatatacatgttttttttttaattctagtaatatattttattttgataatgatgacaataatcgtttttttttttaattttagtagcacacgaggctggccaatcaatgcattttcggcgcaccatgaatcacacttgtacacaataaatactacatttttctcaaaatactaataaatattacctaacacaagtagaaaacgttcagatctcaaattagcaattgaaaatatatttatattttaaattattttcatgatattttgaaacaacatgtaaagtctgtgattgaaaaaacgtcaaaagtaagtggctgccgaattttatataaataaataaaatatatttaaaattaaaaaatagtttaatacaataaaaatactttttattcaaaaatgtaaagcaaaccataaactgttaactactatcttaaataataataataataatattattattattattattattattattaggttgcagtagtagtgtgtgacaaggataaggataagaactgaaatttcaggaacacagaaaataagaaataaaagctattaacagttcagacacgaggaagaagaagaagaaaagttttggaatatgaaaggaaactgtcaaagagtgtgattgctgccatatcactcttttcatttatttgactcgaattaggtaaccaaaatggttggtccacaaatgttaccaattttttgaggaggacaaaataataacgtagtatcataaattatgaagaaataaacaaatctaaaaagttaaatccgttatggaaggtgtgagacataacatcgtaatttgtttggtcaagtgtttatgtctcatcttttatggcgtgactgataacaacatttacattgaaacttggttaccgtttcacacaaacttcataatctgaaactataaatagagaagagaagagaggcaaaacaccaacgaaagttaaccatggcttcttcaaggaggatctcaaggctgctctctccttcttttctttctgctaccactaattctttgttttctagaggtactactacttctttatcatcacttccaagatcttggtctcatcttgttactttcatgtttggttcttgacagcatcaaaattaagtgatcttcaattttgtagtattttctgatccttatgaactgtagttaccaatttgttggagatggttgaattgatcaactgttatataatgtattttaaaaattgtatgatccattaccagaagtgtgtactccattctgtactcatttattggttggctttttgttcttttctagccacaacctgtttctttcaaagattcacttccattttttatgaataatccaaatgtgaaaatacttaccatattaagtaaaatcgagaaagttcaacaccatacttaaaaaagactatttcggttcatgttaatacctagaagaaggatcatgtctttcgatgagtgtttttaggccttgattttgatttggggttttcgttaatggacttgtttatttttaatcagactttttaaggccattgaccattttttctgatattcaggtggaagtggtactgttgttggaggactcagtaaattcagcactactgctgctgccactgaagaaccaattaaaccagcagttagagtagaacacactcagctcttaatcgatggaaaattcgttaattctgcttccggttagtcctctttttttcaccctttctacttttatcttcatctatttagtgtgtttgggtgagcacttgcaaactggttctgaatgaagggatgtgatttatcttaggaaatttttttatattttatcttaaagttagtaaagaatcttaataa

SEQ ID NO: 1320 - DNA, 4000 bp, Escherichia coli
  misc_feature (613)..(613): n is a, c, g, or t
  misc_feature (1674)..(1674): n is a, c, g, or t
  misc_feature (1703)..(1703): n is a, c, g, or t
  misc_feature (1878)..(1878): n is a, c, g, or t
  misc_feature (1983)..(1983): n is a, c, g, or t
  misc_feature (1985)..(1989): n is a, c, g, or t
cgagttaagaacatagcagagtagtacgtatcttttctcggtatatttattaccgatagcagcgaatagactattagggtcacaatgaaactgggagttatttcggacgttcacgggaactatgttgcactccgggcagttctggaggacatggaaggagaagtggataaactgatttgcgctggagacgttgttggatacggaccgcagcagacagaagtagttacggagatgatggagagagacgtccctacggtccaaggaaatcacgaccggagtttcgatagtccggagcgctatcaagcgaataacatggcgtatgagggcctgaaatacgctcgggcccgtatgactgatgaacagaagaactgggtctacgcgcttcctatgcgccgcagattcgcagaaggcaagattctgctcaagcatgaacacccggatgatgattacatcgggacgctaaagtcctatgtcaagcctgcgcagttcccagagatgaacccttacatgagagagctggatgttgatatgctcatcatgggacatactcacgtacagcacgtctacgagggaccagacggcaccgtgttgaatccgggcagtgtgggacaanccagagataaagacaaccgtgctgcatacgccatcgtagataccgacacgatggacgtagagcttcgcagagtagaatatgacattgaaaaagtcatccgtcttgtcaagcaagcgggtcttccagtgagaaccggaacacgtcttcgatgatgaaagataagaacagaggccagtacttctgtcacgattgcatggaggaaccggttttaacatataacaacggagacggaagggtttgtggaaagtgccagtcccataacatagtagatactgatgaagttagagatttcattaagtccagagaagtagcgaagctcggtctcgcgctttctttagtggagagcgtacgtcatgaagtattcgatgaggaaatacagcaacctattcgtagatgctttgggttgctcgattcttcttacgggcaagctactaacaaatacgaggatggtttccaggagggagaaatggacttagagtatcttcttcccgagcaatggctgtatgattcaatctgggattacaagtaaatttctaatatcccttccatcgtttcttctgctctctcgaacctcggaccttttgttattttatcgcctttcttcttgattatgttcgattcttcgagtttcggaatgtggttgtgaacaagagaaatttctaactcttcttcacttccactcaatttctcacagaggtcttctattgttatttttccctcggttgagactgcctgtagaatttctctacggcgtttagacttcaatgcgtcgagcgcgattttgattctctggtctgtttccatgctccattcgctatatgattgtgaattataataaaactacttaatgtctataaccgttgttatagttgagaatcagacggggtagtcttgatattggtcgtgtgatataccccttcgttcccgtattgatatatcttagatacttcttcctctgtgaaagcatagcctctgtagaatcggaaatcgtcaatctttccttcatacaactcagaatctccttgccccgtgttattccatgaggacccttctgtattttnccccataatcccgtatctcgtagacccgntacccagtccttcatttcttgcgtaatcatattggccttctaattctccatcgaagtatagctttgtagtatctccaacggcatatctatcatatgtaacaacgagatgatgccattttccatcatctgtgaatttcccagtgttgatttgggcattgcctccgctcgcactctnaatataaatcccgcagccatcttttccattggacccattggatgtatcatttacatacaatctcacatattcgcttgcgtcgtatgaccatatgtctgtatgggngnnnnnggcggcggggtcgccacgttgttgagtgtatacccagcaagacacagtcattgctgttatcgcaggactcgaattgaagaagtgattgattggaatgtaatttccattcccagcagatacgatttcaactgcttgccctattttcccttcggaaaatgtaacgttgggtctgcagacagacgagtggaaattatttccactataatctctcgtatctccatcaaaggggaaccagtattccagatgctgttggttataatctgcgagttctggttccgctttaagaaggtccttgaatttctgattgcggccatatccttcttcgtcctgggcagaatcccaatctacaccagagtgccatcctacaacgtttgaaggagtaggaactgctgtttcatatggagaggtcgctacggttccattactatctactcccataatcagaacgtagtactcatcccacgtggacaatccagttatcgtgtatgatgtggcgctgccggtgagtgtttgtgagagggtatagtcagataagtctctcgactgagtgtcggagtaatagatgcgggtctcgtcgtagctctggggattgctccagctaacatcgacctctgtttctctctcttcgtctattgttacgcccgtcggcggagctatcggatttagaccgatgctggatatagacgtattggattttaaaacgtgtactcctatctggaatttcttgtggctggaactccaagtgatttccttcgttgaatcttctaccacgtctataagatgaatttcttctccgggtagatttggagaaccgattactgaaatcttaaccatgtctccattagaatctatatccatatcattaaggttcggctgaatcggagacgttgaatatttgtaaccggataggtgatatgactctttcatttctatcttgctgaacccgaaaacgctatcactatcgcttctatcggacttacctccgatgcttaaccaatcataccatgtattgtgctcgtggaaatagaaaccgagtacgtctccattatctgtatttccaggcgtgaagtcgctgttattgttatagttgctcgggtaagtttctcctatgtagtattctacaccttgctctatttcaagttcttcgagtgtaagagtagattctccattctttttcacgacctctcggaggtcccatttgctcgtagaaccgctatcaatagggtggccgaattcgatggcccccgatgaattgaacgaacctccatccattggagtgactctaatatctccccagaatgtacgttgagctgtccagaagtggtggtagaagtcactgttattacttcctgcaccatctgtattaatactgtattctgtcctaaatgctggcgttgcattcaatacatctgcagcatgggacatgttgaattccttttggcctgcatcccagtctccagcagtctcccaactaacagaggttacggaagtcgcggttccaagacttagagaagtaatctccggggcatctccattatccccggcgaaggttaattctaatctgaaatccgtatgagagctggaccacgtcagttcttcggctgggttgcctacaagagtcgtcgtgacaatctcttcggacggagtctccggagaccctactacggaaatatccacctccatatctccgggggaataatccaggttgactaaatctggttgggtttgagacgggaaggacttggtctccgttttgattgtagtagaattgtcaatatctaaggttgtaactgtcccatctgtaggctcatagtagttatccgatgatggagcaacgtttgcccagtcataagtttcccatgtaaccgtccccgaagcagagtaaactctcgtatcaacttgagtagattctgttatccccgatgtgtttcctgtgaggtctgccctgataaacgcatctccaggagaatccccgtcaaccgtccatgtgagggtttcagattgcccctcg

SEQ ID NO: 1321 - DNA, 4000 bp, Escherichia coli
  misc_feature (1)..(2): n is a, c, g, or t
  misc_feature (7)..(12): n is a, c, g, or t
  misc_feature (14)..(19): n is a, c, g, or t
  misc_feature (22)..(26): n is a, c, g, or t
  misc_feature (28)..(30): n is a, c, g, or t
  misc_feature (33)..(34): n is a, c, g, or t
  misc_feature (37)..(38): n is a, c, g, or t
  misc_feature (40)..(42): n is a, c, g, or t
  misc_feature (46)..(53): n is a, c, g, or t
  misc_feature (55)..(55): n is a, c, g, or t
  misc_feature (57)..(60): n is a, c, g, or t
  misc_feature (62)..(64): n is a, c, g, or t
  misc_feature (69)..(72): n is a, c, g, or t
  misc_feature (74)..(74): n is a, c, g, or t
  misc_feature (76)..(76): n is a, c, g, or t
  misc_feature (78)..(79): n is a, c, g, or t
  misc_feature (82)..(84): n is a, c, g, or t
  misc_feature (87)..(89): n is a, c, g, or t
  misc_feature (92)..(92): n is a, c, g, or t
  misc_feature (96)..(96): n is a, c, g, or t
  misc_feature (98)..(104): n is a, c, g, or t
  misc_feature (106)..(107): n is a, c, g, or t
  misc_feature (109)..(109): n is a, c, g, or t
  misc_feature (112)..(113): n is a, c, g, or t
  misc_feature (115)..(115): n is a, c, g, or t
  misc_feature (122)..(123): n is a, c, g, or t
  misc_feature (127)..(127): n is a, c, g, or t
  misc_feature (132)..(132): n is a, c, g, or t
  misc_feature (136)..(138): n is a, c, g, or t
  misc_feature (140)..(144): n is a, c, g, or t
  misc_feature (146)..(146): n is a, c, g, or t
  misc_feature (153)..(153): n is a, c, g, or t
  misc_feature (155)..(155): n is a, c, g, or t
  misc_feature (157)..(157): n is a, c, g, or t
  misc_feature (164)..(165): n is a, c, g, or t
  misc_feature (167)..(167): n is a, c, g, or t
  misc_feature (169)..(171): n is a, c, g, or t
  misc_feature (174)..(174): n is a, c, g, or t
  misc_feature (176)..(176): n is a, c, g, or t
  misc_feature (178)..(179): n is a, c, g, or t
  misc_feature (182)..(183): n is a, c, g, or t
  misc_feature (187)..(188): n is a, c, g, or t
  misc_feature (191)..(192): n is a, c, g, or t
  misc_feature (194)..(196): n is a, c, g, or t
  misc_feature (199)..(199): n is a, c, g, or t
  misc_feature (201)..(201): n is a, c, g, or t
  misc_feature (204)..(204): n is a, c, g, or t
  misc_feature (207)..(207): n is a, c, g, or t
  misc_feature (209)..(209): n is a, c, g, or t
  misc_feature (214)..(214): n is a, c, g, or t
  misc_feature (217)..(218): n is a, c, g, or t
  misc_feature (220)..(222): n is a, c, g, or t
  misc_feature (224)..(225): n is a, c, g, or t
  misc_feature (227)..(227): n is a, c, g, or t
  misc_feature (229)..(229): n is a, c, g, or t
  misc_feature (233)..(234): n is a, c, g, or t
  misc_feature (236)..(239): n is a, c, g, or t
  misc_feature (243)..(243): n is a, c, g, or t
  misc_feature (245)..(248): n is a, c, g, or t
  misc_feature (250)..(252): n is a, c, g, or t
  misc_feature (254)..(263): n is a, c, g, or t
  misc_feature (266)..(266): n is a, c, g, or t
  misc_feature (268)..(273): n is a, c, g, or t
  misc_feature (276)..(276): n is a, c, g, or t
  misc_feature (280)..(281): n is a, c, g, or t
  misc_feature (283)..(283): n is a, c, g, or t
  misc_feature (285)..(286): n is a, c, g, or t
  misc_feature (288)..(291): n is a, c, g, or t
  misc_feature (293)..(294): n is a, c, g, or t
  misc_feature (296)..(296): n is a, c, g, or t
  misc_feature (298)..(300): n is a, c, g, or t
  misc_feature (302)..(302): n is a, c, g, or t
  misc_feature (304)..(308): n is a, c, g, or t
  misc_feature (310)..(310): n is a, c, g, or t
  misc_feature (312)..(312): n is a, c, g, or t
  misc_feature (314)..(314): n is a, c, g, or t
  misc_feature (316)..(316): n is a, c, g, or t
  misc_feature (319)..(327): n is a, c, g, or t
  misc_feature (329)..(333): n is a, c, g, or t
  misc_feature (335)..(339): n is a, c, g, or t
  misc_feature (342)..(344): n is a, c, g, or t
  misc_feature (346)..(348): n is a, c, g, or t
  misc_feature (350)..(350): n is a, c, g, or t
  misc_feature (352)..(354): n is a, c, g, or t
  misc_feature (356)..(356): n is a, c, g, or t
  misc_feature (358)..(358): n is a, c, g, or t
  misc_feature (361)..(362): n is a, c, g, or t
  misc_feature (365)..(365): n is a, c, g, or t
  misc_feature (367)..(367): n is a, c, g, or t
  misc_feature (369)..(370): n is a, c, g, or t
  misc_feature (373)..(374): n is a, c, g, or t
  misc_feature (376)..(376): n is a, c, g, or t
  misc_feature (378)..(378): n is a, c, g, or t
  misc_feature (382)..(382): n is a, c, g, or t
  misc_feature (384)..(384): n is a, c, g, or t
  misc_feature (386)..(386): n is a, c, g, or t
  misc_feature (388)..(390): n is a, c, g, or t
  misc_feature (392)..(395): n is a, c, g, or t
  misc_feature (398)..(398): n is a, c, g, or t
  misc_feature (400)..(400): n is a, c, g, or t
  misc_feature (403)..(411): n is a, c, g, or t
  misc_feature (414)..(416): n is a, c, g, or t
  misc_feature (418)..(418): n is a, c, g, or t
  misc_feature (422)..(423): n is a, c, g, or t
  misc_feature (433)..(433): n is a, c, g, or t
  misc_feature (435)..(435): n is a, c, g, or t
  misc_feature (437)..(437): n is a, c, g, or t
  misc_feature (440)..(442): n is a, c, g, or t
  misc_feature (444)..(445): n is a, c, g, or t
  misc_feature (447)..(449): n is a, c, g, or t
  misc_feature (451)..(452): n is a, c, g, or t
  misc_feature (454)..(454): n is a, c, g, or t
  misc_feature (457)..(457): n is a, c, g, or t
  misc_feature (460)..(461): n is a, c, g, or t
  misc_feature (463)..(464): n is a, c, g, or t
  misc_feature (466)..(466): n is a, c, g, or t
  misc_feature (471)..(473): n is a, c, g, or t
  misc_feature (475)..(476): n is a, c, g, or t
  misc_feature (480)..(480): n is a, c, g, or t
  misc_feature (483)..(484): n is a, c, g, or t
  misc_feature (486)..(494): n is a, c, g, or t
  misc_feature (496)..(498): n is a, c, g, or t
  misc_feature (500)..(503): n is a, c, g, or t
  misc_feature (505)..(507): n is a, c, g, or t
  misc_feature (509)..(509): n is a, c, g, or t
  misc_feature (511)..(515): n is a, c, g, or t
  misc_feature (517)..(517): n is a, c, g, or t
  misc_feature (520)..(521): n is a, c, g, or t
  misc_feature (523)..(523): n is a, c, g, or t
  misc_feature (525)..(525): n is a, c, g, or t
  misc_feature (528)..(529): n is a, c, g, or t
  misc_feature (533)..(534): n is a, c, g, or t
  misc_feature (536)..(543): n is a, c, g, or t
  misc_feature (547)..(547): n is a, c, g, or t
  misc_feature (549)..(555): n is a, c, g, or t
  misc_feature (560)..(563): n is a, c, g, or t
  misc_feature (565)..(565): n is a, c, g, or t
  misc_feature (567)..(568): n is a, c, g, or t
  misc_feature (570)..(572): n is a, c, g, or t
  misc_feature (574)..(575): n is a, c, g, or t
  misc_feature (577)..(577): n is a, c, g, or t
  misc_feature (579)..(579): n is a, c, g, or t
  misc_feature (582)..(583): n is a, c, g, or t
  misc_feature (589)..(592): n is a, c, g, or t
  misc_feature (596)..(596): n is a, c, g, or t
  misc_feature (599)..(600): n is a, c, g, or t
  misc_feature (602)..(602): n is a, c, g, or t
  misc_feature (604)..(604): n is a, c, g, or t
  misc_feature (606)..(606): n is a, c, g, or t
  misc_feature (611)..(618): n is a, c, g, or t
  misc_feature (621)..(623): n is a, c, g, or t
  misc_feature (625)..(629): n is a, c, g, or t
  misc_feature (631)..(632): n is a, c, g, or t
  misc_feature (634)..(635): n is a, c, g, or t
  misc_feature (637)..(638): n is a, c, g, or t
  misc_feature (641)..(641): n is a, c, g, or t
  misc_feature (644)..(645): n is a, c, g, or t
  misc_feature (647)..(647): n is a, c, g, or t
  misc_feature (650)..(650): n is a, c, g, or t
  misc_feature (652)..(655): n is a, c, g, or t
  misc_feature (658)..(659): n is a, c, g, or t
  misc_feature (662)..(662): n is a, c, g, or t
  misc_feature (665)..(665): n is a, c, g, or t
  misc_feature (667)..(667): n is a, c, g, or t
  misc_feature (669)..(669): n is a, c, g, or t
  misc_feature (672)..(674): n is a, c, g, or t
  misc_feature (676)..(678): n is a, c, g, or t
  misc_feature (681)..(681): n is a, c, g, or t
  misc_feature (683)..(689): n is a, c, g, or t
  misc_feature (691)..(692): n is a, c, g, or t
  misc_feature (694)..(698): n is a, c, g, or t
  misc_feature (703)..(704): n is a, c, g, or t
  misc_feature (706)..(706): n is a, c, g, or t
  misc_feature (709)..(713): n is a, c, g, or t
  misc_feature (715)..(716): n is a, c, g, or t
  misc_feature (718)..(720): n is a, c, g, or t
  misc_feature (722)..(722): n is a, c, g, or t
  misc_feature (724)..(725): n is a, c, g, or t
  misc_feature (727)..(728): n is a, c, g, or t
  misc_feature (732)..(737): n is a, c, g, or t
  misc_feature (739)..(740): n is a, c, g, or t
  misc_feature (742)..(746): n is a, c, g, or t
  misc_feature (749)..(750): n is a, c, g, or t
  misc_feature (752)..(754): n is a, c, g, or t
  misc_feature (756)..(756): n is a, c, g, or t
  misc_feature (759)..(761): n is a, c, g, or t
  misc_feature (764)..(765): n is a, c, g, or t
  misc_feature (768)..(768): n is a, c, g, or t
  misc_feature (770)..(770): n is a, c, g, or t
  misc_feature (772)..(772): n is a, c, g, or t
  misc_feature (774)..(774): n is a, c, g, or t
  misc_feature (776)..(777): n is a, c, g, or t
  misc_feature (779)..(782): n is a, c, g, or t
  misc_feature (784)..(784): n is a, c, g, or t
  misc_feature (787)..(788): n is a, c, g, or t
  misc_feature (790)..(793): n is a, c, g, or t
  misc_feature (795)..(796): n is a, c, g, or t
  misc_feature (798)..(798): n is a, c, g, or t
  misc_feature (801)..(802): n is a, c, g, or t
  misc_feature (807)..(809): n is a, c, g, or t
  misc_feature (814)..(818): n is a, c, g, or t
  misc_feature (821)..(824): n is a, c, g, or t
  misc_feature (827)..(827): n is a, c, g, or t
  misc_feature (830)..(830): n is a, c, g, or t
  misc_feature (833)..(836): n is a, c, g, or t
  misc_feature (839)..(841): n is a, c, g, or t
  misc_feature (844)..(846): n is a, c, g, or t
  misc_feature (849)..(850): n is a, c, g, or t
  misc_feature (852)..(853): n is a, c, g, or t
  misc_feature (855)..(855): n is a, c, g, or t
  misc_feature (857)..(857): n is a, c, g, or t
  misc_feature (859)..(859): n is a, c, g, or t
  misc_feature (862)..(862): n is a, c, g, or t
  misc_feature (866)..(866): n is a, c, g, or t
  misc_feature (873)..(873): n is a, c, g, or t
  misc_feature (876)..(878): n is a, c, g, or t
  misc_feature (881)..(881): n is a, c, g, or t
  misc_feature (883)..(883): n is a, c, g, or t
  misc_feature (886)..(888): n is a, c, g, or t
  misc_feature (893)..(894): n is a, c, g, or t
  misc_feature (898)..(899): n is a, c, g, or t
  misc_feature (902)..(905): n is a, c, g, or t
  misc_feature (908)..(908): n is a, c, g, or t
  misc_feature (910)..(910): n is a, c, g, or t
  misc_feature (912)..(912): n is a, c, g, or t
  misc_feature (914)..(917): n is a, c, g, or t
  misc_feature (919)..(921): n is a, c, g, or t
  misc_feature (925)..(925): n is a, c, g, or t
  misc_feature (927)..(928): n is a, c, g, or t
  misc_feature (930)..(930): n is a, c, g, or t
  misc_feature (933)..(934): n is a, c, g, or t
  misc_feature (936)..(938): n is a, c, g, or t
  misc_feature (940)..(942): n is a, c, g, or t
  misc_feature (947)..(948): n is a, c, g, or t
  misc_feature (951)..(951): n is a, c, g, or t
  misc_feature (954)..(955): n is a, c, g, or t
  misc_feature (959)..(960): n is a, c, g, or t
  misc_feature (963)..(963): n is a, c, g, or t
  misc_feature (965)..(966): n is a, c, g, or t
  misc_feature (970)..(970): n is a, c, g, or t
  misc_feature (972)..(976): n is a, c, g, or t
  misc_feature (978)..(979): n is a, c, g, or t
  misc_feature (981)..(982): n is a, c, g, or t
  misc_feature (984)..(987): n is a, c, g, or t
  misc_feature (989)..(989): n is a, c, g, or t
  misc_feature (992)..(993): n is a, c, g, or t
  misc_feature (995)..(997): n is a, c, g, or t
  misc_feature (999)..(1000): n is a, c, g, or t
  misc_feature (1003)..(1004): n is a, c, g, or t
  misc_feature (1006)..(1006): n is a, c, g, or t
  misc_feature (1010)..(1010): n is a, c, g, or t
  misc_feature (1013)..(1013): n is a, c, g, or t
  misc_feature (1015)..(1019): n is a, c, g, or t
  misc_feature (1027)..(1028): n is a, c, g, or t
  misc_feature (1032)..(1032): n is a, c, g, or t
  misc_feature (1296)..(1298): n is a, c, g, or t
  misc_feature (1977)..(1977): n is a, c, g, or t
  misc_feature (1986)..(1986): n is a, c, g, or t
  misc_feature (2204)..(2204): n is a, c, g, or t
  misc_feature (3027)..(3027): n is a, c, g, or t
  misc_feature (3071)..(3071): n is a, c, g, or t
  misc_feature (3074)..(3075): n is a, c, g, or t
  misc_feature (3079)..(3081): n is a, c, g, or t
  misc_feature (3083)..(3085): n is a, c, g, or t
  misc_feature (3087)..(3087): n is a, c, g, or t
  misc_feature (3346)..(3347): n is a, c, g, or t
  misc_feature (3349)..(3354): n is a, c, g, or t
  misc_feature (3357)..(3357): n is a, c, g, or t
  misc_feature (3359)..(3359): n is a, c, g, or t
  misc_feature (3361)..(3363): n is a, c, g, or t
  misc_feature (3365)..(3365): n is a, c, g, or t
  misc_feature (3369)..(3369): n is a, c, g, or t
  misc_feature (3371)..(3374): n is a, c, g, or t
  misc_feature (3376)..(3377): n is a, c, g, or t
  misc_feature (3379)..(3382): n is a, c, g, or t
  misc_feature (3384)..(3385): n is a, c, g, or t
  misc_feature (3387)..(3389): n is a, c, g, or t
  misc_feature (3392)..(3392): n is a, c, g, or t
  misc_feature (3395)..(3397): n is a, c, g, or t
  misc_feature (3473)..(4000): n is a, c, g, or t
nnaggannnnnngnnnnnnccnnnnnannnccnnggnntnnncgcnnnnnnnnangnnnncnnnggggnnnncntngnncannncgnnnacnccgncnnnnnnncnncnccnntnccgcggnngttnggcgngcgnnngnnnnncnacggctngntngggcccnncntnnncgncnannagnngccnnggnncnnncancnggncancnacctnccnngnnncnngnangccnngnnnnaccncnnnnannncnnnnnnnnnnccncnnnnnnccnccgnntngnngnnnncnncntnnngnannnnntntngnanggnnnnnnnnngnnnnngnnnnncgnnngnnngnannncntnggnnacnancnngcnncntncttncngnannncnnnngcnanccnnnnnnnnnccnnngngagnncggcttgggngnanctnnngnngnnnanntnccngcnnanntncggcnnncnntcgnggnncnnnnnnnnntnnngnnnncnnncngnnnnncnccnntngngcnncgcnngnnnnnnnngcgngnnnnnnncgtcnnnnangnngnnncnncngnggnngggctnnnngggngcnngntngncgccnnnnnnnngcnnncnnnnngnnanntnnttngcnncnacntnnnnccnnccnccngncnccnnncnnnggncnnnnnnngnncnnnnnccgcnnangannnnntnntnnngntnnanntgcnnnnnntnnannnnngcnngnnngnggnnnccnngcncntncncnngnnnntnganntnnnntnngncgnntcggnnncgaannnnnaannnnggnggnggnnnngcnnnggnnnggnntnngncngnggngggnggggggnggnnnggngnggnnnggganngaannggnnnnggntngntnnnngnnngagnanntnccnncnnngnnncggcnncgnggnnccgnngcngnncggnannnnnanngnntnnnngncgnntnnncnnggnngncgcncgngnnnnnggcgcttnntctncggagtcggcgccggcggcggcggttccgaggaaacggcgcgggcgcatccaggcgggggcgcggttcggcgacgaagggaggggacacgcacccaggcggtgttttcctttggctttcttgcccatctcgctcggtgaacgcgcggagaccccggcgcgacagccgcgtgcgcggacggacagtggcggcaccaaagccgccgccgcgcctgaagcggcgagcgctccagcgccgaaaaaaaatagcagactgtttgcgcgcnnngatgaaatgcctccgtcgtccgtacgagacgggaaaatcgatgcttccgagagcggcggttcgcttcgtgaagcgagtctcggacgacgcgcctcctcggcggtaccgagagagaggatagcgtcgagcgtcgagaagtcgtcgcggccacacccgaccacgcgcgaaccctcttttcgccccctccactcttcacctccgcctccgcggcgccctccacgcgcgcgtcaccatgccctgtctcccccgcgcgccccttcgcctcgcgctcctgcctctctcctgcctgctctcgctgttcctcgccaggagcgtctccgcggtcccgagcgccaccgggcacctcatcgcggatgcgctcgccgagctccccgacgggctcgggcgcgagatccaggccgtgatgacatccatgaacatgaccgagcgagacacgcacttctcccgcctcgtcgcgtacgacgtcgcggaggtgaaccagagcctggcgttggtcacgttcccgacccccgagaacgggttcgagatgagctacgtgggcatgacgcacgacttggaccccgacgggacgtacgtcgcggtcgtgtgcggccacacccggccgagcgcgtgcgcgggtgaaaacccgcacgtcgccgcgcccggcgaccacccgtgcggcgtcgacgacgccgcgaanccggccacngggccgttttgcgagccgctcgctttatcccacccgagcaccgagcacggcgagctgctcgtgcacgcgtccgaggtgctggactcggtgaaagccgcgtgggaggcggacaaacggaactacgaaaaccccacgctgcacctggagatcgtggacgcggagacgttcgcggacctcatggacgtcgacgacgccggcgacgtcgacgcgctggaganggcgctggagggagacgcgtcgtctcccgctgcctctcccgatggcacgtcacaacgttacagggacgagcccggaaaccgtaagcggctccgcgcgctgctccgcctcggcggcggcatcggcggcgtgcgcggcgcgggcatgcgcgccggcgtcggcggcgtcggccggttcggcggcgcgggcggcatcggccgcggcgccggcttcagacgcggacgcaacatggcggtgaaccaggtgatggccgccaacttctacgggaaccgggggcgcgcgatcggcgccgggcaggcggcgtacttcaacgacccggggatcccgggggggaagtaggcagaacgcgcgaagggcgccggagagaggcgcgccgccagagagacgcgtcgaacgctttatcgatacagaagagactccgacttagacttttgtgggaaaaagacccaacttctgccagtctgccagttcgtgattcgtgaaatcgcgcgcgagattttctcaggcgagctcgcgcggattcggatagcgcttcgtactccacgcggcgcggcgcggggcgcccacggcgaagcccccgcgcccgagccgagcagtcgcgaaggggtgccatgtcgagtgcggcggcgagcgcgcgcggccacgcgacgtgtccatgctgccaggtctgtctccgcgcccccccgacttcgtggtggttcaaacattttcccgggaaaaacgagacggcggacgtgtccgtttccctcgggacgctcccccggtcccccgccactggccgacgagccccgacgagcctcggagtgcctcccgtgcctccccgancgcgcacgcgtggacgcgcccggaacccccgagaccgccgtcgncgnncgcnnncnnncngcgcacccctcgatccgcgacgcgcgcttttctcggcgtaccggaaatcgctgaccaaactgacgttccaaacgcgttccaaacgcgcctcgctccccgtaccccgtgccgatacgccgatacgccgcgcagagccccgaccgcccgctggtgtgcgcgccatgcaccgcgaccgcgctccgcgcgcgccggtggacgctcgagcggctccgcggcgcgcacgagcgcgcgcgcgccgacgtggcgagcgcgctgagcnngnnnnnngangngnnnanaaanannnntnntnnnncnncnnncgncgnnncgcagtccgcagtccgcgcgacgccgtccgcagtccgcagtccgcagtccgactgcgttgacgcgcgacggtcgcnnnnnnnnnnnnnnnnnnnnnnnnnnnnnnnnnnnnnnnnnnnnnnnnnnnnnnnnnnnnnnnnnnnnnnnnnnnnnnnnnnnnnnnnnnnnnnnnnnnnnnnnnnnnnnnnnnnnnnnnnnnnnnnnnnnnnnnnnnnnnnnnnnnnnnnnnnnnnnnnnnnnnnnnnnnnnnnnnnnnnnnnnnnnnnnnnnnnnnnnnnnnnnnnnnnnnnnnnnnnnnnnnnnnnnnnnnnnnnnnnnnnnnnnnnnnnnnnnnnnnnnnnnnnnnnnnnnnnnnnnnnnnnnnnnnnnnnnnnnnnnnnnnnnnnnnnnnnnnnnnnnnnnnnnnnnnnnnnnnnnnnnnnnnnnnnnnnnnnnnnnnnnnnnnnnnnnnnnnnnnnnnnnnnnnnnnnnnnnnnnnnnnnnnnnnnnnnnnnnnnnnnnnnnnnnnnnnnnnnnnnnnnnnnnnnnnnnnnnnnnnnnnnnnnnnnnnnnnnnnnnnnnnnnnnnnnnnnnnnnnnnnnnnnnnnnnnnnnnnnnnnnnnnn

SEQ ID NO: 1322 - DNA, 4000 bp, Escherichia coli
  misc_feature (1548)..(1548): n is a, c, g, or t
  misc_feature (3093)..(3093): n is a, c, g, or t
  misc_feature (3108)..(3108): n is a, c, g, or t
  misc_feature (3134)..(3134): n is a, c, g, or t
  misc_feature (3255)..(3255): n is a, c, g, or t
  misc_feature (3274)..(3274): n is a, c, g, or t
  misc_feature (3280)..(3280): n is a, c, g, or t
  misc_feature (3285)..(3285): n is a, c, g, or t
tgcacttcagtattcatgaaaaatatgcgccatacctgaatagcgacaaagacggtaagcatggtgtcttccaagccgtattaacaagcttaggtaaatttacccagcaacaatacctgcctagatggagaagtacagatcaagaaggtttacatcaacttgctaatggcgaagtagatttcatcatcgacccacccgctatcgatgatcaagcattgaaatttggatcactctctgaggccattttttggggtcacgatgccgtgatcgccaaagccgcaaatggcactaccattgaccaggaaaaaattgcttactttgatcgagggtttgagagctcgccgagtagcgccaatcatctggcgagcatttcaagttacccagaacaactcatcttagacctactgaagaatgatattgaagccctagtgatgccgctgcgcttggcgcaacaactcatcaagcaatttggtaatgagggccttcaaatagatgggctatacgggcgagaaccctttgcatatcgctggctgatttcccatgaagacgcgcccttacattcggtcttagatcgttttatgactgggctagatccgattgagtcacgccaactctttgctttagatacaagcccggtcaccctaacttcacattactggaaaacagcactcccttggagcctgagtatggctctcttgattggcgggggattgttcatttggcagttacaaataaaacgttacaaacaagaacaagaaactgccgacctcatcagctcaaaagaagttgctgaaaaagccaatgcggccaagtctgcctttcttgccaccatgagtcatgaaattcgtacgcccatgaatgccattctgggtgtgcaagagttactgctcaatagtcataagctaccgcctagcgaaaaaccgcttctgaagagcgcccatgcatctgcagagtcactcttgggcatgctaaatcaagtcttagacctctccaagatagaggctggaaaactcacgctgaatctagagccctactgcctcaaagatttagtggatgatattcactcaaccttctctacggttgcgaccaaacaaaaattactactgcacacctcaatcgatccacgggttgctagagtactcatgattgaccctttgagactcaggcagatcctacaaaacctcttaagcaacgcgattaaattcactgatcatggtgcgatctatttttccatcaccgttctagcagatgatcatgctgggcaattgattgagtttagggtgattgatacgggcattggcatgggtaaagaagaaattactcgcgcacttgaagcctttgagcaagttcccaaacggatggatatgggtgaacagcaagccggtactgggcttggtctcaccattactaaacacctcattgactccatgaacagttacctctactttgatagcgatcctggatttggaagcaatgtgcatttttgcgttgcctttccccgtactagcatggccgcattgcgcacgaacttatctgacaacaattcanccaagaagcatcttgctaaaaaacaatccggcaataaagaaaatccaaaaggaacactaaaggctctcgtggtggaggatcaccccgcaagccgtcaaatcctttctttgcaactcgaggcactcggcatccaagtatgggtttgcgagagtgcagatgatgcattggcgttggtgcgagaacatcgttttgatctcatgctgacagaccaatcgatgccaggtatgcaaggatccgatttagcaaaagcagtgcgcgccatgggtcatcgagagctcattattattggcgtgactgcagatatttatgccctagattctcgccatcaatttttatctgccggtatgaacggggtactgataaaaccgcttagcctcagcgcccttgagaatgagctcacccgttactttgctgtggttgatgctgatgcacaaaggaccgtaagagaagattttgaatattcgttcgaggcattctccaatcttttaaaagataatcctgaacatatttcgtttatcttggatgagattcgaaaagtccatgatgacatcttgattgaacttgcagagattactgaaaacaatgggcttacagagagtcaattcagggccatggtgcataaggttaagggtggcgcccaactactcagcgccaaggctttcaccgagcaatgtcagaagctcgaactcgatgggccgctccaagaaagagcgcgcctctttactaaactactggagcaagaaaaccaagtcattaaacgctatcaaggcaaatacggtggataggaattggtagagggtttatcctttgagggtgagagcccaataccgccaccgtctattcctactattttgtgcaagcacaatattgctagtcgttggcttggctcatgccgcagatttagtctctcaagaaactgcctttcaatacatccccaaagcggttgcaagcagtctagaaaaaagccaaatcccccaagatgccattagcatctccgtcacggaaattgggcaagctcaccaaggcaaagaaatacagtatttctctaggactgctctggactggcgctccaccgaagccatgaaccctgcttcaactatgaagctagtgacaactcttgctggcttggatgttttaggtccacagtatcgctggcgcaccaagctctttactgatggggctattcgtcaaggcgttttaaaaggcaatttgtatcttcagggcagtggtgatccaaagcttatccctgaagagctcgcgcggatgatgaaagatctgcaaggtttaggaatccagaagattgatggcaacctcatcttcgatcgaagcgcctatgctcctagcgtcatggagcaaaacaccattgatggcgaagcacttcgcgcctacaacgttactccagatcccctcctctatgcctttcggaccatatcgtttcagatgggcaaatcccgtaccgctgactttatagatattaattacacccctgcgcttgctaatttcaagattaataatgagatgcagctcgttgatcgctcttgtgantcatggaagaaaganatacgctttgagatcaatcctgaaantggtagcgcatcccccaatcaaagtattagcgcttcattttctggggcatttccaaatggatgcaaaggggtcgcttataacgtcgttgccttagatgccaacacattcttaacccggggntttattgccgcctgggagntagctngtggnacttgggcgcaaactccaacaggcagcaatggcatcgtgccaatcaccgctagaccactcctgcaatttgaaggcattagcttagctgatgacgtacaagatattaataagtattcaaacaatgtcatggctaggcaattgatgctgaccttagccctggaaaaaatgggtaagcctgcgaccacagaaaatggtgaactagtgattcaggggtggctcaaaaaaatgggcttgcagtttccagaactcgtgattgagaacggctccgggctatcgcgtaatgaagctatctcggcgcagcatatgaatgagctcctggtcaccgctcgtaagctcgccgttgctgaggcgttttataacagcttacccttagcaggatcggacggaactatgcgtaatcgccttatgactcagctacgaaagtttttacaccttaagaaaaaacctgaagccagaattaaaacaggctcactctccgatgtgcgagcgatctcaggttatgtgattagcaaatctggaaaaatgtacgccgtcacttcattcatcaaccaccccaatgcctggagaggcttagaagcgcacgatcaattactagcgtggttgctggaagatggtcctgagccaaaacaggcccgctgaagtcgatctctcaccccatcccactcttcaccagcaggtggctctgggaacaaaagcaaatcccagccctgttgat

SEQ ID NO: 1323 - DNA, 4000 bp, Escherichia coli
  misc_feature (98)..(98): n is a, c, g, or t
  misc_feature (278)..(278): n is a, c, g, or t
  misc_feature (1549)..(1549): n is a, c, g, or t
  misc_feature (1555)..(1555): n is a, c, g, or t
  misc_feature (1657)..(1657): n is a, c, g, or t
  misc_feature (1985)..(1985): n is a, c, g, or t
  misc_feature (1991)..(1991): n is a, c, g, or t
  misc_feature (2631)..(2631): n is a, c, g, or t
  misc_feature (2681)..(2681): n is a, c, g, or t
  misc_feature (2981)..(2982): n is a, c, g, or t
  misc_feature (3260)..(3260): n is a, c, g, or t
  misc_feature (3326)..(3326): n is a, c, g, or t
  misc_feature (3438)..(3438): n is a, c, g, or t
  misc_feature (3545)..(3545): n is a, c, g, or t
  misc_feature (3564)..(3564): n is a, c, g, or t
  misc_feature (3683)..(3683): n is a, c, g, or t
  misc_feature (3828)..(3828): n is a, c, g, or t
  misc_feature (3832)..(3832): n is a, c, g, or t
  misc_feature (3835)..(3836): n is a, c, g, or t
  misc_feature (3838)..(3839): n is a, c, g, or t
  misc_feature (3846)..(3846): n is a, c, g, or t
  misc_feature (3860)..(3860): n is a, c, g, or t
  misc_feature (3903)..(3903): n is a, c, g, or t
  misc_feature (3917)..(3917): n is a, c, g, or t
  misc_feature (3968)..(3968): n is a, c, g, or t
aaaatgtggcagaatatgatgagtctttattagagaaattctttgaagatccagattctatcacagaagaagaaatcaatgaagctttaagaaaagcnactattgatttgtctattatcccaatgacttgtggttcttcatttaagaacaaaggagttcagtttatgttggatgctgtatgtaaataccttccatctccactagataaagatgatatcaaaggaactgaccctaaaactgatgctgaaatcacaagaaaaccagatgtaaatgagccntttgctgcattagcatttaagattgctactgacccttatgtaggtagattggcattctttagagcttattctggtaaattggatgcaggttcttatgtattgaacacaagatctgattctaaagaaagaatctcaagaatctatcagatgcacgcgaataagcaaaaccctgtagagtacattgaagcaggagatatcggtgcagctgtaggatttaaagatatcaaaactggggatacactttgtgatgaaaagaaccctatcgttcttgaatctatgattttcccagatccagtaatcggtatcgctgttgaacctaaaactaaagctgaccaagataaaatgggtaacgctttagcgaagttagcagaagaggatcctactttccaagtgaaaacagatgaagcatctggacaaactatcatctcaggaatgggagagcttcacttggatatcatcgtagaccgtctaagaagagagttcaaggtagaagtaaaccaaggacagccgcaagtagagtacaaagaatctcttacagctacagctaaccacagagaagtttacaaaaaacaaactgggggtagaggtaaattcgcggatatcatcttcgaaattggtcctgctgatgaaggaaaaacaggtcttgaattcatcaacgaaattaaaggtggtaacattccaaaagaatttatcccttctgttgaaaaaggattcaaagaagctatgaaaaatggtcctttggctggattcgagattgaaggaattaaagttacactaaaagatggttctttccacccagtggactctgaccaactttcattcgaattggctgctaaacttggatttagagaagctggtaaagctgctaaaccagtaatcatggagcctatcatgaaattggaagttgttactccagaagaatacatgggggatatcgtaggtgaccttaacagaagaagaggtactgtaaacggtatggatgatagaaataatgctaaagttatcaaagcatttgttccattagcagaaatgtttggatatgtaacagctcttagaacattatcttctggtagagcaacatcttctatggagtttgaaaaatatgaaccagctccacagaatgtggctgaagaagtaatagctaaagcaagaggttaattaaaatttagattaaaatgtcacaaagaatcagaataaaattaaaatcttacgattacaatttagtagataaatctgctgagaaaatcgtaaaaacagtaaaatctacaggngctgtngtaaatggaccaatcccattacctactcacaagagaatctttactgtgcttagatctccgcatgttaataaaaaagcaagagaacagttccagctttctgcncacaagagattgatggatatctactcttcttcttctaagactgtagatgctcttatgaagttagaattaccaagcggtgtagatgtagaaatcaaagtttgataaaacaatgtatttatacattttgctatgataaaaatcctttcctaagaaattgggaaaggattttcgttatttgaaatacttttgatattattgcagaataaattttagtatgggaaatcaaattagtaacaacaaaatcagacagataatcctgctggggatgattttcggatttttgtttttgataggatttaatttaagtaattttttgccatcatttctnggtgcngttacactttatgttattttccgcgattattattttaagcttacggaggagagaaaatggaaaccttggctggcgattggtttcttgatgttgctttctctattggtcattattgttccgttttattacatcgcagaaacattggtggtaaagctggcaaattcccgagaatatatagagatagccatagagaatgccaatcaaatccatcaatatataaaggataagacaggctatgacatcataaattccattgatataaaaaaagtaggtgagtgggcgacggtttacacctcatctttgctgaatactacggtggaggtggttactacgattgtgacggcttttttcattttgtattttatgctgatcaattcgcgagcgatggaaagagctttggagaaggctgttccgctgaaaaaatctaatatcaataagataggcgagcgtttccgaaaacttatcattgccaatgtggtgggaattcctgtggtagccattgggcaggggcttacggttttgataggctatcttatttttggggtttctagtccgtttttcttatttattttgacggctatggcatcgcttatccctattgtaggaggggcgattgtctatgttccagtgtcacttgtgntgctggtgaaccaagacccagtgggagcggcgggcgttctgttctttggnttcctttctgcgggagtggataatatcctgagattcacatttttaaagagaatagaaaacatccatccgctgaactctgtatttgggattattttaggattgaaggtttttggctttattgggctgatttttgggccgatattgatttccattacagtgctgctgattcaggtttatcatgatgaattttctgaaaatgacaaaaaagaggaaaatgacacggatgagaccgaagaaatttctgaaaatatacccttgtaaaggggctaaaataggcgtgtttagaaaattaacattttnngaagtaaaattttaatgaattgttaattttagttaaaaaaataaccgtaaatttgcgatatttaaaatttagaaaaccaaaaaatttttatgaagacaaactttttaaggagatctgcgatagcagcattgactttaacaacagcaagtttttattttgcacaagaggaaaaacaagactcagaaaagagcattgatgaagtagttcttgtgggggtagcggacatcgctaaagacagaaaaactccagtagcggtttctactgtaaaatctgctcanatcatcgagagattaggaaaccaagaaatgacggaagttcttaacactacaccatctgtgtacgcnactaagtctggtggtggtttcggagatggaggtatcacaatgcgtggtttcgaatctagaaacatcgctgtgatggtaaatggtatgccagtgaacgatatggaaggagggnctgtgtacttttctaactggacaggtctttctgatgttacaagtactatccaagttcagagaggtttaggttcttctaaattagcaattgcgtctgtagggggaacnatgaacttcattactcgtncagcagacatgaaaaaaggaggtgttgtaagaataggagtagcgaataacgactatcacaaagcatctttctcatacaatacaggtaaatctaaaagcggttggtctacatctatcttnatgagtagaacagctggttcttattatgtacaaaatactgatttcgaagcttatgcatactatttcgctttaggatttgagccaaataaaaaacataacttccagtttactataacaacttctcctcagtggcacgaccaaagangttntannannaaaatanaagattatataaantataatccagatcatgatggaaatccatacagacagtataacncagattatggatantatacagatgcagcaggaagaagaatagcattgtctaacaaatctaacttntactcaaaaccagtaatgatgttcaactggga

SEQ ID NO: 1324 - DNA, 4000 bp, Escherichia coli
  misc_feature (1)..(7): n is a, c, g, or t
  misc_feature (10)..(12): n is a, c, g, or t
  misc_feature (14)..(14): n is a, c, g, or t
  misc_feature (19)..(22): n is a, c, g, or t
  misc_feature (26)..(27): n is a, c, g, or t
  misc_feature (31)..(37): n is a, c, g, or t
  misc_feature (41)..(42): n is a, c, g, or t
  misc_feature (44)..(45): n is a, c, g, or t
  misc_feature (52)..(54): n is a, c, g, or t
  misc_feature (56)..(57): n is a, c, g, or t
  misc_feature (59)..(64): n is a, c, g, or t
  misc_feature (66)..(75): n is a, c, g, or t
  misc_feature (77)..(79): n is a, c, g, or t
  misc_feature (84)..(85): n is a, c, g, or t
  misc_feature (89)..(93): n is a, c, g, or t
  misc_feature (97)..(102): n is a, c, g, or t
  misc_feature (104)..(105): n is a, c, g, or t
  misc_feature (108)..(112): n is a, c, g, or t
  misc_feature (114)..(116): n is a, c, g, or t
  misc_feature (118)..(120): n is a, c, g, or t
  misc_feature (123)..(124): n is a, c, g, or t
  misc_feature (126)..(126): n is a, c, g, or t
  misc_feature (131)..(131): n is a, c, g, or t
  misc_feature (134)..(135): n is a, c, g, or t
  misc_feature (138)..(138): n is a, c, g, or t
  misc_feature (140)..(142): n is a, c, g, or t
  misc_feature (144)..(144): n is a, c, g, or t
  misc_feature (146)..(147): n is a, c, g, or t
  misc_feature (149)..(151): n is a, c, g, or t
  misc_feature (153)..(153): n is a, c, g, or t
  misc_feature (155)..(155): n is a, c, g, or t
  misc_feature (157)..(157): n is a, c, g, or t
  misc_feature (159)..(159): n is a, c, g, or t
  misc_feature (161)..(161): n is a, c, g, or t
  misc_feature (163)..(163): n is a, c, g, or t
  misc_feature (165)..(168): n is a, c, g, or t
  misc_feature (170)..(171): n is a, c, g, or t
  misc_feature (173)..(173): n is a, c, g, or t
  misc_feature (177)..(178): n is a, c, g, or t
  misc_feature (181)..(184): n is a, c, g, or t
  misc_feature (186)..(186): n is a, c, g, or t
  misc_feature (188)..(188): n is a, c, g, or t
  misc_feature (190)..(193): n is a, c, g, or t
  misc_feature (195)..(196): n is a, c, g, or t
  misc_feature (198)..(198): n is a, c, g, or t
  misc_feature (200)..(201): n is a, c, g, or t
  misc_feature (203)..(206): n is a, c, g, or t
  misc_feature (208)..(208): n is a, c, g, or t
  misc_feature (212)..(215): n is a, c, g, or t
  misc_feature (218)..(221): n is a, c, g, or t
  misc_feature (223)..(223): n is a, c, g, or t
  misc_feature (227)..(229): n is a, c, g, or t
  misc_feature (231)..(231): n is a, c, g, or t
  misc_feature (233)..(233): n is a, c, g, or t
  misc_feature (235)..(236): n is a, c, g, or t
  misc_feature (239)..(242): n is a, c, g, or t
  misc_feature (248)..(250): n is a, c, g, or t
  misc_feature (253)..(255): n is a, c, g, or t
  misc_feature (257)..(266): n is a, c, g, or t
  misc_feature (269)..(270): n is a, c, g, or t
  misc_feature (273)..(273): n is a, c, g, or t
  misc_feature (275)..(277): n is a, c, g, or t
  misc_feature (280)..(280): n is a, c, g, or t
  misc_feature (282)..(290): n is a, c, g, or t
  misc_feature (294)..(297): n is a, c, g, or t
  misc_feature (299)..(303): n is a, c, g, or t
  misc_feature (305)..(308): n is a, c, g, or t
  misc_feature (311)..(312): n is a, c, g, or t
  misc_feature (314)..(318): n is a, c, g, or t
  misc_feature (320)..(321): n is a, c, g, or t
  misc_feature (323)..(334): n is a, c, g, or t
  misc_feature (336)..(338): n is a, c, g, or t
  misc_feature (340)..(343): n is a, c, g, or t
  misc_feature (348)..(351): n is a, c, g, or t
  misc_feature (353)..(355): n is a, c, g, or t
  misc_feature (361)..(361): n is a, c, g, or t
  misc_feature (364)..(365): n is a, c, g, or t
  misc_feature (367)..(368): n is a, c, g, or t
  misc_feature (370)..(384): n is a, c, g, or t
  misc_feature (387)..(388): n is a, c, g, or t
  misc_feature (392)..(398): n is a, c, g, or t
  misc_feature (402)..(406): n is a, c, g, or t
  misc_feature (408)..(408): n is a, c, g, or t
  misc_feature (410)..(414): n is a, c, g, or t
  misc_feature (416)..(417): n is a, c, g, or t
  misc_feature (419)..(420): n is a, c, g, or t
  misc_feature (425)..(428): n is a, c, g, or t
  misc_feature (431)..(433): n is a, c, g, or t
  misc_feature (436)..(437): n is a, c, g, or t
  misc_feature (440)..(445): n is a, c, g, or t
  misc_feature (447)..(448): n is a, c, g, or t
  misc_feature (450)..(453): n is a, c, g, or t
  misc_feature (456)..(460): n is a, c, g, or t
  misc_feature (466)..(473): n is a, c, g, or t
  misc_feature (475)..(477): n is a, c, g, or t
  misc_feature (479)..(479): n is a, c, g, or t
  misc_feature (481)..(486): n is a, c, g, or t
  misc_feature (488)..(489): n is a, c, g, or t
  misc_feature (491)..(491): n is a, c, g, or t
  misc_feature (494)..(494): n is a, c, g, or t
  misc_feature (496)..(498): n is a, c, g, or t
  misc_feature (500)..(501): n is a, c, g, or t
  misc_feature (504)..(504): n is a, c, g, or t
  misc_feature (506)..(514): n is a, c, g, or t
  misc_feature (516)..(519): n is a, c, g, or t
  misc_feature (522)..(523): n is a, c, g, or t
  misc_feature (527)..(532): n is a, c, g, or t
  misc_feature (536)..(539): n is a, c, g, or t
  misc_feature (541)..(541): n is a, c, g, or t
  misc_feature (544)..(550): n is a, c, g, or t
  misc_feature (552)..(553): n is a, c, g, or t
  misc_feature (555)..(560): n is a, c, g, or t
  misc_feature (562)..(563): n is a, c, g, or t
  misc_feature (565)..(571): n is a, c, g, or t
  misc_feature (573)..(574): n is a, c, g, or t
  misc_feature (576)..(576): n is a, c, g, or t
  misc_feature (581)..(583): n is a, c, g, or t
  misc_feature (585)..(585): n is a, c, g, or t
  misc_feature (591)..(595): n is a, c, g, or t
  misc_feature (600)..(605): n is a, c, g, or t
  misc_feature (614)..(619): n is a, c, g, or t
  misc_feature (621)..(623): n is a, c, g, or t
  misc_feature (628)..(634): n is a, c, g, or t
  misc_feature (640)..(640): n is a, c, g, or t
  misc_feature (647)..(647): n is a, c, g, or t
  misc_feature (650)..(651): n is a, c, g, or t
  misc_feature (660)..(663): n is a, c, g, or t
  misc_feature (681)..(681): n is a, c, g, or t
  misc_feature (707)..(707): n is a, c, g, or t
  misc_feature (724)..(724): n is a, c, g, or t
  misc_feature (766)..(766): n is a, c, g, or t
  misc_feature (797)..(797): n is a, c, g, or t
  misc_feature (1084)..(1084): n is a, c, g, or t
  misc_feature (1108)..(1108): n is a, c, g, or t
  misc_feature (1114)..(1114): n is a, c, g, or t
  misc_feature (1140)..(1140): n is a, c, g, or t
  misc_feature (1147)..(1147): n is a, c, g, or t
  misc_feature (1150)..(1150): n is a, c, g, or t
  misc_feature (1231)..(1231): n is a, c, g, or t
  misc_feature (3723)..(3723): n is a, c, g, or t
  misc_feature (3779)..(3779): n is a, c, g, or t
  misc_feature (3846)..(3846): n is a, c, g, or t
  misc_feature (3869)..(3869): n is a, c, g, or t
  misc_feature (3877)..(3877): n is a, c, g, or t
  misc_feature (3881)..(3881): n is a, c, g, or t
  misc_feature (3896)..(3896): n is a, c, g, or t
  misc_feature (3899)..(3899): n is a, c, g, or t
  misc_feature (3902)..(3902): n is a, c, g, or t
  misc_feature (3905)..(3905): n is a, c, g, or t
  misc_feature (3910)..(3911): n is a, c, g, or t
  misc_feature (3914)..(3914): n is a, c, g, or t
  misc_feature (3920)..(3920): n is a, c, g, or t
  misc_feature (3937)..(3937): n is a, c, g, or t
  misc_feature (3941)..(3941): n is a, c, g, or t
  misc_feature (3962)..(3962): n is a, c, g, or t
nnnnnnnaannnanttttnnnngggnntttnnnnnnngggnntnnttttttnnngnngnnnnnntnnnnnnnnnngnnnccccnnaaannnnntttnnnnnncnnaannnnngnnnannnaannanttttnaannaantnnntnannannntnantnantngnannnntnnantttnnttnnnntngntnnnnannancnntnnnntnaaannnnttnnnntngggnnntncnannaannnntttttnnnaannncnnnnnnnnnnccnnttncnnnaangnnnnnnnnnaaannnnannnnnannnnccnntnnnnnannannnnnnnnnnnntnnngnnnnttttnnnntnnntttttnaanntnntnnnnnnnnnnnnnnnttnnaaannnnnnnaaannnnnancnnnnntnntnnttttnnnnttnnnttnnttnnnnnnannannnnaannnnntttttnnnnnnnncnnncntnnnnnntnnanttnannntnnttngnnnnnnnnngnnnnaanncccnnnnnntttnnnnanttnnnnnnngnnannnnnntnntnnnnnnnannanttttnnnantttttnnnnnaaaannnnnnaaatttttnnnnnncnnnaattnnnnnnnaatttntttaaanaannttaaatttnnnntaaattatgcaaaaaatntcttattaaaataattctaatctttntgttaatgttaaacttnatttcccaattaataaaaaaggagaaagtagtgaaaaaaatnattacgttatttacctgtttttttcttgtantaggtttcacgcagacttcatctgcagaatctgatacattaaaaaaacttaagaaacaaggttacgcaacagttgctgttgccaatgaacctccctatagtgatatcaaatctgatggatatgttactggagcggcgccagatgttgcacgcgctgtgcttgcagtcctgggtgttccagaacttaaagctgaagttattatgtacggtgctatgattccagcgcttcaagcaagaagagttgatatggcaacttctggtctttatattaagcctggtagatgtgantctattatttattctgagcctganctttgnggtgcagaggcgtttgcggttccagntggcaanccnaacaacctactaacttatgaagacattgcagctaatcctgcattaaaaatgactacttgtgctggttgtgctgaagagaantatgctttagagcgcggtgtaagtgctgatcaaattatttattttgatgcacctccaagtggtataaaaatgcttcaacaaggtagagttgatgtatttgctctatctggtttaggtacagcagatcttcttaacaagactaatgatccaaaccttgaattaatcatgccagttactggtgttccaatgggttgtgctggtgcagcatttaacaaggatgatttagagtttagatctgaatacaatatggctttggctatgttgaaagctactggtgaatttgcagctataattgagccttatggtttctctgcagaagcaactgctagtaaatcctacttgacacaatgtcctgatggaatgtaaattgtttttataatttaatcttccctgtaagatactcggggtaggtctaattagaatttactttacaacctaatctgccctgtaatatttacagggcaggttttttttaaaatttttttatgaatgaagtcttagagttctacccaattcttattaaaggaacgattacaacagtccagttaactgtattaggagctatattagctctaattgtttcttttattgttggacttgcaaggatttcttcatttgctgcagttagagtaattgcaatcatttatttagaatttttccgaggcagttctgctctcgttcaaatgttttttatatatttcgtattaccaatgtggggcatatattttgatgccttgactgctggtgtagtagcctgcggccttaacgtcggcgcatatggttcagaggttgttcgaggagcaatacttgcagttagtaaggagcaacatgaagcatgcaaagccttaaactattcaagcttaaaaaaatatagatacgttattattcctcaagcaatcccaatcatgattcctacatttggaaatttacttattgagcttttaaaattaacagcggttgcctcactgattactatttcagatcttacatttatggctcaaataatcagggttcagactgcattaacattagagccatttttactcatacttgttatttattttattattgctacggttttggttcagatagtagatctgattgctaaaaagttttctaaaggtagaaatattatgaccgcaggagacaaataattatggagtggaattgggatcatgcattcgctgttctgccgcaactagcagatggtttattagtaactattcaagctactattgttgcttcacttcttgcttatgtattgggactagggatagctattgtcaaaatgtcaaaaagtaagcttacacgtatttcaatctactggattactgagtttgttagaagaacgccaatcttagttcagctttatgtagtattttatgttctaccagactttggaatattcttagaagccttcacatgtggtgtcattgtattaggcattcattttagtacatatacttcagaagtctttagagctggtattgacaatgttcctaaaggccagtgggaggcagcaaagtcacttaactataacccacttcaaacctggaaaaatgttatcctgcctcaggccataccaccaatgattccacctcttgcaaactatctcattaccatgtttaaggaaacaccattattagcagcaattacagtagttgaattatttagagctgccgatcagtatagtaatagtcattacacctatctagaaccaatgaccttagttggagtgttctttttgattgtttcaataccatcagcaatgttagcaatgaaactagaaaagaagtttaagcaagcaaagacggcgtaagtcaatttttgaccaaacaagtctgatctcaacccctctagagaactctaaacattttgatatggtcaatacctgcttcttcgtatatctctccctcacatacaaagccaagatctagataaaaactatgcgcatgccattgagatgataaccaaagcttttcaagattgtttttttgagcccatttaataagctcttgcatgacggacttaccaattccaagtccgcgatacttttttagaacagcaacccttccaatgtgtccatcaattaatatccttccagttccaattggctcatcatcagaataagccagtacatgctttgcttcatcatctaatccatcaatttcaagctcttctggcacattctgctcatcaacaaagacctcaaaccttattttgcagatatctttttcattgcccttatagtcacaaattttggattcaatattcatattaatttcataattattaagatacaaaaaataagttaattgctaaagcaaaataaacgaatgcggctagcttatttatgttgtttccaactgattttgattttttaagaaatctctcaagaaaacttccaagaaatgcaatcgatgagaaaacacatagcgcactcaaaataaataaaagaccaagtgttaggatttgaatagtaacactgcccncactaacattaacaaattgcggcaaaaaaaccagaaagaaaagagcaacctttggnttggtcagattcatgattatgcctgtaatataataggattgattggtacttttttctttgctttcancaaggactagctcctcatttttnagagacanccancctaaataaacaagntancangcncccannatntttaanccattaaacgcaatagnactngtttggaaaataacgcttacnccaacagctaccaagagagtatgccccactagcccagt

SEQ ID NO: 1325 - DNA, 4000 bp, Escherichia coli
  misc_feature (1)..(8): n is a, c, g, or t
  misc_feature (10)..(21): n is a, c, g, or t
  misc_feature (23)..(26): n is a, c, g, or t
  misc_feature (28)..(36): n is a, c, g, or t
  misc_feature (38)..(47): n is a, c, g, or t
  misc_feature (49)..(50): n is a, c, g, or t
  misc_feature (52)..(54): n is a, c, g, or t
  misc_feature (57)..(62): n is a, c, g, or t
  misc_feature (64)..(68): n is a, c, g, or t
  misc_feature (70)..(70): n is a, c, g, or t
  misc_feature (72)..(76): n is a, c, g, or t
  misc_feature (78)..(80): n is a, c, g, or t
  misc_feature (82)..(82): n is a, c, g, or t
  misc_feature (84)..(84): n is a, c, g, or t
  misc_feature (86)..(87): n is a, c, g, or t
  misc_feature (89)..(93): n is a, c, g, or t
  misc_feature (95)..(95): n is a, c, g, or t
  misc_feature (97)..(98): n is a, c, g, or t
  misc_feature (101)..(101): n is a, c, g, or t
  misc_feature (103)..(106): n is a, c, g, or t
  misc_feature (108)..(119): n is a, c, g, or t
  misc_feature (123)..(126): n is a, c, g, or t
  misc_feature (128)..(129): n is a, c, g, or t
  misc_feature (131)..(137): n is a, c, g, or t
  misc_feature (139)..(139): n is a, c, g, or t
  misc_feature (141)..(142): n is a, c, g, or t
  misc_feature (144)..(149): n is a, c, g, or t
  misc_feature (151)..(195): n is a, c, g, or t
  misc_feature (199)..(222): n is a, c, g, or t
  misc_feature (224)..(229): n is a, c, g, or t
  misc_feature (231)..(249): n is a, c, g, or t
  misc_feature (251)..(253): n is a, c, g, or t
  misc_feature (255)..(256): n is a, c, g, or t
  misc_feature (258)..(268): n is a, c, g, or t
  misc_feature (270)..(270): n is a, c, g, or t
  misc_feature (274)..(274): n is a, c, g, or t
  misc_feature (277)..(277): n is a, c, g, or t
  misc_feature (282)..(282): n is a, c, g, or t
  misc_feature (287)..(287): n is a, c, g, or t
  misc_feature (292)..(292): n is a, c, g, or t
  misc_feature (295)..(295): n is a, c, g, or t
  misc_feature (299)..(299): n is a, c, g, or t
  misc_feature (301)..(301): n is a, c, g, or t
  misc_feature (303)..(303): n is a, c, g, or t
  misc_feature (310)..(312): n is a, c, g, or t
  misc_feature (314)..(314): n is a, c, g, or t
  misc_feature (318)..(319): n is a, c, g, or t
  misc_feature (321)..(321): n is a, c, g, or t
  misc_feature (323)..(323): n is a, c, g, or t
  misc_feature (331)..(332): n is a, c, g, or t
  misc_feature (334)..(334): n is a, c, g, or t
  misc_feature (336)..(336): n is a, c, g, or t
  misc_feature (338)..(338): n is a, c, g, or t
  misc_feature (341)..(341): n is a, c, g, or t
  misc_feature (349)..(349): n is a, c, g, or t
  misc_feature (352)..(352): n is a, c, g, or t
  misc_feature (354)..(354): n is a, c, g, or t
  misc_feature (361)..(363): n is a, c, g, or t
  misc_feature (366)..(366): n is a, c, g, or t
  misc_feature (369)..(370): n is a, c, g, or t
  misc_feature (374)..(374): n is a, c, g, or t
  misc_feature (377)..(378): n is a, c, g, or t
  misc_feature (382)..(382): n is a, c, g, or t
  misc_feature (386)..(386): n is a, c, g, or t
  misc_feature (388)..(389): n is a, c, g, or t
  misc_feature (393)..(393): n is a, c, g, or t
  misc_feature (397)..(398): n is a, c, g, or t
  misc_feature (400)..(400): n is a, c, g, or t
  misc_feature (405)..(405): n is a, c, g, or t
  misc_feature (410)..(410): n is a, c, g, or t
  misc_feature (412)..(413): n is a, c, g, or t
  misc_feature (418)..(418): n is a, c, g, or t
  misc_feature (421)..(422): n is a, c, g, or t
  misc_feature (424)..(424): n is a, c, g, or t
  misc_feature (427)..(428): n is a, c, g, or t
  misc_feature (433)..(433): n is a, c, g, or t
  misc_feature (438)..(438): n is a, c, g, or t
  misc_feature (446)..(447): n is a, c, g, or t
  misc_feature (450)..(450): n is a, c, g, or t
  misc_feature (453)..(454): n is a, c, g, or t
  misc_feature (456)..(456): n is a, c, g, or t
  misc_feature (461)..(462): n is a, c, g, or t
  misc_feature (464)..(464): n is a, c, g, or t
  misc_feature (469)..(469): n is a, c, g, or t
  misc_feature (472)..(472): n is a, c, g, or t
  misc_feature (477)..(477): n is a, c, g, or t
  misc_feature (482)..(483): n is a, c, g, or t
  misc_feature (490)..(490): n is a, c, g, or t
  misc_feature (493)..(493): n is a, c, g, or t
  misc_feature (497)..(498): n is a, c, g, or t
  misc_feature (503)..(503): n is a, c, g, or t
  misc_feature (506)..(506): n is a, c, g, or t
  misc_feature (511)..(511): n is a, c, g, or t
  misc_feature (515)..(516): n is a, c, g, or t
  misc_feature (520)..(520): n is a, c, g, or t
  misc_feature (523)..(523): n is a, c, g, or t
  misc_feature (525)..(526): n is a, c, g, or t
  misc_feature (532)..(532): n is a, c, g, or t
  misc_feature (534)..(534): n is a, c, g, or t
  misc_feature (538)..(538): n is a, c, g, or t
  misc_feature (544)..(544): n is a, c, g, or t
  misc_feature (550)..(552): n is a, c, g, or t
  misc_feature (554)..(556): n is a, c, g, or t
  misc_feature (564)..(564): n is a, c, g, or t
  misc_feature (566)..(566): n is a, c, g, or t
  misc_feature (570)..(570): n is a, c, g, or t
  misc_feature (573)..(573): n is a, c, g, or t
  misc_feature (576)..(579): n is a, c, g, or t
  misc_feature (583)..(584): n is a, c, g, or t
  misc_feature (586)..(586): n is a, c, g, or t
  misc_feature (591)..(591): n is a, c, g, or t
  misc_feature (604)..(604): n is a, c, g, or t
  misc_feature (606)..(607): n is a, c, g, or t
  misc_feature (610)..(611): n is a, c, g, or t
  misc_feature (613)..(616): n is a, c, g, or t
  misc_feature (618)..(618): n is a, c, g, or t
  misc_feature (622)..(622): n is a, c, g, or t
  misc_feature (624)..(624): n is a, c, g, or t
  misc_feature (626)..(629): n is a, c, g, or t
  misc_feature (631)..(631): n is a, c, g, or t
  misc_feature (633)..(634): n is a, c, g, or t
  misc_feature (636)..(637): n is a, c, g, or t
  misc_feature (639)..(639): n is a, c, g, or t
  misc_feature (642)..(642): n is a, c, g, or t
  misc_feature (644)..(644): n is a, c, g, or t
  misc_feature (646)..(649): n is a, c, g, or t
  misc_feature (652)..(653): n is a, c, g, or t
  misc_feature (655)..(655): n is a, c, g, or t
  misc_feature (658)..(658): n is a, c, g, or t
  misc_feature (665)..(665): n is a, c, g, or t
  misc_feature (667)..(667): n is a, c, g, or t
  misc_feature (669)..(669): n is a, c, g, or t
  misc_feature (673)..(674): n is a, c, g, or t
  misc_feature (679)..(679): n is a, c, g, or t
  misc_feature (682)..(683): n is a, c, g, or t
  misc_feature (685)..(685): n is a, c, g, or t
  misc_feature (688)..(689): n is a, c, g, or t
  misc_feature (692)..(692): n is a, c, g, or t
  misc_feature (694)..(695): n is a, c, g, or t
  misc_feature (698)..(698): n is a, c, g, or t
  misc_feature (703)..(703): n is a, c, g, or t
  misc_feature (705)..(705): n is a, c, g, or t
  misc_feature (708)..(708): n is a, c, g, or t
  misc_feature (711)..(712): n is a, c, g, or t
  misc_feature (717)..(717): n is a, c, g, or t
  misc_feature (720)..(720): n is a, c, g, or t
  misc_feature (725)..(733): n is a, c, g, or t
  misc_feature (735)..(737): n is a, c, g, or t
  misc_feature (739)..(740): n is a, c, g, or t
  misc_feature (742)..(743): n is a, c, g, or t
  misc_feature (746)..(752): n is a, c, g, or t
  misc_feature (754)..(757): n is a, c, g, or t
  misc_feature (760)..(767): n is a, c, g, or t
  misc_feature (769)..(769): n is a, c, g, or t
  misc_feature (775)..(775): n is a, c, g, or t
  misc_feature (777)..(779): n is a, c, g, or t
  misc_feature (781)..(788): n is a, c, g, or t
  misc_feature (791)..(797): n is a, c, g, or t
  misc_feature (799)..(799): n is a, c, g, or t
  misc_feature (803)..(803): n is a, c, g, or t
  misc_feature (805)..(808): n is a, c, g, or t
  misc_feature (810)..(812): n is a, c, g, or t
  misc_feature (814)..(817): n is a, c, g, or t
  misc_feature (819)..(819): n is a, c, g, or t
  misc_feature (821)..(824): n is a, c, g, or t
  misc_feature (828)..(834): n is a, c, g, or t
  misc_feature (836)..(844): n is a, c, g, or t
  misc_feature (846)..(855): n is a, c, g, or t
  misc_feature (857)..(857): n is a, c, g, or t
  misc_feature (862)..(862): n is a, c, g, or t
  misc_feature (866)..(868): n is a, c, g, or t
  misc_feature (872)..(875): n is a, c, g, or t
  misc_feature (877)..(877): n is a, c, g, or t
  misc_feature (879)..(879): n is a, c, g, or t
  misc_feature (887)..(896): n is a, c, g, or t
  misc_feature (898)..(898): n is a, c, g, or t
  misc_feature (900)..(902): n is a, c, g, or t
  misc_feature (904)..(908): n is a, c, g, or t
  misc_feature (910)..(911): n is a, c, g, or t
  misc_feature (913)..(931): n is a, c, g, or t
  misc_feature (935)..(935): n is a, c, g, or t
  misc_feature (937)..(939): n is a, c, g, or t
  misc_feature (941)..(941): n is a, c, g, or t
  misc_feature (946)..(948): n is a, c, g, or t
  misc_feature (950)..(950): n is a, c, g, or t
  misc_feature (954)..(954): n is a, c, g, or t
  misc_feature (956)..(959): n is a, c, g, or t
  misc_feature (962)..(963): n is a, c, g, or t
  misc_feature (965)..(965): n is a, c, g, or t
  misc_feature (967)..(967): n is a, c, g, or t
  misc_feature (969)..(969): n is a, c, g, or t
  misc_feature (971)..(978): n is a, c, g, or t
  misc_feature (980)..(980): n is a, c, g, or t
  misc_feature (982)..(982): n is a, c, g, or t
  misc_feature (984)..(987): n is a, c, g, or t
  misc_feature (989)..(1005): n is a, c, g, or t
  misc_feature (1007)..(1022): n is a, c, g, or t
  misc_feature (1024)..(1027): n is a, c, g, or t
  misc_feature (1030)..(1030): n is a, c, g, or t
  misc_feature (1032)..(1032): n is a, c, g, or t
  misc_feature (1034)..(1036): n is a, c, g, or t
  misc_feature (1038)..(1038): n is a, c, g, or t
  misc_feature (1040)..(1040): n is a, c, g, or t
  misc_feature (1044)..(1058): n is a, c, g, or t
  misc_feature (1060)..(1061): n is a, c, g, or t
  misc_feature (1063)..(1063): n is a, c, g, or t
  misc_feature (1066)..(1067): n is a, c, g, or t
  misc_feature (1069)..(1069): n is a, c, g, or t
  misc_feature (1072)..(1080): n is a, c, g, or t
  misc_feature (1082)..(1082): n is a, c, g, or t
  misc_feature (1084)..(1084): n is a, c, g, or t
  misc_feature (1088)..(1090): n is a, c, g, or t
  misc_feature (1094)..(1103): n is a, c, g, or t
  misc_feature (1105)..(1105): n is a, c, g, or t
  misc_feature (1107)..(1109): n is a, c, g, or t
  misc_feature (1111)..(1112): n is a, c, g, or t
  misc_feature (1114)..(1121): n is a, c, g, or t
  misc_feature (1123)..(1123): n is a, c, g, or t
  misc_feature (1126)..(1127): n is a, c, g, or t
  misc_feature (1129)..(1131): n is a, c, g, or t
  misc_feature (1135)..(1147): n is a, c, g, or t
  misc_feature (1149)..(1153): n is a, c, g, or t
  misc_feature (1155)..(1158): n is a, c, g, or t
  misc_feature (1160)..(1161): n is a, c, g, or t
  misc_feature (1163)..(1164): n is a, c, g, or t
  misc_feature (1166)..(1169): n is a, c, g, or t
  misc_feature (1171)..(1172): n is a, c, g, or t
  misc_feature (1175)..(1177): n is a, c, g, or t
  misc_feature (1179)..(1180): n is a, c, g, or t
  misc_feature (1182)..(1183): n is a, c, g, or t
  misc_feature (1185)..(1185): n is a, c, g, or t
  misc_feature (1189)..(1198): n is a, c, g, or t
  misc_feature (1201)..(1204): n is a, c, g, or t
  misc_feature (1206)..(1206): n is a, c, g, or t
  misc_feature (1209)..(1209): n is a, c, g, or t
  misc_feature (1211)..(1211): n is a, c, g, or t
  misc_feature (1213)..(1214): n is a, c, g, or t
  misc_feature (1216)..(1220): n is a, c, g, or t
  misc_feature (1222)..(1222): n is a, c, g, or t
  misc_feature (1225)..(1234): n is a, c, g, or t
  misc_feature (1236)..(1238): n is a, c, g, or t
  misc_feature (1241)..(1252): n is a, c, g, or t
  misc_feature (1255)..(1255): n is a, c, g, or t
  misc_feature (1257)..(1257): n is a, c, g, or t
  misc_feature (1261)..(1261): n is a, c, g, or t
  misc_feature (1263)..(1265): n is a, c, g, or t
  misc_feature (1267)..(1268): n is a, c, g, or t
  misc_feature (1270)..(1271): n is a, c, g, or t
  misc_feature (1273)..(1274): n is a, c, g, or t
  misc_feature (1276)..(1281): n is a, c, g, or t
  misc_feature (1283)..(1294): n is a, c, g, or t
  misc_feature (1296)..(1296): n is a, c, g, or t
  misc_feature (1298)..(1298): n is a, c, g, or t
  misc_feature (1300)..(1302): n is a, c, g, or t
  misc_feature (1304)..(1304): n is a, c, g, or t
  misc_feature (1308)..(1308): n is a, c, g, or t
  misc_feature (1310)..(1310): n is a, c, g, or t
  misc_feature (1312)..(1331): n is a, c, g, or t
  misc_feature (1333)..(1339): n is a, c, g, or t
  misc_feature (1342)..(1355): n is a, c, g, or t
  misc_feature (1358)..(1360): n is a, c, g, or t
  misc_feature (1363)..(1363): n is a, c, g, or t
  misc_feature (1367)..(1367): n is a, c, g, or t
  misc_feature (1369)..(1377): n is a, c, g, or t
  misc_feature (1379)..(1380): n is a, c, g, or t
  misc_feature (1382)..(1382): n is a, c, g, or t
  misc_feature (1384)..(1388): n is a, c, g, or t
  misc_feature (1391)..(1391): n is a, c, g, or t
  misc_feature (1393)..(1394): n is a, c, g, or t
  misc_feature (1396)..(1397): n is a, c, g, or t
  misc_feature (1399)..(1400): n is a, c, g, or t
  misc_feature (1402)..(1403): n is a, c, g, or t
  misc_feature (1406)..(1408): n is a, c, g, or t
  misc_feature (1410)..(1414): n is a, c, g, or t
  misc_feature (1416)..(1423): n is a, c, g, or t
  misc_feature (1425)..(1425): n is a, c, g, or t
  misc_feature (1427)..(1427): n is a, c, g, or t
  misc_feature (1429)..(1435): n is a, c, g, or t
  misc_feature (1437)..(1437): n is a, c, g, or t
  misc_feature (1441)..(1443): n is a, c, g, or t
  misc_feature (1445)..(1445): n is a, c, g, or t
  misc_feature (1447)..(1452): n is a, c, g, or t
  misc_feature (1456)..(1456): n is a, c, g, or t
  misc_feature (1458)..(1460): n is a, c, g, or t
  misc_feature (1462)..(1463): n is a, c, g, or t
  misc_feature (1465)..(1469): n is a, c, g, or t
  misc_feature (1471)..(1471): n is a, c, g, or t
  misc_feature (1474)..(1474): n is a, c, g, or t
  misc_feature (1477)..(1481): n is a, c, g, or t
  misc_feature (1489)..(1489): n is a, c, g, or t
  misc_feature (1492)..(1492): n is a, c, g, or t
  misc_feature (1494)..(1494): n is a, c, g, or t
  misc_feature (1499)..(1499): n is a, c, g, or t
  misc_feature (1501)..(1501): n is a, c, g, or t
  misc_feature (1504)..(1505): n is a, c, g, or t
  misc_feature (1510)..(1510): n is a, c, g, or t
  misc_feature (1513)..(1513): n is a, c, g, or t
  misc_feature (1520)..(1520): n is a, c, g, or t
  misc_feature (1524)..(1525): n is a, c, g, or t
  misc_feature (1527)..(1527): n is a, c, g, or t
  misc_feature (1530)..(1530): n is a, c, g, or t
  misc_feature (1532)..(1532): n is a, c, g, or t
  misc_feature (1542)..(1543): n is a, c, g, or t
  misc_feature (1545)..(1545): n is a, c, g, or t
  misc_feature (1548)..(1548): n is a, c, g, or t
  misc_feature (1550)..(1551): n is a, c, g, or t
  misc_feature (1566)..(1566): n is a, c, g, or t
  misc_feature (1569)..(1569): n is a, c, g, or t
  misc_feature (1571)..(1576): n is a, c, g, or t
  misc_feature (1578)..(1578): n is a, c, g, or t
  misc_feature (1580)..(1585): n is a, c, g, or t
  misc_feature (1587)..(1590): n is a, c, g, or t
  misc_feature (1595)..(1598): n is a, c, g, or t
  misc_feature (1600)..(1600): n is a, c, g, or t
  misc_feature (1602)..(1603): n is a, c, g, or t
  misc_feature (1607)..(1608): n is a, c, g, or t
  misc_feature (1611)..(1615): n is a, c, g, or t
  misc_feature (1618)..(1618): n is a, c, g, or t
  misc_feature (1621)..(1622): n is a, c, g, or t
  misc_feature (1721)..(1721): n is a, c, g, or t
  misc_feature (1787)..(1787): n is a, c, g, or t
  misc_feature (1982)..(1985): n is a, c, g, or t
  misc_feature (1989)..(1989): n is a, c, g, or t
  misc_feature (2057)..(2057): n is a, c, g, or t
nnnnnnnncnnnnnnnnnnnngnnnncnnnnnnnnncnnnnnnnnnncnnannngcnnnnnncnnnnncngnnnnncnnngngngnncnnnnngngnncgngnnnncnnnnnnnnnnnngcgnnnngnngnnnnnnnancnncnnnnnncnnnnnnnnnnnnnnnnnnnnnnnnnnnnnnnnnnnnnnnnnnnnngcannnnnnnnnnnnnnnnnnnnnnnncnnnnnntnnnnnnnnnnnnnnnnnnncnnncnncnnnnnnnnnnnantgcncgnacgtncgcgntgtgncancaantnanacgcacnnncncganngnancgatcggnncncncnccncgcgcccnccncncccgcgnnnganganngcgnccnngacngccncnngcgncccnngngtcgngaaananngcgtngcnncncgnncgcgnctccntcccgcgnngcnctnncncccgnncntctcncgnctccncgcgnncgcggcncgncccnncgcgngcntctcngcgnntcanatntnngcccgncngacngcccgnccgcgnnncnnncgcgcgtntncccnccncgnnnngcgnncnccccngccgaccccgcgngnncgnngnnnncncgcncnannnngnanngnntngcncncnnnnganngngcnggagacngngnacanncctcncanncnctnntangnnccncccgncncgngcnngaccnccngcgcnnnnnnnnncnnncnncnnctnnnnnnncnnnngcnnnnnnnncngcgcgngnnngnnnnnnnngcnnnnnnngngcgngnnnncnnngnnnngngnnnnaaannnnnnngnnnnnnnnncnnnnnnnnnngngcgcncgcnnncggnnnncncncccccccnnnnnnnnnncncnnncnnnnngnngnnnnnnnnnnnnnnnnnnncgcncnnngngcgcnnngncgcncnnnnganncncncncnnnnnnnncncncnnnntnnnnnnnnnnnnnnnnntnnnnnnnnnnnnnnnncnnnncgngngnnngngngcgnnnnnnnnnnnnnnncnncncgnncnggnnnnnnnnngngngcgnnngcgnnnnnnnnnngngnnngnngnnnnnnnncncgnngnnngcgnnnnnnnnnnnnncnnnnncnnnngnngnngnnnncnncgnnngnngnncnctcnnnnnnnnnncgnnnngngtntntnngnnnnngncgnnnnnnnnnngnnngannnnnnnnnnnncgngngcgngnnngnngnngnngnnnnnngnnnnnnnnnnnntntntnnnanaaananannnnnnnnnnnnnnnnnnnngnnnnnnncgnnnnnnnnnnnnnnggnnnccncgcncnnnnnnnnntnncncnnnnngcngnngnngnngnngcnnncnnnnncnnnnnnnncncncnnnnnnnanacannncncnnnnnngcgngnnngnngnnnnngngcncgnnnnnggcgcggncgngnctctncngcnngcggnggnggtctcngtgnngngcntngcgctggggnngnggngnnggacgcggcgcgcgnggngnnnnnngntnnnnnntnnnnaaaannnnananngagnntannnnnttntannagtcatcaatccaggtacagcccgaaccctaggttgatgggcttggactcgagcatccacgccgcctggttgatgacgaagttgtcgcacccctggctngccgccgcgagcagcgccgcgcggtctgccaccgcctcgggctcctccgggtaccacactcccggncgcgtttccccgcgcagcatcgccgacgcgaacgccgccgtggcgttccccaccgcgtcccgcagccgcgggtggttgaagatgccgccggcgagcttgccattcttcagcttgacgtccacgcgcatcgccgtgcgctcgcccacgagcgcgtccacggcgcgcaccagcggagcggtgagccgcgccagcgtnnnngcgntttcgcggttggcgagaaaatccttgggcgcgacggcgctcattaagttcatcgccagattccacacncccggcgacgtcccgaaccgcgtcttgaccgtctccgcgccgaacacctcgcgcgcggatctcgtctcgggaagattgtacatgaacacctcgcgctttccgcacttcttcccgaagtccaccaccttcctttgcgcggccgggcgcgaagtcacgggcgcgccgttttcccagctctccacgtcctcgccgcagagcatgtaggaggtggcgaggatggtgtccccgacgccgccgcttcccgcgcagaagtacgagtacagcacgtactccacctcggcgtccatgtccccgcccgcctcgcggttcgcggcgatcatgtccgcggccatgacgttggacacgccggggtacacgccggcggtggtgatgcacggcacgccggcggcgcgcgcggcggcgtgtctcgacttggccgcctgcgcgtagttcgcatcgtcgcagacgtccaggtacgggacgcccgcggcgatggcggcgtccatgaccgcgttacggtcgccgccgctctggaacgggcccgcgctgtgcacgacgaggtccgcgcccgcgatcgcggcggcgacggagccggcgtccgccagatcgagtttcgcgaagtccgcgacgccgcgcaggcaggggtgcctctccatcgcctccgcggccgccgcgtccgagcggccggcgagcaccaccttcgcgacggacgggtcgttggccaccagcgccgccgcggaggcggcgccgacgcgaccagtgccgcccacgaacaccaccttcttggtcgcctcggtctcggaggcctcggcctcggacgcgcgcgcgcgcgtcgatcgacggcggttcgagggtcgcgcgaccttcgcgaacgataggcgctcggcggtcgagggcgaggcgcgcgcgctcggcgcggcggtcgctcggcacatcgcggacgcggacatggtggtctgtgtcgggcgaacggacgcgcgcgggggcgaagtgatggtcgcggtgccgaacgcgcgatgacgtcggcacttctgttctttgttttatccggtgcgagcggtgggaaagctgtcggtcgttttcgaggtctattcttgagtcacagatatatacgatttcgaagactgcatggactgtcatgacggttgaaaatgttggatcgagagaaaatcagaaaaagcgaagacagtggggatttcaaacgaaaagaaccgtttgtggagcttttcaacgtccgaggcatcgacgccgcgcgcatacccgcgcgctcttcgcagcgacgggaccgtgaccgtacggcggcgcgccttcgaccttcgaagcgtcgcaccgcgcgcgtacgcgcgaaaacccattcgccggggcgtggaggatacacatccgcgctccataaggttgcatttttaagcgctcctcgtcgccgggtcgaccctctcgcgtttcccacgcgtgcatcgggtagacgccggcgcgtgccaacgaggccaccgcgcgccgccttcgttccaagatggcgaccgcgatggccgaggagacgcccccctactcgttcgtggccaagaacgggcaggtggcgtgggacgcggtgatgggcttcgacctcgcgccgtttctcagcgggcagaacgtcgcgccgaacgccctcggcgcgctcgatgacctgtccaggcagctggaggaggcgcgcatcgagccggacccgggggtgaaccccgagacgaacaccgaccgcctcgcgcgcctcgccgtggtcctgcagctcagcagcgagtaccaggcgatgcgcgcggaggacctgcaggtggcggtcgagaagaaggatcgcgagctggacgtcatggacgagcagatggagcagctcgagcgcggcggcgcgcgcacggacacctcgctggaggcggaggcggacgccgcgcgcagccgcgcggaggaggcggaccgacgcatgtcgctgcagacgcagg

SEQ ID NO: 1326 - DNA, 4000 bp, Escherichia coli
  misc_feature (803)..(803): n is a, c, g, or t
  misc_feature (808)..(808): n is a, c, g, or t
  misc_feature (1556)..(1556): n is a, c, g, or t
  misc_feature (1595)..(1595): n is a, c, g, or t
  misc_feature (1784)..(1784): n is a, c, g, or t
  misc_feature (1971)..(1972): n is a, c, g, or t
  misc_feature (1996)..(1996): n is a, c, g, or t
  misc_feature (2007)..(2007): n is a, c, g, or t
  misc_feature (2015)..(2015): n is a, c, g, or t
  misc_feature (2330)..(2330): n is a, c, g, or t
  misc_feature (3073)..(3073): n is a, c, g, or t
  misc_feature (3640)..(3640): n is a, c, g, or t
  misc_feature (3676)..(3676): n is a, c, g, or t
  misc_feature (3682)..(3682): n is a, c, g, or t
  misc_feature (3692)..(3693): n is a, c, g, or t
  misc_feature (3721)..(3721): n is a, c, g, or t
accaactttgcaggcatctgcaaaaagagggagaaacaatgatgtttctttgatgtttttaaaaggtagggtaaggaagagactgttgtaaatttggaatctagaaagtattttttcgttaaatcgttcgattttaggttttcgggccattaaagtttgtgttttatagttcggtaaaaatatggtgcatcaatcgttttttgtcgtttatactctcttccattgagatcatcgtctccgttctagagactccagggacatcgtcaatactaaaaataatatcctttgcatggtgcgtatctcgcgccctaaccttacagaaaacattgaatttccccgtggtaatatgcgcaactgtgataaaaggaatatcatttagtgcacttagaacttcattgatggtatttgttttttcaagaaaaacacctacataggcaataaaagaataccctagtttgacatagtcaagatttaaggaagatcctttaatgatccctgattcttccatctttctaacccgaacatgaacggttcctgcagagattaataaacgttttgaaatgtctgtgaatggaattcttgtattatcaattaaaatatctaggatttgatggtcaatttcatctaaagctactttgctcatggctaatatatttttgcaaatttaactaaattttactgataaatcatcaatgaattcgcttgattttgaagaaaaacgcactgaaatgaattaaatctatgctttaattgaacataatgagacaaaatccaaattttcaagaagattatcttttttaaantgtantgaaatgttttttagttcttcagggaggattatttttttatgggccttcaaagggagtttaacaccaaaaaatttcatttcagggaggaaaacaatcgcgtcatccctaagttcttccttatagtgaattgccaattcctgctcagcatagctatttccatcctctgttacagtgacgccggtaatgattaggtcaacaaagtctttagcgttctctgggattgcgtaataggcttctgtagggtggtcaaaattatcttccaaaagtgtttctagaagcagtccaaagcttttaaacaagtgccttcgtgtggtttctctttggtaatcattcgggacgtgtcccgcttcaaaaaggacggtgggtgttccgagttgagtgaatttatctcccacacaatttgggttaaacgcatcatcataacgtccaatttgatttgggagggcatcctgaagcccgttttttaattcaacaatgagttgcatcgctttctttcttggagcagttacagtgcgcgcttcgtctgcggaaggagctaaaaaagaaatgcttgccgtttcccccattttacctgcagcaaacaaagtgcgttggccatgtagatttaagcaatagtcgggtttttctaacgtatataaatcatgtaataccttactttctggttgtgtaagatccactgcatcacgatttaggtctattccatttgcatttaaacgtgtataggcttgagctccgtctgggttaagntgtagtataacacacagtgtgaaggcttcctgaaggtgnttttgaggcgtatcaacaaaccagggaataaagtctagcagtgctcgggtggtcgtactctcgtttccatgcatctgtgaccacattaggatctttacctttccttttccaagtgttaaaagagatatgggtaaatcatttacagaacgaccgataacttttctagaaacagtttccggtaagccttcnaaaaatgaatataaagcacttggcggtaaatatcgcttggtagtcatatagattataaaacacaaatgtaaacatctgtttgtttacatttgtaacgaaatagtatttcatatcaaaccactgaacccgcattattgtatttgttttgatacaaatgtaacacatcaataaatgaatgaataaaaannctttaaatcaagtacttacgtttnaaaattaaagnaatacatncatttttaaagggcttgttttattcagtttacaattgtatatttgtaatagaaccaataatagtttacaatgttaaacattgaccacttcctaaagcgacttgaatcattaatggaaaataaccatctaaatgcaactgcctttgccgaaaaaatcgatgttcaacgttcttccgtttctcatattttatcgaaacgaaataaaccgagtttggaatttatattgaaaatcaatgaacattttgaggaagctgatttagaatggttactattgggtgaaaaacaagatcaagaaaaacaccctaccctactaaangagaaagtagaagtttcagaaatcgatgcaatcgaacacaaaacaaaatatgaaatcacacaagggatgccccaaaagaatgaaaattcaaacacggacgaaatatctcaaataattcaattatataaggacggtagttttcgcacttattttcccaaatcttagtatttttgctcttgatgaagcattatctaaaattactactgcctttactgtttatttcctgctattctgtcgaacgaaattgtgaggattttcatgaaggtacctttgaattttctcaaatcattaatggtgagatgacccgttcccgttttgaacgtgacgcaaactttgaaatagaattctttgagggcgtcacagacaccgccagtatccgatgggtaaatgattgcgaatgtattttaaccaagctcaatcctacttcaaatcaggacaaacgtcctattcaaatcaaaatcttaagtaccaccaacaattcatacacctttgaatactccctagtaggagatagtggaaacacccagcgaggaacgattcagaaaataaaataacgcatgatcaccccagatatagtagtcgcttttataacccttacctttttggagattgttttaggaatagataacattattttcatttcaattttatcagatcgatttcccatagagaaacgtaagaaattaatgcagttggggcttttcttggcaatgatcatgcggattctattactgatgggagtnaattggctgactaggatgcaaaccacattaatacagtttgacacaaaatacttctcctctaacatatccattcaagctttgattctattagcaggaggattatttttaatttataagagtactcgtgaaatttttgataaggtggagtatgatttagatgagaaaaaagcagaaaaaaacttttcattctctttttctaaagctttggtccaaatcattttaatcgatattgttttttcttttgactcgatccttacagctattggaatgacaagtggaattccgtatgccttgtggatcatgatcactgcagttgtgatcgctttgactatcatgattggatttgcttcccctgtaagtaaatttgtaaatgcccatccgtccatacagatattgggcttgtcttttttattgcttattggttttatgttaattacagaagcagcaagccattctcaaactgtaattttcggatcctcaatcacaacagtacctaaggggtatctatattttgctattgctttttcgttaggagtagaaatgcttaatatgagaattagaaaaacnagatcaaattagaagtctaaggttatttgagggtcntcgccnttttttgatnntgaaataacttcttcatcaacatccacntcaatatcattaatatcttcctctggaggcatttcatatggcaacgcttccttgagctcaacagacttaattttcttttgtgtgagttgatttcctagggctttaaaacccttgactgagatgaattcatccgcattaatctctaagctatcaggttgttcttttcctcttggcttttcaaaatggacttcaagaattgggagccaatcaaatccaacatatagaagggtaccgtcgtctttaatatagctatcctcccgatcaacactttcaattaaa

SEQ ID NO: 1327 - DNA, 4000 bp, Escherichia coli
  misc_feature (113)..(113): n is a, c, g, or t
  misc_feature (122)..(122): n is a, c, g, or t
  misc_feature (205)..(205): n is a, c, g, or t
  misc_feature (212)..(212): n is a, c, g, or t
  misc_feature (1095)..(1095): n is a, c, g, or t
  misc_feature (1100)..(1100): n is a, c, g, or t
  misc_feature (1114)..(1114): n is a, c, g, or t
  misc_feature (1148)..(1148): n is a, c, g, or t
  misc_feature (1167)..(1167): n is a, c, g, or t
  misc_feature (1420)..(1420): n is a, c, g, or t
  misc_feature (1992)..(1992): n is a, c, g, or t
  misc_feature (2585)..(2585): n is a, c, g, or t
  misc_feature (3882)..(3882): n is a, c, g, or t
gccataatggaatcgcgccacgcgtgacaagatgcaaatttgccggtgtcatgccaagcacatcatcggccgtgcgccgtgccacaatcgccgcgcgatgtgcgttaacacgntgggcaaanttaccaatttgcacgctccagcttgggttttcatcagtggcagggttggcggcacttgcaatatcaagctggataaattcggnctttttnggtgctgcagctggccgtgtcttggttttgctgactggcaggcttttgctgactggcaggcttttgggcaatttgtcgccgcgttcgggtggtgccactggcaaggttgttggcatggcaagcgcggcacgccgaaccgtgatggttttgacgcgtttaaactgattatccagaatttgcatcatatggcggtcgcggctgcgcgacgttttcccgccaaacacaacaccaatcagccgaacaccattgcgttcgaccgtggcaacaagattgaatcccgatgcattaatatagcctgttttgatgccatctgtgccgctatattttgccaacagcttgttatgattgccgtatttccggcctttccagttaaagctttgggtgctgaaatatttataaaattgcggaaaatcgcgccgcatggcaacggccagaacggccatatcacgcgctgtcgatttctgccggcgatttggcaggcctgacgcgttcttgaaaaccgtacgccgcatgcccagagccttggccttgcgggtcatgcgtttggcaaattttcgttccgtgcccgacagtttttcggcaattgctgttgccacatcattggccgattttgtcactagcgcgtagatggcttgttcggcgctgattgattgacctggtttcaaatataatttggatggcgaacggccagcggctgttttggaaaccggaatcctgcttttcagtgtcatgcgtcccgcttcgatatcttcaaacaaaagataaagcgtcatgattttggtcaaggatgccgggtagcgcagattatcggcattgcgcgaaaacagaactttgccagtggcttcttcaatgacgattgacgcatatttgctggctttagccngtgtngccggcaacccaancccaaccataaaaatgatcatcattgtcaaaaangatttaccggggcggaaanccccaagctgtgacaaagccaaaaggccggattttatcgaaaatagacatttttcaccacggcgattgagtgaccgaaagggtgcatgttgcttgttcagtagcgtcttggctacatttgatcgtgccattaaggcctgccccattccgaaattatgactatcttgtaacactgcgcggcaaagcataacgcaattaggattctattcaagaatcttgccaaaatttggacaataaactgcaatatggtcgcntcatgtatttgcgaaagtttttttgccgcaccccttttccttgatgtatgcgataccaatatcaaaaggatgcggcgggcgttttgtttctgtgctatattcaacgccctgtacggatgattgaattacgaaggtttaaaagagaatttatggcaaatgaagacgataaaaacggcaatggtcagttaatcctcgacagccgtaccaaaacgaaaaagccatcaatgtataaagtcattatgcttaatgacgactatacaccgatggagtttgtcgtgcatgtcttgcagaaatttttcggtcgttcggcagatgaagccacccagatcatgttgaatgtgcatcagcgcggggttggtgtttgcggtgtctatagttttgaaatcgccgaaagcaaagcgcaaaaaaccattgattatgcgcggaagaatgatcatccgctgcaattacaactggaaaaggaataggcaaaatgctgtcacgcgaactcgaagaaacattgcgccgcgccatgtcgaatgcggcatcatgttcgcatgaatttgccactttagaacatttgctattggcgntaaccgaagatagtgacgcgcttgaagtcctgcatgcctgcaatgttgatattgatgagctggtcaaaaagctgggtgaatttatcgaaattgaactggcatcgattgttgaccccgaaggcaatgttgatgtgcagccaacggcaagtttccagcgcgtgatccagcgcgccatcatccatacacaatcatcagggcgggaagtggccaccggtgccaatgttctggtgtcgattttctccgagcgcgaaagccatgctgtctggtttttgaaatcattgaatatgacacggcttgatgcggtgtcctttatcagccatggcgccgacagcagtatcgccaaaagccagagcgaagatcaggctggcgaaaccattggcgaggatggcaaagacccgcttagccagtttgctgtcaatttgatcgccaaggccgcagctggtaggattgatccattgattggccgcagccgtgaattagaccgcacgattcaggttttatgccgccgcacgaaaaacaatccgctttatgttggtgatccgggtgttggcaaaaccgccatcgccgaagggcttgccttgcgaatttatganggcaatgttcccgatgttctggcaacagcggtgatttattcgcttgatatgggacaattgctggctggaacccgctatcgtggtgattttgaagaacggttgaaagccgtgatgaaagcggtggcagacgacgaaaatgccattctgttcattgatgaaatccatacggtgattggcgcaggggcgacctctggcggagcgatggatgcgtcaaatctgctaaagcctgcgttgcaggaaggcacgcttcgctgtatcgggtcgacaacctataaagaatatcgcggtcattttgaaaaggatcgcgcattggtgcgccggttccagaagattgatgttgccgagccgaccatccccgatacgatcaaaattctgaatggtttgaaaagccgctatgaagatcatcacaaagtgcgctttaccggtgctgccttgaaaaccgcggttgatctgtctgctcgctatatcaatgatcgcaaattgcccgataaagcgattgatgtgattgacgaagctgcggcggcacaaaatctgctgccaccatcacgccgccgccaaacaattggccagaaagaaatcgaagccacggtggcgacaatggcgcggattccgtcaaagcatgttagccgtgatgacaaggctgtgttggcatcgcttgaaactgatttgaaacgtatggtgtttggccaagatccggccattaccgccttggcatcagcgattaagctatcgcgtgctggccttcgtgatgcagaaaagccggttggcaattatctgttttccggcccaacaggcgttggtaaaaccgaggttgcgcgccagcttgccgaaacgcttggcatcaagctgatgcggtttgatatgtccgaatatatggaacgccatacggtatcgcgcctgattggtgcgcctccaggctatgtcgggtttgaccaaggcgggctgttgaccgatgcggttgatcagacgccgcatgccgttctgcttcttgacgagatcgaaaaagcgcatcctgatttgttcaatattctgctgcaggtcatggatcatggcaaattgaccgacaataatggcaagattgttgatttcagaaatgtcattttgattatgacaacaaatgccggagcgcaggaattgtcaaaatcggcaatcggctttaaccgtacgcataatgaaggcgccgatattgaagctatcgaaaaaatgtttacgcctgaattccgtaaccggcttgatgcgattattccgtttgcgccgcttggcaaagatgtcatccggttggttgttgataaatttntcatgcagcttgatgcccagcttgccgatcgtaatgtcgaaatcgaattgagcgaagcggcgatggattggcttgccgaacgtggctatgacgccaaatatggcgcgcggccactggc

SEQ ID NO: 1328 - DNA, 4000 bp, Escherichia coli
  misc_feature (1986)..(1986): n is a, c, g, or t
  misc_feature (1989)..(1989): n is a, c, g, or t
  misc_feature (1992)..(1992): n is a, c, g, or t
  misc_feature (2184)..(2184): n is a, c, g, or t
  misc_feature (2186)..(2186): n is a, c, g, or t
  misc_feature (2188)..(2190): n is a, c, g, or t
  misc_feature (2192)..(2193): n is a, c, g, or t
  misc_feature (2198)..(2200): n is a, c, g, or t
  misc_feature (2203)..(2204): n is a, c, g, or t
  misc_feature (2206)..(2206): n is a, c, g, or t
  misc_feature (2208)..(2208): n is a, c, g, or t
  misc_feature (2212)..(2217): n is a, c, g, or t
  misc_feature (2219)..(2231): n is a, c, g, or t
  misc_feature (2237)..(2238): n is a, c, g, or t
  misc_feature (2241)..(2241): n is a, c, g, or t
  misc_feature (2243)..(2245): n is a, c, g, or t
  misc_feature (2247)..(2247): n is a, c, g, or t
  misc_feature (2249)..(2251): n is a, c, g, or t
  misc_feature (2254)..(2257): n is a, c, g, or t
  misc_feature (2259)..(2260): n is a, c, g, or t
  misc_feature (2262)..(2264): n is a, c, g, or t
  misc_feature (2266)..(2279): n is a, c, g, or t
  misc_feature (2281)..(2282): n is a, c, g, or t
  misc_feature (2285)..(2290): n is a, c, g, or t
  misc_feature (2292)..(2293): n is a, c, g, or t
  misc_feature (2295)..(2295): n is a, c, g, or t
  misc_feature (2297)..(2297): n is a, c, g, or t
  misc_feature (2300)..(2300): n is a, c, g, or t
  misc_feature (2302)..(2303): n is a, c, g, or t
  misc_feature (2305)..(2305): n is a, c, g, or t
  misc_feature (2308)..(2311): n is a, c, g, or t
  misc_feature (2313)..(2315): n is a, c, g, or t
  misc_feature (2317)..(2318): n is a, c, g, or t
  misc_feature (2321)..(2321): n is a, c, g, or t
  misc_feature (2324)..(2324): n is a, c, g, or t
  misc_feature (2326)..(2326): n is a, c, g, or t
  misc_feature (2328)..(2328): n is a, c, g, or t
  misc_feature (2330)..(2338): n is a, c, g, or t
  misc_feature (2340)..(2343): n is a, c, g, or t
  misc_feature (2345)..(2345): n is a, c, g, or t
  misc_feature (2347)..(2356): n is a, c, g, or t
  misc_feature (2358)..(2360): n is a, c, g, or t
  misc_feature (2363)..(2363): n is a, c, g, or t
  misc_feature (2367)..(2373): n is a, c, g, or t
  misc_feature (2375)..(2384): n is a, c, g, or t
  misc_feature (2386)..(2386): n is a, c, g, or t
  misc_feature (2389)..(2391): n is a, c, g, or t
  misc_feature (2395)..(2395): n is a, c, g, or t
  misc_feature (2398)..(2407): n is a, c, g, or t
  misc_feature (2409)..(2409): n is a, c, g, or t
  misc_feature (2411)..(2415): n is a, c, g, or t
  misc_feature (2417)..(2417): n is a, c, g, or t
  misc_feature (2420)..(2427): n is a, c, g, or t
  misc_feature (2429)..(2430): n is a, c, g, or t
  misc_feature (2432)..(2432): n is a, c, g, or t
  misc_feature (2434)..(2436): n is a, c, g, or t
  misc_feature (2439)..(2440): n is a, c, g, or t
  misc_feature (2442)..(2442): n is a, c, g, or t
  misc_feature (2445)..(2447): n is a, c, g, or t
  misc_feature (2449)..(2449): n is a, c, g, or t
  misc_feature (2451)..(2452): n is a, c, g, or t
  misc_feature (2456)..(2464): n is a, c, g, or t
  misc_feature (2466)..(2468): n is a, c, g, or t
  misc_feature (2470)..(2477): n is a, c, g, or t
  misc_feature (2479)..(2481): n is a, c, g, or t
  misc_feature (2484)..(2486): n is a, c, g, or t
  misc_feature (2488)..(2493): n is a, c, g, or t
  misc_feature (2496)..(2496): n is a, c, g, or t
  misc_feature (2498)..(2500): n is a, c, g, or t
  misc_feature (2504)..(2505): n is a, c, g, or t
  misc_feature (2507)..(2513): n is a, c, g, or t
  misc_feature (2515)..(2518): n is a, c, g, or t
  misc_feature (2520)..(2522): n is a, c, g, or t
  misc_feature (2525)..(2527): n is a, c, g, or t
  misc_feature (2529)..(2529): n is a, c, g, or t
  misc_feature (2531)..(2535): n is a, c, g, or t
  misc_feature (2537)..(2542): n is a, c, g, or t
  misc_feature (2545)..(2545): n is a, c, g, or t
  misc_feature (2547)..(2550): n is a, c, g, or t
  misc_feature (2552)..(2559): n is a, c, g, or t
  misc_feature (2561)..(2563): n is a, c, g, or t
  misc_feature (2565)..(2580): n is a, c, g, or t
  misc_feature (2585)..(2585): n is a, c, g, or t
  misc_feature (2588)..(2597): n is a, c, g, or t
  misc_feature (2599)..(2600): n is a, c, g, or t
  misc_feature (2602)..(2607): n is a, c, g, or t
  misc_feature (2612)..(2617): n is a, c, g, or t
  misc_feature (2620)..(2620): n is a, c, g, or t
  misc_feature (2623)..(2623): n is a, c, g, or t
  misc_feature (2625)..(2625): n is a, c, g, or t
  misc_feature (2627)..(2627): n is a, c, g, or t
  misc_feature (2629)..(2629): n is a, c, g, or t
  misc_feature (2631)..(2637): n is a, c, g, or t
  misc_feature (2639)..(2647): n is a, c, g, or t
  misc_feature (2649)..(2650): n is a, c, g, or t
  misc_feature (2654)..(2661): n is a, c, g, or t
  misc_feature (2663)..(2669): n is a, c, g, or t
  misc_feature (2671)..(2671): n is a, c, g, or t
  misc_feature (2673)..(2675): n is a, c, g, or t
  misc_feature (2677)..(2684): n is a, c, g, or t
  misc_feature (2688)..(2694): n is a, c, g, or t
  misc_feature (2696)..(2696): n is a, c, g, or t
  misc_feature (2698)..(2698): n is a, c, g, or t
  misc_feature (2701)..(2710): n is a, c, g, or t
  misc_feature (2712)..(2713): n is a, c, g, or t
  misc_feature (2720)..(2722): n is a, c, g, or t
  misc_feature (2724)..(2727): n is a, c, g, or t
  misc_feature (2731)..(2731): n is a, c, g, or t
  misc_feature (2735)..(2735): n is a, c, g, or t
  misc_feature (2737)..(2737): n is a, c, g, or t
  misc_feature (2739)..(2741): n is a, c, g, or t
  misc_feature (2743)..(2745): n is a, c, g, or t
  misc_feature (2747)..(2749): n is a, c, g, or t
  misc_feature (2751)..(2751): n is a, c, g, or t
  misc_feature (2753)..(2754): n is a, c, g, or t
  misc_feature (2756)..(2756): n is a, c, g, or t
  misc_feature (2758)..(2758): n is a, c, g, or t
  misc_feature (2760)..(2760): n is a, c, g, or t
  misc_feature (2764)..(2765): n is a, c, g, or t
  misc_feature (2767)..(2768): n is a, c, g, or t
  misc_feature (2770)..(2770): n is a, c, g, or t
  misc_feature (2773)..(2780): n is a, c, g, or t
  misc_feature (2783)..(2783): n is a, c, g, or t
  misc_feature (2785)..(2785): n is a, c, g, or t
  misc_feature (2787)..(2787): n is a, c, g, or t
  misc_feature (2789)..(2789): n is a, c, g, or t
  misc_feature (2791)..(2794): n is a, c, g, or t
  misc_feature (2796)..(2798): n is a, c, g, or t
  misc_feature (2800)..(2801): n is a, c, g, or t
  misc_feature (2804)..(2807): n is a, c, g, or t
  misc_feature (2810)..(2811): n is a, c, g, or t
  misc_feature (2813)..(2814): n is a, c, g, or t
  misc_feature (2816)..(2820): n is a, c, g, or t
  misc_feature (2822)..(2822): n is a, c, g, or t
  misc_feature (2824)..(2824): n is a, c, g, or t
  misc_feature (2827)..(2829): n is a, c, g, or t
  misc_feature (2831)..(2835): n is a, c, g, or t
  misc_feature (2843)..(2846): n is a, c, g, or t
  misc_feature (2856)..(2858): n is a, c, g, or t
  misc_feature (2860)..(2860): n is a, c, g, or t
  misc_feature (2869)..(2869): n is a, c, g, or t
  misc_feature (2871)..(2871): n is a, c, g, or t
  misc_feature (2873)..(2873): n is a, c, g, or t
  misc_feature (2876)..(2877): n is a, c, g, or t
  misc_feature (2884)..(2884): n is a, c, g, or t
  misc_feature (2886)..(2887): n is a, c, g, or t
  misc_feature (2889)..(2889): n is a, c, g, or t
  misc_feature (2892)..(2892): n is a, c, g, or t
  misc_feature (2899)..(2899): n is a, c, g, or t
  misc_feature (2902)..(2902): n is a, c, g, or t
  misc_feature (2907)..(2907): n is a, c, g, or t
  misc_feature (2912)..(2912): n is a, c, g, or t
  misc_feature (2914)..(2914): n is a, c, g, or t
  misc_feature (2916)..(2916): n is a, c, g, or t
  misc_feature (2918)..(2918): n is a, c, g, or t
  misc_feature (2921)..(2924): n is a, c, g, or t
  misc_feature (2926)..(2926): n is a, c, g, or t
  misc_feature (2929)..(2932): n is a, c, g, or t
  misc_feature (2937)..(2937): n is a, c, g, or t
  misc_feature (2940)..(2940): n is a, c, g, or t
  misc_feature (2942)..(2944): n is a, c, g, or t
  misc_feature (2946)..(2946): n is a, c, g, or t
  misc_feature (2948)..(2949): n is a, c, g, or t
  misc_feature (2954)..(2958): n is a, c, g, or t
  misc_feature (2961)..(2966): n is a, c, g, or t
  misc_feature (2969)..(2973): n is a, c, g, or t
  misc_feature (2980)..(2980): n is a, c, g, or t
  misc_feature (2992)..(2992): n is a, c, g, or t
  misc_feature (2994)..(2997): n is a, c, g, or t
  misc_feature (2999)..(3004): n is a, c, g, or t
  misc_feature (3006)..(3007): n is a, c, g, or t
  misc_feature (3011)..(3011): n is a, c, g, or t
  misc_feature (3015)..(3015): n is a, c, g, or t
  misc_feature (3019)..(3021): n is a, c, g, or t
  misc_feature (3027)..(3028): n is a, c, g, or t
  misc_feature (3030)..(3030): n is a, c, g, or t
  misc_feature (3034)..(3035): n is a, c, g, or t
  misc_feature (3037)..(3040): n is a, c, g, or t
  misc_feature (3042)..(3047): n is a, c, g, or t
  misc_feature (3051)..(3051): n is a, c, g, or t
  misc_feature (3058)..(3058): n is a, c, g, or t
  misc_feature (3060)..(3068): n is a, c, g, or t
  misc_feature (3070)..(3072): n is a, c, g, or t
  misc_feature (3076)..(3077): n is a, c, g, or t
  misc_feature (3082)..(3083): n is a, c, g, or t
  misc_feature (3088)..(3088): n is a, c, g, or t
  misc_feature (3094)..(3094): n is a, c, g, or t
  misc_feature (3099)..(3100): n is a, c, g, or t
  misc_feature (3102)..(3104): n is a, c, g, or t
  misc_feature (3106)..(3108): n is a, c, g, or t
  misc_feature (3114)..(3114): n is a, c, g, or t
  misc_feature (3119)..(3120): n is a, c, g, or t
  misc_feature (3123)..(3123): n is a, c, g, or t
  misc_feature (3129)..(3131): n is a, c, g, or t
  misc_feature (3134)..(3135): n is a, c, g, or t
  misc_feature (3141)..(3145): n is a, c, g, or t
  misc_feature (3147)..(3147): n is a, c, g, or t
  misc_feature (3154)..(3154): n is a, c, g, or t
  misc_feature (3162)..(3162): n is a, c, g, or t
  misc_feature (3165)..(3166): n is a, c, g, or t
  misc_feature (3170)..(3171): n is a, c, g, or t
  misc_feature (3174)..(3174): n is a, c, g, or t
  misc_feature (3180)..(3180): n is a, c, g, or t
  misc_feature (3185)..(3185): n is a, c, g, or t
  misc_feature (3187)..(3188): n is a, c, g, or t
  misc_feature (3194)..(3194): n is a, c, g, or t
  misc_feature (3197)..(3197): n is a, c, g, or t
  misc_feature (3199)..(3199): n is a, c, g, or t
  misc_feature (3202)..(3205): n is a, c, g, or t
  misc_feature (3207)..(3208): n is a, c, g, or t
  misc_feature (3210)..(3215): n is a, c, g, or t
  misc_feature (3218)..(3218): n is a, c, g, or t
  misc_feature (3223)..(3223): n is a, c, g, or t
  misc_feature (3226)..(3227): n is a, c, g, or t
  misc_feature (3231)..(3231): n is a, c, g, or t
  misc_feature (3233)..(3234): n is a, c, g, or t
  misc_feature (3240)..(3240): n is a, c, g, or t
  misc_feature (3243)..(3243): n is a, c, g, or t
  misc_feature (3247)..(3248): n is a, c, g, or t
  misc_feature (3251)..(3252): n is a, c, g, or t
  misc_feature (3254)..(3254): n is a, c, g, or t
  misc_feature (3258)..(3262): n is a, c, g, or t
  misc_feature (3272)..(3272): n is a, c, g, or t
  misc_feature (3278)..(3278): n is a, c, g, or t
  misc_feature (3283)..(3285): n is a, c, g, or t
  misc_feature (3287)..(3287): n is a, c, g, or t
  misc_feature (3289)..(3289): n is a, c, g, or t
  misc_feature (3291)..(3291): n is a, c, g, or t
  misc_feature (3293)..(3293): n is a, c, g, or t
  misc_feature (3295)..(3296): n is a, c, g, or t
  misc_feature (3301)..(3304): n is a, c, g, or t
  misc_feature (3306)..(3306): n is a, c, g, or t
  misc_feature (3308)..(3308): n is a, c, g, or t
  misc_feature (3316)..(3316): n is a, c, g, or t
  misc_feature (3318)..(3318): n is a, c, g, or t
  misc_feature (3320)..(3321): n is a, c, g, or t
  misc_feature (3324)..(3326): n is a, c, g, or t
  misc_feature (3335)..(3335): n is a, c, g, or t
  misc_feature (3337)..(3337): n is a, c, g, or t
  misc_feature (3339)..(3341): n is a, c, g, or t
  misc_feature (3348)..(3349): n is a, c, g, or t
  misc_feature (3352)..(3354): n is a, c, g, or t
  misc_feature (3358)..(3361): n is a, c, g, or t
  misc_feature (3365)..(3365): n is a, c, g, or t
  misc_feature (3367)..(3371): n is a, c, g, or t
  misc_feature (3373)..(3374): n is a, c, g, or t
  misc_feature (3377)..(3379): n is a, c, g, or t
  misc_feature (3381)..(3381): n is a, c, g, or t
  misc_feature (3383)..(3383): n is a, c, g, or t
  misc_feature (3386)..(3386): n is a, c, g, or t
  misc_feature (3388)..(3388): n is a, c, g, or t
  misc_feature (3391)..(3391): n is a, c, g, or t
  misc_feature (3394)..(3394): n is a, c, g, or t
  misc_feature (3397)..(3397): n is a, c, g, or t
  misc_feature (3407)..(3411): n is a, c, g, or t
  misc_feature (3417)..(3417): n is a, c, g, or t
  misc_feature (3419)..(3420): n is a, c, g, or t
  misc_feature (3422)..(3425): n is a, c, g, or t
  misc_feature (3427)..(3428): n is a, c, g, or t
  misc_feature (3434)..(3434): n is a, c, g, or t
  misc_feature (3443)..(3443): n is a, c, g, or t
  misc_feature (3451)..(3451): n is a, c, g, or t
  misc_feature (3457)..(3457): n is a, c, g, or t
  misc_feature (3460)..(3460): n is a, c, g, or t
  misc_feature (3462)..(3463): n is a, c, g, or t
  misc_feature (3467)..(3467): n is a, c, g, or t
  misc_feature (3469)..(3469): n is a, c, g, or t
  misc_feature (3472)..(3472): n is a, c, g, or t
  misc_feature (3474)..(3474): n is a, c, g, or t
  misc_feature (3479)..(3480): n is a, c, g, or t
  misc_feature (3482)..(3482): n is a, c, g, or t
  misc_feature (3487)..(3487): n is a, c, g, or t
  misc_feature (3493)..(3494): n is a, c, g, or t
  misc_feature (3506)..(3506): n is a, c, g, or t
  misc_feature (3508)..(3508): n is a, c, g, or t
  misc_feature (3510)..(3510): n is a, c, g, or t
  misc_feature (3513)..(3513): n is a, c, g, or t
  misc_feature (3523)..(3523): n is a, c, g, or t
  misc_feature (3525)..(3525): n is a, c, g, or t
  misc_feature (3527)..(3529): n is a, c, g, or t
  misc_feature (3534)..(3534): n is a, c, g, or t
  misc_feature (3537)..(3539): n is a, c, g, or t
  misc_feature (3541)..(3541): n is a, c, g, or t
  misc_feature (3546)..(3546): n is a, c, g, or t
  misc_feature (3549)..(3549): n is a, c, g, or t
  misc_feature (3553)..(3553): n is a, c, g, or t
  misc_feature (3556)..(3556): n is a, c, g, or t
  misc_feature (3562)..(3562): n is a, c, g, or t
  misc_feature (3564)..(3565): n is a, c, g, or t
  misc_feature (3567)..(3567): n is a, c, g, or t
  misc_feature (3569)..(3571): n is a, c, g, or t
  misc_feature (3580)..(3580): n is a, c, g, or t
  misc_feature (3587)..(3587): n is a, c, g, or t
  misc_feature (3589)..(3589): n is a, c, g, or t
  misc_feature (3594)..(3594): n is a, c, g, or t
  misc_feature (3598)..(3598): n is a, c, g, or t
  misc_feature (3600)..(3600): n is a, c, g, or t
  misc_feature (3604)..(3604): n is a, c, g, or t
  misc_feature (3606)..(3606): n is a, c, g, or t
  misc_feature (3608)..(3608): n is a, c, g, or t
  misc_feature (3610)..(3610): n is a, c, g, or t
  misc_feature (3612)..(3612): n is a, c, g, or t
  misc_feature (3618)..(3618): n is a, c, g, or t
  misc_feature (3620)..(3620): n is a, c, g, or t
  misc_feature (3622)..(3622): n is a, c, g, or t
  misc_feature (3625)..(3626): n is a, c, g, or t
  misc_feature (3628)..(3628): n is a, c, g, or t
  misc_feature (3636)..(3639): n is a, c, g, or t
  misc_feature (3649)..(3649): n is a, c, g, or t
  misc_feature (3651)..(3651): n is a, c, g, or t
  misc_feature (3655)..(3655): n is a, c, g, or t
  misc_feature (3661)..(3661): n is a, c, g, or t
  misc_feature (3663)..(3664): n is a, c, g, or t
  misc_feature (3675)..(3675): n is a, c, g, or t
  misc_feature (3679)..(3681): n is a, c, g, or t
  misc_feature (3685)..(3685): n is a, c, g, or t
  misc_feature (3687)..(3688): n is a, c, g, or t
  misc_feature (3693)..(3694): n is a, c, g, or t
  misc_feature (3697)..(3697): n is a, c, g, or t
  misc_feature (3699)..(3699): n is a, c, g, or t
  misc_feature (3710)..(3710): n is a, c, g, or t
  misc_feature (3712)..(3712): n is a, c, g, or t
  misc_feature (3716)..(3716): n is a, c, g, or t
  misc_feature (3720)..(3721): n is a, c, g, or t
  misc_feature (3730)..(3730): n is a, c, g, or t
  misc_feature (3734)..(3734): n is a, c, g, or t
  misc_feature (3739)..(3739): n is a, c, g, or t
  misc_feature (3742)..(3742): n is a, c, g, or t
  misc_feature (3751)..(3751): n is a, c, g, or t
  misc_feature (3754)..(3754): n is a, c, g, or t
  misc_feature (3774)..(3774): n is a, c, g, or t
  misc_feature (3779)..(3780): n is a, c, g, or t
  misc_feature (3787)..(3788): n is a, c, g, or t
  misc_feature (3790)..(3790): n is a, c, g, or t
  misc_feature (3798)..(3798): n is a, c, g, or t
  misc_feature (3802)..(3802): n is a, c, g, or t
  misc_feature (3805)..(3805): n is a, c, g, or t
  misc_feature (3808)..(3808): n is a, c, g, or t
  misc_feature (3816)..(3817): n is a, c, g, or t
  misc_feature (3820)..(3820): n is a, c, g, or t
  misc_feature (3825)..(3826): n is a, c, g, or t
  misc_feature (3828)..(3828): n is a, c, g, or t
  misc_feature (3830)..(3831): n is a, c, g, or t
  misc_feature (3833)..(3833): n is a, c, g, or t
  misc_feature (3839)..(3839): n is a, c, g, or t
  misc_feature (3849)..(3850): n is a, c, g, or t
  misc_feature (3854)..(3854): n is a, c, g, or t
  misc_feature (3864)..(3865): n is a, c, g, or t
  misc_feature (3868)..(3868): n is a, c, g, or t
  misc_feature (3874)..(3874): n is a, c, g, or t
  misc_feature (3877)..(3877): n is a, c, g, or t
  misc_feature (3882)..(3882): n is a, c, g, or t
  misc_feature (3886)..(3886): n is a, c, g, or t
  misc_feature (3890)..(3890): n is a, c, g, or t
  misc_feature (3898)..(3898): n is a, c, g, or t
  misc_feature (3900)..(3900): n is a, c, g, or t
  misc_feature (3904)..(3904): n is a, c, g, or t
  misc_feature (3916)..(3916): n is a, c, g, or t
  misc_feature (3925)..(3925): n is a, c, g, or t
  misc_feature (3985)..(3986): n is a, c, g, or t
aaggagatgctcattattccttggtctacccaagagcctctttttatggctgcaattatccccgcaggaacaccaataatgagggcaaataagattgcacagactccaagctcagcagtagcaggaaatagctcaaaaaactcctcaacgacaggcctattcgtgattaaagaggtgcccaaatctccatgaagtatgtcagtcaaatagtttagatactgttgccatatcggcttatcaaagccaagttgtgcgagaagttcagcgtgtctttctgtactcagtcctctttcaccagcaagaacctcaactgggtctccaggaagaaccctgataaagccaaaggcaaccagcgtgacgccaaagaatactggcaccagcaacattagacggttaattaaaaagcgaagcatagttactttgtgtgtggcttaaattggtaggctaaatagctactaaaaaaacacgtagctattaggtctaacaacttaaatataaattgacgcggatattagatatccgcgtcaaaatgttatttattttaggtcgacaccatcataaaagatgtggcttccaagtgggtgaactttaaatcctgtcacttcagcgcgaacaggtttaaatgcaactgagtgcgcaatagttacccatggtgcttcctctttgaagatctcctgtgctgcttcatataaaacagttctttcagcttgatcagttaactgtcttgcttcatttaggagagaatcaaattcctcatggcaccagcgtgcacggttaccaccagatttggcagcggcacaacctaataaaacacccatgaagttgtctggatcaccattgtctccagtccaacccaataacactgtgtcgtgttcgccagcatttgagcgcttgaggtactcaccccactcaaatgtaacaatttcagcgtcaacacctacagcagcccagtcagcctgaattagttcagccatacgacgggcgttagggttataaggacgctgaactggcatcgcccagatatttgtcttgagtccacttacaccagcggcgtctagcattgattttgcaccagctggatcataagcgtaatctctaaccgcatggttataagaccacatggttggtggaattgggttttttgcaacagagcccgcaccctcaaaaacgatatccaagattgcttgcttgttgatagccatgcttagagcttgacgaaccatcttttggtcaaatggcgccttctcagtgttaaatgctaagtaaccaacatttaagccttcttgttctaggacattgatttctggatctgcctgcatctctgcaacatcagcagggttaggataaggcatcacgtgacattctcctgccttaagtttttgataacgaacactagagtcagtagtgatagcaaaaactagcttatcaatgttagatctaccgtcccaatagtcatcaaaggcttcataacgaatcattgaatccttcttgtaagacttaaagacaaatgggcccgtaccaactggtttgaagtcaatatcagcttgattcccagaggcagtcaaattgtctgcatactcagctgataatattgaagcaaagtccatagctaaatttgaaacaaaaggtgattcaggcttagtcaaagtgaacttaactgtatggtcatcaattttatcaatggacccaattaatccatccatacccatccatccaaaatacaagtgctctccacctacagcataataaggatgatctttatcccactgtctgttgaagctaaacatgatgtcatctgcgttaaagtcacgagttggagtaaagtaaggtgttgaatggaacttgacacctttacgtaagttaaacgtgtactctagtccatcatcagatgcagaccaagattcagctaaaccagggattacttttgttgtgcctgtctcaaactggacaaggcgattgaaaatagtttgtgaagaagcgtcaaangtngtnccggctgagtaaagcgaaggtgtaaagccttcaggacttccttcagaacaaaaaaccattgttttggcttgtgctactccacttaatgccatactgagaccaagcccagcggcaagtagtgattttttcatatatttctccttaatttaatacctagtctggctaggttatagaattgctaaacaaaaaaancnannnannaaaannnttnntngntttnnnnnnannnnnnnnnnnnnaaaaannttngnnnangnnnttnnnntnntnnnannnnnnnnnnnnnnannaannnnnngnnantnaancnncnaannnnannnannttnaantnantnnnnnnnnnannnntnannnnnnnnnncnnnaantttnnnnnnnannnnnnnnnnanggnnntttnaannnnnnnnnngnannnnncnaannnnnnnnanncntnnnaanngnaannntnannaaannnnnnnnncnnncnnnnnnnngnnnttnnnannnnnnccnannntttnnannnnnnnannnntnnnccnnnangnnnnnannnnnnttnannnntnnnnnnnnannnannnnnnnnnnnnnnnnttttnggnnnnnnnnnngnnannnnnnaaaannnnnnttnaancnangncnnnnnnnannnnnnnnnannaaannnnnnnngnnnnnnntnannngnnnnnnnncttnnnnnnntnanttnnnnnnnnnntnnaaaaaannnannnncctncaantngnnncnnnannncnannantncnccannanntnttnnnnnnnnttngngntngnnnncnnntnnaannnnttnncnncnnnnntnangtnnnannnnncccaaggnnnnaccaaaaaannnancaataattncnanatnnaaaatantnntnccnatttttnacnttttnttttntngnanttnnnntnaannnnttttncangnnnantnntcccnnnnnaannnnnnccnnnnncctaatnaaaaaatggttncnnnnannnnnngnnaaancccnaatnnnaaattnngnaatnntnnnntnnnnnnaggntcctttnannnnnnnnngnnntacnngcccnnttttnaagaanttttnntnnntnnncaaatngactnnttnctttannnaanntttttnnnnngntttttanaatcttanttnnatcnnccnaaaaanccccngnntcatgntcntnaannnntnntnnnnnntcnaatangannggtnannagtcangtntttnnccnngnttcnnnnnaaaaccctcntttttnaagtnnncntntnantnnataannnntngncctctttncntnncannnccaaaaatntnannngttaaannaannntatnnnncggngnnnnntnnaannncntnacntnttnctnttnaatttcaatnnnnntttgancnntnnnncnnttaatnaacgttaanaaggattntttttntgnannattnanttngnagganntntcaangatttnnattaactcatcnanantcncaataatctntngnnnagganaannnantaganttnatanaantttatntnntntnnnaatggcctnatttgcncntattntttnanattntntntncnggaatnancnaanntnttcggggnnnngggaaaaggntnaaancttttncnncctttgagccntaannncttnannttccnnctntnaacccgtttanancttnaaanncataagggncttngtttntgntttcttcangcnatgtaggaataacaaagcgntcctnntaatttnntnttccaagntagnggnacntttcttcnnccncctcnnancnnancccagnatcacttagnncggncaaaaccttnntgncgtgcnctnttttntttntttnatgggctngnatanccagaagtttanttattgaantcaggatgggcttttcatctccagctgtaaacatattggcaaggtattgagctggcaggnncaaggaatttgctg

SEQ ID NO: 1329 - DNA, 4000 bp, Escherichia coli
  misc_feature (532)..(532): n is a, c, g, or t
  misc_feature (741)..(741): n is a, c, g, or t
  misc_feature (786)..(786): n is a, c, g, or t
  misc_feature (1041)..(1041): n is a, c, g, or t
  misc_feature (1175)..(1176): n is a, c, g, or t
  misc_feature (1332)..(1332): n is a, c, g, or t
  misc_feature (1989)..(1989): n is a, c, g, or t
  misc_feature (2890)..(2890): n is a, c, g, or t
  misc_feature (3184)..(3184): n is a, c, g, or t
  misc_feature (3603)..(3603): n is a, c, g, or t
  misc_feature (3621)..(3621): n is a, c, g, or t
agcagcattcgttagttcgattgcttctgcgcaaatatcgtacgataactcaaaaacagacgcctttggtgccggttacgtgcaagatggtaatgccaaggttgctccaggtggttccgctgtcagagctaatgacatcatcattaagcagacaggaactagtactaagctgattcctcaagacgccaaaatcatcattcgtttgcctaaaggcttgaattttgatggcagcccaagcttcctggtcacaccagcgacgcctactttaggcctcacgctgaaggacacaagtgaatttggtgatcctacattggatgatccaaaagttgagctgttcgacgccaataatgacggcggcatggaccgtgctgtagtcactgccgctgcagcagcaggtcatggcgattcgttgactatcagcataaatctgactgctgatgcgactgccaccaaaggtgctaaaaaagcatctgtaattgttaatggcggattggccgcaacccagtacgttgttgaagttgttgaaggtttnacagagccggttttctcggcttcaggtaaaagcctgacgtcgattgaccagagtcaacagacagcctctgttacttctgctttgttcacagtaacagtgcctaagggaacagctaataaagctaaacttacgtttactccacagtcaaaggtcaaattctcccctcagggaacgaccattacttatactgtaaacactcctcttacgangtacccatttaccgctgtttctagcactggtaccttcgcggctgntactggcacgccgtcattgtcattgactgtgtcaggtaccactactgctgatgtacaagtaacgttcaaagtttctcaggtacaatctgaggctggtggcagtactggtactcgtggcttggtgctttctggtgcagtatcaggtacagctgctctggttgatgtcaaagcaaatggctcttctgcagcgcttaccaaaggtacaaaagcagctcctaacaaaattaaggaaattgtagctggtagctctgttangcaaaccctgccaacgattgatatcactgaaaactttgatggtgatgcagttggatatgttgctgctggaaaaactggaacaattactcttactccaggaactggtttgaaatttaaaggtacaaatacaattnnagtaacaggcactggttggaccctcgaagcaccgagcgcatctattagcagcacaacaggtaaattaacactgtatttaggtaatgctactaatacagctggtgttggttctttgactgttactatttctggtataggagctacagctgacaaaancgcaactggtgacttgtcactgactgttggttcacccggtaacccagacaagtctacagcgcctagtaataagcttgtagtagcgaaggccactccacttggaactgtagatgttgctggtcctaagactaaagacctcaagacaactggccctggtggtgcagctgttacatcaactattacctttaaggaaactacttatggtgctctgacaacatcaaataagactgatgttcaggatgcttactttaggttgactcctacgaaggaaggttctatcaaggctgttactatcagcttcagtggctatcctagtggagctgctacacctactattagtgcatgttctgcagaaaataatgtaaccactggtgcatggatctgtaaaattacagctgagtcctccggtgttactgctggtacaagtactattagtgtgaaggtaaattactctgctggatccaagttcccagtaggtactacattggctatgaccattgatggtaattcaggtgtcagtggtactgttgatgtagctaatgttggtatagcaacttctgcaaaagcaggtgcaatcactgatgttaagccaggtgccacagaagcgaaggatttcgccaaagtgactatcactcctaaatatactaatgctattangcaaagtagggagttcaggttgcttgcgcctcagggtgtagctttccagaatgcttctgctacggctacagctagccctggtattgctacagcaaccattaccgcgacattcaatccgaatgacacgttggttatgactacgaagacaactgctacagtagtatttacaccgaaaggtattcttactagcggtaacaccggcttccagtcatttaccttggtagacggtaatattgatggttcacgtaaatctggtattactggtgaatctatcatcctagcttatggtgacggtactctgaaagctctggatgccggtgctaatggcagtgtaaatgtaggattccctgttaagaacactgttactggtggtcttaatattacggactacgtttacacagttaaatcaagtgatgccactattggctcaccaacaatcagcggtgatgtagttacagtacttggcaagaaaacaggtaatgcaactattaccgtaacagatggactgggtgctactgacacttacgtagttactgtaagcgatgctattgctcagcccgatgctgaaaaagcggcgaaaactgctgatggttctacaaccactgcaaccttcaaagctggtgcatctagcgatggtggtgccacatacgccactgaatttaccactgctgacgatgtcacactggtaggtacggtgaatgtagatgctgctgaccagggtaaagatggtgaagtctacatcgctattctgtctaaactggataacggaagctccatcctcgcctatatggatgagactggttctccgcagacttgggacggcacagttgctggccttggtgccaacgttgtagcaactccgcttgctgatacctataacctcacaatcttcagcggcacnctgggtgccggtactcacagggtggctctggcatactctactgaagacggtgatatcgtttatagtggtaaagcaatggtaattactgttaccgagtaatatcagtaagtagtattaaaaacggcaccttcgggtgccgtttttttttgtatggaatgcataaatacgatattgcgcaggtctaaaatgataatattccaactcttaaatattattgaaatgttagctaaagcatgaaaattaaagtctttgaacttatagcgtttgttatttcattcttctttaaccaggtgnttgcccaggatcttgatctatttcaggcggttgattcgccggaggagggtgaaaataacagccgtagggcacaaagaaatgaacgtgtgcgctcctcgccagcttttacattggtaggaactagccgttttggtgataactatgtagcgtcattaaaatccagagatggaaattctgtaattgttgaatgggagaaggacttaattaaagaaatccagggttttagtggatacggtttggttaatgttcaaagtcgtaaggtggcaatacgcttaccagaagatgatccatgcataccagctaaagacaaaggagttcaatgcaatggtgaacttgcaatactcactttaagtaacgcacaacctactgaaccgactatggaatctgaaacatcagttgtagagccaacagataatgangtttccggctcagatganaatgaggtaattgacaatgatcagaacgaaacaattacttttaccaatccatttaccggggaagaagaggaaaggcctgcattaacacctgaagagcaagctgaaagggaagctcgtcgacaaaggcgtgcagaacaattcaggaattttgaaatagtacgcataccagacaatgaaattcctgaaggaatgcaaagaatcagaacaccttttggcgatcgtctagaacctgtagaagagtaatatagagtttgttaagtatttctattgttacttataaaacagaaatagaaacaattgcacgcttaatagattccctgaaagtagcaattggaatattacctaccaattataaagtcgataagatttcatttgttga

SEQ ID NO: 1330 - DNA, 4000 bp, Escherichia coli
  misc_feature (1985)..(1985): n is a, c, g, or t
gttttctatgaacgtattgattattaattgctgatttaaatattactgttatttaatattattttcaaaaaaaagcataaaagaaaataattgaaaataatttttagttatataatctcattcacaaattaactttaagaaggaaatttaatttttgaatattaattttttttattccatcattaagaggatgtaaacttgctaataattgcgaacaattatttcaacaagcttttaatgatgctgttgatatagctaatgataaaactttaaatttagatagttataatatttttttacctttatttgataattcaaatttacctaatcaaaataataacacaaaataataacaatcaaccaaatgcaaataataatcaattgaaactgataatcttgatattattaatgatataagaaattatgattttgaatttcatcctgatcttaatggtcttgatactattataaccaagattatatatgttgaataacaattaagaaattttgactataatacacttcaaaaaatttgaagaagtaaatagctataaatcttattgaaaaactgttattttttaaagaaatttaataaaattaaaaaaaaataatcataaaaatatttatttttttattttattttattttattttttggattttctttattcctttattttattaaaatttaatacttgtaattatattaagcaataacgatatatatattaatgaagttcaaaaaaatatatatgtataattttattaataaaatataatagttgataaattaacaattacttattattatttattataattaaccataataacaaaaaaatataataataataataatggttgttgtaataacaataaataatttatttataatataaattattttaatttttaatttatattccattttatgaatacatttgttagataacgtatttaatatttaatgtagattgtttgttgtgaatcattaaaaatatattatattaatgtattgtataatattaattggttgattttattaaaaaggaatgattgaaaatacatacagaaaatgaattaatcaaatagtttaattataaatacattaattttattggttgatcaatattacaaataataatattataataattataaatataaataataattaaataattaaataattaaataatggaataattaaataatggaataataaataattgaataataaataaatagataaataaataaatagataaatatataattaaataataaataataaataataaatagtaaataataaataataatgaataataaataataaataattaaataataataaataattaattcaaccttttaaataattaatttttataatattttaaaataaaataatataataaaaaaaaaaaactgacagacgaaatagataattttatatttataatatttaataaaataaaaaaaatataaaaaaataaaatcgaaagaaaatagttatattttttattatattttacaaaaaagacaatggaaagaaataactacttgtttatttttataatattttaaaacataaaagaatacgaaagaaaaacataattttatttttttaattttaaaaaaaaaaaaaatatatatatatatatatatatatatatttatataattacaatattttaaataaaacttttttttggtaagataataagagcatgtaaaaaaaaaagaatatatatatggttacaataatttagctttgtttactaggaagagaatattcaataaatatatatatatttataataattttaagtctatggtatatttatttatatatatatagaatataattatattaaataaagttgattagtgaacaattaaggaaaaaatttatatttaaaatattatgaatataaaatattttgtttctttagtcattttttatttttttttttttttttntataacttaaataaaaaataaaaaataaaaaataataatatatatatatttattatttttaaatacattgataataagaataaactttgttatatcttgtataaatctcaaaaatttataaagtaacgaaaagaaaaatataagagcaaaaaatacgaataaaaggaaaagaaatagaaacaaataacacagaataaccaaaatttaaagtaataataaaaataaaaaattaaattgtaaacaaaagtttttttttttacacatatttaaaatgtaaaataaaattgaaataaacacatgtatagaataaaatattttgataataaagttcgactataaatattacaaagttgaaattaaatcgaaatcttttgaaggaagaataaaaatattttacatgtactaaaatatgatattaaacatgaaaatatggtatcaaaaatgaaagtagtaaacttaacaaaaaaaataattaatttataaacatatcaaacttatactacataaaaaattaaattaataatattataaataatataaaaaaataaaatcaaaataagaatttcaattgaaataaataaatataaataaacttattattttaataatttatatgtagaattgttgaaaaatattaatataattattatatttaattttaaagaattacttgtgttgtattctaatatataattttaattgtataattattttaggttaataataatagagattgaaaattaattaaaacaaaatgaaatacgattatgatgaaacaggagctaactttagctactttatattatcacttttaattcttttccttgttccatacacaatatattgtattaagaatcttggaggtattttattgttaaataataaaataatacaactaaaaattaaaaaagaaaaaaaagaaaaaagttttttaagaaaaaaatattcaataaaaatttaaaaaaaaaagtttctaaaagaaaattaataattaattatatattttaataggtaagaaaggacaatcaggtcatacagaggtattattaaatgaaaagaaaaaagcaagattaaacgcaaaaaaaagtgataaatcttcaggtttaaggtatataatgaaatttaaaaaattttattttttggctgtaattatttacaattttttttttttaatttatagatatgtattattaattggtggttggattttacttggattactagtttataaagtaatgaatactgaagttgattatgtcgaatgggatccttatcaaattatggaattaaagaaggtatattacaactattatttaatgcttgtttacataagatattaatatatatattttttatttttccttttttttttttaaaaaaaaaataataaataaattttatagtcagcaactccagctcaaattaaaaagcaatataagttacttggtctcaaatagtaaatattattttataataaaatttttaaaaaaaaagttctgttgaaaaaaatcataacgataatttaatattaatattaatataatatagtcacccagataaggttgaagaaaaagatagagctactgctgaagatcgttggatcgaaatcactaaagcttataaagtgtaaataatatttttaaaagtggaatattaataaatatttatataatcaataaaaattaattaattagatgcttataccgatttaatgatatttaataatatagtcttaccgatgatgaagctagaagaaactttgaagaatacggtcatccagatggcaaacaatgtaaataatatattatttatattaatatttatggtttgcttattaattaataatttaataaattaaaattaaaatagcattcagcttaggtattgctttaccagcttggcttgctgaatcaagtaattcatttattgtatgtaggctttaaataatatattgaaagaaatttaattatatcaaaatatttaaagtcattaattttttttttttttttttattt

SEQ ID NO: 1331 - DNA, 4000 bp, Escherichia coli
  misc_feature (1361)..(1361): n is a, c, g, or t
  misc_feature (1367)..(1367): n is a, c, g, or t
  misc_feature (1979)..(1980): n is a, c, g, or t
  misc_feature (1983)..(1983): n is a, c, g, or t
  misc_feature (1985)..(1985): n is a, c, g, or t
  misc_feature (1988)..(1988): n is a, c, g, or t
  misc_feature (1990)..(1990): n is a, c, g, or t
  misc_feature (1993)..(1993): n is a, c, g, or t
  misc_feature (1995)..(1995): n is a, c, g, or t
  misc_feature (1997)..(1997): n is a, c, g, or t
ccccatgtagtagtgtatttaatgtagtgagggatgaggttattgaaattggattaacacctaatcgggcagacgccatgagtcattttggtgtagctagagatttaaaagctggtttaaaacaacaaggtatatctaaagaacttatcactccttcagtgatgcagttttctgttgacaataggctttctactattcaagttaaggtagacacaccagaattagctccacgatattctggtattactattagtaatttaacagtaaaggaaagtcctgattggataaaaaacaggcttaaggctattgggcttaatcctattaacaatgttgtggatgcaacaaattatgtaatgcatgaattgggtcaaccactacacgcttttgatttagataaaattgaaggaaaaaaaataatcgttaaaacacttaaggaagggactaattttactacactagacgggattgaaagacagttatcttctgaagatttaatgatttgtgacgcaaaaaaacccatgtgtttagcgggtgtttttggagggcaagactcaggagttagtgaaaaaacatcagctattttcctagaatctgcctatttcaatccagtttctattagaaaatcagccaagaggcatgggctgagcacagatgcctcttttaggtttgaacgaggtattgatattaaccttgtagaagaaactttaaaaagagcagcgctactcattaaagaattaacagggggacaaatcagttcggatattgtagatctatacccgaaaaaagaggaaaattatcaggtgtttttgacctttaagagaatatattcactcataggagaagaaatccctacagacactattaagagtattttaagttcattagagattcgtgtaaacaatgtgacagaatctggactagggttaaccatccctttttatagagtagatgttcaaagagaagtagacgttattgaagaaattttgagggtttatggctacaacaatattcatttctcaaaaaaaataaatgcttctatcgcttttacagatccaaaatcagatcatattattcaaaataaaattggtgattcattagcagctcaaggatttcatgagattttaaccaactccctcacttctcctaagccactacaatatactcaagatattgacctacaacagtcagtaaatatattgaatccattgagtaatgacttaagtatattaaaaacttcaatgttatttacgggcttagaaactgtttcctataatattaatagaaaaacaaatcgtttaaaactatttgaatttggtaagacttaccaccaaatcgaagaaaatagaatagaacataagcanttaagnatcttaatgacgggaaaaaaagctcctgagaattggttaagttcaggtgaaaagtttagcttctttgaccttaaatctattgtagaaaacatattggaaaggttaggtattcaaaaatggaaaatctcaaaagcctcttctgaccttttttcagaaggtataagttacaatggcagaaaggaaactcttgttacctttggggtactctccaataagcttcttaaaaaattagacataaaacaggaagttctttatgctgattttaattgggattcaattcttaaatctcttacaaaagaagcaatgaaatttaaagaaattcctaagtttcctgaagtatctagagatttcgccctattgatcaaaaacaatgtaacttttgaacaggtagctaaaactgctaaaaatactgaaaaaaaatatttaaaagaggtagggttattcgatgtgtatacaggaaataatttacccgaaggcactaagtcttatggtgttaattttatactccaagacccaaatgctacactagaagaaaagcaaatagacaaaataatgcaaaagctccaatctgcttttgaaaaagacttggaagctacgcttagataaaaaaannccntnttnanaangngnttttttttatctaagactatagctgatacattttctctcgttgcaccttaatgtctttatctgacatataatcgtcaaaactcaggtacctatctatgacccctttaggggttatttcaactaccctattggctactgtttgtgcaaattcatgatcatgagtggtcattaataaagttcctttaaaagcttttaaagagttgttaaatgcggtaatactctctaaatctaaatgatttgttggctcgtctaacataagtacatttgcgcgaagcatcatcattctactaagcatacaccttactttttctcctccagacaaaacagtggctttttttaatgcctcttctccactgaatagcattttccctagaaacccccttatgtgtacttcttctctttcctcttcggttttagcccactgtctcaaccaatctaccaaattactttctgttttaaaaaactcagaattatctgctggtaaataggattgattggttgtaacaccccattggtagtggccactttctgcttttttatttccgtttataatttcataaaaagcagaggtagctctggcatctttagaaaaaacaaccaccttatctccctttgcgaggttaagatctactcctttaaacaacaaatcgccatcttcagaaaatgcactcaaattttccacatttaagatttggtctcctgcctctctttctctctcaaaaattattgcagggtaccttctcgaagagggtttaatgtcgtctacttttaattttgaaagcattttttttctagaggtagcttgcttacttttagcaacgttagcgctaaacctcataataaactcttgaagctctttggccttttcttctgcttttttgttttgttgtgccctttgtcttaaagccaactggctactctcataccaaaaagtgtaattacctgaataaaggtttaattttccgaaatcaatatctgcaatatgggtgcagactgcatctaaaaagtgtctgtcgtgagatacaactataaccgtgttttcataatctgccagaaaattttctaaccatgagatggtttcataatctaaatcgttagtaggctcatccatgatcaatacatctggatttccaaataaggcttgtgccaacaatacccttacttttaatttggggtctaaatctgacattaaagtataatgaaaagactcattaataccaagattagagagcattgcagcagcgtcactgtctgcattccaaccattcatctcttcaaattgaacttgcaactcccctattctatctgcgtttttgtcatcataatcagcatataggctgtcaatttcattcttaatatcgaataaaggcttatttccttttaccacagtttcaagaacggtattactgtcataagcgttatgattctgctctaagatagacatgcgtttccctggctctaagtgaacgtgacccgagcttggctctaactgtttggataagaacttcaaaaaagtagattttccggcaccatttgcgccaataatcccgtagcaattgccctgaagaaaggctacgttcacctcgtcaaataatacgcgtttcccaaattgaatggataaattagatactgataacatagaagtatttaaagtttttgcaaaagtattaatttatattttgctgggctttgtttatggctactaataaataagaatagtcataaagcggggtcatattaagaagctagcattaggttttttaacttgaccttaacaatattggctatggtccatttgtacctttgtgtcataggattatttatgaaaaaaggattcttaatattagtctgcgtgttagcatacagttgtggtgtcattgacaagcgcccctctcccgtatattttgggggagaaattgtcaatcctactaatccttatgtggtgttgtttaaagacgaccaagtcattgattctgccaaattagacagaagcaatcgcttta

SEQ ID NO: 1332 - DNA, 4000 bp, Escherichia coli
  misc_feature (752)..(752): n is a, c, g, or t
  misc_feature (788)..(788): n is a, c, g, or t
  misc_feature (1007)..(1007): n is a, c, g, or t
  misc_feature (1031)..(1031): n is a, c, g, or t
  misc_feature (1034)..(1034): n is a, c, g, or t
  misc_feature (3344)..(3344): n is a, c, g, or t
  misc_feature (3428)..(3428): n is a, c, g, or t
  misc_feature (3440)..(3440): n is a, c, g, or t
  misc_feature (3449)..(3449): n is a, c, g, or t
  misc_feature (3602)..(3602): n is a, c, g, or t
  misc_feature (3608)..(3608): n is a, c, g, or t
  misc_feature (3917)..(3917): n is a, c, g, or t
cagtgccgttagcgaaggtgtaggtgtagacggtcttgccgttttcacccttagcgctttcctgacgcataatgcgcgagttctgcaggaacttaaccggcaggttgttagcccaaatgttgcggtagaaggcgctctggtcttggtggccagtccagccctcaaactcaacaatctgggggtagcccaaaactacgttggggttccagttgtccttgttggagttgtccacaaagcggatcacgtcagagttcaaacccttgttggtggcgccgccatagttttcatcattggaccagtgcgaccaggtggagtagcgctcaaagcggtcagcccactctgaacccatttcccaacccatcttgtttagctcgcggcccaggcgctcagcttgccagcccgaaccgtagtaaacgtcaatgtagatccagcggaagttggggtaggtagccagcgggaactggttacgcaggtcttggaaacgcttaattaccgcgccgctacctagatcagcgcgctgatcaacgtagtaggactggtttagccagttccagccgcgcccgccagtgaagggtagggaaccgaaagagttggcttcggggtaggcctcagtggtgttgacgtggacgccgtaaatcgcgttggagttggcggtggtgttaaacagggtggcaaagtccttgtcaccaccggcgcgggtgttgatgttgcccgcgtagtccatgtgtccagagtcgtggccttcagaagcntaacccttgagcatcacgcgctgacctaggccgtcngtagccaggttgacgcgctttacgtcgtcggctacctgcaagaaggggtgcgtggcggccgagccgaagtcaaagggaatatgggttactacccacttgtggttgtcagctgcaccggccacccagggggtgatgtccgcataggcgacggcggcatcctgccagttcaccgtgcccgaggagttggcgtcaccggtgaacaccaaagtggtgtagggncgctcttcatcgccgacggcgtcngtngctgcagctgagcggtaggtccactggccgttggaggccagcagggtcttagaaccatcctggtcaactacccggcgcttccagcgcgaaccgtcgtcagcttcccagccggtggggcggtcataggtggcgttggtttccatacccacggccaccttagaggtgttaaccatcaggtaggtactgggggcgtcagcgtcgctgaccggggtggactcgcttaggctctcaatagtgtcagccacgccagcgtatttgttcttagcgctagcgccacgcgaaaccagggtgataccggcagcgtaggcgccgccgtctttagcgctaaccgataccaggccatggccgggaatctcgacggtgtgggcgccaccggtgagctcagtgatacggaaggttagggtgggacgcttggcaccagttgtgccctgggcctttgaagtaatctcctttacttcaatttcggccttcatggtgacgtcagtgtcattgaagtcaaccgtgtaggccaccttggtgttggattctttaactgcctgcaccgacttgacggtgtaagcctgattgtcaatcagtactgaatcgaggacctgggtgcggccgccaactttattgcccgcgaaggtgtagccaagtacctgggggaaggcgttggatacggtcgcggtcaagttaccggcgctaatggtctccggagcactaatgacaccagaagtttccggggtcactgcgccagcagctgcccctggaagggatagggcgacaacccctagcaatgctagggaccgtcggtggaggtgtcttaccttcatcgtgtagggctcctttgcctagacgtggttgacccaattttgtccttttgcaacaaaaagcgtcaagtctaagcagaaccgaacagcataagttgcaaccaaacagttacaaatctggtttgagctaataatttaactagcgcctactgcgcgcatttgttcgtttattgtaaagactgttttgcacacaaaccgaaaagcttggggtagtccatgtaccacagcttcattgccgcctgtacatgggaacaccgccgccagtgagcaacacgcactatagccagggtgatgagctagctataacggaacactcgcagtagcggcggtgcggcgatagattaccttggtttttactagtaattccagtacctaaacctcattttttgcactttcttttaggccaaaagtgtttctgcaggccagcaagttacaagtagtcgcaaatcactttatatgtgggctaattaactaaaaacggtgctgagcgggtctaaacccacccagcaccgtcgaattagttaaaagcgcaggtcactccgcactggcggcgctagcagccgaaccggccacagccgcaccgggaattagcgtcagaccgtcgtcggcaacgtcaaccgtaacctgctggccgtcagcaacctggccggccaagatcaggcgggccaagcggtcaccaatctcacgctgcaccaggcgacgcagcgggcgagccccgtaagccgggtcgtagccctcgtcagccagccaagtgcgggcggcgtcggtaacatccaggctgatgcggcggtcagacagacgcttgctcatcttgcttagctgcaagcccacaatctggcccaactcatccttgctcagcgcattaaagatcagcacatcgtcaaggcggttgaggaactcaggcttgaaggcggcgcgcaccgtagccataacgttctcgcgcttttcctcctggctcagcgccgggtctaccaggaactggctacccaggttggaggtcaggatcaagatgacgttacggaagtccaccgtgcgtccctggccgtcagttaggcgaccgtcgtcgagcacctgcagcaagatgtcaaagacctcagggtgggccttttccacctcatctagcagcaccacagagtaggggcgacgacgcaccgcctcggtcagctgaccgccctcttcgtagcctacgtacccgggaggggcacccactaggcgcgaaaccgagtgcttctcggagtattcgctcatgtcgatacgcacaatggcgtgctcgtcatcgaagaggaactcagccagggccttggccagctcggtcttacctacaccggtggggcctaggaacatgaaggaaccggtggggcggtcagggtcagaaaccccggcgcgcgagcggcgcacagcgtcggccacagccgcaaccgcgtccttctggccgattaggcgcgagcctacctgctcttccatgtgcagcagcttttcgctttcgccctgcatcagcttncctaccggaatgccggtccaagaagagataacctcagcgatctcctcagggccaaccttctcagcgatcatcggctcgccagcntcaggctggttntgctcactngcttcagcctcagcgatttgacgctgcaagctgggcatttcgccgtagcggatacgtccggcggcctcaaagtcaccttcacgctcagccagttcggcgcgggtacgcagctcatctagctgggcgcgcagctcaccgatgcggttgtgaccngccttntgggcttcccagcgggcgtttagggcgctgagttcttcgtttaggtcagccaggcgggcacgcaaggcagccaggcgctctgccgcgccggcgtcggcctcatcttccttggcgctggaatcagccaggtaggcttcttccatctttaggcggtctacgcgacggcgcagctcgtcaatttccaccggggaggagtccagctccatgcgcaggcgggaagcagcctcatcaaccaggtcaatggccttgtcgggcagttggcggccggtgatgtagcggtctgacaggctggcggcagccaccagggcnccgtcggagatggtcacgtggtggtgtgcctcgtacttgggggcgataccacgcaagatggccacggtgtcagccacggaggg

SEQ ID NO: 1333 - DNA, 4000 bp, Escherichia coli
  misc_feature (29)..(29): n is a, c, g, or t
  misc_feature (40)..(40): n is a, c, g, or t
  misc_feature (88)..(89): n is a, c, g, or t
  misc_feature (91)..(91): n is a, c, g, or t
  misc_feature (94)..(94): n is a, c, g, or t
  misc_feature (96)..(96): n is a, c, g, or t
  misc_feature (101)..(101): n is a, c, g, or t
  misc_feature (103)..(105): n is a, c, g, or t
  misc_feature (107)..(109): n is a, c, g, or t
  misc_feature (111)..(111): n is a, c, g, or t
  misc_feature (117)..(117): n is a, c, g, or t
  misc_feature (119)..(119): n is a, c, g, or t
  misc_feature (123)..(123): n is a, c, g, or t
  misc_feature (125)..(125): n is a, c, g, or t
  misc_feature (128)..(128): n is a, c, g, or t
  misc_feature (131)..(131): n is a, c, g, or t
  misc_feature (133)..(133): n is a, c, g, or t
  misc_feature (135)..(138): n is a, c, g, or t
  misc_feature (141)..(141): n is a, c, g, or t
  misc_feature (143)..(145): n is a, c, g, or t
  misc_feature (147)..(147): n is a, c, g, or t
  misc_feature (149)..(149): n is a, c, g, or t
  misc_feature (158)..(158): n is a, c, g, or t
  misc_feature (160)..(160): n is a, c, g, or t
  misc_feature (162)..(165): n is a, c, g, or t
  misc_feature (171)..(174): n is a, c, g, or t
  misc_feature (178)..(178): n is a, c, g, or t
  misc_feature (180)..(181): n is a, c, g, or t
  misc_feature (185)..(186): n is a, c, g, or t
  misc_feature (188)..(188): n is a, c, g, or t
  misc_feature (190)..(190): n is a, c, g, or t
  misc_feature (195)..(196): n is a, c, g, or t
  misc_feature (198)..(198): n is a, c, g, or t
  misc_feature (201)..(201): n is a, c, g, or t
  misc_feature (208)..(210): n is a, c, g, or t
  misc_feature (214)..(214): n is a, c, g, or t
  misc_feature (216)..(216): n is a, c, g, or t
  misc_feature (218)..(218): n is a, c, g, or t
  misc_feature (220)..(221): n is a, c, g, or t
  misc_feature (224)..(225): n is a, c, g, or t
  misc_feature (230)..(231): n is a, c, g, or t
  misc_feature (234)..(239): n is a, c, g, or t
  misc_feature (242)..(243): n is a, c, g, or t
  misc_feature (245)..(248): n is a, c, g, or t
  misc_feature (251)..(256): n is a, c, g, or t
  misc_feature (260)..(260): n is a, c, g, or t
  misc_feature (262)..(262): n is a, c, g, or t
  misc_feature (266)..(267): n is a, c, g, or t
  misc_feature (269)..(270): n is a, c, g, or t
  misc_feature (272)..(272): n is a, c, g, or t
  misc_feature (274)..(274): n is a, c, g, or t
  misc_feature (276)..(276): n is a, c, g, or t
  misc_feature (280)..(280): n is a, c, g, or t
  misc_feature (282)..(284): n is a, c, g, or t
  misc_feature (286)..(288): n is a, c, g, or t
  misc_feature (290)..(292): n is a, c, g, or t
  misc_feature (294)..(295): n is a, c, g, or t
  misc_feature (299)..(300): n is a, c, g, or t
  misc_feature (303)..(305): n is a, c, g, or t
  misc_feature (307)..(307): n is a, c, g, or t
  misc_feature (310)..(311): n is a, c, g, or t
  misc_feature (313)..(314): n is a, c, g, or t
  misc_feature (317)..(317): n is a, c, g, or t
  misc_feature (319)..(319): n is a, c, g, or t
  misc_feature (321)..(321): n is a, c, g, or t
  misc_feature (328)..(330): n is a, c, g, or t
  misc_feature (333)..(334): n is a, c, g, or t
  misc_feature (336)..(338): n is a, c, g, or t
  misc_feature (342)..(346): n is a, c, g, or t
  misc_feature (348)..(348): n is a, c, g, or t
  misc_feature (352)..(352): n is a, c, g, or t
  misc_feature (354)..(354): n is a, c, g, or t
  misc_feature (356)..(359): n is a, c, g, or t
  misc_feature (361)..(361): n is a, c, g, or t
  misc_feature (363)..(367): n is a, c, g, or t
  misc_feature (369)..(369): n is a, c, g, or t
  misc_feature (375)..(376): n is a, c, g, or t
  misc_feature (378)..(379): n is a, c, g, or t
  misc_feature (383)..(384): n is a, c, g, or t
  misc_feature (387)..(388): n is a, c, g, or t
  misc_feature (390)..(390): n is a, c, g, or t
  misc_feature (393)..(393): n is a, c, g, or t
  misc_feature (395)..(396): n is a, c, g, or t
  misc_feature (398)..(398): n is a, c, g, or t
  misc_feature (403)..(403): n is a, c, g, or t
  misc_feature (407)..(407): n is a, c, g, or t
  misc_feature (409)..(409): n is a, c, g, or t
  misc_feature (412)..(415): n is a, c, g, or t
  misc_feature (420)..(420): n is a, c, g, or t
  misc_feature (422)..(422): n is a, c, g, or t
  misc_feature (426)..(427): n is a, c, g, or t
  misc_feature (431)..(431): n is a, c, g, or t
  misc_feature (435)..(435): n is a, c, g, or t
  misc_feature (437)..(437): n is a, c, g, or t
  misc_feature (439)..(440): n is a, c, g, or t
  misc_feature (443)..(444): n is a, c, g, or t
  misc_feature (447)..(449): n is a, c, g, or t
  misc_feature (451)..(451): n is a, c, g, or t
  misc_feature (453)..(455): n is a, c, g, or t
  misc_feature (457)..(458): n is a, c, g, or t
  misc_feature (460)..(461): n is a, c, g, or t
  misc_feature (463)..(463): n is a, c, g, or t
  misc_feature (467)..(467): n is a, c, g, or t
  misc_feature (471)..(475): n is a, c, g, or t
  misc_feature (477)..(480): n is a, c, g, or t
  misc_feature (483)..(484): n is a, c, g, or t
  misc_feature (487)..(490): n is a, c, g, or t
  misc_feature (493)..(501): n is a, c, g, or t
  misc_feature (507)..(507): n is a, c, g, or t
  misc_feature (509)..(510): n is a, c, g, or t
  misc_feature (512)..(512): n is a, c, g, or t
  misc_feature (514)..(515): n is a, c, g, or t
  misc_feature (517)..(518): n is a, c, g, or t
  misc_feature (522)..(523): n is a, c, g, or t
  misc_feature (527)..(528): n is a, c, g, or t
  misc_feature (533)..(541): n is a, c, g, or t
  misc_feature (544)..(544): n is a, c, g, or t
  misc_feature (548)..(548): n is a, c, g, or t
  misc_feature (550)..(551): n is a, c, g, or t
  misc_feature (553)..(553): n is a, c, g, or t
  misc_feature (556)..(558): n is a, c, g, or t
  misc_feature (561)..(569): n is a, c, g, or t
  misc_feature (571)..(576): n is a, c, g, or t
  misc_feature (579)..(588): n is a, c, g, or t
  misc_feature (590)..(599): n is a, c, g, or t
  misc_feature (601)..(601): n is a, c, g, or t
  misc_feature (603)..(604): n is a, c, g, or t
  misc_feature (606)..(607): n is a, c, g, or t
  misc_feature (609)..(610): n is a, c, g, or t
  misc_feature (613)..(615): n is a, c, g, or t
  misc_feature (618)..(620): n is a, c, g, or t
  misc_feature (622)..(623): n is a, c, g, or t
  misc_feature (625)..(626): n is a, c, g, or t
  misc_feature (628)..(628): n is a, c, g, or t
  misc_feature (630)..(630): n is a, c, g, or t
  misc_feature (632)..(639): n is a, c, g, or t
  misc_feature (641)..(645): n is a, c, g, or t
  misc_feature (647)..(648): n is a, c, g, or t
  misc_feature (650)..(654): n is a, c, g, or t
  misc_feature (656)..(657): n is a, c, g, or t
  misc_feature (660)..(671): n is a, c, g, or t
  misc_feature (673)..(675): n is a, c, g, or t
  misc_feature (677)..(679): n is a, c, g, or t
  misc_feature (681)..(682): n is a, c, g, or t
  misc_feature (684)..(687): n is a, c, g, or t
  misc_feature (689)..(690): n is a, c, g, or t
  misc_feature (692)..(693): n is a, c, g, or t
  misc_feature (695)..(695): n is a, c, g, or t
  misc_feature (699)..(707): n is a, c, g, or t
  misc_feature (711)..(716): n is a, c, g, or t
  misc_feature (718)..(720): n is a, c, g, or t
  misc_feature (723)..(727): n is a, c, g, or t
  misc_feature (729)..(729): n is a, c, g, or t
  misc_feature (731)..(731): n is a, c, g, or t
  misc_feature (733)..(734): n is a, c, g, or t
  misc_feature (738)..(741): n is a, c, g, or t
  misc_feature (743)..(747): n is a, c, g, or t
  misc_feature (749)..(749): n is a, c, g, or t
  misc_feature (752)..(757): n is a, c, g, or t
  misc_feature (759)..(762): n is a, c, g, or t
  misc_feature (764)..(767): n is a, c, g, or t
  misc_feature (770)..(772): n is a, c, g, or t
  misc_feature (774)..(774): n is a, c, g, or t
  misc_feature (776)..(776): n is a, c, g, or t
  misc_feature (778)..(778): n is a, c, g, or t
  misc_feature (780)..(780): n is a, c, g, or t
  misc_feature (784)..(784): n is a, c, g, or t
  misc_feature (788)..(790): n is a, c, g, or t
  misc_feature (792)..(797): n is a, c, g, or t
  misc_feature (799)..(808): n is a, c, g, or t
  misc_feature (810)..(812): n is a, c, g, or t
  misc_feature (814)..(815): n is a, c, g, or t
  misc_feature (817)..(819): n is a, c, g, or t
  misc_feature (823)..(827): n is a, c, g, or t
  misc_feature (831)..(840): n is a, c, g, or t
  misc_feature (843)..(844): n is a, c, g, or t
  misc_feature (846)..(847): n is a, c, g, or t
  misc_feature (850)..(851): n is a, c, g, or t
  misc_feature (853)..(854): n is a, c, g, or t
  misc_feature (857)..(857): n is a, c, g, or t
  misc_feature (859)..(860): n is a, c, g, or t
  misc_feature (863)..(867): n is a, c, g, or t
  misc_feature (869)..(869): n is a, c, g, or t
  misc_feature (871)..(871): n is a, c, g, or t
  misc_feature (873)..(873): n is a, c, g, or t
  misc_feature (875)..(877): n is a, c, g, or t
  misc_feature (880)..(880): n is a, c, g, or t
  misc_feature (883)..(883): n is a, c, g, or t
  misc_feature (885)..(886): n is a, c, g, or t
  misc_feature (890)..(893): n is a, c, g, or t
  misc_feature (895)..(897): n is a, c, g, or t
  misc_feature (899)..(904): n is a, c, g, or t
  misc_feature (907)..(908): n is a, c, g, or t
  misc_feature (910)..(912): n is a, c, g, or t
  misc_feature (914)..(914): n is a, c, g, or t
  misc_feature (917)..(920): n is a, c, g, or t
  misc_feature (922)..(923): n is a, c, g, or t
  misc_feature (925)..(925): n is a, c, g, or t
  misc_feature (927)..(927): n is a, c, g, or t
  misc_feature (929)..(929): n is a, c, g, or t
  misc_feature (935)..(940): n is a, c, g, or t
  misc_feature (942)..(942): n is a, c, g, or t
  misc_feature (946)..(948): n is a, c, g, or t
  misc_feature (950)..(951): n is a, c, g, or t
  misc_feature (955)..(956): n is a, c, g, or t
  misc_feature (958)..(958): n is a, c, g, or t
  misc_feature (960)..(961): n is a, c, g, or t
  misc_feature (963)..(966): n is a, c, g, or t
  misc_feature (969)..(972): n is a, c, g, or t
  misc_feature (974)..(974): n is a, c, g, or t
  misc_feature (976)..(976): n is a, c, g, or t
  misc_feature (978)..(979): n is a, c, g, or t
  misc_feature (982)..(982): n is a, c, g, or t
  misc_feature (986)..(986): n is a, c, g, or t
  misc_feature (997)..(997): n is a, c, g, or t
  misc_feature (1022)..(1022): n is a, c, g, or t
  misc_feature (1025)..(1025): n is a, c, g, or t
  misc_feature (1028)..(1028): n is a, c, g, or t
  misc_feature (1037)..(1037): n is a, c, g, or t
  misc_feature (1039)..(1041): n is a, c, g, or t
  misc_feature (1045)..(1046): n is a, c, g, or t
  misc_feature (1051)..(1051): n is a, c, g, or t
  misc_feature (1058)..(1059): n is a, c, g, or t
  misc_feature (1062)..(1062): n is a, c, g, or t
  misc_feature (1064)..(1064): n is a, c, g, or t
  misc_feature (1081)..(1082): n is a, c, g, or t
  misc_feature (1085)..(1085): n is a, c, g, or t
  misc_feature (1091)..(1091): n is a, c, g, or t
  misc_feature (1093)..(1095): n is a, c, g, or t
  misc_feature (1097)..(1097): n is a, c, g, or t
  misc_feature (1100)..(1100): n is a, c, g, or t
  misc_feature (1121)..(1121): n is a, c, g, or t
  misc_feature (1127)..(1127): n is a, c, g, or t
  misc_feature (1133)..(1133): n is a, c, g, or t
  misc_feature (1139)..(1139): n is a, c, g, or t
  misc_feature (1143)..(1144): n is a, c, g, or t
  misc_feature (1155)..(1155): n is a, c, g, or t
  misc_feature (1157)..(1158): n is a, c, g, or t
  misc_feature (1160)..(1160): n is a, c, g, or t
  misc_feature (1173)..(1173): n is a, c, g, or t
  misc_feature (1175)..(1175): n is a, c, g, or t
  misc_feature (1178)..(1178): n is a, c, g, or t
  misc_feature (1181)..(1181): n is a, c, g, or t
  misc_feature (1187)..(1187): n is a, c, g, or t
  misc_feature (1194)..(1194): n is a, c, g, or t
  misc_feature (1197)..(1197): n is a, c, g, or t
  misc_feature (1201)..(1201): n is a, c, g, or t
  misc_feature (1212)..(1212): n is a, c, g, or t
  misc_feature (1219)..(1219): n is a, c, g, or t
  misc_feature (1225)..(1226): n is a, c, g, or t
  misc_feature (1241)..(1241): n is a, c, g, or t
  misc_feature (1246)..(1246): n is a, c, g, or t
  misc_feature (1250)..(1251): n is a, c, g, or t
  misc_feature (1256)..(1256): n is a, c, g, or t
  misc_feature (1265)..(1265): n is a, c, g, or t
  misc_feature (1276)..(1277): n is a, c, g, or t
  misc_feature (1287)..(1288): n is a, c, g, or t
  misc_feature (1292)..(1292): n is a, c, g, or t
  misc_feature (1295)..(1296): n is a, c, g, or t
  misc_feature (1302)..(1305): n is a, c, g, or t
  misc_feature (1311)..(1311): n is a, c, g, or t
  misc_feature (1313)..(1313): n is a, c, g, or t
  misc_feature (1322)..(1322): n is a, c, g, or t
  misc_feature (1328)..(1328): n is a, c, g, or t
  misc_feature (1332)..(1332): n is a, c, g, or t
  misc_feature (1340)..(1340): n is a, c, g, or t
  misc_feature (1347)..(1347): n is a, c, g, or t
  misc_feature (1355)..(1355): n is a, c, g, or t
  misc_feature (1364)..(1365): n is a, c, g, or t
  misc_feature (1367)..(1367): n is a, c, g, or t
  misc_feature (1379)..(1379): n is a, c, g, or t
  misc_feature (1418)..(1418): n is a, c, g, or t
  misc_feature (1431)..(1433): n is a, c, g, or t
  misc_feature (1449)..(1449): n is a, c, g, or t
  misc_feature (1455)..(1455): n is a, c, g, or t
  misc_feature (1467)..(1467): n is a, c, g, or t
  misc_feature (1474)..(1474): n is a, c, g, or t
  misc_feature (1485)..(1485): n is a, c, g, or t
  misc_feature (1512)..(1512): n is a, c, g, or t
  misc_feature (1528)..(1528): n is a, c, g, or t
  misc_feature (1539)..(1539): n is a, c, g, or t
  misc_feature (1542)..(1542): n is a, c, g, or t
  misc_feature (1550)..(1550): n is a, c, g, or t
  misc_feature (1556)..(1556): n is a, c, g, or t
  misc_feature (1564)..(1564): n is a, c, g, or t
  misc_feature (1606)..(1606): n is a, c, g, or t
  misc_feature (1632)..(1632): n is a, c, g, or t
  misc_feature (1784)..(1784): n is a, c, g, or t
  misc_feature (1791)..(1791): n is a, c, g, or t
  misc_feature (1793)..(1793): n is a, c, g, or t
  misc_feature (1798)..(1798): n is a, c, g, or t
  misc_feature (1800)..(1800): n is a, c, g, or t
  misc_feature (1827)..(1827): n is a, c, g, or t
  misc_feature (1992)..(1992): n is a, c, g, or t
  misc_feature (2017)..(2017): n is a, c, g, or t
  misc_feature (2022)..(2022): n is a, c, g, or t
aagcacttggcgtagatactgacgaaaanaaacttttaanattaagtttatctatggtagacgatgttgcaagaacagtttcagattnnanganangttanannnannnanatgaanangacnanganaangnannnnaantnnnantngtaattganantnnnngtatgnnnntaanannaacnnananagatnngnttnaaaaagnnnaaangnangnnganntaggnngannnnnnaanncnnnnacnnnnnnagtncntaanngnntnantntgtntnnntnnngnnncnntggnnttnnngnaannanncanananacgcatnnnaanntnnntttnnnnntnatgntnannnntnannnnnanaagganntnnatanncanntncantnntnattgnaatnanaannnnaaaantnaaannagangaanangnnaannaannnanannnannanngntatnagannnnntnnnnaannaannnnaannnnnnnnncaaaancnntngnntnngtannagtnnaaatnnnnnnnnnaanaggnanngntcnnnatnnnnnnnnngnnnnnntannnnnnnnnnannnnnnnnnnanannannannaannngannnanntnnananannnnnnnngnnnnnannannnnnannttnnnnnnnnnnnngnnngnnncnnannnnanntnntnatgnnnnnnnnngatnnnnnnannntannnnnancnanngaannnnannnnnanaannnnnncnnnnannnntcnnnanantntngaangcannngnnnnnnannnnnnnnnnannnannannnagannnnnatannnnnnnnnnaanntnnttnnannatntnnagnnnnnanangngnnnatnaanannatannnnannntnnnnnnaanntnnnanaannnnannananantattannnnnntntatnnngnncaannanannannnntannnnantnannaanaatnaattggtatancgaagtaagtagaaatttagataanatnccngattgtatnannnattnngatanagaattnntanangcaaaaaaagaaattannatntttggnannntnganaaagcaagtgcttctttaccnggtatngttgancaaagntttnnacaattacaananntngaagcaatattanantanctnaatatngaattangangtanaagatcaaaancatttanaaaatnntttgaacattacaanagagnattnnatagnagagaagcngaaaaatatgnngacggtgaannagangtnnttgatnnnnaaaaantnataaacgantttgcnttantaagaaancaatggntaggcatnaccaaaggnntngatcaaaaacantggcaaataacaaacattgttaaactacgagtagcaggnatggaagatgccnnnatcaaatagaataatncttacngacgtagacggngtattantagaatgggancaccattttactaaatggatgttacancgaacactctttgatnaaaaaggaagnagntatcaccnatatanattgttanaagataaagaaaacacttacgaaatggcagaacgttttggtnttactataccagaaattagaaaaganattagagagtttaacagaagtgcttggatgggaacacaacggcctatgccagattcacaaacttgggttaaactactacacgcagaaggttggacttttataccaattacatcacaaacatctgacaaaccagcacaagaattacgtaaaanacgactngnagaantntttggcaaacaagttttttcaaactancacatattaggtacaggagcagataaagattcagcattagcagagtttcacaacacagggttatattgggtcgaggacaagcctaagaacgctttagccgggctcaattacggtttaaaggttatattatacaatcgtccttacaaccaaaacttcggccatccngaaattactagagtaaataattggnaaganatacaccaaattttatcaggaagaaaatgacaacagacataccaacaatatacgtaggatacgatccaagagaagacgaaccttatgaagtactaaaatatacagcacaaaaacacgcatcgggtccaataaacgtatacccgatcaagcaagatttattaagacgaataggattatatagacgagcatggcaattaggcagttcagcactaccaagtcctgtagatcctaaaaatgatatacaacacagagatcaatcagatggcagaccatttgctactgacttttcattttcaagatttttaacaccatttttacatagattagaaggttgggcagtgtttatggactgtgatatgtattttagaagtgatcctttagagttatttgaaaaatacaatgatccgggatatgcgatgtattgtattaaacataatcatacccaagcatcaaacgaaacccataaaatgtatggtaatgaacaatacaattataatcgtaaaaactggtcttcagtaataatgtataattgtagtcatccagcacacaaatatcttactgtggatgatgtaagtacaaaatcaggaagatggttgcatagatttgaatggattgaagactatgctcgtgcaaacaatcttaagtttgatgaccttataggtaatctaccagaagaatggaactggttagatggacatagttcagcagatattgatgctaaaaatgttcacttcacaagaggtggcccgtggttcagaggacaaatatgggaaccacttgatgaacaatcagaaaaatatgcagtggaatgggaatctataagagacgaatatagagaatctaaaaattccaatgcataatgaactgggaaaaattaagaaaacctcattatcacaaagaaccggttgaatacatttacgcaactggcatttttaatcttaaagaatacgataaactttacgaaaaccaaaacaacctttctcaccaaatttggcaagactttgataccaaatataaaattggttttgaattttttaaagatttacgtgagtttaataaaaataaagaagtaatttgtttatggttttttaaagagagatctgacagaaaaactggtaacgatatagatctagaaggaaaaattataaaatatcaacctaatacatttttaataacaagatctaaaaacataaaaataattaaaaggaaatcggttttacctaacagaccggttttacaattagatttaagcataaacaaatacaataaaattataaaaatggaaacctaataatacatttgttttttgtggacaagaaggacatacttggcactcatatgaaagtaataaaaatactaaccgtattacatttaatacttttattatgaagtatagaaaaagggtaactttttataccaattaatttttccagtacaatttatctatttgattaacttttccatgatcccctataatggcactactgttaaatcctaaactttgcataaataggtccatctcatctacatcaggtataagaggttgtttagggtctttatataaatttacctcgtttaaaacataagttgctcttttaaaaatctccggcgagcctttcattactaaaagttctgcgccttgtacatcttgtttaataaaatcataaattgcatcgttgccaacaatagatttaagtgtttgcatttttcttttttctactgcttgtgaaggaaatgtgtcaattccaaatatgtttgatcctttagtataagttattttatgccctttaatctgtcttaagtgcatatctacttctttattttcgtttcctaatacagcaataaaaacttcatttgcacattttaataatcttccttcgtgtttttttcctgcttcaatgcaagtataatgtgcatcaggccaaaattccttcacttctctggtccatattccgttccatgcacccaaatctaaaac

SEQ ID NO: 1334 - DNA, 4000 bp, Escherichia coli
  misc_feature (50)..(50): n is a, c, g, or t
  misc_feature (54)..(55): n is a, c, g, or t
  misc_feature (63)..(63): n is a, c, g, or t
  misc_feature (66)..(67): n is a, c, g, or t
  misc_feature (69)..(69): n is a, c, g, or t
  misc_feature (75)..(75): n is a, c, g, or t
  misc_feature (77)..(78): n is a, c, g, or t
  misc_feature (81)..(81): n is a, c, g, or t
  misc_feature (84)..(84): n is a, c, g, or t
  misc_feature (86)..(86): n is a, c, g, or t
  misc_feature (88)..(89): n is a, c, g, or t
  misc_feature (92)..(93): n is a, c, g, or t
  misc_feature (98)..(98): n is a, c, g, or t
  misc_feature (104)..(104): n is a, c, g, or t
  misc_feature (107)..(108): n is a, c, g, or t
  misc_feature (111)..(111): n is a, c, g, or t
  misc_feature (115)..(118): n is a, c, g, or t
  misc_feature (120)..(121): n is a, c, g, or t
  misc_feature (123)..(123): n is a, c, g, or t
  misc_feature (125)..(126): n is a, c, g, or t
  misc_feature (128)..(128): n is a, c, g, or t
  misc_feature (130)..(131): n is a, c, g, or t
  misc_feature (133)..(133): n is a, c, g, or t
  misc_feature (135)..(138): n is a, c, g, or t
  misc_feature (140)..(141): n is a, c, g, or t
  misc_feature (143)..(143): n is a, c, g, or t
  misc_feature (145)..(146): n is a, c, g, or t
  misc_feature (148)..(148): n is a, c, g, or t
  misc_feature (150)..(151): n is a, c, g, or t
  misc_feature (153)..(153): n is a, c, g, or t
  misc_feature (155)..(156): n is a, c, g, or t
  misc_feature (158)..(158): n is a, c, g, or t
  misc_feature (160)..(161): n is a, c, g, or t
  misc_feature (163)..(163): n is a, c, g, or t
  misc_feature (165)..(166): n is a, c, g, or t
  misc_feature (168)..(168): n is a, c, g, or t
  misc_feature (170)..(171): n is a, c, g, or t
  misc_feature (173)..(173): n is a, c, g, or t
  misc_feature (175)..(176): n is a, c, g, or t
  misc_feature (178)..(180): n is a, c, g, or t
  misc_feature (182)..(191): n is a, c, g, or t
  misc_feature (193)..(193): n is a, c, g, or t
  misc_feature (196)..(197): n is a, c, g, or t
  misc_feature (199)..(202): n is a, c, g, or t
  misc_feature (204)..(204): n is a, c, g, or t
  misc_feature (206)..(207): n is a, c, g, or t
  misc_feature (209)..(210): n is a, c, g, or t
  misc_feature (215)..(215): n is a, c, g, or t
  misc_feature (222)..(224): n is a, c, g, or t
  misc_feature (226)..(226): n is a, c, g, or t
  misc_feature (229)..(255): n is a, c, g, or t
  misc_feature (257)..(257): n is a, c, g, or t
  misc_feature (259)..(274): n is a, c, g, or t
  misc_feature (276)..(278): n is a, c, g, or t
  misc_feature (280)..(288): n is a, c, g, or t
  misc_feature (290)..(314): n is a, c, g, or t
  misc_feature (316)..(334): n is a, c, g, or t
  misc_feature (337)..(341): n is a, c, g, or t
  misc_feature (344)..(344): n is a, c, g, or t
  misc_feature (347)..(347): n is a, c, g, or t
  misc_feature (349)..(349): n is a, c, g, or t
  misc_feature (351)..(351): n is a, c, g, or t
  misc_feature (353)..(358): n is a, c, g, or t
  misc_feature (362)..(367): n is a, c, g, or t
  misc_feature (370)..(373): n is a, c, g, or t
  misc_feature (375)..(375): n is a, c, g, or t
  misc_feature (378)..(379): n is a, c, g, or t
  misc_feature (381)..(390): n is a, c, g, or t
  misc_feature (392)..(402): n is a, c, g, or t
  misc_feature (404)..(409): n is a, c, g, or t
  misc_feature (412)..(412): n is a, c, g, or t
  misc_feature (414)..(418): n is a, c, g, or t
  misc_feature (422)..(427): n is a, c, g, or t
  misc_feature (429)..(430): n is a, c, g, or t
  misc_feature (432)..(434): n is a, c, g, or t
  misc_feature (437)..(439): n is a, c, g, or t
  misc_feature (442)..(445): n is a, c, g, or t
  misc_feature (447)..(449): n is a, c, g, or t
  misc_feature (456)..(457): n is a, c, g, or t
  misc_feature (472)..(477): n is a, c, g, or t
  misc_feature (480)..(481): n is a, c, g, or t
  misc_feature (483)..(484): n is a, c, g, or t
  misc_feature (486)..(486): n is a, c, g, or t
  misc_feature (491)..(495): n is a, c, g, or t
  misc_feature (497)..(497): n is a, c, g, or t
  misc_feature (499)..(513): n is a, c, g, or t
  misc_feature (515)..(519): n is a, c, g, or t
  misc_feature (521)..(521): n is a, c, g, or t
  misc_feature (523)..(526): n is a, c, g, or t
  misc_feature (528)..(538): n is a, c, g, or t
  misc_feature (540)..(550): n is a, c, g, or t
  misc_feature (552)..(555): n is a, c, g, or t
  misc_feature (558)..(558): n is a, c, g, or t
  misc_feature (563)..(567): n is a, c, g, or t
  misc_feature (571)..(580): n is a, c, g, or t
  misc_feature (582)..(587): n is a, c, g, or t
  misc_feature (589)..(589): n is a, c, g, or t
  misc_feature (591)..(594): n is a, c, g, or t
  misc_feature (599)..(600): n is a, c, g, or t
  misc_feature (602)..(605): n is a, c, g, or t
  misc_feature (608)..(613): n is a, c, g, or t
  misc_feature (616)..(619): n is a, c, g, or t
  misc_feature (622)..(622): n is a, c, g, or t
  misc_feature (627)..(628): n is a, c, g, or t
  misc_feature (631)..(631): n is a, c, g, or t
  misc_feature (633)..(633): n is a, c, g, or t
  misc_feature (636)..(636): n is a, c, g, or t
  misc_feature (638)..(640): n is a, c, g, or t
  misc_feature (642)..(643): n is a, c, g, or t
  misc_feature (645)..(645): n is a, c, g, or t
  misc_feature (647)..(649): n is a, c, g, or t
  misc_feature (651)..(652): n is a, c, g, or t
  misc_feature (654)..(655): n is a, c, g, or t
  misc_feature (658)..(659): n is a, c, g, or t
  misc_feature (661)..(664): n is a, c, g, or t
  misc_feature (666)..(671): n is a, c, g, or t
  misc_feature (673)..(675): n is a, c, g, or t
  misc_feature (680)..(680): n is a, c, g, or t
  misc_feature (688)..(689): n is a, c, g, or t
  misc_feature (693)..(693): n is a, c, g, or t
  misc_feature (695)..(695): n is a, c, g, or t
  misc_feature (697)..(701): n is a, c, g, or t
  misc_feature (705)..(706): n is a, c, g, or t
  misc_feature (716)..(718): n is a, c, g, or t
  misc_feature (2784)..(2784): n is a, c, g, or t
  misc_feature (2822)..(2823): n is a, c, g, or t
  misc_feature (2825)..(2825): n is a, c, g, or t
  misc_feature (2827)..(2830): n is a, c, g, or t
  misc_feature (2833)..(2834): n is a, c, g, or t
  misc_feature (2837)..(2838): n is a, c, g, or t
  misc_feature (2840)..(2841): n is a, c, g, or t
  misc_feature (2844)..(2848): n is a, c, g, or t
  misc_feature (2850)..(2851): n is a, c, g, or t
  misc_feature (2853)..(2853): n is a, c, g, or t
  misc_feature (2855)..(2857): n is a, c, g, or t
  misc_feature (2859)..(2859): n is a, c, g, or t
  misc_feature (2862)..(2866): n is a, c, g, or t
  misc_feature (2868)..(2873): n is a, c, g, or t
  misc_feature (2875)..(2878): n is a, c, g, or t
  misc_feature (2880)..(2883): n is a, c, g, or t
  misc_feature (2890)..(2891): n is a, c, g, or t
  misc_feature (2893)..(2893): n is a, c, g, or t
  misc_feature (2897)..(2897): n is a, c, g, or t
  misc_feature (2901)..(2901): n is a, c, g, or t
  misc_feature (2903)..(2904): n is a, c, g, or t
  misc_feature (2907)..(2908): n is a, c, g, or t
  misc_feature (2912)..(2913): n is a, c, g, or t
  misc_feature (2916)..(2916): n is a, c, g, or t
  misc_feature (2918)..(2918): n is a, c, g, or t
  misc_feature (2922)..(2923): n is a, c, g, or t
  misc_feature (2925)..(2925): n is a, c, g, or t
  misc_feature (2927)..(2929): n is a, c, g, or t
  misc_feature (2931)..(2933): n is a, c, g, or t
  misc_feature (2937)..(2937): n is a, c, g, or t
  misc_feature (2940)..(2941): n is a, c, g, or t
  misc_feature (2945)..(2947): n is a, c, g, or t
  misc_feature (2951)..(2952): n is a, c, g, or t
  misc_feature (2954)..(2955): n is a, c, g, or t
  misc_feature (2957)..(2957): n is a, c, g, or t
  misc_feature (2959)..(2961): n is a, c, g, or t
  misc_feature (2963)..(2964): n is a, c, g, or t
  misc_feature (2968)..(2968): n is a, c, g, or t
  misc_feature (2973)..(2973): n is a, c, g, or t
  misc_feature (2976)..(2977): n is a, c, g, or t
  misc_feature (2980)..(2981): n is a, c, g, or t
  misc_feature (2995)..(2995): n is a, c, g, or t
  misc_feature (3000)..(3000): n is a, c, g, or t
  misc_feature (3002)..(3003): n is a, c, g, or t
  misc_feature (3005)..(3005): n is a, c, g, or t
  misc_feature (3008)..(3011): n is a, c, g, or t
  misc_feature (3020)..(3020): n is a, c, g, or t
  misc_feature (3023)..(3024): n is a, c, g, or t
  misc_feature (3026)..(3026): n is a, c, g, or t
  misc_feature (3030)..(3030): n is a, c, g, or t
  misc_feature (3035)..(3036): n is a, c, g, or t
  misc_feature (3040)..(3040): n is a, c, g, or t
  misc_feature (3045)..(3045): n is a, c, g, or t
  misc_feature (3052)..(3053): n is a, c, g, or t
  misc_feature (3056)..(3056): n is a, c, g, or t
  misc_feature (3060)..(3062): n is a, c, g, or t
  misc_feature (3065)..(3068): n is a, c, g, or t
  misc_feature (3076)..(3080): n is a, c, g, or t
  misc_feature (3082)..(3082): n is a, c, g, or t
  misc_feature (3084)..(3084): n is a, c, g, or t
  misc_feature (3086)..(3086): n is a, c, g, or t
  misc_feature (3093)..(3093): n is a, c, g, or t
  misc_feature (3099)..(3100): n is a, c, g, or t
  misc_feature (3104)..(3105): n is a, c, g, or t
  misc_feature (3108)..(3110): n is a, c, g, or t
  misc_feature (3112)..(3113): n is a, c, g, or t
  misc_feature (3117)..(3117): n is a, c, g, or t
  misc_feature (3120)..(3120): n is a, c, g, or t
  misc_feature (3122)..(3122): n is a, c, g, or t
  misc_feature (3126)..(3126): n is a, c, g, or t
  misc_feature (3130)..(3131): n is a, c, g, or t
  misc_feature (3138)..(3138): n is a, c, g, or t
  misc_feature (3143)..(3143): n is a, c, g, or t
  misc_feature (3147)..(3148): n is a, c, g, or t
  misc_feature (3150)..(3151): n is a, c, g, or t
  misc_feature (3154)..(3154): n is a, c, g, or t
  misc_feature (3162)..(3162): n is a, c, g, or t
  misc_feature (3166)..(3168): n is a, c, g, or t
  misc_feature (3171)..(3171): n is a, c, g, or t
  misc_feature (3173)..(3173): n is a, c, g, or t
  misc_feature (3175)..(3175): n is a, c, g, or t
  misc_feature (3178)..(3178): n is a, c, g, or t
  misc_feature (3182)..(3183): n is a, c, g, or t
  misc_feature (3186)..(3186): n is a, c, g, or t
  misc_feature (3188)..(3188): n is a, c, g, or t
  misc_feature (3193)..(3193): n is a, c, g, or t
  misc_feature (3197)..(3197): n is a, c, g, or t
  misc_feature (3199)..(3199): n is a, c, g, or t
  misc_feature (3205)..(3205): n is a, c, g, or t
  misc_feature (3207)..(3207): n is a, c, g, or t
  misc_feature (3209)..(3209): n is a, c, g, or t
  misc_feature (3213)..(3213): n is a, c, g, or t
  misc_feature (3215)..(3215): n is a, c, g, or t
  misc_feature (3218)..(3218): n is a, c, g, or t
  misc_feature (3220)..(3221): n is a, c, g, or t
  misc_feature (3223)..(3223): n is a, c, g, or t
  misc_feature (3227)..(3227): n is a, c, g, or t
  misc_feature (3229)..(3230): n is a, c, g, or t
  misc_feature (3232)..(3236): n is a, c, g, or t
  misc_feature (3238)..(3240): n is a, c, g, or t
  misc_feature (3252)..(3253): n is a, c, g, or t
  misc_feature (3256)..(3256): n is a, c, g, or t
  misc_feature (3261)..(3261): n is a, c, g, or t
  misc_feature (3264)..(3264): n is a, c, g, or t
  misc_feature (3270)..(3270): n is a, c, g, or t
  misc_feature (3272)..(3273): n is a, c, g, or t
  misc_feature (3276)..(3276): n is a, c, g, or t
  misc_feature (3280)..(3281): n is a, c, g, or t
  misc_feature (3285)..(3285): n is a, c, g, or t
  misc_feature (3292)..(3292): n is a, c, g, or t
  misc_feature (3297)..(3297): n is a, c, g, or t
  misc_feature (3300)..(3302): n is a, c, g, or t
  misc_feature (3305)..(3305): n is a, c, g, or t
  misc_feature (3307)..(3307): n is a, c, g, or t
  misc_feature (3309)..(3309): n is a, c, g, or t
  misc_feature (3311)..(3311): n is a, c, g, or t
  misc_feature (3313)..(3315): n is a, c, g, or t
  misc_feature (3319)..(3319): n is a, c, g, or t
  misc_feature (3321)..(3321): n is a, c, g, or t
  misc_feature (3325)..(3325): n is a, c, g, or t
  misc_feature (3327)..(3327): n is a, c, g, or t
  misc_feature (3329)..(3329): n is a, c, g, or t
  misc_feature (3332)..(3332): n is a, c, g, or t
  misc_feature (3340)..(3345): n is a, c, g, or t
  misc_feature (3349)..(3349): n is a, c, g, or t
  misc_feature (3353)..(3353): n is a, c, g, or t
  misc_feature (3355)..(3356): n is a, c, g, or t
  misc_feature (3359)..(3360): n is a, c, g, or t
  misc_feature (3362)..(3362): n is a, c, g, or t
  misc_feature (3367)..(3367): n is a, c, g, or t
  misc_feature (3373)..(3373): n is a, c, g, or t
  misc_feature (3378)..(3380): n is a, c, g, or t
  misc_feature (3385)..(3385): n is a, c, g, or t
  misc_feature (3390)..(3391): n is a, c, g, or t
  misc_feature (3393)..(3393): n is a, c, g, or t
  misc_feature (3399)..(3400): n is a, c, g, or t
  misc_feature (3409)..(3412): n is a, c, g, or t
  misc_feature (3417)..(3417): n is a, c, g, or t
  misc_feature (3419)..(3420): n is a, c, g, or t
  misc_feature (3423)..(3426): n is a, c, g, or t
  misc_feature (3428)..(3428): n is a, c, g, or t
  misc_feature (3433)..(3433): n is a, c, g, or t
  misc_feature (3435)..(3435): n is a, c, g, or t
  misc_feature (3438)..(3438): n is a, c, g, or t
  misc_feature (3442)..(3442): n is a, c, g, or t
  misc_feature (3446)..(3446): n is a, c, g, or t
  misc_feature (3452)..(3453): n is a, c, g, or t
  misc_feature (3455)..(3458): n is a, c, g, or t
  misc_feature (3463)..(3464): n is a, c, g, or t
  misc_feature (3466)..(3466): n is a, c, g, or t
  misc_feature (3469)..(3469): n is a, c, g, or t
  misc_feature (3471)..(3479): n is a, c, g, or t
  misc_feature (3483)..(3483): n is a, c, g, or t
  misc_feature (3488)..(3489): n is a, c, g, or t
  misc_feature (3491)..(3491): n is a, c, g, or t
  misc_feature (3496)..(3497): n is a, c, g, or t
  misc_feature (3500)..(3500): n is a, c, g, or t
  misc_feature (3503)..(3503): n is a, c, g, or t
  misc_feature (3506)..(3506): n is a, c, g, or t
  misc_feature (3509)..(3509): n is a, c, g, or t
  misc_feature (3513)..(3513): n is a, c, g, or t
  misc_feature (3517)..(3518): n is a, c, g, or t
  misc_feature (3526)..(3527): n is a, c, g, or t
  misc_feature (3531)..(3533): n is a, c, g, or t
  misc_feature (3538)..(3538): n is a, c, g, or t
  misc_feature (3548)..(3548): n is a, c, g, or t
  misc_feature (3550)..(3551): n is a, c, g, or t
  misc_feature (3553)..(3555): n is a, c, g, or t
  misc_feature (3557)..(3558): n is a, c, g, or t
  misc_feature (3562)..(3562): n is a, c, g, or t
  misc_feature (3566)..(3568): n is a, c, g, or t
  misc_feature (3570)..(3571): n is a, c, g, or t
  misc_feature (3576)..(3576): n is a, c, g, or t
  misc_feature (3578)..(3580): n is a, c, g, or t
  misc_feature (3582)..(3582): n is a, c, g, or t
  misc_feature (3587)..(3587): n is a, c, g, or t
  misc_feature (3590)..(3590): n is a, c, g, or t
  misc_feature (3597)..(3597): n is a, c, g, or t
  misc_feature (3599)..(3600): n is a, c, g, or t
  misc_feature (3602)..(3603): n is a, c, g, or t
  misc_feature (3605)..(3605): n is a, c, g, or t
  misc_feature (3608)..(3608): n is a, c, g, or t
  misc_feature (3615)..(3615): n is a, c, g, or t
  misc_feature (3617)..(3618): n is a, c, g, or t
  misc_feature (3620)..(3621): n is a, c, g, or t
  misc_feature (3627)..(3627): n is a, c, g, or t
  misc_feature (3629)..(3629): n is a, c, g, or t
  misc_feature (3636)..(3638): n is a, c, g, or t
  misc_feature (3643)..(3643): n is a, c, g, or t
  misc_feature (3647)..(3647): n is a, c, g, or t
  misc_feature (3650)..(3650): n is a, c, g, or t
  misc_feature (3652)..(3652): n is a, c, g, or t
  misc_feature (3656)..(3660): n is a, c, g, or t
  misc_feature (3666)..(3668): n is a, c, g, or t
  misc_feature (3671)..(3671): n is a, c, g, or t
  misc_feature (3676)..(3676): n is a, c, g, or t
  misc_feature (3679)..(3679): n is a, c, g, or t
  misc_feature (3681)..(3684): n is a, c, g, or t
  misc_feature (3686)..(3686): n is a, c, g, or t
  misc_feature (3693)..(3698): n is a, c, g, or t
  misc_feature (3700)..(3700): n is a, c, g, or t
  misc_feature (3705)..(3705): n is a, c, g, or t
  misc_feature (3707)..(3707): n is a, c, g, or t
  misc_feature (3709)..(3709): n is a, c, g, or t
  misc_feature (3712)..(3712): n is a, c, g, or t
  misc_feature (3715)..(3715): n is a, c, g, or t
  misc_feature (3717)..(3717): n is a, c, g, or t
  misc_feature (3719)..(3719): n is a, c, g, or t
  misc_feature (3722)..(3723): n is a, c, g, or t
  misc_feature (3729)..(3733): n is a, c, g, or t
  misc_feature (3735)..(3735): n is a, c, g, or t
  misc_feature (3737)..(3737): n is a, c, g, or t
  misc_feature (3741)..(3741): n is a, c, g, or t
  misc_feature (3745)..(3746): n is a, c, g, or t
  misc_feature (3749)..(3750): n is a, c, g, or t
  misc_feature (3754)..(3754): n is a, c, g, or t
  misc_feature (3757)..(3759): n is a, c, g, or t
  misc_feature (3761)..(3761): n is a, c, g, or t
  misc_feature (3763)..(3763): n is a, c, g, or t
  misc_feature (3765)..(3766): n is a, c, g, or t
  misc_feature (3769)..(3770): n is a, c, g, or t
  misc_feature (3775)..(3775): n is a, c, g, or t
  misc_feature (3781)..(3782): n is a, c, g, or t
  misc_feature (3784)..(3784): n is a, c, g, or t
  misc_feature (3788)..(3788): n is a, c, g, or t
  misc_feature (3791)..(3791): n is a, c, g, or t
  misc_feature (3793)..(3793): n is a, c, g, or t
  misc_feature (3801)..(3801): n is a, c, g, or t
  misc_feature (3804)..(3804): n is a, c, g, or t
  misc_feature (3807)..(3808): n is a, c, g, or t
  misc_feature (3811)..(3814): n is a, c, g, or t
  misc_feature (3816)..(3818): n is a, c, g, or t
  misc_feature (3829)..(3829): n is a, c, g, or t
  misc_feature (3832)..(3832): n is a, c, g, or t
  misc_feature (3836)..(3836): n is a, c, g, or t
  misc_feature (3850)..(3850): n is a, c, g, or t
  misc_feature (3854)..(3855): n is a, c, g, or t
  misc_feature (3858)..(3858): n is a, c, g, or t
  misc_feature (3866)..(3866): n is a, c, g, or t
  misc_feature (3868)..(3869): n is a, c, g, or t
  misc_feature (3871)..(3871): n is a, c, g, or t
  misc_feature (3874)..(3874): n is a, c, g, or t
  misc_feature (3876)..(3879): n is a, c, g, or t
  misc_feature (3884)..(3884): n is a, c, g, or t
  misc_feature (3886)..(3887): n is a, c, g, or t
  misc_feature (3891)..(3892): n is a, c, g, or t
  misc_feature (3895)..(3895): n is a, c, g, or t
  misc_feature (3906)..(3906): n is a, c, g, or t
  misc_feature (3909)..(3909): n is a, c, g, or t
  misc_feature (3914)..(3914): n is a, c, g, or t
  misc_feature (3916)..(3918): n is a, c, g, or t
  misc_feature (3921)..(3924): n is a, c, g, or t
  misc_feature (3929)..(3929): n is a, c, g, or t
  misc_feature (3933)..(3933): n is a, c, g, or t
  misc_feature (3939)..(3939): n is a, c, g, or t
  misc_feature (3941)..(3941): n is a, c, g, or t
  misc_feature (3943)..(3943): n is a, c, g, or t
  misc_feature (3946)..(3946): n is a, c, g, or t
  misc_feature (3948)..(3949): n is a, c, g, or t
  misc_feature (3955)..(3955): n is a, c, g, or t
  misc_feature (3959)..(3959): n is a, c, g, or t
  misc_feature (3961)..(3961): n is a, c, g, or t
  misc_feature (3970)..(3970): n is a, c, g, or t
  misc_feature (3972)..(3973): n is a, c, g, or t
  misc_feature (3988)..(3988): n is a, c, g, or t
  misc_feature (3992)..(3998): n is a, c, g, or t
aattttcattattattatttgaacaaatattaattttcctttgtaattantatnnataaaaanaannanaataanannaanaananannaanntattnatattnatnntantatnnnntnntntnntntnntntnnnntnntntnntntnntntnntntnntntnntntnntntnntnnnannnnnnnnnnanttnntnnnntntnntnnttttnttttttnnnanttnnnnnnnnnnnnnnnnnnnnnnnnnnnanannnnnnnnnnnnnnnntnnnannnnnnnnntnnnnnnnnnnnnnnnnnnnnnnnnntnnnnnnnnnnnnnnnnnnnttnnnnnttnttntntntnnnnnntttnnnnnnttnnnnanttnntnnnnnnnnnnannnnnnnnnnntnnnnnnttntnnnnntttnnnnnnannannnaannnttnnnnannnttttttnnttttttttttttttnnnnnnttnnannantttannnnntnannnnnnnnnnnnnnntnnnnnantnnnnannnnnnnnnnnannnnnnnnnnntnnnnttnttttnnnnntttnnnnnnnnnntnnnnnntntnnnnttttnnannnnttnnnnnnttnnnnaanttttnnaantnatnannntnntnannntnntnnaannannnnannnnnnannnaaaanaaaaaaannaaanantnnnnntttnntttttttttnnnaaaaaaaaaaaaaaaaaaaagaaaaaaaaaagataagattaaagaaagttaatataaatatatagtatcaaatataaatttattataatttttttttacctccttttgaataaaagcatgaataatcttgataattacgaataactaatatacattttgctttaagatgaataaattcatcattttcaatatctttatttttcaaagtaaatgaaagatattcattattttttatcatatttgatgttaaattgatattcctaaaattttttaatatataaacattaaatatttaaattatattttaaatttgattagtttattctattttattgattataaattattttatttatcaatttttttttaaagaattttataaactattcttaaactttttaattatttatttataccatttgtgatcacatagaataaattcattattatattcttcatttttattatttttccaactttcaataggccattcgtaataaccatctctgatatttttacatccatcatcatttatatattgttttaattcttcatcaaattgttctattattgaatatagaatttttattttttatttttttattaatttttttttaaaaaaaatatatatataaatattatataatattataaatattttatatattataaaataataacctttatcatatttatattcacagatgcaggttccaatttttaatttatcattttctactaatgatttatccaattcttcattttttctatataaatcttcttttttaataaaacttttccaactatgtaaattattatatttattatagtaatttaatgtagtttctataaatttataccaatatatataaatataattaatttattcgtatggagttatatataaaaaattaatcgtaatttaaaaaaaaaaaataataataataataattatttaatatatatcataatatattttatgattattgaattaattataacaaatgaaaaatacaacttttaattaatttttattttaaaaattattattacctccattggtataatagtaagaattatcatcgctattacaaataacaataacggattttgcattaatatgatagtttggatcattatcaatagtaagactttttaaattaacagttacataattggtgtctcttgcatctaaatgaatttccctaatttttttattaaataatattgataatattagatttaaaaaaatttttcctttaataacaatatgtttttttttttaattaaaaaaaaaaaaaatatggtaattatggtattaccatgaatgattcttgttcttgtttgtaaattgatgaataatgtatttatttgaattttctttccaattttcaatttcatattcataataatctttagatatcactaaatgattatcgtcatgtattaaactctttattccatttatatattgttctattataaacaaaaaaaattagaattagtatattatatatattattaattatttaatatttaataattaatttataaatattatttattattaaccttgatcatatttatatatttgaatatatgcgccaacatttgctttattattttccactaaacatctatttgatgcactattttttgaaaataatttatttttttcaatgaaaaaacttgatttgtaagaatcattataattgctaaaactgcagttgtgtactaatattatatatatttaataaaataatttattcatattttttttaaaaattatggtcatttttttaaaatatattaaaattataaaatataattatttaaaatatatgtcatacctccatcagaataaaaagtagagtaatccatataattacgaataaataaggtaaattttatataaatatgttttaatatatttcttttaacatctatactttttaaatagacggaagtatatccattaatattatcaccatttggatataattgaattttcctaatatttttaataatatttttgagagacaataattcaaattttaaattatatnttaattataatatattatttagttaatttaaaaaaaannantnnnnttnnttnncnnttnnnnncnncnannntnaannnnngnnnnnnannnncnnnnaataaannanttcnaatnannaannttcnnttnanaatnncnannntnnntaanttnnttgnnnttanntnnantnnnanntttnaaatnttnnttnnaatgttctaaatanaatantnntnatnnnnatatatatnttnntnaatntatanngatnttttnttatttnnaanaaannntannnntaatatannnnntntntnatatttntaggtnnaaanntannnannaatnatngntttnttannataaatnaattnattnntnnaantaagaaangaannnttntntntanattnnttncntcccnaacnantagaantntnattnanatngnntntatntnntnnnnntnnntatatatttatnnatnttaanttnatttantnnttntttnnttantaatatnaaatnatnnnaanananantnnntaananattnanantantaataatnnnnnnaatnattntnnttnntnatatnaaaaanaaaannncctanaatannantagtannattattttnnnnatctncnnttnnnnanaaaananaantatnattnttattnntnnnntcatnncnatntnnnnnnnnnttanttttnntnaattnnttnttntanatnatantatnntaatattnnttannnattantaaaaaaatntnntnnntnnatantatnnntnnatatntnnnanaaaanttntaattantnnannantanaaaaaanannannaataananaaatatnnnttatntatnttnanattnnnnntatttnnnatnttttnttntnnnntntaaattnnnnnntntattntntnctnttntntntannaaattnnnnntntnaaantttnnatnnatanaannntncntnnatnntattntatttnnanaatnttnantttatttnttnttnnaannnngnnntatatatattnttntatntatatattataaanattnnatnaaataaananntnttntnnnnattananntttnntanatatatatatnatnttttntnnnttnnnnttttntatntatttntntntananntaaaanatantnttttttatnannatatatatatatatntaannnnnnnta

SEQ ID NO: 1335 - DNA, 4000 bp, Escherichia coli
  misc_feature (278)..(278): n is a, c, g, or t
  misc_feature (530)..(530): n is a, c, g, or t
  misc_feature (622)..(622): n is a, c, g, or t
  misc_feature (874)..(874): n is a, c, g, or t
  misc_feature (916)..(916): n is a, c, g, or t
  misc_feature (924)..(924): n is a, c, g, or t
  misc_feature (958)..(958): n is a, c, g, or t
  misc_feature (970)..(970): n is a, c, g, or t
  misc_feature (1162)..(1162): n is a, c, g, or t
  misc_feature (1194)..(1194): n is a, c, g, or t
  misc_feature (1261)..(1261): n is a, c, g, or t
  misc_feature (1989)..(1989): n is a, c, g, or t
cacgcactatcccgatcatctgttccacaacacccgccggcgcgacggaaccgcgcggttcgaggacgtgcttccgccgctggtaaacgagcacgacggcagccacggcgtgcagtgggtggatttcgacggcgacggcgcgctggatctggcgctgtcgaacaacgatcccgccggcggccatttcttgttccgcaatctcctcgagcccgaccgcgcccgcgcgtcgctcgccgtcgacgtcgtcgatgccggcggccggcacaccaaggccggcncggaagtgcgcgtctacgctgcagggacgcggaagctgatcgcaacaggcctggtcgataccggcggcggctactgctcgcagaacgtgatgcccgtgcatctcggaaccggcggcgccaagcgagtcgacgtggaagtcacagcgatgggaaagggtggccgccgcgtgacgcgagtagccggggtcgacgcgcgcacagcgacgcgtccgctgcgcgtgcgcgtcgctcgctgacgcgcgagacggggcnaggggcggagcaagctccgcccctacggatgtaagcgtcgaagttgatcgcccgtaggggccgaccttggtcggcccctctagcccctgtanccgaggcgtcgcttcatggccctcacagttccacctgggtctctcgctgcgcctcgtcccaccgcgccgagcagcctcgccgcctgcgtcgcgttgccgccgctctcctcgagcgccgcgctcaacgccgtctcctcgagcgcgcgaatctcgtcgcgcaggttcagcgctccggcctgcagccgctggcgcagcgtgccgccgtccaccagtgcgccgcggcgcgatgatgtccgcagcacgcgcgagggnagatccgacagcagcagctcccggccggcgcgcttgtagacnagcgcctngtagatcacgttgcgcagctcgcggatgttgccnggccacggatangccgccatcgccgccagggcgtcgggccggatcgcctcgatccgcggctgccggttctcgcgcgcgaagcgatcgaggaagtgccgcgccagcaccggcaggtcgtcgatccgctcgcgcagcggcgacagccggatctggacgatggccagccgctcgtagagatccgcgccgaaccgcccggccgcgacnagcggcaccagatcgcggttggtcgcggcgangatccggaaatcgacctcgtgccagtcgttctcgcccagccggctgacgacgtgatcctcgagcacncgcagcagcttgatctgcgtctcgagcggcgtgtcgtcgatctcgtcgaggaacacggtgccgccggccgccgccatcagctggccgtcgtacgactgcaccgcgccggagaaggcgccgcgggcgtagccgaagagctccgcctccatcagctcgttcgggatggccgcgcagttgatcggcaccaaccgccgctcgtgccgcggcgaccacgcgtgaatcagccgcgcggtcacctccttgccggtgccggtttcgccggtgagcagcacggccatcgaggttcgcgccacccgcgccacctgccgcaataccgcctgcgaggcgaggctgttctgcacgatgtgttcggccggcggcggtgccggttccggcgtcaacagctcctcgagccgcgcgacgagcgcgtcgaatgcccccgttgcgctcaatccgatgacgtcgtacgcgccgcgcagcacggcgtccgtgacccgcgccgcgggcaccgccgccgttgacacccagacccagcgcccgcgtgcagcgcgcggcgccggcacgcgcgtcgatgtagcggtcgcggcgacgagcggcaggccggtccgttcctctcgatcgatcccgatgtcggcgcccttcagccgctcgacgagcgcgcgcgaggggggcggtccggtccagccgacaagtcgcatacttcgtcattagagcacggatcattcgcgattcaattactgatactcctnaacatcgtaaggaattggccggaaaaggcccggaccagctcatgcaccgtgaggctttcacgcgaacgtaagcgtgttcgcgctgggggccacatagccatgctgaatgttcttctcgaccacctggtcgccgttttcgtcgtcgcggcgatcgtgagcgtcgccgcggagctcgttctcctcagcacctgggtgattgccgccgatgaatcgggcctcgtcgtcaagcgcttcggccagccgctcgcatcgggccgaatcatcgcgatgcagggcgaggccggctatcaggcgcgcatgctgtcgccaggctggcacttcggcctgtggcgctggcgctatcgcgtgatcaaggtgccgacggttgtcgtgcggccgggcgacatcgcgctggtggtggccgccgacggcgccgcgatccccagcgagcgcgtgctcgcgaagagcgtgccgtgcaataactttcaagacgccgaagcgttcctcaccggcggcggcgagcgcggccgccagatcgcgttcctcaccgccggcacctaccgcatcaacccggcgctcttcgacgtcgtcaccgccgcgaacgcgtcgaaggtcggcgtcaccgccgcggagctgcgcgtgcatcaggttcagcccgatcgcgtcggcatcgtgacgatgctcgacggccgcccgattccggccggcgacatggcggggccgagcgtgccgggccacgagagcttccagcgcggccaggcgttcatcgatgccggcgggtgccgcggcctgcaggaggatgtgctgctgtccggttcgtggaacctgaacccgtggctggtgcaggttgagcaggtgccgctcgtcgaggtgccgatcggctacgtcggcgtcgtcgtcagctacgtcggccgcgagcacatcgacgtgtctggtgaggagttcacgcacggcgatctcgtcgagcgcggccgcaagggcgtgtggatggagccgctgctgccgggcaagcatccgctcaacaccaaggtgatgaaggtggagctggtgccgaccaccaacatcgtcctgaactgggcgcagcagaccgaggcgcatcactacgacgcgcggctgtcgtcgatcatcgtccgctcgaaggacggcttctcgttcagcctcgacgtctcgcagatcattcacatcggcatgcgcaacgcgccgcgggtgatctcgcgggtcgggtcgatgcagaacctggtcgatcacgtgctgcagccgacggtcggcaactacttccgcaactcggcgcaggaagtgtcggtgctcgagttcctgtcggcgcggtcggatcggcagcggcacgcgttcctcgacatcaagaaggcgatcgaggcctatgacgtcgagtgcatcgacacgctgatcggcgacatcgcgccgccggcagagctgatgaagacgcagaccgaccgcaaaatcgccgaggagctcgagcgcacctacgaggtccagcgagaggcccaggtgacgcgccaggcgctggagcgcgagaccgccgtggccaacctgcagggcgaggtcgtccgctcggagcagatggtgaaggtggcgcagcagaacgcgctcgctgccgcggagcaggcgcgcggcgagggcagcgcgatcgagttgcgcgcccagggtcaggcggcgtcgatccggctgtcgggcgaggcggaagcgtcggcgctgcgggcggtcggcgcggcgaaggcagatgcctacaagcagggcgtcgccgccgtcggcgagagcgggtttacggcgatgcagatcgctacgatcctcggcgagaacaaggtcaaggtggtgcccgagatcgccgtgtcgggtgacggttcgtcggggatggcgaacgtgatgctcgccaagctggtcgcggccgctaacgctgacgcgaccagaaatcggggctagtggctaggggcttggggctggccgttcttcggccagctccaagcttcattttgccgggagagcctcagccagcccccagcccctattgcgccgc

SEQ ID NO: 1336 - DNA, 4000 bp, Escherichia coli
  misc_feature (611)..(611): n is a, c, g, or t
  misc_feature (656)..(656): n is a, c, g, or t
  misc_feature (665)..(665): n is a, c, g, or t
  misc_feature (689)..(689): n is a, c, g, or t
  misc_feature (752)..(752): n is a, c, g, or t
  misc_feature (1960)..(1960): n is a, c, g, or t
  misc_feature (1985)..(1985): n is a, c, g, or t
  misc_feature (1990)..(1990): n is a, c, g, or t
  misc_feature (2031)..(2031): n is a, c, g, or t
  misc_feature (2080)..(2080): n is a, c, g, or t
  misc_feature (2195)..(2195): n is a, c, g, or t
  misc_feature (2642)..(2642): n is a, c, g, or t
  misc_feature (2834)..(2834): n is a, c, g, or t
  misc_feature (2857)..(2858): n is a, c, g, or t
  misc_feature (2886)..(2886): n is a, c, g, or t
  misc_feature (2936)..(2936): n is a, c, g, or t
  misc_feature (2948)..(2948): n is a, c, g, or t
  misc_feature (2951)..(2951): n is a, c, g, or t
  misc_feature (2993)..(2993): n is a, c, g, or t
  misc_feature (3008)..(3008): n is a, c, g, or t
  misc_feature (3011)..(3011): n is a, c, g, or t
  misc_feature (3020)..(3020): n is a, c, g, or t
  misc_feature (3026)..(3027): n is a, c, g, or t
  misc_feature (3035)..(3035): n is a, c, g, or t
  misc_feature (3037)..(3038): n is a, c, g, or t
  misc_feature (3056)..(3056): n is a, c, g, or t
  misc_feature (3062)..(3062): n is a, c, g, or t
  misc_feature (3074)..(3074): n is a, c, g, or t
  misc_feature (3083)..(3083): n is a, c, g, or t
  misc_feature (3092)..(3092): n is a, c, g, or t
  misc_feature (3109)..(3109): n is a, c, g, or t
  misc_feature (3119)..(3119): n is a, c, g, or t
  misc_feature (3121)..(3121): n is a, c, g, or t
  misc_feature (3143)..(3143): n is a, c, g, or t
  misc_feature (3155)..(3155): n is a, c, g, or t
  misc_feature (3161)..(3161): n is a, c, g, or t
  misc_feature (3182)..(3182): n is a, c, g, or t
  misc_feature (3191)..(3191): n is a, c, g, or t
  misc_feature (3196)..(3196): n is a, c, g, or t
  misc_feature (3203)..(3203): n is a, c, g, or t
  misc_feature (3209)..(3209): n is a, c, g, or t
  misc_feature (3211)..(3211): n is a, c, g, or t
  misc_feature (3213)..(3213): n is a, c, g, or t
  misc_feature (3226)..(3226): n is a, c, g, or t
  misc_feature (3236)..(3236): n is a, c, g, or t
  misc_feature (3242)..(3242): n is a, c, g, or t
  misc_feature (3248)..(3248): n is a, c, g, or t
  misc_feature (3254)..(3254): n is a, c, g, or t
  misc_feature (3257)..(3257): n is a, c, g, or t
  misc_feature (3260)..(3260): n is a, c, g, or t
  misc_feature (3266)..(3266): n is a, c, g, or t
  misc_feature (3274)..(3274): n is a, c, g, or t
  misc_feature (3281)..(3281): n is a, c, g, or t
  misc_feature (3295)..(3295): n is a, c, g, or t
  misc_feature (3302)..(3302): n is a, c, g, or t
  misc_feature (3308)..(3308): n is a, c, g, or t
  misc_feature (3314)..(3314): n is a, c, g, or t
  misc_feature (3317)..(3317): n is a, c, g, or t
  misc_feature (3332)..(3332): n is a, c, g, or t
  misc_feature (3338)..(3338): n is a, c, g, or t
  misc_feature (3344)..(3344): n is a, c, g, or t
  misc_feature (3366)..(3366): n is a, c, g, or t
  misc_feature (3373)..(3373): n is a, c, g, or t
  misc_feature (3386)..(3386): n is a, c, g, or t
  misc_feature (3401)..(3401): n is a, c, g, or t
  misc_feature (3409)..(3409): n is a, c, g, or t
  misc_feature (3556)..(3556): n is a, c, g, or t
  misc_feature (3577)..(3577): n is a, c, g, or t
  misc_feature (3673)..(3673): n is a, c, g, or t
  misc_feature (3940)..(3940): n is a, c, g, or t
  misc_feature (3953)..(3953): n is a, c, g, or t
  misc_feature (3973)..(3973): n is a, c, g, or t
  misc_feature (3985)..(3985): n is a, c, g, or t
caaacagacggtcgattgccttttcaaggcttgtgtttttatagtaaatgatcgggatcacttctactttaaatcccggcaccttcatggctttgatcttcatcaggtctgtgtttgtcagaatcgggttatttacttttagtacctggcagttctctgccttctcctctaagaggttaccgtcttcaccgatatagactgtcgtggatgttacaactttctcacggatcgagtcgatcggcgggtttgttacctgtgcaaacagctgtttgaaatagttgaataatggctgatggtcacttgcaagtgcagcaagcggtgtatcaatacccatggcagaggtgccctcgccgccgttctttgccatcggaaggattgcttcacgcagggactcgaatgtataaccgaaagctttctgcattctctggcgctcttccttggtgtattccggcacacgctcgttcgggatttttagatcttccagttttaagaggttgcggtcaagccattcaccgtatggctgtttgtttgcataagtttctttcaactcatcatcgtcgatcacgcggcctgcaacggtatcaaccagaagcattttaccaggacgcagncgctcttttacgagaatctttgtcggatcgatatcaagtacaccnacctcggangagaggatcagataatcatcatcngtaatgtaataacgggaaggacgcagaccgttgcggtcaagcactgctcccatcatatcaccntcggagaacagaatagatgcaggtccgtcccacggctccatcatcgtcgcataatactgatagaaatcttttttcttctgtgacatgatgcggttgtttgcccatggctccgggatcatgatcataactgcaagtggaagttccatgccgctcataaccagaaattccaaggtattatcaagcattgcggagtcggaaccctcggaattgataaccggaagtaccttctgcagttctccttttaagtgctcagactccatcgtctcctcgcgggcaagcatcttgtccgcattacccttgatggtgttgatctcaccgttatgtacgataaaacggttcggatgcgctctctcccagcttggattcgtgttcgtggagaaacgggagtgcacggttgcgatcgctgattcgtaatctttatcctgtaagtcagcaaagaataagcgaagctgctctactaagaacatacctttgtatacgatggttctgctggataaagaaaccacataagtatcatcgttggactgttcaaaaacacgtcttgccacatacagtttgcggtcaaaatcaagtccctttgccacttctgccggacgtttgacaaagccctgcataatatacggcatacagtcaactgctttctgtccgagtttggtcggatcggttggaacttctctccatcctaagaactccattccttccttgttcacgatgacctcaaacattttcttcgcctggttgcgttttaattcatcctgcgggaagaaaaacatgccgacaccgtagtctctctcctctccaagctcgattccaagtggttttgtcactttggagaaaaacttgtgtgatacctgaagcagaataccaacaccgtcacctgtcttgccctctgcatctttacctgctctgtgtttcaagttttctacgatctttaatgcattctctaccgttgcatgtgtcttgatacctttgatattgacaacagcaccgataccgcagttatcatgttcaaatctcggatcatacattccggtttctgtcttacagctgcccgctacagaaaaacggtctaatttctgctctttcatcttcaacttcctttctccatccactcatctgtctttgcctgaaaaacagttgtcttttgtcggatttgttatgtattaatatacaactttcatattcgtttgtctaccagttttttcttnatattatctgataatatgataattntatgnaatgtatgtatattatctgtcttttttatttattttctctnaaaataatatctatacaaacaattcaatagaaaaaagatgcaaaaaaanttcattaatttttctgcatcttcgcatttttattatttctattaaattgtgtttaaattgtatctgtgtctttccgctcttttacctgcagatctatgcttccatgcctgccagntcatccatttttttcttaaacccatggttaaaaattgcgattacacgtccgactccgatcactgccaccaccgttccaagcccgattccgatcagatgtccctgacagaccagtccgactgtgatcgtgatacagatgttgaagaggtcaaaacagtttttggtaaatcccacactcttatgtaccgtgtctgcgatcgcctgcatagcttccggcaagttgatttgggtatgcctccccaaataccagaatcactgccgaaaacagattcagaaaccttgtgaaaataagacttaacggcaactgcagcagatccataagcagtgtcagacggatgtccattttctgtgcgtgcatcaaagtttctccctctgccttctgataccggaaatgccggatcagatgcaggatcatctccacaagcacaaacagtgtgtagatcaccantgtcatattcattgttctttccctgatttctttcgctcatctgttacaatgtgtttcaattccattgtcatggactaatagtttctttcccatatttggtcaaagaagtcatttccctccagtgttttcccatcacaactatacaaagcaccattatcaatgtcaagtgacagaagaagcgtggaatcatcnaggtatggcgtcattttttcctnnaaaagcgggacgacatcttccctgtgtntacattcgttccagtcctggtgttcatccttgtcaactgcaaattcaacnccataggtgtcntcnatcacaattcccttttcatcatccacataaaaggctgcaaantcatattgggcagtnccntgcatttcntaggtnntgcttatnannagatagtccagaccatcntttttngaaagacatatngttccattncctgcatgngacaggtgaaagtttcngctgataaancncggataactttcatattctccntcttttgttccncgatanactttcacataacatccatangaactgttncttanaacatcntctacngntncatccggctcacngccatatccnactacngaaacnagatcngcnatnccatcntgtgtganatctgcngttgtttcaaatanaggcacntcatangcatcnttncccggataatctganttatantagttnccctcttcccctaactgaccgntatcgcngtaggtggaatanacatattcctgattntccacganatatttttgtgtctgtgcatcagaagtattttctgtagtttcagagatttctgtacctgattctttttctgtgtcttctgatatgttttctaacatttcttccgtatttcctgttttcagtttttccggcatctcttctgcattttntgttttcttcgcgttttctgnttctttctcattttcttccaatactgacgcgtttgaagcagcagaattttctattgtttttttactgcatccagcaaaacactcacttgcaagtanaacagtaatcatcgccatgactaatttatttttcattttccccacctcataacatactctttttcgtttgtatcttcatctgtttcttccgcctgaatcaagaaattctccctctgataaaagtaaattgcatgcacattcttttcgtatacacataaacacaattcggtttttctgctttttacataatccagcagacattttccaattcccatcgattgtgcagattctttcacaaacaatccctcgatatagcaatcatttatnccgataaaaccanctatctgaccatttttttcntcttcatatacntatacttctgcttcc

SEQ ID NO: 1337 - DNA, 4000 bp, Escherichia coli
  misc_feature (2)..(5): n is a, c, g, or t
  misc_feature (7)..(7): n is a, c, g, or t
  misc_feature (9)..(14): n is a, c, g, or t
  misc_feature (16)..(18): n is a, c, g, or t
  misc_feature (20)..(20): n is a, c, g, or t
  misc_feature (22)..(30): n is a, c, g, or t
  misc_feature (32)..(42): n is a, c, g, or t
  misc_feature (44)..(48): n is a, c, g, or t
  misc_feature (51)..(51): n is a, c, g, or t
  misc_feature (53)..(54): n is a, c, g, or t
  misc_feature (56)..(65): n is a, c, g, or t
  misc_feature (67)..(67): n is a, c, g, or t
  misc_feature (69)..(71): n is a, c, g, or t
  misc_feature (73)..(73): n is a, c, g, or t
  misc_feature (75)..(78): n is a, c, g, or t
  misc_feature (80)..(85): n is a, c, g, or t
  misc_feature (87)..(91): n is a, c, g, or t
  misc_feature (94)..(99): n is a, c, g, or t
  misc_feature (103)..(105): n is a, c, g, or t
  misc_feature (107)..(142): n is a, c, g, or t
  misc_feature (144)..(148): n is a, c, g, or t
  misc_feature (150)..(151): n is a, c, g, or t
  misc_feature (153)..(158): n is a, c, g, or t
  misc_feature (163)..(163): n is a, c, g, or t
  misc_feature (166)..(167): n is a, c, g, or t
  misc_feature (169)..(178): n is a, c, g, or t
  misc_feature (182)..(185): n is a, c, g, or t
  misc_feature (187)..(189): n is a, c, g, or t
  misc_feature (192)..(196): n is a, c, g, or t
  misc_feature (198)..(202): n is a, c, g, or t
  misc_feature (205)..(205): n is a, c, g, or t
  misc_feature (207)..(214): n is a, c, g, or t
  misc_feature (216)..(217): n is a, c, g, or t
  misc_feature (219)..(229): n is a, c, g, or t
  misc_feature (232)..(234): n is a, c, g, or t
  misc_feature (237)..(253): n is a, c, g, or t
  misc_feature (255)..(257): n is a, c, g, or t
  misc_feature (259)..(260): n is a, c, g, or t
  misc_feature (262)..(262): n is a, c, g, or t
  misc_feature (265)..(268): n is a, c, g, or t
  misc_feature (272)..(273): n is a, c, g, or t
  misc_feature (277)..(278): n is a, c, g, or t
  misc_feature (280)..(280): n is a, c, g, or t
  misc_feature (283)..(283): n is a, c, g, or t
  misc_feature (285)..(287): n is a, c, g, or t
  misc_feature (289)..(290): n is a, c, g, or t
  misc_feature (294)..(301): n is a, c, g, or t
  misc_feature (303)..(313): n is a, c, g, or t
  misc_feature (315)..(316): n is a, c, g, or t
  misc_feature (318)..(319): n is a, c, g, or t
  misc_feature (321)..(322): n is a, c, g, or t
  misc_feature (324)..(328): n is a, c, g, or t
  misc_feature (331)..(343): n is a, c, g, or t
  misc_feature (345)..(351): n is a, c, g, or t
  misc_feature (353)..(360): n is a, c, g, or t
  misc_feature (362)..(376): n is a, c, g, or t
  misc_feature (379)..(379): n is a, c, g, or t
  misc_feature (383)..(383): n is a, c, g, or t
  misc_feature (386)..(386): n is a, c, g, or t
  misc_feature (388)..(389): n is a, c, g, or t
  misc_feature (392)..(392): n is a, c, g, or t
  misc_feature (394)..(397): n is a, c, g, or t
  misc_feature (400)..(409): n is a, c, g, or t
  misc_feature (411)..(415): n is a, c, g, or t
  misc_feature (417)..(418): n is a, c, g, or t
  misc_feature (420)..(423): n is a, c, g, or t
  misc_feature (425)..(427): n is a, c, g, or t
  misc_feature (429)..(430): n is a, c, g, or t
  misc_feature (432)..(437): n is a, c, g, or t
  misc_feature (439)..(444): n is a, c, g, or t
  misc_feature (446)..(446): n is a, c, g, or t
  misc_feature (449)..(456): n is a, c, g, or t
  misc_feature (458)..(460): n is a, c, g, or t
  misc_feature (463)..(464): n is a, c, g, or t
  misc_feature (466)..(467): n is a, c, g, or t
  misc_feature (469)..(474): n is a, c, g, or t
  misc_feature (476)..(478): n is a, c, g, or t
  misc_feature (480)..(483): n is a, c, g, or t
  misc_feature (486)..(486): n is a, c, g, or t
  misc_feature (488)..(490): n is a, c, g, or t
  misc_feature (492)..(495): n is a, c, g, or t
  misc_feature (497)..(498): n is a, c, g, or t
  misc_feature (500)..(500): n is a, c, g, or t
  misc_feature (502)..(505): n is a, c, g, or t
  misc_feature (510)..(510): n is a, c, g, or t
  misc_feature (513)..(514): n is a, c, g, or t
  misc_feature (516)..(517): n is a, c, g, or t
  misc_feature (520)..(521): n is a, c, g, or t
  misc_feature (525)..(535): n is a, c, g, or t
  misc_feature (538)..(539): n is a, c, g, or t
  misc_feature (541)..(544): n is a, c, g, or t
  misc_feature (546)..(559): n is a, c, g, or t
  misc_feature (561)..(563): n is a, c, g, or t
  misc_feature (565)..(567): n is a, c, g, or t
  misc_feature (569)..(569): n is a, c, g, or t
  misc_feature (572)..(573): n is a, c, g, or t
  misc_feature (578)..(590): n is a, c, g, or t
  misc_feature (592)..(593): n is a, c, g, or t
  misc_feature (596)..(596): n is a, c, g, or t
  misc_feature (598)..(603): n is a, c, g, or t
  misc_feature (605)..(611): n is a, c, g, or t
  misc_feature (613)..(622): n is a, c, g, or t
  misc_feature (624)..(624): n is a, c, g, or t
  misc_feature (626)..(626): n is a, c, g, or t
  misc_feature (630)..(631): n is a, c, g, or t
  misc_feature (633)..(634): n is a, c, g, or t
  misc_feature (636)..(638): n is a, c, g, or t
  misc_feature (641)..(647): n is a, c, g, or t
  misc_feature (650)..(651): n is a, c, g, or t
  misc_feature (653)..(656): n is a, c, g, or t
  misc_feature (659)..(665): n is a, c, g, or t
  misc_feature (667)..(671): n is a, c, g, or t
  misc_feature (673)..(681): n is a, c, g, or t
  misc_feature (683)..(684): n is a, c, g, or t
  misc_feature (686)..(688): n is a, c, g, or t
  misc_feature (694)..(695): n is a, c, g, or t
  misc_feature (697)..(697): n is a, c, g, or t
  misc_feature (699)..(699): n is a, c, g, or t
  misc_feature (703)..(704): n is a, c, g, or t
  misc_feature (706)..(706): n is a, c, g, or t
  misc_feature (708)..(709): n is a, c, g, or t
  misc_feature (712)..(713): n is a, c, g, or t
  misc_feature (715)..(715): n is a, c, g, or t
  misc_feature (717)..(717): n is a, c, g, or t
  misc_feature (719)..(722): n is a, c, g, or t
  misc_feature (724)..(727): n is a, c, g, or t
  misc_feature (729)..(740): n is a, c, g, or t
  misc_feature (742)..(744): n is a, c, g, or t
  misc_feature (746)..(746): n is a, c, g, or t
  misc_feature (749)..(755): n is a, c, g, or t
  misc_feature (757)..(765): n is a, c, g, or t
  misc_feature (768)..(774): n is a, c, g, or t
  misc_feature (776)..(776): n is a, c, g, or t
  misc_feature (778)..(778): n is a, c, g, or t
  misc_feature (780)..(787): n is a, c, g, or t
  misc_feature (789)..(793): n is a, c, g, or t
  misc_feature (795)..(800): n is a, c, g, or t
  misc_feature (803)..(803): n is a, c, g, or t
  misc_feature (805)..(810): n is a, c, g, or t
  misc_feature (813)..(815): n is a, c, g, or t
  misc_feature (817)..(818): n is a, c, g, or t
  misc_feature (821)..(828): n is a, c, g, or t
  misc_feature (830)..(831): n is a, c, g, or t
  misc_feature (833)..(834): n is a, c, g, or t
  misc_feature (837)..(837): n is a, c, g, or t
  misc_feature (839)..(839): n is a, c, g, or t
  misc_feature (841)..(846): n is a, c, g, or t
  misc_feature (849)..(859): n is a, c, g, or t
  misc_feature (861)..(876): n is a, c, g, or t
  misc_feature (878)..(881): n is a, c, g, or t
  misc_feature (884)..(884): n is a, c, g, or t
  misc_feature (886)..(886): n is a, c, g, or t
  misc_feature (888)..(890): n is a, c, g, or t
  misc_feature (892)..(896): n is a, c, g, or t
  misc_feature (898)..(899): n is a, c, g, or t
  misc_feature (901)..(901): n is a, c, g, or t
  misc_feature (903)..(913): n is a, c, g, or t
  misc_feature (915)..(923): n is a, c, g, or t
  misc_feature (925)..(928): n is a, c, g, or t
  misc_feature (933)..(933): n is a, c, g, or t
  misc_feature (936)..(937): n is a, c, g, or t
  misc_feature (939)..(940): n is a, c, g, or t
  misc_feature (942)..(945): n is a, c, g, or t
  misc_feature (947)..(947): n is a, c, g, or t
  misc_feature (949)..(952): n is a, c, g, or t
  misc_feature (954)..(960): n is a, c, g, or t
  misc_feature (962)..(964): n is a, c, g, or t
  misc_feature (967)..(970): n is a, c, g, or t
  misc_feature (972)..(972): n is a, c, g, or t
  misc_feature (974)..(976): n is a, c, g, or t
  misc_feature (978)..(978): n is a, c, g, or t
  misc_feature (980)..(988): n is a, c, g, or t
  misc_feature (990)..(991): n is a, c, g, or t
  misc_feature (993)..(995): n is a, c, g, or t
  misc_feature (998)..(999): n is a, c, g, or t
  misc_feature (1001)..(1007): n is a, c, g, or t
  misc_feature (1010)..(1019): n is a, c, g, or t
  misc_feature (1022)..(1032): n is a, c, g, or t
  misc_feature (1034)..(1035): n is a, c, g, or t
  misc_feature (1037)..(1042): n is a, c, g, or t
  misc_feature (1044)..(1049): n is a, c, g, or t
  misc_feature (1051)..(1056): n is a, c, g, or t
  misc_feature (1061)..(1065): n is a, c, g, or t
  misc_feature (1067)..(1073): n is a, c, g, or t
  misc_feature (1076)..(1079): n is a, c, g, or t
  misc_feature (1081)..(1081): n is a, c, g, or t
  misc_feature (1083)..(1086): n is a, c, g, or t
  misc_feature (1088)..(1089): n is a, c, g, or t
  misc_feature (1091)..(1097): n is a, c, g, or t
  misc_feature (1099)..(1106): n is a, c, g, or t
  misc_feature (1108)..(1109): n is a, c, g, or t
  misc_feature (1111)..(1116): n is a, c, g, or t
  misc_feature (1118)..(1118): n is a, c, g, or t
  misc_feature (1121)..(1121): n is a, c, g, or t
  misc_feature (1123)..(1123): n is a, c, g, or t
  misc_feature (1125)..(1125): n is a, c, g, or t
  misc_feature (1127)..(1129): n is a, c, g, or t
  misc_feature (1132)..(1138): n is a, c, g, or t
  misc_feature (1140)..(1143): n is a, c, g, or t
  misc_feature (1145)..(1145): n is a, c, g, or t
  misc_feature (1149)..(1151): n is a, c, g, or t
  misc_feature (1153)..(1154): n is a, c, g, or t
  misc_feature (1156)..(1163): n is a, c, g, or t
  misc_feature (1165)..(1169): n is a, c, g, or t
  misc_feature (1171)..(1180): n is a, c, g, or t
  misc_feature (1184)..(1185): n is a, c, g, or t
  misc_feature (1187)..(1188): n is a, c, g, or t
  misc_feature (1190)..(1193): n is a, c, g, or t
  misc_feature (1195)..(1196): n is a, c, g, or t
  misc_feature (1198)..(1204): n is a, c, g, or t
  misc_feature (1206)..(1217): n is a, c, g, or t
  misc_feature (1219)..(1222): n is a, c, g, or t
  misc_feature (1226)..(1228): n is a, c, g, or t
  misc_feature (1230)..(1232): n is a, c, g, or t
  misc_feature (1234)..(1236): n is a, c, g, or t
  misc_feature (1238)..(1240): n is a, c, g, or t
  misc_feature (1242)..(1245): n is a, c, g, or t
  misc_feature (1248)..(1248): n is a, c, g, or t
  misc_feature (1250)..(1251): n is a, c, g, or t
  misc_feature (1255)..(1275): n is a, c, g, or t
  misc_feature (1277)..(1278): n is a, c, g, or t
  misc_feature (1281)..(1282): n is a, c, g, or t
  misc_feature (1284)..(1286): n is a, c, g, or t
  misc_feature (1288)..(1293): n is a, c, g, or t
  misc_feature (1295)..(1297): n is a, c, g, or t
  misc_feature (1300)..(1300): n is a, c, g, or t
  misc_feature (1302)..(1303): n is a, c, g, or t
  misc_feature (1305)..(1307): n is a, c, g, or t
  misc_feature (1309)..(1310): n is a, c, g, or t
  misc_feature (1312)..(1312): n is a, c, g, or t
  misc_feature (1315)..(1315): n is a, c, g, or t
  misc_feature (1317)..(1327): n is a, c, g, or t
  misc_feature (1329)..(1341): n is a, c, g, or t
  misc_feature (1343)..(1343): n is a, c, g, or t
  misc_feature (1345)..(1352): n is a, c, g, or t
  misc_feature (1354)..(1354): n is a, c, g, or t
  misc_feature (1356)..(1356): n is a, c, g, or t
  misc_feature (1359)..(1365): n is a, c, g, or t
  misc_feature (1367)..(1367): n is a, c, g, or t
  misc_feature (1369)..(1369): n is a, c, g, or t
  misc_feature (1371)..(1378): n is a, c, g, or t
  misc_feature (1380)..(1381): n is a, c, g, or t
  misc_feature (1383)..(1388): n is a, c, g, or t
  misc_feature (1390)..(1391): n is a, c, g, or t
  misc_feature (1393)..(1394): n is a, c, g, or t
  misc_feature (1396)..(1396): n is a, c, g, or t
  misc_feature (1399)..(1401): n is a, c, g, or t
  misc_feature (1404)..(1405): n is a, c, g, or t
  misc_feature (1407)..(1410): n is a, c, g, or t
  misc_feature (1414)..(1414): n is a, c, g, or t
  misc_feature (1416)..(1423): n is a, c, g, or t
  misc_feature (1425)..(1438): n is a, c, g, or t
  misc_feature (1440)..(1441): n is a, c, g, or t
  misc_feature (1445)..(1445): n is a, c, g, or t
  misc_feature (1449)..(1450): n is a, c, g, or t
  misc_feature (1452)..(1454): n is a, c, g, or t
  misc_feature (1456)..(1465): n is a, c, g, or t
  misc_feature (1468)..(1469): n is a, c, g, or t
  misc_feature (1471)..(1478): n is a, c, g, or t
  misc_feature (1480)..(1492): n is a, c, g, or t
  misc_feature (1494)..(1496): n is a, c, g, or t
  misc_feature (1499)..(1504): n is a, c, g, or t
  misc_feature (1507)..(1512): n is a, c, g, or t
  misc_feature (1514)..(1514): n is a, c, g, or t
  misc_feature (1516)..(1520): n is a, c, g, or t
  misc_feature (1522)..(1526): n is a, c, g, or t
  misc_feature (1529)..(1530): n is a, c, g, or t
  misc_feature (1533)..(1533): n is a, c, g, or t
  misc_feature (1535)..(1535): n is a, c, g, or t
  misc_feature (1538)..(1538): n is a, c, g, or t
  misc_feature (1540)..(1541): n is a, c, g, or t
  misc_feature (1543)..(1546): n is a, c, g, or t
  misc_feature (1549)..(1553): n is a, c, g, or t
  misc_feature (1555)..(1556): n is a, c, g, or t
  misc_feature (1558)..(1558): n is a, c, g, or t
  misc_feature (1560)..(1561): n is a, c, g, or t
  misc_feature (1564)..(1571): n is a, c, g, or t
  misc_feature (1573)..(1574): n is a, c, g, or t
  misc_feature (1576)..(1589): n is a, c, g, or t
  misc_feature (1592)..(1598): n is a, c, g, or t
  misc_feature (1600)..(1603): n is a, c, g, or t
  misc_feature (1605)..(1607): n is a, c, g, or t
  misc_feature (1609)..(1610): n is a, c, g, or t
  misc_feature (1612)..(1613): n is a, c, g, or t
  misc_feature (1615)..(1617): n is a, c, g, or t
  misc_feature (1619)..(1619): n is a, c, g, or t
  misc_feature (1621)..(1622): n is a, c, g, or t
  misc_feature (1624)..(1630): n is a, c, g, or t
  misc_feature (1632)..(1633): n is a, c, g, or t
  misc_feature (1635)..(1641): n is a, c, g, or t
  misc_feature (1643)..(1644): n is a, c, g, or t
  misc_feature (1646)..(1647): n is a, c, g, or t
  misc_feature (1652)..(1654): n is a, c, g, or t
  misc_feature (1657)..(1657): n is a, c, g, or t
  misc_feature (1659)..(1659): n is a, c, g, or t
  misc_feature (1665)..(1667): n is a, c, g, or t
  misc_feature (1669)..(1670): n is a, c, g, or t
  misc_feature (1673)..(1674): n is a, c, g, or t
  misc_feature (1678)..(1679): n is a, c, g, or t
  misc_feature (1682)..(1684): n is a, c, g, or t
  misc_feature (1687)..(1688): n is a, c, g, or t
  misc_feature (1690)..(1693): n is a, c, g, or t
  misc_feature (1696)..(1696): n is a, c, g, or t
  misc_feature (1700)..(1700): n is a, c, g, or t
  misc_feature (1703)..(1704): n is a, c, g, or t
  misc_feature (1706)..(1707): n is a, c, g, or t
  misc_feature (1709)..(1709): n is a, c, g, or t
  misc_feature (1719)..(1721): n is a, c, g, or t
  misc_feature (1723)..(1724): n is a, c, g, or t
  misc_feature (1726)..(1729): n is a, c, g, or t
  misc_feature (1731)..(1732): n is a, c, g, or t
  misc_feature (1738)..(1740): n is a, c, g, or t
  misc_feature (1744)..(1745): n is a, c, g, or t
  misc_feature (1747)..(1748): n is a, c, g, or t
  misc_feature (1750)..(1751): n is a, c, g, or t
  misc_feature (1755)..(1757): n is a, c, g, or t
  misc_feature (1759)..(1766): n is a, c, g, or t
  misc_feature (1782)..(1783): n is a, c, g, or t
  misc_feature (1790)..(1791): n is a, c, g, or t
  misc_feature (1794)..(1796): n is a, c, g, or t
  misc_feature (1799)..(1799): n is a, c, g, or t
  misc_feature (1979)..(1981): n is a, c, g, or t
  misc_feature (1984)..(1984): n is a, c, g, or t
  misc_feature (1987)..(1987): n is a, c, g, or t
  misc_feature (1989)..(1990): n is a, c, g, or t
  misc_feature (1995)..(1995): n is a, c, g, or t
  misc_feature (1998)..(1998): n is a, c, g, or t
  misc_feature (2000)..(2000): n is a, c, g, or t
  misc_feature (2002)..(2003): n is a, c, g, or t
  misc_feature (2005)..(2006): n is a, c, g, or t
  misc_feature (2008)..(2011): n is a, c, g, or t
  misc_feature (2013)..(2017): n is a, c, g, or t
  misc_feature (2023)..(2025): n is a, c, g, or t
  misc_feature (2028)..(2032): n is a, c, g, or t
  misc_feature (2035)..(2043): n is a, c, g, or t
  misc_feature (2052)..(2052): n is a, c, g, or t
  misc_feature (3199)..(3199): n is a, c, g, or t
  misc_feature (3203)..(3208): n is a, c, g, or t
  misc_feature (3210)..(3223): n is a, c, g, or t
  misc_feature (3226)..(3229): n is a, c, g, or t
  misc_feature (3231)..(3234): n is a, c, g, or t
  misc_feature (3236)..(3239): n is a, c, g, or t
  misc_feature (3242)..(3242): n is a, c, g, or t
  misc_feature (3244)..(3251): n is a, c, g, or t
  misc_feature (3253)..(3260): n is a, c, g, or t
  misc_feature (3264)..(3264): n is a, c, g, or t
  misc_feature (3266)..(3268): n is a, c, g, or t
  misc_feature (3270)..(3274): n is a, c, g, or t
  misc_feature (3276)..(3281): n is a, c, g, or t
  misc_feature (3283)..(3286): n is a, c, g, or t
  misc_feature (3288)..(3295): n is a, c, g, or t
  misc_feature (3297)..(3302): n is a, c, g, or t
  misc_feature (3304)..(3308): n is a, c, g, or t
  misc_feature (3310)..(3311): n is a, c, g, or t
  misc_feature (3314)..(3314): n is a, c, g, or t
  misc_feature (3316)..(3317): n is a, c, g, or t
  misc_feature (3320)..(3320): n is a, c, g, or t
  misc_feature (3323)..(3323): n is a, c, g, or t
  misc_feature (3326)..(3326): n is a, c, g, or t
  misc_feature (3328)..(3329): n is a, c, g, or t
  misc_feature (3332)..(3332): n is a, c, g, or t
  misc_feature (3334)..(3336): n is a, c, g, or t
  misc_feature (3338)..(3339): n is a, c, g, or t
  misc_feature (3342)..(3351): n is a, c, g, or t
  misc_feature (3355)..(3356): n is a, c, g, or t
  misc_feature (3359)..(3363): n is a, c, g, or t
  misc_feature (3368)..(3373): n is a, c, g, or t
  misc_feature (3375)..(3381): n is a, c, g, or t
  misc_feature (3383)..(3390): n is a, c, g, or t
  misc_feature (3392)..(3395): n is a, c, g, or t
  misc_feature (3397)..(3397): n is a, c, g, or t
  misc_feature (3399)..(3400): n is a, c, g, or t
  misc_feature (3403)..(3408): n is a, c, g, or t
  misc_feature (3411)..(3416): n is a, c, g, or t
  misc_feature (3418)..(3418): n is a, c, g, or t
  misc_feature (3420)..(3423): n is a, c, g, or t
  misc_feature (3425)..(3425): n is a, c, g, or t
  misc_feature (3427)..(3431): n is a, c, g, or t
  misc_feature (3433)..(3434): n is a, c, g, or t
  misc_feature (3436)..(3436): n is a, c, g, or t
  misc_feature (3438)..(3439): n is a, c, g, or t
  misc_feature (3441)..(3450): n is a, c, g, or t
  misc_feature (3452)..(3453): n is a, c, g, or t
  misc_feature (3455)..(3457): n is a, c, g, or t
  misc_feature (3459)..(3460): n is a, c, g, or t
  misc_feature (3464)..(3467): n is a, c, g, or t
  misc_feature (3469)..(3469): n is a, c, g, or t
  misc_feature (3472)..(3476): n is a, c, g, or t
  misc_feature (3478)..(3478): n is a, c, g, or t
  misc_feature (3480)..(3480): n is a, c, g, or t
  misc_feature (3482)..(3483): n is a, c, g, or t
  misc_feature (3485)..(3487): n is a, c, g, or t
  misc_feature (3491)..(3492): n is a, c, g, or t
  misc_feature (3494)..(3495): n is a, c, g, or t
  misc_feature (3497)..(3497): n is a, c, g, or t
  misc_feature (3500)..(3500): n is a, c, g, or t
  misc_feature (3506)..(3506): n is a, c, g, or t
  misc_feature (3509)..(3509): n is a, c, g, or t
  misc_feature (3511)..(3533): n is a, c, g, or t
  misc_feature (3536)..(3537): n is a, c, g, or t
  misc_feature (3540)..(3542): n is a, c, g, or t
  misc_feature (3545)..(3551): n is a, c, g, or t
  misc_feature (3553)..(3555): n is a, c, g, or t
  misc_feature (3557)..(3557): n is a, c, g, or t
  misc_feature (3560)..(3576): n is a, c, g, or t
  misc_feature (3578)..(3581): n is a, c, g, or t
  misc_feature (3585)..(3585): n is a, c, g, or t
  misc_feature (3587)..(3587): n is a, c, g, or t
  misc_feature (3589)..(3590): n is a, c, g, or t
  misc_feature (3594)..(3596): n is a, c, g, or t
  misc_feature (3598)..(3598): n is a, c, g, or t
  misc_feature (3601)..(3602): n is a, c, g, or t
  misc_feature (3606)..(3607): n is a, c, g, or t
  misc_feature (3609)..(3610): n is a, c, g, or t
  misc_feature (3613)..(3614): n is a, c, g, or t
  misc_feature (3616)..(3616): n is a, c, g, or t
  misc_feature (3618)..(3619): n is a, c, g, or t
  misc_feature (3622)..(3631): n is a, c, g, or t
  misc_feature (3633)..(3645): n is a, c, g, or t
  misc_feature (3648)..(3653): n is a, c, g, or t
  misc_feature (3655)..(3657): n is a, c, g, or t
  misc_feature (3659)..(3660): n is a, c, g, or t
  misc_feature (3662)..(3662): n is a, c, g, or t
  misc_feature (3664)..(3664): n is a, c, g, or t
  misc_feature (3666)..(3670): n is a, c, g, or t
  misc_feature (3673)..(3673): n is a, c, g, or t
  misc_feature (3675)..(3675): n is a, c, g, or t
  misc_feature (3677)..(3681): n is a, c, g, or t
  misc_feature (3684)..(3684): n is a, c, g, or t
  misc_feature (3686)..(3687): n is a, c, g, or t
  misc_feature (3694)..(3695): n is a, c, g, or t
  misc_feature (3697)..(3698): n is a, c, g, or t
  misc_feature (3701)..(3705): n is a, c, g, or t
  misc_feature (3707)..(3707): n is a, c, g, or t
  misc_feature (3710)..(3710): n is a, c, g, or t
  misc_feature (3712)..(3712): n is a, c, g, or t
  misc_feature (3714)..(3719): n is a, c, g, or t
  misc_feature (3721)..(3721): n is a, c, g, or t
  misc_feature (3723)..(3730): n is a, c, g, or t
  misc_feature (3732)..(3742): n is a, c, g, or t
  misc_feature (3744)..(3744): n is a, c, g, or t
  misc_feature (3747)..(3751): n is a, c, g, or t
  misc_feature (3767)..(3767): n is a, c, g, or t
  misc_feature (3770)..(3770): n is a, c, g, or t
  misc_feature (3773)..(3774): n is a, c, g, or t
  misc_feature (3776)..(3782): n is a, c, g, or t
  misc_feature (3784)..(3785): n is a, c, g, or t
  misc_feature (3787)..(3789): n is a, c, g, or t
  misc_feature (3791)..(3791): n is a, c, g, or t
  misc_feature (3793)..(3796): n is a, c, g, or t
  misc_feature (3801)..(3802): n is a, c, g, or t
  misc_feature (3804)..(3804): n is a, c, g, or t
  misc_feature (3806)..(3809): n is a, c, g, or t
  misc_feature (3811)..(3813): n is a, c, g, or t
  misc_feature (3815)..(3817): n is a, c, g, or t
  misc_feature (3819)..(3822): n is a, c, g, or t
  misc_feature (3824)..(3828): n is a, c, g, or t
  misc_feature (3830)..(3836): n is a, c, g, or t
  misc_feature (3839)..(3841): n is a, c, g, or t
  misc_feature (3843)..(3844): n is a, c, g, or t
  misc_feature (3846)..(3846): n is a, c, g, or t
  misc_feature (3848)..(3854): n is a, c, g, or t
  misc_feature (3857)..(3857): n is a, c, g, or t
  misc_feature (3859)..(3862): n is a, c, g, or t
  misc_feature (3864)..(3869): n is a, c, g, or t
  misc_feature (3873)..(3873): n is a, c, g, or t
  misc_feature (3875)..(3881): n is a, c, g, or t
  misc_feature (3884)..(3886): n is a, c, g, or t
  misc_feature (3888)..(3889): n is a, c, g, or t
  misc_feature (3891)..(3892): n is a, c, g, or t
  misc_feature (3894)..(3895): n is a, c, g, or t
  misc_feature (3897)..(3898): n is a, c, g, or t
  misc_feature (3900)..(3901): n is a, c, g, or t
  misc_feature (3903)..(3904): n is a, c, g, or t
  misc_feature (3906)..(3907): n is a, c, g, or t
  misc_feature (3909)..(3912): n is a, c, g, or t
  misc_feature (3914)..(3918): n is a, c, g, or t
  misc_feature (3920)..(3922): n is a, c, g, or t
  misc_feature (3925)..(3925): n is a, c, g, or t
  misc_feature (3941)..(3941): n is a, c, g, or t
  misc_feature (3944)..(3945): n is a, c, g, or t
  misc_feature (3948)..(3948): n is a, c, g, or t
  misc_feature (3951)..(3952): n is a, c, g, or t
  misc_feature (3954)..(3955): n is a, c, g, or t
  misc_feature (3957)..(3957): n is a, c, g, or t
  misc_feature (3959)..(3961): n is a, c, g, or t
  misc_feature (3964)..(3966): n is a, c, g, or t
  misc_feature (3968)..(3970): n is a, c, g, or t
  misc_feature (3973)..(3978): n is a, c, g, or t
  misc_feature (3981)..(3985): n is a, c, g, or t
  misc_feature (3987)..(3988): n is a, c, g, or t
  misc_feature (3990)..(3991): n is a, c, g, or t
  misc_feature (3993)..(3994): n is a, c, g, or t
  misc_feature (3996)..(3997): n is a, c, g, or t
  misc_feature (3999)..(3999): n is a, c, g, or t
cnnnncncnnnnnncnnncncnnnnnnnnncnnnnnnnnnnnannnnngcncnngnnnnnnnnnncncnnncncnnnntnnnnnngnnnnncgnnnnnntcgnnncnnnnnnnnnnnnnnnnnnnnnnnnnnnnnnnnnnnncnnnnncnncnnnnnnaaacncanncnnnnnnnnnnaaannnncnnncgnnnnncnnnnnaancnnnnnnnngnncnnnnnnnnnnnatnnngtnnnnnnnnnnnnnnnnngnnngnncncgnnnncgcnngcgnngncgngnnngnncgcnnnnnnnngnnnnnnnnnnncnncnncnncnnnnnccnnnnnnnnnnnnntnnnnnnngnnnnnnnngnnnnnnnnnnnnnnncgncgcncgncnncgncnnnnttnnnnnnnnnncnnnnncnntnnnntnnntnncnnnnnngnnnnnntnttnnnnnnnntnnnggnngnntnnnnnngnnngnnnncgngnnngnnnngnngngnnnngtcgngtnncnngannacgnnnnnnnnnnnatnnannnnannnnnnnnnnnnnnannntnnntntgnntgtgnnnnnnnnnnnnnannatnannnnnnannnnnnncnnnnnnnnnngngngacnngnncnnnaannnnnnnctnntnnnnttnnnnnnngnnnnngnnnnnnnnnanncnnncgattnncncncggnncncnnccnncncncnnnncnnnngnnnnnnnnnnnntnnntngtnnnnnnncnnnnnnnnnaannnnnnntncntnnnnnnnncnnnnnannnnnngcncnnnnnntgnnngnngcnnnnnnnngnngnnggntngnnnnnnatnnnnnnnnnnntnnnnnnnnnnnnnnnnannnnacncncnnncnnnnngnngncnnnnnnnnnnnannnnnnnnngnnnntgttnttnntnntnnnntncnnnnannnnnnncnnntcnnnntngnnngntnnnnnnnnncnnannnaanncnnnnnnnggnnnnnnnnnngannnnnnnnnnngnngnnnnnntnnnnnngnnnnnngcgcnnnnngnnnnnnntgnnnntntnnnntnntnnnnnnntnnnnnnnncnncnnnnnnancanantnannnaannnnnnncnnnncncgcnnncnncnnnnnnnncnnnnncnnnnnnnnnnccgnncnntnnnncnncnnnnnnntnnnnnnnnnnnngnnnngcgnnngnnngnnncnnnannnnatngnntcgnnnnnnnnnnnnnnnnnnnnnanntannannnannnnnnannnacncnngnnncnncngcncnnnnnnnnnnntnnnnnnnnnnnnnancnnnnnnnntngntcnnnnnnngngngnnnnnnnngnncnnnnnnanncnncnccnnncgnncnnnncacncnnnnnnnntnnnnnnnnnnnnnntnntctntttnntnnntnnnnnnnnnnacnnannnnnnnngnnnnnnnnnnnnncnnnatnnnnnntcnnnnnnancnnnnngnnnnncgnncgntncgngnngnnnntgnnnnncnncngnngcnnnnnnnncnngnnnnnnnnnnnnnnggnnnnnnncnnnngnnntnncnncnnncncnncnnnnnnncnncnnnnnnncnncnnttttnnntcncnttcgtnnntnnatnngatnnggnnncgnncnnnncancgancgnncnncncgcgtttcgnnngnntnnnncnnctcgcnnncccnngnntnngggnnngnnnnnnnncgtcgtcgcgcggggnncgggggnnggnnntgngctcggcttcggcttcggcgcgtcgtgaagtgaagtgacgtcgccgagtgagagggcaacccgcacacgtcgacgccgcatccgtcgtcggtcggatccgcgcgcggtgacgacggcgatgatgcgcgcggtgaggacgtcgacgacgacgtgggcgcgtcgcctcgctagggaggccgnnncgncgngnngtcgncgncngnngnngnnnntnnnnncgacgnnncgnnnnncgnnnnnnnnngatgatganggagtggcggcggctgagtgtatgggtaaacagttagaagagacaagaacaacgaccacagaagcgctgtcgttcacgctgcgcgtcgatgaaaccgccccgacgccgtcgcggttggacgcctacgtctcctctcgcgtcgacgacccggggttttctcgcggacgcgtcgcggcggcgatcaaggcgagtaaagtgagactcaacggacgcgtggaacgcaagccgtcgcgcgcgttgaaaccgggggacgtcgtggagggggcgctggagcccgaaccgacgagtgaggcgacgccggaaccgtggatagagttggatgtggtgtatgaggacgcgagcgtgttggtggtgaataaaccggcggggatggtgacgcatccgagcgcggggcacgcgagcggtacgttggtcaacgccgtgttggggcactgcgagcttccggaactcgtcgttccaacgggtaggaagtcgacgacgcaccgaggtggtgaagatgaggatgaggatgaggatgaggaacccatcgggggggattctcaaggggtgacgacgaggccggggattgtacacaggttggataaaggaacgagcggcgtcatggttgtggccaaggacgcggcggcgcacaactcactctgcgatcaattcgccgcgcgagaggttcggagacggtacgtcgccattcttagcggtgttccgacgccgaaaaaggggcggatcgaggcgccaatcggacgcgatccgcgagataggcttcgcatggcggtgacgcccggcggcgggaggttcgcggcgagcaattacgaagtcatcgcgacgctcgccaatggcaatgcctctctcgtcgaatggcggctggagactggacgaacccaccaaattcgcgtgcacgccaaacacatcggtcacccgatcctcggcgacgacgtgtacggcggtggtgggggttccgcggtgagcgcgttgacgcgttacggcgtcctcgcgccgaaagaggcgaaagccatcctgtccaaaatcgacagaccgatgcttcacgcgcgaaccttggggttttcccacccacgcaccgcggaaagtcttcactttacgcgagatccaccggacgatttcgcccagtttgccgccgcgttgtctctatcgncgtnnnnnncnnnnnnnnnnnnnncgnnnngnnnnannnnttncnnnnnnnncnnnnnnnnccgngnnnannnnntnnnnnncnnnncnnnnnnnncnnnnnntnnnnntnnttntnnttnttnttntnnttntnnncnntgnnnnnnnnnnttcnntgnnnnncgtgnnnnnngnnnnnnngnnnnnnnngnnnncngnncgnnnnnnccnnnnnncncnnnncncnnnnntnncnannannnnnnnnnncnngnnngnngcgnnnnangcnnnnnangncnncnnngacnncnncnacnacgacnacnannnnnnnnnnnnnnnnnnnnnnncgnnttnnncgnnnnnnncnnngncgnnnnnnnnnnnnnnnnncnnnngcgncngnngcgnnngntgnncganntnntcnncntnntcnnnnnnnnnnannnnnnnnnnnnnccnnnnnngnnncnncngngnnnnncgngngnnnnncgngnngatcganngnntcnnnnncntcngngnnnnnngngnnnnnnnngnnnnnnnnnnngncgnnnnngtcgtcgtcgtcgtcntcntcnncnnnnnnnannannnanannnncggcnncncnnnntnnncnnntnnnngnnnnngnnnnnnncgnnncnnangnnnnnnnggnannnnannnnnntcancnnnnnnnaannngnngnngnngnngnngnngnngnnnntnnnnnannncgncgacgacgacgacgangannagnagnngnngngnnngannngnnngannnnnntgnnnnngnngnngnngnngnt

SEQ ID NO: 1338 - DNA, 4000 bp, Escherichia coli
  misc_feature (49)..(49): n is a, c, g, or t
  misc_feature (394)..(394): n is a, c, g, or t
  misc_feature (1544)..(1544): n is a, c, g, or t
  misc_feature (2608)..(2608): n is a, c, g, or t
caaagacaataggaatgacaatgggaatcatcggtctatttgtcagtangttttcgacaagtaccctcgccgccgcagaacctggtgccccccctgcagcccaatacaacaaacacctcacctgcgccgtgtactaccgaatggtggccggcagtttcaaacgccaaggcaatggcatcttggccgcgccagccctggatcaaatgaatctaatgatcacgcgcacaaaggcactcggcgcggcgttaggccataccgaggctgattatttgagtgattggtcggacaccctaggtgtcatgacggatcaaatgaatcgcaactatgacaatattcgccaactgaaaacgcgctaccaaaatcgctgcaaagcgcttaatgactgacaacccgntctgccaacccgcgtatcacaccgcgcatcgatcggtttaaaagtcaggcgctgcctcgagcatcaggacgcggttcgttgcgggatgcgcaaaggtcagcctctgagcatgcagcattaaccgcgcccccgacgcacgcaccgacgccggcgcatacaaatcgcatcccacaatgggcagcccaatcaaggcaaggtgcagtcgcagttgatggcgaacgcccgttacgggcatcaaggcgagtctcgtctgcgagccggctgcgctcagaacccgatatcgcgtcaatgcctgcttccctgtccgccaattgacccgctggcaggggcgtcgtaaccggtcgggcccaagtggaaaggtgatttcgccagcatcaactgcggccgttccggcaacctgcgcaacatactgcttgtcaatccggcgctcacgaaacaattgattgagtccggagattccccgtttagaacacccaaaaaccaccaaccctgaggtgtcgaggtccaagcgatgcaccgcttgggcctcagctcgcagggcttgagcctcgttcagcaaacaccgcttttcgaaccgaccgggcgtcgtaaacagccctgctggcttattcatcaccagtaggtgctcatcttcataaatgatccaatctttcacattacgccgtctcaatcgtttcttgccttctgcttgggtatcataccggttcagcgaagcagaatcggtcttatgactcagaatatcgaacaccttggcgaggtcattaccgctgccgttccagcgctcctcacagcgcttgaggtaatggaaacggtgcaacagggccaccatccggctcggccacaggcgaccatcaactttatcgaaccgtttatcgaatcgctcaatgaggcgcacgcatcgcttgcgccgctgacttttcccacgcaaatcgaaaagtttggcgagcatctcaagaccagctttctgtatgcaagccggaccggtgagaatcttaccgccacagccgaagactcaatggcattcttccgagcaaacagaaccttcagtaaagcgttggatcacctattcccgttggcgaccctattgaatccaatccatcagtttttcctagaggcgccgctgcggcacagcccgaacgtagccgagcantttttgtctgagccgagccattatcccatcacccacatcgaaaatgcctatgatcaacggggcggcgcgtcgatctacattccgcactgggtcgacccgaatgctttgacgcccgtggtcatcgcacttcacggtggagccggccatggccgggacatgctctggcattggttacgagaagcgcgcagccgagggtttgttttgatcgcgcccacgtcaagcgaggatacttggcggctcaaccgtcccgagctggaacaaccggcacttttggccttattgcacttcgtcaaagatcagatccaaatcgatgagacgaaaatcctactctctggcttatcggacggcgccacgctttcgttacagttgggcttacaacctgacgcgccatttacgcatttggcccctttctcaggcaccctcgatcctgccctcgtcagtcaggaggtggatcttttacagcaagacaagcccatctacttagtacacggcgataacgattggatgtttccagtggagattggccaaatggcagcggaattactgggcgctcgcaatccgaatctcatttataatgagatcaaaggattgggccacacctttgcccgatcagagttgaagcaattattgccctggttttcagcggcactctcactggagcaataacctatgacgaatcgactgatattgtgtgtcttgctggtcattatcagcccttggctactcgccaaagaattgatcctgctccacaccaacgattttcacgggcacattcaacaagagggcaagtacgcaggcgcggctaaaattgcagcgtttgtaaaggaaatcaaagctcagcaccctgcggtattgctgctagatgctggcgacgccatctctggaacacctgtgtccagcatgtttgaaggcgaacccatattcgatgttatgaatgcgatgggctacgacgtcggcctgattggcaaccacgaatttgatcatggctataaaaagatcgagcgctttcgcgccatcgccaaccaccctttattaaccgccaatgctcttggcccggacggcgngctattgggcgatgccccttatttactgcgcaacctcgatggcatccgagttgggatcatcggcttgatcaccgagacagcccccaccttgttttcaccgaccggcaacgaagggttaacctttttaaatcccgccgatcgactttccgaactcgtgcccatgctcaggcccaaaaccgatgttttgattctactctcccacattggacatgaagcagaattggtattggcagaacagttccaggatcttgatctcatcattggcggacattcgcacaccttggtgcagcatccagtgcgggttggtaaaaccctcgtcgcccaagccaaccactacggcagtcatttagggctgatcaagatcaaggtgcccgacgcggggcaggggtccctcgatattcaaggcgatttgattgccgcgaacgagctgcccgatggggatcccgcaacgcaagcgctggtttcatcctatgaagcaaaggttgaagatcaagtcgatatcaagatcgctgtcattcgcaaaaactatagcaaaatagcgcttcaaccgattcttgaagacatcttggccgaggctatcggggccgacctgggctattacaatcggaccggtattcgcgatgtcctctcagagggtgatgtcacagcgagaatgatttggaaccttgagccctttggtaataccctggttaagctcaccctaagcggcgctgacttgttgatactgctcagccaagagcccaccctgcatcacgcagccaacgcaattgatccagaacgacgttatcagctcgcaaccaattcgtttatcgcatcccacgcgaccctggcctttggcgatgccatcaccgccgtcgataccggtattttagtccgcgatattttgatccaacagatcaaagccaagggtctgcagtaacgggccgcctcgtcttaggcgcctttaaagaatccgcgaacctcccccacaaagcggtcgagctgatcatgctgcacccaatgacccgcgtgatcaaaccgaacagaacgcgcattgttaaagtgttccgccgggtcacccggttgatgacgaccaaactcgctttcgctgccgctgattaataacaaaggtgcattgattctcgaccagagttgctgcgtctgcgcaagggtcaaatcaaagggcgccatgacatgggtttggttatcaaacttccaggaataggtgccgtcttcgttttggttactaccatgcactgttaagtggcgcgcttgggcttcgctcaaatgcttattttccgtgcgcatccgctcaaaggcttcttctaaggtggcataccgccgcggcgttcggcccgcgctgccccgcgtactgtcaacgaaggactgaatgcgctcgtgcaccgggacttc

SEQ ID NO: 1339 - DNA, 4000 bp, Escherichia coli
  misc_feature (1969)..(1969): n is a, c, g, or t
  misc_feature (1973)..(1973): n is a, c, g, or t
  misc_feature (1976)..(1976): n is a, c, g, or t
  misc_feature (1978)..(1978): n is a, c, g, or t
  misc_feature (1982)..(1982): n is a, c, g, or t
  misc_feature (1987)..(1988): n is a, c, g, or t
  misc_feature (1992)..(1994): n is a, c, g, or t
  misc_feature (1998)..(1998): n is a, c, g, or t
  misc_feature (3987)..(3987): n is a, c, g, or t
gccggtaccatcgggttgtgcccaacctcctgtctccctcgacccgcggcgccatcgatctccccggtgctgacctcgattggctccaccagctcatcgccgattggcaggtgatcgcagacctatcggtgtccgacctggtgctgtggatccgcaccagcaccggacgtttcgtcgccgccgcccactcccgtcccgccacgggcgccaccgtccacctcgaggaggtcatcggccgacgtatgcccgccgcccgcgaggcgatggcgctggaggcgctcaccagcgtgcaggtcgtcgtcgccgccgatccggaatggaccggcacgaccgccgtgcgcgaggaatacgtcccggtggtgcgtgacagtgaacccatcgccatcatcacacgggagacctcggtgggcgtcatgcgcggcgggcggatcgtccaccagccccaggaggatctggccgacgcgttgtgcctcatgatctcccagggcgccttcccgatccggggcgccgccaccgcggtgcgacacggcactccgcgcgtgggcgacggtgtcgtcaggctcgacgacgacggagtcgtggtctacacctcccccaatgcgcgatcctgcttccaccggctggggctggtcgacgagatcgacggacaggtactcgccgaggccgtcactcggatcattcccgagcgcacgcccgtggatgagacgctggcggtcgtgctcatggggcgccaggcctggctgaccgagatcgaggtcggcgggatcttcctgtcggtgcgctccatcccactgcgtcgcgacgggcatcgcgccggtgctctgctgctggtgcgcgacgtctcggagatccgacgacgcgagcaggtgctgctcaacaaggacgccaccatccgcgagatccaccaccgggtcaagaacaacctgcagacggtctcggccctcctgcgactccagggccgacgcgccaccaatgacgagacccgcgaggcgctggccgaggccgagcgccgcgtcgccaccattgcgacggtgcacgcggccctgagccagaacgtcgacgagaccgtcgatttcgacgaggtcttcgcgtccgtgctacgcggcgctgcggcggtggcctccgctggcggacgcgtgaccacccgcctcgaaggcgccttcggggtggtggaggccgatgcggcccaggcgctggcgacggtcctggccgagctggtcaccaacgccgtcgagcacgggcttcaggatcacgacggcaccgtggtcgtcaccgctcagcgcgatgacgacgagctgaccgtccacgtcatcgacgacggcgtcggccttgagcccggagcggcgatgacgggactgggaacgcggatcgtatccaccctggtgcacggggagctgcgcggcaccatcgattggcgacccgtgagcgatccggtgcgtgaggcgaggggcaccgacgtcgtcgtgcgcgcccggctcgctccgtcggcctgatcgtctcggcatcgcgggtcgacgcccgacgcgtttcgatgacggaaccggcgaggcccgccgatgggcgggatcgcctcgcacatgggtttcggcttgaagcttgaaggaggtgcgcggcgtctacaacgaggtgtgcggcacagcccgtgaccgggtcggcgctgcgaccagatctctccccagtgcgacggtgccgaccggtgcaagactcagccagcgacactggaacgaggcggtggcgtatcgggtcgtctacgacgccgaggtcttcggatgacgcctgcgctggacaccatgcggcaggataacaagacgagcgtttccgatctcatgccggcgcgatccctcgtgcgcgacaatgaaataatgaggaataccttgtcttccaccgggggaggaggcatgcgccgcgcacggtcgtgcgccgtgagtactcgacctgctgaagcggaattttgaagccgtctgacgcnccgngcncnccgnccgcnngggnnngggncgggggggggggggggggggggggagccgctcgccgtttgagggaacgacgctcgtcctcgctcatccccccccacacgccagcatcctgaccgttctccagagcccacttcaagcaggtgtcgatgacctcgcagcgggcgcacacctctttcgcctcggcgatctgcgcgatggccggaccggtgttgccgacggggaagaagagctccgggtcaacggtgagacatgctgcctgacttcgccagtccatgagggctcccttcggggtacgtcttgcggcccgcctatacccgccataccgagcggtgctcggagatgagcaacaggttgtcgcgttctgagccaactttcacacgcgtgcgcaggtgtggcaagagttcagcggtgagaggtgcgccggcgaccttgtcgttatggtcacaggaacgaatccttgattctgagcgattcggaggcataagggaagccacgtcaggttgctgcagcagttgcgtcggcggcgatctgtatggggacggtatccccccgggacaccaggaccccgcggcccggatgcgtgggcgctcgcgggtcggtcaccgctcgcagcgagcgtcccgccacctgcgaggccggtcccagggcgggccacagtacgactagatcgccgcgctcgcgcagggtcgccaacggcccccggtacgtgcccacaacgcgttcggtggtcgccgaggccaggacgatccgtccgctgtgcagagctctctccactcgagagagcaccaccgcctcggccagatcgagatcgtcgatcgccaggaccggctcgtccggattttcatgaaggcagcgcttgagcgcggccagtgccgtcgtgcgcccggatcccgggggtccgaccacgagcacgcagccgcgggggaccggcaggggccgggcgtcatcaccgcccacggcccacgttccggccaggggcgccaccgtccgggggatcgcgaccaggcggtgggccgacctcgccgtcgcctctcggggcgcgcacggggtgaccacctggacggacaatgcccgctccgcctcgacggctccgtcgatgacgacgccgcggcccggagccgatcccgtcaccacgccgcgcgggaggcccgccaccgacgcctgggcgggctgcggcgcccccagtacgagccgcaaccctattctggaggcccatctggcccccgccatggacagcggcgcggtcagcaccagtcccgtgcccgtcgccggggccgtgcgcaccagcagctcgagcaggttctggccctcgcccggacccagcacctcgtcgacggcggccgccatggcatccacgtcgtcgacgaccagcagttccccggccagccgcccggcggcggccaacgaccacaggcgcaccaggcgccgtggatcctccgggccgacgacggtgcccagtccccggtcgagggccgtcagccaggggggcgcggtgcccgccaggcacagggacaccgcccgttgagcatccatggccgcgcacgccgccgcgagggccgccgtcgtgcgccccgagccgggcgagccgatcaccgccaacggtcggtccaccggccaccgccagtgccccaggcgctgctcatccggatggtccgtgcccgccagcaccagaccctcggccggtcccgtggcggggcccagttcggcggcctcccgcgcactcagcgatgcgggcagcggcgcggcccatggccgccacggcgatgaggtcgagcgggcggccgcccgcacctcggtgatcagcgcctccaggcgatccgccggcccgcaccacggcgcctgagcggcgccgtggtcgccgtccgtcccggcgaccaggacgcgtccgggacggggaccgagagcggccgcgccctcatgccccaggacgtcgcgggaatccccggcgtcgagtacacgcaggcacacccgcagtgttgtgttggcgcgaatggccggggagatgacgccngtcggccgctgtg

SEQ ID NO: 1340 - DNA, 4000 bp, Escherichia coli
  misc_feature (1)..(1): n is a, c, g, or t
  misc_feature (4)..(4): n is a, c, g, or t
  misc_feature (7)..(7): n is a, c, g, or t
  misc_feature (11)..(12): n is a, c, g, or t
  misc_feature (14)..(16): n is a, c, g, or t
  misc_feature (19)..(20): n is a, c, g, or t
  misc_feature (22)..(24): n is a, c, g, or t
  misc_feature (26)..(26): n is a, c, g, or t
  misc_feature (28)..(30): n is a, c, g, or t
  misc_feature (32)..(33): n is a, c, g, or t
  misc_feature (35)..(38): n is a, c, g, or t
  misc_feature (40)..(54): n is a, c, g, or t
  misc_feature (57)..(62): n is a, c, g, or t
  misc_feature (64)..(66): n is a, c, g, or t
  misc_feature (68)..(79): n is a, c, g, or t
  misc_feature (81)..(83): n is a, c, g, or t
  misc_feature (86)..(88): n is a, c, g, or t
  misc_feature (90)..(95): n is a, c, g, or t
  misc_feature (97)..(98): n is a, c, g, or t
  misc_feature (101)..(106): n is a, c, g, or t
  misc_feature (110)..(111): n is a, c, g, or t
  misc_feature (113)..(117): n is a, c, g, or t
  misc_feature (120)..(120): n is a, c, g, or t
  misc_feature (122)..(122): n is a, c, g, or t
  misc_feature (124)..(124): n is a, c, g, or t
  misc_feature (126)..(128): n is a, c, g, or t
  misc_feature (130)..(131): n is a, c, g, or t
  misc_feature (133)..(135): n is a, c, g, or t
  misc_feature (137)..(140): n is a, c, g, or t
  misc_feature (142)..(144): n is a, c, g, or t
  misc_feature (228)..(228): n is a, c, g, or t
  misc_feature (414)..(414): n is a, c, g, or t
  misc_feature (1990)..(1991): n is a, c, g, or t
  misc_feature (2007)..(2007): n is a, c, g, or t
  misc_feature (2016)..(2017): n is a, c, g, or t
  misc_feature (2021)..(2021): n is a, c, g, or t
  misc_feature (2317)..(2317): n is a, c, g, or t
  misc_feature (2444)..(2445): n is a, c, g, or t
  misc_feature (2453)..(2453): n is a, c, g, or t
  misc_feature (2456)..(2459): n is a, c, g, or t
  misc_feature (2466)..(2467): n is a, c, g, or t
  misc_feature (2469)..(2469): n is a, c, g, or t
  misc_feature (2792)..(2792): n is a, c, g, or t
  misc_feature (2807)..(2807): n is a, c, g, or t
  misc_feature (2838)..(2838): n is a, c, g, or t
  misc_feature (2846)..(2846): n is a, c, g, or t
  misc_feature (2855)..(2855): n is a, c, g, or t
  misc_feature (2858)..(2858): n is a, c, g, or t
  misc_feature (2861)..(2861): n is a, c, g, or t
  misc_feature (2864)..(2864): n is a, c, g, or t
  misc_feature (2910)..(2910): n is a, c, g, or t
  misc_feature (2912)..(2912): n is a, c, g, or t
  misc_feature (3059)..(3059): n is a, c, g, or t
  misc_feature (3065)..(3065): n is a, c, g, or t
  misc_feature (3080)..(3081): n is a, c, g, or t
  misc_feature (3089)..(3089): n is a, c, g, or t
  misc_feature (3091)..(3091): n is a, c, g, or t
  misc_feature (3104)..(3104): n is a, c, g, or t
  misc_feature (3152)..(3152): n is a, c, g, or t
  misc_feature (3161)..(3161): n is a, c, g, or t
  misc_feature (3164)..(3164): n is a, c, g, or t
  misc_feature (3179)..(3179): n is a, c, g, or t
  misc_feature (3184)..(3185): n is a, c, g, or t
  misc_feature (3194)..(3194): n is a, c, g, or t
  misc_feature (3197)..(3197): n is a, c, g, or t
  misc_feature (3220)..(3221): n is a, c, g, or t
  misc_feature (3223)..(3223): n is a, c, g, or t
  misc_feature (3225)..(3225): n is a, c, g, or t
  misc_feature (3228)..(3229): n is a, c, g, or t
  misc_feature (3236)..(3236): n is a, c, g, or t
  misc_feature (3248)..(3248): n is a, c, g, or t
  misc_feature (3254)..(3254): n is a, c, g, or t
  misc_feature (3257)..(3257): n is a, c, g, or t
  misc_feature (3557)..(3557): n is a, c, g, or t
  misc_feature (3564)..(3564): n is a, c, g, or t
  misc_feature (3622)..(3622): n is a, c, g, or t
  misc_feature (3624)..(3624): n is a, c, g, or t
  misc_feature (3649)..(3649): n is a, c, g, or t
  misc_feature (3658)..(3658): n is a, c, g, or t
  misc_feature (3728)..(3728): n is a, c, g, or t
  misc_feature (3734)..(3734): n is a, c, g, or t
  misc_feature (3743)..(3744): n is a, c, g, or t
  misc_feature (3749)..(3749): n is a, c, g, or t
  misc_feature (3780)..(3780): n is a, c, g, or t
  misc_feature (3793)..(3793): n is a, c, g, or t
nganacncaannannncgnnannnanannntnnannnngnnnnnnnnnnnnnnntannnnnngnnnannnnnnnnnnnnannnaannncnnnnnnanngannnnnnaaannannnnnctnangntnnnannannnannnngnnnaaatactttatccctctattgataatagttgtagtgggaactatcagtctgtaataagtcagatggtagcatctggtttaatancaagcggattaacttttaccgatggtgattggcagaatatggctgttacaaaagtaaaggtaaattggactacgcttgcaaaccctttaaaccccacgagtaccgtaaataatcaacaatatatgctcgttgaattatgggctgatagaaacgctgtattacctccatttataagagtgggtgganctattgtttgtgccaatataacacttcctataagcgtacaataccctataacatcaataagaccgaatgataactgtataggtggcgagatatactttgtaaactatcatgatccgtttatgataatgcaagtatatgatatgtgttacaacggtgggttattgccagacgataacgggaattatacttgtactaataaatattttactggatttcaggtaaatcaatattcgggtgttttaaccaatcccaacaactcttttgcgtttaaagaaataactacgcttggtggttttagctcatcgggttatcctaatccatttatattgggtggtaatggaatgaaggtaggaacatatacttatatgtatcagtatgtagatgcggcaggtaatgttacaccttggagtataatgacaccgggaatacccttgccttataatacggatggcacttcaaatgcgggaaataatagcgcattatatccttggataaagacatttggtgcatcggcagctatgggagaaacagatttaggtatagtcatacaattaagaatttataacgtattaaattacgtttcaataaatatagcaagggctgattataatgctggaataccgataggcggaagcgttacacctactattttaaatataggcacagcatcagcattagcaccgggagaaatatcagtaaggacattctttgatatgagtgcttctggtactcccataacaacacagcaacaagcaaacacgttatcaactatcggtacttgtaagtcattaagatattttaataatagactatggcaaatgaatgtaaaatatgccgataggtctattgttccttcttcaatatttggtaatacaacccctttattccctgtaatggaatggatgggtattgccggacacaaagacccttatcatcatacgtaccataaaaattatatgagtggcgaaaggtttgactttgctatggtatgttttgattctactttcactaattcttttgcaataccaatacctacaggtacattaggatattatcaagtaccaaacaggagagaaccgagaacgggtaatagcgacatttattcatataattgcggttataatccttattcttcttctccacaggtaacggctattgcgggagatataaatggcaatgcaataagaacttttgaaaggtttgttacagacagatgtattgcaaaaacagattcaagttcgagttataatatttgtaataatgggcaaaaaccatacaatcttcttcatccgcacaacagggcgagtgctgtgggatacaaaccattaacacctaaaggtgattctgatacggatgtgagcgggcatgcctttagaataaacgaccaagtttataatgcaagttctggttggttagggtatgaaccagaaggatttgcacccgaatatatgtcttgcggatgggcttgtcctatagatgtaagcaaattaccttcatgggtaacatcttttgtaatagtaagaagcgaccctgcgggtagggtaatgatgcagggattgggattctatgatatganncccacaagcaaacctnatgttgganntttnaataaagattcttataaaacatggttttttagtcctgatttagtaaattacgacagtggttattctttaatatccaatagtcaaatatctgctgtaaattcagggcaatatacagcacaggcaatagcaccttatggtatgttttcagaagtttttttgggagattatcacgacccatctgctgatgaagattgggttgatatgtgttgttattgcagaataataaaagattatggtaatatatattggtcgggtaagcctccaagaataaaccccgatccacgattaaacacgcntgattcatgtgtaatgttcggcacgtggcaaaacggacaacctaataactggacttataatggcgggatttatgggaatataaatacttcttctaatcctggggaatttagtatttctggattttcnntacatacnggnnnnccttatnntnacccaggtagggttgcgggatatgaatactatgatttaacactaacaagtcccatatacaatacagcaggtggtagttcttcttcaccgatatttagacctaacggaacaaataactcatcggcaggacttgaaccaatgtatttgtttaatatagtaaacgataacgcattaataccgcagaccaatacaacaaattattacgatactggaacttttgcaaagataattagctgtttaggacagtctgacggttctacaaccaattatcctttagtagacgaaagatgggaagattgttgtaacggaataacagacggtaanggtaatcttgttgcnggtaatttaatgaatagtaattattcttatntgtatatncaagatacnaanggnaancaaacaacgtggatggatagcacttatttatctaacacacaaatangnaatataaatgctctaataaatacaactggttattatgtaggaacaactttaatatcgggattgtatagatttaccacagatacaaataacacaagtcctacttttaataggtttttcactataatatttgatgtaaataacacaacntggacnggaactaactggacnngtgctacnanttggatgccaacngcgggatatactatttggtgtagatatgatagccgaatgcctttaagnatatttggnggngattcctttattacngaaannatatttccngtngttgatacatattttgacacaannantntanntaatttntttaattttggnacatcnttnccttatttttcatggaatttaaacgacaattatttaatacctaatcatgcacaagcagcctcagatagtaatcccaactgtttgcaacagcacaacgatgtagatttgaattatattaggcaaatggtatgcgtttttaattgcgaaacaagaatgccgactgacttgtattgggaatttcctaataaagcctgtaactataattcagataaatactttcctgcaacaaattacgtaatgcgacctttagattggggtagtagctacggagataattttaccggagcaagtaattgtaanagttctnatggttacggtggcaacataatacctcaatatgacaatgattaccccaacgaatggananaatgggggtggggtggttttcattntagaccatncgtaaacatagattatatacacgataacgacactccttatacatcacaaccaatagtaggatatgtaaanaaaacnttatattgnncaagngtagcttggagtttggatagaccattaaatncgcaggacgtacntaatcttaaaacttttcttgctgccaacgtatatgacgcatcagatgatacggggtgtatagattatgcttttgatgctttaactggaaataaaggaagtaacctttttgcagtaacagatcatggcgtggttttattcccaacaatgaaaagcgttgtttcggaaaatgcaacaagtaatgatttggaagtcattgatagtacggt

SEQ ID NO: 1341 - DNA, 4000 bp, Escherichia coli
  misc_feature (1985)..(1985): n is a, c, g, or t
acatttttttttcagtaggttagttagtaagttcatttgatatattatataacttttgatattataatgaggcattatgtaatttttgtagtttaggttttattattagttttaagaagtgcaactattatatttaaaatttattattaataaaattataatgaaaatattaaaatcatattagacattttgtatgttgatcattaaattaatacaaatatcaaattatttattttatattacaaaattttttttattaataaaataaattactcacataaataagttcttctggaactttatcacatccatcttcaatttctaattcagaaagattcttaatattctttaatggaaagagatcttcagcataaatagcacgaacatcaattttttaatgattcaagttatatctttgattgatcttttatttaaattcttctaaaaaaaaataaatattatttttgtttttcatatgaaatttattattaccaatgatataatcccattcatcaattattagtataaacttttcttttattttcgaatttatatatttataaatatattttatttttttattatttaattttattttttttttattattttctttatgaatattaatcacgaatgattcattattagatggccagaattatttgccatgtactgatttgaaatagtttacaaacatgggaagcggaataataaagccaatgctctctcaagagtagaaactgattagacagggggtaaggactacgataaggatagtctcttgaaaccagagcaaatggtaggattcgacgatttagaaggtgaaagcaaattatttggctttagctaccaatttcaaggatgatttcaagaaggcctaccgacaggacaagatggctcaaaaaatatttaaagatctagcagaagacgaaggaaataacttcaataagaaatattagttagaggtagatagtcttctaataagaaaggaaaatcttaaacaagtttacgtacccacattgtttaggaaaactattatacaactaaaccacaacttagaatatgcaggttacttagggatagacaagacctcggatctagtgtcaagcaacttctactggccaaagatgaagaaagatacttcagattatgtaagagcctgtgaaacccgcgctataaagaaggatgatcaacacaaggaaaatggtaccactgtgagagttccagttgtggatttgcattggcaagaaatccaactagacttcaatacgaatttgccaataaagagatgaataagaacagatgaaggtaaataggtaaataaaaaaaaaaaagattaataaaattaaacttatttatattaatcgaggcttgataataatataatgaaattataatgaaattattttaacaataaattaaataatgtatttcaattttataaaataatttacacataacgaaataatataatttatataattttaaaaataatttacttcatttgcaataaaataataaaatatattaaaaataaattatttatttattagtttgataattatttatttccttataaatataaagttaatacgctacttattgcaatatgcctcattgtgaaattcttcactctatgttatggataatattttaattaatattttgtattacattataatacgttgtttttttttatttacttagtttaataaagtttttaactagaataataaaaatataaattattacaatataaacataatataatgtaattaattaaaatattctagaacaagccacatatttagtataaaataaatacatgtaaatttcattatgttgaatatggctaattacctattcatatttatcataaataaatcattaataaaacttcatataatataacaattataaaccaataatttatttattttactatatataattattttttactagttaaaaaaaaaaaaaaaaantaaaaatagaataaaattattttttttttaaaaaaaatgggaaggattattgatagtgataaaatgtttaataaatatctaggaatccgaaatcaggattactttgtagataaatctaaactaataaataaattaaacaaattaatagaaaaagatgagtctaaatatgtatgcattacaaaaccaagaagatttggtaaaacttcaatagctgcaatgttagttacatattatagtaaaggtataaattcaaaaaaaatatttgatgaattaaaagtttctaaagtaataaactctgataaaaatgaaaataaagtagaaatagatcaatataataaatttcaaaaaaaatatcacacaatatattttgatttctcgtatgatgttgattcctacaaaaccttaaagggttatttaaaatcaattaataaagatttaaagaaagatattaaagatttatatccaaattctaatatattaaaaaaatatagtagaaaaatttataaaaatttacaagaagtttttgtagctattaaagaaaagtttattattattattgatgaatgggactatataattagtaataatttgtttactcccaaagagcaaaagaagtatattgcttttttaaaaaatttaatcaaagatcaagtatatgtagcttttgtatatatgacaggaatattaccaatagcaaaacaaatgactcagtccacaataaattgttttaatgaatattctatgttaaatgacaaagattattaccagtattttggttttactgaacaagaagttatcaaactatgcgaaattaataaaacaaaatataatgaaaatgaaactttagaatatgaaaatatagaaaattggtataatggatataaaggttacaatggtaaaaaaatttttaattcatggtcagtgtatcatgccttacaaaataatagaattgaaaattattggatacagacaggacgatttaatgaagtggtagattcaattgactttaaaattcatggtgtaaaaaatgatattttagatttaattaaaggggatgatatatctatagaattagaaaagtatggagtggaagatctattaaaagatacagaaacgaatgattcacaagaaaaaacaaaaaaagataatgatgaagataatattaacaagaaaaagcaactctattcaaagatggttacatatggatttttaacttattgtaatggtaaaatttccattcctaataaagaattacaggaagaatttataaaaattttaaaaaaaaaaaaaacctgaattatttatatgatttaattaataattctaataaaatgttagaactgacaataaaaaaagatgttaaaggaatgtgtaaaatattagaatatagacatatgaaaacaataaaaccaaaccataaaatggatcatggtaatttaaaacgtgttattgattacgcctattttaatgcaaaagattattatgatattaaagaagaagaaaacagtgaaaagggtaacttagattatattttttatccaaaaatagaaaatgaaggaaaaaaacctgttattattatagaattaaaaacaaatggctcagccgaaaatgtaattaaccaaatacatgaaaagaaatattggtttaaaattgaagaaaaagaatttaaagaaaatattcttttagtaagaataagtttagataagaataaaaaaaaatatacatgtataatagaagaatatgctaatgtttcagaacttaaatcagctgaagatgaaatggagggagaagataaaactaaaaaaagaaaaagggaaagtagttctaactatgaatctgaaagtgtatttcaaggaacaagaagtaaaacaaaaaaaagcaaaaaataaaattgattccgaataagatatatataaaattttaaattatataatataataaatatttaaattattattattatatatataaaaatataaaaatattattttacaatatttaaatcacataacaat

SEQ ID NO: 1342 - DNA, 4000 bp, Escherichia coli
  misc_feature (1987)..(1987): n is a, c, g, or t
  misc_feature (2702)..(2702): n is a, c, g, or t
catcaccgattgacataacaataccgaaggcatagttagtagactcttctggctgcagttgacctgcgcccagcttaaagcttggcagagtctgcgcctgagtcagctgaccgccaacgagagtagtctgagtgttaacaacgttagcctgaccctgagttggagcacggaaaccagtactgtgtgaaccacgaatagacaggctgtctgacatctgcttgttaaaggtaaccttgtagttagcagtgtcaccgaagcttgtgtagtcctcataacgcagagcaccaccaaccaacaatgtatcagaaacctgagattcaacgtccatatacagcgcgtagttgcgacgagagaatgcaccagctgagtctggagagaatccagcgaagccgtgagagccaatgttaaagccctgtgcagcatactcacctactttccaagaagcttcttcaccagaaacaacttcaaaagtggtttcacgccactcggcaccaccagcgatgctagtgtcgccatactgcttctgcagatccaggttaaaggtcttttctaactgaatgtagctaccagtatagaaatcgcgctttgaatcaggacccatagatgggttgaacgtgttgttcagaccaaagtctgcttcgttgcgaccaacagaaccgcttacgtcatagcgaacgccgtccatgtttccgccagtgatttcgccacgagtaccagctgtgaaagaggtatcagtgatgttaccggtgaaacgaggagtgtagccgccaggagcctgttcgttgtgaatatagcagttagggttagccataatcgcatcgcgcagagcgtagtcagcaggatctacgtcagttgggcagttaccggacatatcgccagttacgtctgcaatcagacggttgccgtcaccatttgtaaatactccgccacggctgtctggattacggtagtagaaaccaccatccacatcgcgctcagagtagttaccaaacatgtaagcttcagcgccattgcccaggtcaagacctgagttgaagaagaaagttacatcgtcgtcaatttttggggcaccccagatctgggccggatctgtcactgaagtgttgcctaagtcgatcaggtcctgtgcgtctggacgctgcacggaacgtgaagtgtcatcagcttgcttcacctggaagctcaggttaacaaaaccagcatcagtcaaaggtaaaccaacgttacctgcaactgtagtagtggtgccgtcgccttcgctgaactcaccctgcttaacagttaggctaccgccttcagaagcgtcattcagtacaaagttcaaaacaccggcaatagcatcagaaccatactgagctgctgcgccatcacgcagtacttcaacctgcttcagagcaatgcttggaattacagagatatcagcaccctgagaaccatcgtttacaccaccgccctggaaggcgataactgatgcacggtgacgacgcttgccgttaaccaagatcagggtgctgtctgcagagagaccacgcaggttagctggacggatcatagatgccgcgtcactgataggctgcaggtgaacgttcagtgaaggaatagcaccctgaagctgcataagcaggtcagagctaccagctgagttcaactcatctgcactgagaacgtcgacaggaactggtgattcagtaacggtgcgaggtgcaccacgtgaaccaactacaacaacttcttcaagtgctgcttctgctgcaaatgcaactgtaggaagcgcagtgcttcctgcaattactgctgccgcaatagtattcattttccaaaaggtattagatttcataaatctcccccgagatgtttgtggataaagctttgggttactgtgcctataatgggcttttttataaattccgtattgttaaccgagccagatgggatctgtttctgttactgcattggtttaacgaaggtaatacgcaaaccctcatcngcaagtttactctaattgcaatctcttttcgatagtcgtttttaggtaattgaaagtcgtaaaagacttagggttaagactaattgttaacttgacccatcaatgtcttggattttttgccaggaatttctcgcaccagctttggtaccaagaaaccgggcagttcagcctgtagttgatgaaatatatgttcagcacgctgctgagaaatatcaaaatggctggcgccctcgattgggtccaatagatgtaggtagtatggcagcacccctacatcgtagactgtttcgctcagctcggataatacttgcgcatcgtcattgataccttttagcagtacagtttggttaaggattaatatgcctcggcttaatagtcgctggatcatattttgtacgctggagtcgatctcgttgctatggttaatatgcagcactattatcggcttgagtctggtggcagttatccagctaagaaatggctcatcaatgcgtgatgggatcaccactggcaatctactatgaatgcgcagacgcttgatatgagggatatctgcaatctgcttagttagccagctaagaaaattatcattggcggccagtggatcgccaccactaaaaatcacttcattaatttcttttgacctacttatataggcgatggcctgttgccactgctctttactctggcgattttcttgataggggaagtgccngcggaagcagtagcgacagttaatcgcgcaactgggactgactattaatagcaggcgattgcggtatttatgcacaatgcccggcactggattatgctgagtttcttccagtgggtctgcgctgtagcccaccgcagactgagtttcttggatcacaggcagaacctgagccaacaatgggtcattggggtcgccaattttcatacgctcaacaaatggccttggcactctcagggggaaatctgtggcggcctgatggcttggagagagttgctccggtttgagttgcaagcggcccagcagttcatcaattgagctgatgcattgactaaactcagttttccagctcggttgaatatcaatggtctgggaggtgataatggacggcataggacagcggctttggttgcaaagttaactccagcgattttacgctatttcttcagcattagtggccctgagtaataatctattgaagaccgacgaattttacatgacaagagcccttgagctcgcggctcaggctggcgctgctggtgaagtccctgtgggcgctctggtggtgcgagatgggcaggtgattggcgaaggttacaatcagcctatcagcgccattgatcccacagctcacgccgagattgtagccatgcgcaatgcggccgcccatataggtaactatcgtttaatcgactgtgatctctatgtgactatcgagccctgcaccatgtgtgttggtgccatgattcacgcccgtgtgcagagggtgatttttggtgccaaggagcctcgggctggtgccctggccagccagctgcaactgatggaaaacaagcacttcaatcatgtaatcgaatggcggggcggattgatggaaaaagactgtggcgatcttatcagtgatttttttcgccgcaagagaggcaaatagcggttttaaatggttggtacgccgttaatttcccagtctaccgatttagctggctcttcggtgtccggttcgaagtcctgctgagacagtgcatgaagctgcagataggttttgtagtactgaatatttttcacgtagagaactggctcgttgccgcgggcataaccatgtttgactgttgagtaaaatttctttttgctcaataggggcagatgcaggctaacatcgtcccagctatctgggtttttaccattgcgcaccgttaagatacgcgcatcttccaaatgaccaaagcccacgttataagcggcaagtgcaaatagagtgcgatcagggtcttcaatacgatcgggcaggcgagcctttagtt

SEQ ID NO: 1343 - DNA, 4000 bp, Escherichia coli
  misc_feature (13)..(13): n is a, c, g, or t
  misc_feature (21)..(21): n is a, c, g, or t
  misc_feature (67)..(67): n is a, c, g, or t
  misc_feature (238)..(238): n is a, c, g, or t
  misc_feature (313)..(313): n is a, c, g, or t
  misc_feature (316)..(316): n is a, c, g, or t
  misc_feature (388)..(388): n is a, c, g, or t
  misc_feature (562)..(562): n is a, c, g, or t
  misc_feature (713)..(713): n is a, c, g, or t
  misc_feature (769)..(769): n is a, c, g, or t
  misc_feature (784)..(784): n is a, c, g, or t
  misc_feature (819)..(819): n is a, c, g, or t
  misc_feature (841)..(841): n is a, c, g, or t
  misc_feature (843)..(843): n is a, c, g, or t
  misc_feature (930)..(930): n is a, c, g, or t
  misc_feature (1000)..(1000): n is a, c, g, or t
  misc_feature (1018)..(1018): n is a, c, g, or t
  misc_feature (1110)..(1110): n is a, c, g, or t
  misc_feature (1633)..(1633): n is a, c, g, or t
  misc_feature (1649)..(1650): n is a, c, g, or t
  misc_feature (1706)..(1706): n is a, c, g, or t
  misc_feature (1708)..(1709): n is a, c, g, or t
  misc_feature (1807)..(1807): n is a, c, g, or t
  misc_feature (1822)..(1822): n is a, c, g, or t
  misc_feature (1969)..(1969): n is a, c, g, or t
  misc_feature (1971)..(1973): n is a, c, g, or t
  misc_feature (1977)..(1979): n is a, c, g, or t
  misc_feature (1981)..(1982): n is a, c, g, or t
  misc_feature (1984)..(1984): n is a, c, g, or t
  misc_feature (1986)..(1986): n is a, c, g, or t
  misc_feature (1992)..(1992): n is a, c, g, or t
  misc_feature (1999)..(1999): n is a, c, g, or t
  misc_feature (2968)..(2970): n is a, c, g, or t
  misc_feature (2972)..(2975): n is a, c, g, or t
  misc_feature (2977)..(2977): n is a, c, g, or t
  misc_feature (2982)..(2982): n is a, c, g, or t
  misc_feature (2985)..(2988): n is a, c, g, or t
  misc_feature (2997)..(3000): n is a, c, g, or t
  misc_feature (3012)..(3012): n is a, c, g, or t
  misc_feature (3015)..(3018): n is a, c, g, or t
  misc_feature (3032)..(3032): n is a, c, g, or t
  misc_feature (3034)..(3034): n is a, c, g, or t
  misc_feature (3037)..(3039): n is a, c, g, or t
  misc_feature (3041)..(3041): n is a, c, g, or t
  misc_feature (3043)..(3043): n is a, c, g, or t
  misc_feature (3048)..(3049): n is a, c, g, or t
  misc_feature (3051)..(3051): n is a, c, g, or t
  misc_feature (3054)..(3054): n is a, c, g, or t
  misc_feature (3059)..(3064): n is a, c, g, or t
  misc_feature (3067)..(3067): n is a, c, g, or t
  misc_feature (3070)..(3076): n is a, c, g, or t
  misc_feature (3097)..(3097): n is a, c, g, or t
  misc_feature (3105)..(3106): n is a, c, g, or t
  misc_feature (3110)..(3110): n is a, c, g, or t
  misc_feature (3114)..(3117): n is a, c, g, or t
  misc_feature (3121)..(3121): n is a, c, g, or t
  misc_feature (3125)..(3125): n is a, c, g, or t
  misc_feature (3128)..(3128): n is a, c, g, or t
  misc_feature (3132)..(3132): n is a, c, g, or t
  misc_feature (3134)..(3134): n is a, c, g, or t
  misc_feature (3138)..(3138): n is a, c, g, or t
  misc_feature (3141)..(3141): n is a, c, g, or t
  misc_feature (3144)..(3147): n is a, c, g, or t
  misc_feature (3149)..(3150): n is a, c, g, or t
  misc_feature (3152)..(3154): n is a, c, g, or t
  misc_feature (3156)..(3157): n is a, c, g, or t
  misc_feature (3160)..(3160): n is a, c, g, or t
  misc_feature (3164)..(3164): n is a, c, g, or t
  misc_feature (3170)..(3170): n is a, c, g, or t
  misc_feature (3173)..(3180): n is a, c, g, or t
  misc_feature (3186)..(3188): n is a, c, g, or t
  misc_feature (3190)..(3191): n is a, c, g, or t
  misc_feature (3194)..(3195): n is a, c, g, or t
  misc_feature (3198)..(3199): n is a, c, g, or t
  misc_feature (3201)..(3206): n is a, c, g, or t
  misc_feature (3218)..(3221): n is a, c, g, or t
  misc_feature (3224)..(3225): n is a, c, g, or t
  misc_feature (3227)..(3228): n is a, c, g, or t
  misc_feature (3232)..(3232): n is a, c, g, or t
  misc_feature (3236)..(3237): n is a, c, g, or t
  misc_feature (3240)..(3242): n is a, c, g, or t
  misc_feature (3245)..(3246): n is a, c, g, or t
  misc_feature (3248)..(3249): n is a, c, g, or t
  misc_feature (3257)..(3257): n is a, c, g, or t
  misc_feature (3260)..(3260): n is a, c, g, or t
  misc_feature (3270)..(3272): n is a, c, g, or t
  misc_feature (3274)..(3274): n is a, c, g, or t
  misc_feature (3277)..(3277): n is a, c, g, or t
  misc_feature (3281)..(3281): n is a, c, g, or t
  misc_feature (3284)..(3284): n is a, c, g, or t
  misc_feature (3287)..(3288): n is a, c, g, or t
  misc_feature (3295)..(3298): n is a, c, g, or t
  misc_feature (3300)..(3300): n is a, c, g, or t
  misc_feature (3307)..(3309): n is a, c, g, or t
  misc_feature (3312)..(3316): n is a, c, g, or t
  misc_feature (3319)..(3319): n is a, c, g, or t
  misc_feature (3322)..(3322): n is a, c, g, or t
  misc_feature (3326)..(3326): n is a, c, g, or t
  misc_feature (3333)..(3334): n is a, c, g, or t
  misc_feature (3337)..(3340): n is a, c, g, or t
  misc_feature (3344)..(3351): n is a, c, g, or t
  misc_feature (3353)..(3356): n is a, c, g, or t
  misc_feature (3362)..(3362): n is a, c, g, or t
  misc_feature (3364)..(3376): n is a, c, g, or t
  misc_feature (3378)..(3378): n is a, c, g, or t
  misc_feature (3381)..(3381): n is a, c, g, or t
  misc_feature (3383)..(3390): n is a, c, g, or t
  misc_feature (3392)..(3394): n is a, c, g, or t
  misc_feature (3398)..(3398): n is a, c, g, or t
  misc_feature (3401)..(3408): n is a, c, g, or t
  misc_feature (3410)..(3411): n is a, c, g, or t
  misc_feature (3414)..(3414): n is a, c, g, or t
  misc_feature (3416)..(3417): n is a, c, g, or t
  misc_feature (3420)..(3420): n is a, c, g, or t
  misc_feature (3423)..(3423): n is a, c, g, or t
  misc_feature (3426)..(3427): n is a, c, g, or t
  misc_feature (3429)..(3430): n is a, c, g, or t
  misc_feature (3433)..(3436): n is a, c, g, or t
  misc_feature (3438)..(3439): n is a, c, g, or t
  misc_feature (3442)..(3451): n is a, c, g, or t
  misc_feature (3454)..(3458): n is a, c, g, or t
  misc_feature (3460)..(3466): n is a, c, g, or t
  misc_feature (3468)..(3470): n is a, c, g, or t
  misc_feature (3472)..(3477): n is a, c, g, or t
  misc_feature (3479)..(3482): n is a, c, g, or t
  misc_feature (3484)..(3488): n is a, c, g, or t
  misc_feature (3490)..(3492): n is a, c, g, or t
  misc_feature (3495)..(3497): n is a, c, g, or t
  misc_feature (3499)..(3501): n is a, c, g, or t
  misc_feature (3503)..(3503): n is a, c, g, or t
  misc_feature (3505)..(3507): n is a, c, g, or t
  misc_feature (3510)..(3510): n is a, c, g, or t
  misc_feature (3512)..(3513): n is a, c, g, or t
  misc_feature (3516)..(3519): n is a, c, g, or t
  misc_feature (3522)..(3522): n is a, c, g, or t
  misc_feature (3526)..(3530): n is a, c, g, or t
  misc_feature (3533)..(3537): n is a, c, g, or t
  misc_feature (3539)..(3539): n is a, c, g, or t
  misc_feature (3542)..(3542): n is a, c, g, or t
  misc_feature (3544)..(3547): n is a, c, g, or t
  misc_feature (3551)..(3551): n is a, c, g, or t
  misc_feature (3554)..(3556): n is a, c, g, or t
  misc_feature (3560)..(3565): n is a, c, g, or t
  misc_feature (3567)..(3567): n is a, c, g, or t
  misc_feature (3570)..(3572): n is a, c, g, or t
  misc_feature (3574)..(3574): n is a, c, g, or t
  misc_feature (3580)..(3584): n is a, c, g, or t
  misc_feature (3587)..(3588): n is a, c, g, or t
  misc_feature (3590)..(3591): n is a, c, g, or t
  misc_feature (3593)..(3597): n is a, c, g, or t
  misc_feature (3599)..(3599): n is a, c, g, or t
  misc_feature (3603)..(3607): n is a, c, g, or t
  misc_feature (3609)..(3612): n is a, c, g, or t
  misc_feature (3614)..(3614): n is a, c, g, or t
  misc_feature (3617)..(3620): n is a, c, g, or t
  misc_feature (3622)..(3623): n is a, c, g, or t
  misc_feature (3625)..(3629): n is a, c, g, or t
  misc_feature (3631)..(3632): n is a, c, g, or t
  misc_feature (3634)..(3639): n is a, c, g, or t
  misc_feature (3641)..(3641): n is a, c, g, or t
  misc_feature (3643)..(3643): n is a, c, g, or t
  misc_feature (3645)..(3645): n is a, c, g, or t
  misc_feature (3647)..(3652): n is a, c, g, or t
  misc_feature (3657)..(3659): n is a, c, g, or t
  misc_feature (3661)..(3661): n is a, c, g, or t
  misc_feature (3663)..(3670): n is a, c, g, or t
  misc_feature (3675)..(3676): n is a, c, g, or t
  misc_feature (3678)..(3678): n is a, c, g, or t
  misc_feature (3681)..(3689): n is a, c, g, or t
  misc_feature (3692)..(3692): n is a, c, g, or t
  misc_feature (3694)..(3699): n is a, c, g, or t
  misc_feature (3701)..(3701): n is a, c, g, or t
  misc_feature (3703)..(3703): n is a, c, g, or t
  misc_feature (3706)..(3707): n is a, c, g, or t
  misc_feature (3710)..(3711): n is a, c, g, or t
  misc_feature (3713)..(3714): n is a, c, g, or t
  misc_feature (3716)..(3716): n is a, c, g, or t
  misc_feature (3720)..(3720): n is a, c, g, or t
  misc_feature (3723)..(3725): n is a, c, g, or t
  misc_feature (3727)..(3728): n is a, c, g, or t
  misc_feature (3730)..(3734): n is a, c, g, or t
  misc_feature (3736)..(3743): n is a, c, g, or t
  misc_feature (3746)..(3746): n is a, c, g, or t
  misc_feature (3749)..(3749): n is a, c, g, or t
  misc_feature (3752)..(3753): n is a, c, g, or t
  misc_feature (3755)..(3762): n is a, c, g, or t
  misc_feature (3764)..(3769): n is a, c, g, or t
  misc_feature (3771)..(3774): n is a, c, g, or t
  misc_feature (3777)..(3781): n is a, c, g, or t
  misc_feature (3783)..(3787): n is a, c, g, or t
  misc_feature (3791)..(3792): n is a, c, g, or t
  misc_feature (3794)..(3796): n is a, c, g, or t
  misc_feature (3798)..(3802): n is a, c, g, or t
  misc_feature (3804)..(3804): n is a, c, g, or t
  misc_feature (3806)..(3809): n is a, c, g, or t
  misc_feature (3816)..(3816): n is a, c, g, or t
  misc_feature (3822)..(3822): n is a, c, g, or t
  misc_feature (3828)..(3828): n is a, c, g, or t
  misc_feature (3830)..(3830): n is a, c, g, or t
  misc_feature (3840)..(3840): n is a, c, g, or t
  misc_feature (3842)..(3843): n is a, c, g, or t
  misc_feature (3846)..(3846): n is a, c, g, or t
  misc_feature (3849)..(3849): n is a, c, g, or t
  misc_feature (3855)..(3856): n is a, c, g, or t
  misc_feature (3858)..(3859): n is a, c, g, or t
  misc_feature (3861)..(3863): n is a, c, g, or t
  misc_feature (3865)..(3866): n is a, c, g, or t
  misc_feature (3869)..(3869): n is a, c, g, or t
  misc_feature (3872)..(3875): n is a, c, g, or t
  misc_feature (3877)..(3879): n is a, c, g, or t
  misc_feature (3881)..(3882): n is a, c, g, or t
  misc_feature (3884)..(3884): n is a, c, g, or t
  misc_feature (3889)..(3889): n is a, c, g, or t
  misc_feature (3891)..(3892): n is a, c, g, or t
  misc_feature (3894)..(3894): n is a, c, g, or t
  misc_feature (3899)..(3899): n is a, c, g, or t
  misc_feature (3906)..(3906): n is a, c, g, or t
  misc_feature (3908)..(3908): n is a, c, g, or t
  misc_feature (3912)..(3913): n is a, c, g, or t
  misc_feature (3922)..(3923): n is a, c, g, or t
  misc_feature (3929)..(3929): n is a, c, g, or t
  misc_feature (3931)..(3932): n is a, c, g, or t
  misc_feature (3936)..(3936): n is a, c, g, or t
  misc_feature (3939)..(3941): n is a, c, g, or t
  misc_feature (3943)..(3945): n is a, c, g, or t
  misc_feature (3951)..(3954): n is a, c, g, or t
  misc_feature (3956)..(3956): n is a, c, g, or t
  misc_feature (3958)..(3958): n is a, c, g, or t
  misc_feature (3961)..(3961): n is a, c, g, or t
  misc_feature (3963)..(3966): n is a, c, g, or t
  misc_feature (3969)..(3969): n is a, c, g, or t
  misc_feature (3971)..(3971): n is a, c, g, or t
  misc_feature (3974)..(3974): n is a, c, g, or t
  misc_feature (3978)..(3978): n is a, c, g, or t
  misc_feature (3980)..(3981): n is a, c, g, or t
  misc_feature (3983)..(3984): n is a, c, g, or t
  misc_feature (3987)..(3987): n is a, c, g, or t
  misc_feature (3990)..(3990): n is a, c, g, or t
  misc_feature (3993)..(3993): n is a, c, g, or t
  misc_feature (3999)..(3999): n is a, c, g, or t
ggaggaggcggtnggggcggnggcggtgaagcccgagccgggtgaagcggcggtcgtggcggttgangcgaacgacgtgggcggcgcgagctcggcgctggcggaggcggcggctgaactggcggcggcgtacaagccgtgggtcgagaacgacggtcggacgcggagctactcggtgccgtacagcgagcactcgtccttcgtcgagctggtggagtttgtcaagcggatccgcccncggagggtcacgcccacggtcaacgccgacaccaaggcggacagggacaagatcatgaagcacttcctcgagttnacngacctcgccgcggacaagaacaggctggaccactacttcttcaacaaacggcacgcgccggaggtcaaggtngaggtgaagcgggagatggaggctgagcccgccgcggcgctcccggcttccgacggttcaaacggcggcggcatcgaccccgagatcctcgccgctctgggcgacgttctcaccccggaggagctgcgccaacagtccgcgttgtgggcagcggcgcagacggcgtcgagggcngcgcaggaggcggctcaggctgcggtgttgggtccgtttcccctcgggtgcgtggcgctggtccgcggcggcggcggcgggttcggcggcaacggcccgaggtacgtccagttcaaggacaagtcgcacgtggagcagaggctacgggcgntgggcgcgacgatcgtccatcgaatatcaccaaaggtgacgcacgtcgtggtcccngcgggcggcgaggcnttggcggaggaggagaggcggcacgggggcaaagncggcaaaggcggtggcgacgangnagccgacgggtccgctcgcaaggaggggtacgaagccccggacaccgatgacatcgacaccgatgggatcgacaccaagggtgaccngtctaagaagggtgacccgtccaagtcgaccccgcccgccgtggtcaccgaagggtgggtgatgcgtcantggcgagcccaaaagacnggcgtcgccgaagcccacgatgacgacaccgtgcgggcgcaccaggagcgcgtgaaggaggaacgcaggcgcgaggccgcggagcgaaccgncgcggccaagcgtcgccgtgaggaggctgactccggcgttgaacagaggccggggcgcgagcggacgatgagccgcgcggtgatggacagggtggggagggcgctggcgcagaggctgtttttagtgcagcggcgggacgtgtcgcgggggccggcgggggtcggcggggccgcctcgacggggcccggcgcgacaccggcgggtggcgaggataagtggcacgccgtgttcgcggtgtttggcaccacgggtaacgtgtacgagtgccacgtgtgcgccaaccccagttgcacctgccccgacttcacgggcgatttacggaccagcagctcgagcaggaaaggcggcggtcacatctgcaagcacctgctgtgggtgtacatgcgggtcctcggcgtgcaacgcgacgatccggtgctgtgccaggtggcgctgctccagtcggagctcgccgcgatgctagccgcgccttccagggcgcagagggcgtcactcgcgacagcctcggtccgggacgcgtanctcgccgccacgggtnnaacgcgcgggacggaggagctcgcgccggcaccggtgacgcgccagccgatcatgncnnagccgccggataacggggacggggacgatgcggacccggtgacgtgtcccgtgtgcttcgacccgctggaggacccggctgacgcggcggcggggtcnagggagacggacctntcggccaaggtgtggtggtgccggggtggatgcggcgggaacgtgcacagcgcgtgtatgcgacggtggatggccaagagcggcatggcgcccgcgtgtccgctgtgcagggcgacgtgggtaccccaggaagacgccgaggacgcngnnncggnnncnncntnaggtcnaccctcnggtctacccggaccgctcgcgctcccgacgtcgcccgcgtcgaccgcgggtctaccctcgggcggtgcgccgttcacgagcccggggggttcgagttacgtcaacctgcgcgcgtaccagggcggcaccgcggcgcacagggacctgagccagtacaacgacttcgccaggaaggccatcgaaaaacgggagaaggaggaacgggagcgacgggaacgggagggcggttgacggcgagtgacggcccagggttgaaacgacgattctttggcggtgggtcttcacgtcccatcgtcccacgcgtggaggcttgattcacgactagcgtattgttaccaacacgagaaacgcgcgatggatgtacccgctgactcgccgcttcctaaactggaatcttttggatttcccccctgggccgatcctcccctcgggctgcgacgtatccgggtctcagatggtgagcttgaggcccggtccgtcgttgttgtagaattccccgacccactcccgtccgtccttgtccgtgtacgtcccctgcccgtgcatcgcgttgtccacccactggcccacgtacttggtcccgtccggccaggtgtaggtgccggcgccgtggtacttgttggccacccagtcgccgtcgtacaccgccccggacttgtacgtgaacgcgcccttgccctccatcttgtcctggacccagtcgccctcgtacgtccacttgccgtccaccgagttcttccccttgccgtgcctcacgtacgtgcgaagctcggtgccatcctcgggctcggggggcggctcctcgccctcggcgagctcgcgctcggcccagtcgccgtcgtagatgtccaggccgtcgcccttggggcccgggaagatgaacttgccgttctgggggggctcgacctcctcttctccttcctcggccatggcttcgagtcggggcgcgagtgagtgtgctgctcacannntnnnngnagtcngannnngggggaaannnncccccgttggcnccnnnngggggaaccaaagncnccnnngnanaaccnngnggnccccnnnnnnccnggnnnnnnngggggttcccgggaacccggngcggcccnnccgngggnnnngttnaaanggntccncncccnggnccnnnngnngnnnannaanaacnccaagnggnnnnnnnncccccnnncnnccnnccnngnnnnnntttttttttggnnnncannannaaantttnnccnnntgnngnngcggcccnccncccccttcgnnncnccngggnccnggnnaacggcnnnntnttcgccnnnatnnnnnccnggnaccnccccgannaannnncccnnnnnnnntnnnncccggngnnnnnnnnnnnnncnaanannnnnnnnannngggnccnnnnnnnnannttntnnaanaanaanncnnggnnnntnnggnnnnnnnnnnggnnnnngnnnnnnncnnngnnnnnngnnnngnnnnngnnnttnnngnnnangnnnttnannttnnnnggngggnnnnnggnnnnncnggngnnnncccnggnnnccgnnnnnngnccnnngnaaaacnnnnnggnngnncnnnnngncccnnnnnannnntnggnnnngnncnnnnncnncnnnnnncncnanannnnnnccccnnncnannnnnnnnccccnncnccnnnnnnnnncgncnnnnnntngnccnnggnngnngngggncgnnngnngnnnnngnnnnnnnnggnggnggnncnnnnnnnncnnnnnncnnnnccnnnnnannnnntttnngnnngnnnnncngnnnnggaggangaggangaggangnccgaggaggncnnccnccngggggnncnngnnngnnggnccnnnncnnngnngnacccntnnancaacnaagccgncnaggnnccaaccggnncaggancnnccgnggnnngnnnaagccnnnngngncgnannnncgngncgncggngnngnnggnttnggngggggng

SEQ ID NO: 1344 - DNA, 4000 bp, Escherichia coli
  misc_feature (1)..(4): n is a, c, g, or t
  misc_feature (7)..(12): n is a, c, g, or t
  misc_feature (14)..(22): n is a, c, g, or t
  misc_feature (24)..(25): n is a, c, g, or t
  misc_feature (27)..(29): n is a, c, g, or t
  misc_feature (31)..(31): n is a, c, g, or t
  misc_feature (33)..(39): n is a, c, g, or t
  misc_feature (42)..(42): n is a, c, g, or t
  misc_feature (44)..(45): n is a, c, g, or t
  misc_feature (47)..(50): n is a, c, g, or t
  misc_feature (52)..(53): n is a, c, g, or t
  misc_feature (55)..(55): n is a, c, g, or t
  misc_feature (58)..(58): n is a, c, g, or t
  misc_feature (60)..(61): n is a, c, g, or t
  misc_feature (63)..(65): n is a, c, g, or t
  misc_feature (67)..(74): n is a, c, g, or t
  misc_feature (77)..(79): n is a, c, g, or t
  misc_feature (81)..(90): n is a, c, g, or t
  misc_feature (92)..(94): n is a, c, g, or t
  misc_feature (97)..(98): n is a, c, g, or t
  misc_feature (101)..(104): n is a, c, g, or t
  misc_feature (106)..(106): n is a, c, g, or t
  misc_feature (109)..(110): n is a, c, g, or t
  misc_feature (112)..(112): n is a, c, g, or t
  misc_feature (115)..(119): n is a, c, g, or t
  misc_feature (122)..(131): n is a, c, g, or t
  misc_feature (134)..(134): n is a, c, g, or t
  misc_feature (136)..(138): n is a, c, g, or t
  misc_feature (140)..(146): n is a, c, g, or t
  misc_feature (149)..(149): n is a, c, g, or t
  misc_feature (151)..(151): n is a, c, g, or t
  misc_feature (155)..(157): n is a, c, g, or t
  misc_feature (159)..(174): n is a, c, g, or t
  misc_feature (176)..(180): n is a, c, g, or t
  misc_feature (182)..(182): n is a, c, g, or t
  misc_feature (184)..(184): n is a, c, g, or t
  misc_feature (186)..(187): n is a, c, g, or t
  misc_feature (189)..(189): n is a, c, g, or t
  misc_feature (191)..(193): n is a, c, g, or t
  misc_feature (195)..(196): n is a, c, g, or t
  misc_feature (198)..(200): n is a, c, g, or t
  misc_feature (204)..(204): n is a, c, g, or t
  misc_feature (207)..(218): n is a, c, g, or t
  misc_feature (220)..(220): n is a, c, g, or t
  misc_feature (224)..(228): n is a, c, g, or t
  misc_feature (230)..(231): n is a, c, g, or t
  misc_feature (233)..(233): n is a, c, g, or t
  misc_feature (236)..(237): n is a, c, g, or t
  misc_feature (241)..(245): n is a, c, g, or t
  misc_feature (248)..(248): n is a, c, g, or t
  misc_feature (250)..(253): n is a, c, g, or t
  misc_feature (255)..(255): n is a, c, g, or t
  misc_feature (258)..(260): n is a, c, g, or t
  misc_feature (262)..(266): n is a, c, g, or t
  misc_feature (268)..(268): n is a, c, g, or t
  misc_feature (270)..(272): n is a, c, g, or t
  misc_feature (276)..(277): n is a, c, g, or t
  misc_feature (279)..(295): n is a, c, g, or t
  misc_feature (297)..(299): n is a, c, g, or t
  misc_feature (301)..(302): n is a, c, g, or t
  misc_feature (305)..(307): n is a, c, g, or t
  misc_feature (309)..(311): n is a, c, g, or t
  misc_feature (314)..(318): n is a, c, g, or t
  misc_feature (322)..(324): n is a, c, g, or t
  misc_feature (326)..(326): n is a, c, g, or t
  misc_feature (328)..(329): n is a, c, g, or t
  misc_feature (331)..(334): n is a, c, g, or t
  misc_feature (336)..(344): n is a, c, g, or t
  misc_feature (348)..(349): n is a, c, g, or t
  misc_feature (351)..(354): n is a, c, g, or t
  misc_feature (356)..(357): n is a, c, g, or t
  misc_feature (359)..(359): n is a, c, g, or t
  misc_feature (361)..(362): n is a, c, g, or t
  misc_feature (365)..(370): n is a, c, g, or t
  misc_feature (372)..(373): n is a, c, g, or t
  misc_feature (377)..(381): n is a, c, g, or t
  misc_feature (383)..(386): n is a, c, g, or t
  misc_feature (388)..(389): n is a, c, g, or t
  misc_feature (393)..(393): n is a, c, g, or t
  misc_feature (396)..(397): n is a, c, g, or t
  misc_feature (400)..(406): n is a, c, g, or t
  misc_feature (408)..(414): n is a, c, g, or t
  misc_feature (416)..(416): n is a, c, g, or t
  misc_feature (419)..(420): n is a, c, g, or t
  misc_feature (422)..(423): n is a, c, g, or t
  misc_feature (425)..(425): n is a, c, g, or t
  misc_feature (429)..(431): n is a, c, g, or t
  misc_feature (434)..(435): n is a, c, g, or t
  misc_feature (437)..(440): n is a, c, g, or t
  misc_feature (442)..(447): n is a, c, g, or t
  misc_feature (449)..(454): n is a, c, g, or t
  misc_feature (457)..(457): n is a, c, g, or t
  misc_feature (459)..(466): n is a, c, g, or t
  misc_feature (468)..(469): n is a, c, g, or t
  misc_feature (472)..(476): n is a, c, g, or t
  misc_feature (478)..(482): n is a, c, g, or t
  misc_feature (485)..(485): n is a, c, g, or t
  misc_feature (487)..(487): n is a, c, g, or t
  misc_feature (489)..(489): n is a, c, g, or t
  misc_feature (492)..(492): n is a, c, g, or t
  misc_feature (495)..(496): n is a, c, g, or t
  misc_feature (498)..(502): n is a, c, g, or t
  misc_feature (505)..(505): n is a, c, g, or t
  misc_feature (507)..(511): n is a, c, g, or t
  misc_feature (513)..(513): n is a, c, g, or t
  misc_feature (515)..(518): n is a, c, g, or t
  misc_feature (522)..(525): n is a, c, g, or t
  misc_feature (528)..(536): n is a, c, g, or t
  misc_feature (538)..(538): n is a, c, g, or t
  misc_feature (541)..(551): n is a, c, g, or t
  misc_feature (553)..(553): n is a, c, g, or t
  misc_feature (555)..(556): n is a, c, g, or t
  misc_feature (560)..(561): n is a, c, g, or t
  misc_feature (563)..(566): n is a, c, g, or t
  misc_feature (568)..(570): n is a, c, g, or t
  misc_feature (574)..(575): n is a, c, g, or t
  misc_feature (578)..(582): n is a, c, g, or t
  misc_feature (584)..(593): n is a, c, g, or t
  misc_feature (595)..(598): n is a, c, g, or t
  misc_feature (600)..(602): n is a, c, g, or t
  misc_feature (604)..(609): n is a, c, g, or t
  misc_feature (611)..(614): n is a, c, g, or t
  misc_feature (616)..(618): n is a, c, g, or t
  misc_feature (620)..(623): n is a, c, g, or t
  misc_feature (626)..(630): n is a, c, g, or t
  misc_feature (632)..(632): n is a, c, g, or t
  misc_feature (634)..(644): n is a, c, g, or t
  misc_feature (646)..(649): n is a, c, g, or t
  misc_feature (652)..(652): n is a, c, g, or t
  misc_feature (654)..(657): n is a, c, g, or t
  misc_feature (661)..(663): n is a, c, g, or t
  misc_feature (665)..(668): n is a, c, g, or t
  misc_feature (670)..(671): n is a, c, g, or t
  misc_feature (673)..(674): n is a, c, g, or t
  misc_feature (676)..(677): n is a, c, g, or t
  misc_feature (679)..(684): n is a, c, g, or t
  misc_feature (686)..(688): n is a, c, g, or t
  misc_feature (690)..(695): n is a, c, g, or t
  misc_feature (697)..(700): n is a, c, g, or t
  misc_feature (702)..(703): n is a, c, g, or t
  misc_feature (706)..(708): n is a, c, g, or t
  misc_feature (710)..(712): n is a, c, g, or t
  misc_feature (714)..(717): n is a, c, g, or t
  misc_feature (719)..(732): n is a, c, g, or t
  misc_feature (735)..(736): n is a, c, g, or t
  misc_feature (738)..(740): n is a, c, g, or t
  misc_feature (742)..(743): n is a, c, g, or t
  misc_feature (745)..(748): n is a, c, g, or t
  misc_feature (750)..(752): n is a, c, g, or t
  misc_feature (754)..(762): n is a, c, g, or t
  misc_feature (764)..(769): n is a, c, g, or t
  misc_feature (771)..(771): n is a, c, g, or t
  misc_feature (773)..(773): n is a, c, g, or t
  misc_feature (776)..(780): n is a, c, g, or t
  misc_feature (782)..(782): n is a, c, g, or t
  misc_feature (786)..(786): n is a, c, g, or t
  misc_feature (788)..(790): n is a, c, g, or t
  misc_feature (792)..(793): n is a, c, g, or t
  misc_feature (795)..(799): n is a, c, g, or t
  misc_feature (804)..(804): n is a, c, g, or t
  misc_feature (806)..(806): n is a, c, g, or t
  misc_feature (808)..(808): n is a, c, g, or t
  misc_feature (810)..(810): n is a, c, g, or t
  misc_feature (812)..(812): n is a, c, g, or t
  misc_feature (814)..(818): n is a, c, g, or t
  misc_feature (820)..(822): n is a, c, g, or t
  misc_feature (825)..(829): n is a, c, g, or t
  misc_feature (831)..(836): n is a, c, g, or t
  misc_feature (839)..(848): n is a, c, g, or t
  misc_feature (851)..(861): n is a, c, g, or t
  misc_feature (865)..(869): n is a, c, g, or t
  misc_feature (873)..(876): n is a, c, g, or t
  misc_feature (879)..(879): n is a, c, g, or t
  misc_feature (881)..(882): n is a, c, g, or t
  misc_feature (884)..(886): n is a, c, g, or t
  misc_feature (889)..(889): n is a, c, g, or t
  misc_feature (893)..(895): n is a, c, g, or t
  misc_feature (897)..(897): n is a, c, g, or t
  misc_feature (899)..(899): n is a, c, g, or t
  misc_feature (901)..(904): n is a, c, g, or t
  misc_feature (908)..(908): n is a, c, g, or t
  misc_feature (910)..(915): n is a, c, g, or t
  misc_feature (918)..(919): n is a, c, g, or t
  misc_feature (921)..(922): n is a, c, g, or t
  misc_feature (924)..(929): n is a, c, g, or t
  misc_feature (932)..(933): n is a, c, g, or t
  misc_feature (937)..(939): n is a, c, g, or t
  misc_feature (942)..(947): n is a, c, g, or t
  misc_feature (952)..(958): n is a, c, g, or t
  misc_feature (961)..(962): n is a, c, g, or t
  misc_feature (964)..(975): n is a, c, g, or t
  misc_feature (977)..(981): n is a, c, g, or t
  misc_feature (983)..(983): n is a, c, g, or t
  misc_feature (985)..(988): n is a, c, g, or t
  misc_feature (992)..(996): n is a, c, g, or t
  misc_feature (998)..(1001): n is a, c, g, or t
  misc_feature (1003)..(1004): n is a, c, g, or t
  misc_feature (1007)..(1007): n is a, c, g, or t
  misc_feature (1010)..(1010): n is a, c, g, or t
  misc_feature (1016)..(1033): n is a, c, g, or t
  misc_feature (1035)..(1036): n is a, c, g, or t
  misc_feature (1038)..(1038): n is a, c, g, or t
  misc_feature (1040)..(1041): n is a, c, g, or t
  misc_feature (1043)..(1044): n is a, c, g, or t
  misc_feature (1046)..(1046): n is a, c, g, or t
  misc_feature (1049)..(1049): n is a, c, g, or t
  misc_feature (1053)..(1061): n is a, c, g, or t
  misc_feature (2654)..(2654): n is a, c, g, or t
  misc_feature (3484)..(3484): n is a, c, g, or t
  misc_feature (3487)..(3488): n is a, c, g, or t
  misc_feature (3983)..(3983): n is a, c, g, or t
nnnnttnnnnnncnnnnnnnnngnncnnngncnnnnnnnccngnncnnnngnncnggngnngnnnannnnnnnnggnnnannnnnnnnnnannnccnngcnnnnanccnnangcnnnnngcnnnnnnnnnnggncnnngnnnnnnngcngntgannngnnnnnnnnnnnnnnnngnnnnntngnanntngnnntnngnnncttntcnnnnnnnnnnnnancctnnnnngnnanacnncccnnnnnaancnnnncngcnnnannnnngncnnnaaanngnnnnnnnnnnnnnnnnntnnngnngcnnntnnncannnnntgannnananncnnnnannnnnnnnngttnngnnnngnnantnnggnnnnnntnngcannnnngnnnngnnaacnatnntcnnnnnnncnnnnnnntnganncnnangagnnnaannannnnannnnnncnnnnnnatngnnnnnnnncnntgnnnnntnnnnnctntntnctnatnncnnnnngcngnnnnncncnnnngggnnnnccnnnnnnnnngnccnnnnnnnnnnngncnnaacnnannnngnnnagcnnaannnnnannnnnnnnnncnnnngnnnannnnnntnnnncnnngnnnntannnnnangnnnnnnnnnnnannnnccngnnnnaagnnncnnnngnnanngnncnnnnnnannngnnnnnngnnnnanncgnnnannngnnnncnnnnnnnnnnnnnntgnncnnngnncnnnngnnngnnnnnnnnngnnnnnntnangtnnnnnanctgncnnncnncnnnnngcacncncngngncnnnnncnnngcnnnnngnnnnnngcnnnnnnnnnncgnnnnnnnnnnngcgnnnnnctgnnnncgngnngnnncgnccgnnngnancnnnncggngnnnnnncgnngnntnnnnnncgnngccnnnctnnnnnngcggnnnnnnnccnncnnnnnnnnnnnncnnnnnancnnnnccannnnngnnnnannacnctnggccannnnnnnnnnnnnnnnnnanntntnntnngngangtannnnnnnnnagggaggagttaggagttaagcggcggcctaaaagtttgcggtatacctgcaatgcgccgggtactgttttggcagtattggcataagcgggattacaacaggctcggctccgcgctaactcctccctccaattcgggggttcttatgcaaattgtattgcgcggtgcggcagctgggtatgaggccgagcataccgcacgcatcttttacccggcggcggagctgagccagaccctgccggacgataccgcagaccttgtgctggctgtggctcacaggtatctgctgctggttctggtgcggcagaacggcacaaccacctgggtgcagcagcgcccgccccagggggatgcccgcacgcaggagtatgctctgtgccgcatgctgtacaccatgctgtgcggcgttaccggtatccgcccgccctggggcatgatgaccggcgtgcgcccggtgcgcatcatccatgacctgcgcgccgagggcaaaaccgaagaagaaatcgaacagcgctttttgcagcattttgactgcacgccgcgccgttttgccatggccaaaagtattgcggacctgcagcgcccggtgctggagcgcgcccagccgatggattgcagtgtgtacgcgggcattccgttctgcccgtcccgctgcagctattgcagctttgtttcccgcacggtgggggataaatccagccgtgcgctggtggccccctacgtggactgcctgtgcaaggagcttgccgctacccgcgccgctgcggacgccgcacacctcagcatcaaaacgctgtatatcggcggcggcacccccaccagcgtcaacgcgcagcagctgcgccagctgatgggcaccatggccgagcagtttgacctgcccgccctggaagagtttaccgtggaagcgggccgccctgactgtaccgacgaagaaaaactgcgcatcatcaaagaatacggcgcaacccgcatttccatcaacccgcagacattctcggatgaagtgctgcgcaacattggccgccgccacacggcgcaggatatcctggattgttaccggaccgcccgccgcgtggggcatgataacatcaacatggacttgatcgcgggtctgccgggggatacggtggaaggcttccgccatagcctgcagacggccattgacttggacccggaaaatatcaccgtgcataccctcacgctgaaacgggcgtccaacctggtggtggagcaccgcgctgcggattatgccgatgtggccgctatggtggaaagctgcgagctgctggaaaaagccggttaccgcccctactacctgtaccgccaaaaaggcaccctgcaaaacctggaaaacgtgggctggtgcaagccggggtacgagtgcctgtataatatctatatcatggaggaagtccacaccattctttctgccggtgcgggcggttctacaaagctggtggcccccggtgcacgtcacggcaagatcgagcgtatctttaattataagtacccgacagaatatatcgaccgttttgacacgatccttgcacgcaaggaaggagtgaaacagttctatgaccaatatcccanctgtggtgaatccgcgcgcccccaagcgcatggtggggtgtgagctgctcaaccttgccgcgcacaacccggctgatttggtgcagctgagcgaacagcagtaccagagccgcattgatgccgccgcggcctatgttctggcatccggccgccgtattgtcatgctgacggggccttccgctgcgggcaaaaccaccagcgccaacaagttggccgccgccatgcgcagcaaaggcgtgcgcagccgggtattgagcctggacgacttttttgtgggcgagggccgctaccccaaacagccggatggccgggatgattacgaatgcgtggaagcgctggatatcccgctggtgcagcactgcctgcagcagctggcccagaccggcgtgtgcgatgcgccgatctttgactttatgacccagctgcccgccccgcagacccagcacatcgactgcaccgacggtgtggtggttgtggagggactgcacgcctttaaccccatcctgaccgagactttgccgcaggatgctgtgctgaatatttacgccagcctgcgggaagaatatgccggaccggacggtgcgcggctgatcgccacccgcgatgttcgccttgcccgccgcattacgcgggactggcggttccgcgggcatgatgccgattttaccatcggcctgtggccccatgtctgtaaggcagaggaccagtatatcaagacgttcaagaatcgggcgaaccttgtgctggatacttcgttcagctgcgaggtggggatttgggaatattatattgaccagctgacggccagcgccaatgcgggccgcatggcnganntgcgcagccggtttgcgcattttgtacccattaatgccgcgctgatcccacagaaaagcatgctgcgggagttcattggagccgaaaaccaataaaacttcctgttacgtccaaatgtttacgatttggacataattctttgcgccacaagattgaaaaccaggcaatgatacggtataataagccttacagggaaaagccgtgaaatcgaaaataataaatttttacggcttttcattccacccggccgggctgcgcagctgtggcgcagtgccctgccggggccagatgataacgaggtgttacattatgtttgaactggatatcaataagatcaaagaacagagcatgcagtttgtggataccgcttacaaggcagccatggatattgcagataagggcaagaaccagctggatctggcatcccagcagaaccgcctggccaaggcacagcgccagctgggcgcactggtttacagcctgcataaggcagangaggaaaaccagcccct

SEQ ID NO: 1345 - DNA, 4000 bp, Escherichia coli
  misc_feature (1)..(1): n is a, c, g, or t
  misc_feature (6)..(8): n is a, c, g, or t
  misc_feature (11)..(18): n is a, c, g, or t
  misc_feature (21)..(22): n is a, c, g, or t
  misc_feature (25)..(25): n is a, c, g, or t
  misc_feature (28)..(30): n is a, c, g, or t
  misc_feature (33)..(35): n is a, c, g, or t
  misc_feature (38)..(38): n is a, c, g, or t
  misc_feature (42)..(48): n is a, c, g, or t
  misc_feature (52)..(56): n is a, c, g, or t
  misc_feature (58)..(58): n is a, c, g, or t
  misc_feature (60)..(60): n is a, c, g, or t
  misc_feature (62)..(62): n is a, c, g, or t
  misc_feature (66)..(75): n is a, c, g, or t
  misc_feature (78)..(80): n is a, c, g, or t
  misc_feature (82)..(83): n is a, c, g, or t
  misc_feature (88)..(88): n is a, c, g, or t
  misc_feature (90)..(91): n is a, c, g, or t
  misc_feature (93)..(93): n is a, c, g, or t
  misc_feature (95)..(97): n is a, c, g, or t
  misc_feature (99)..(101): n is a, c, g, or t
  misc_feature (103)..(119): n is a, c, g, or t
  misc_feature (121)..(125): n is a, c, g, or t
  misc_feature (127)..(132): n is a, c, g, or t
  misc_feature (135)..(135): n is a, c, g, or t
  misc_feature (138)..(142): n is a, c, g, or t
  misc_feature (144)..(147): n is a, c, g, or t
  misc_feature (150)..(152): n is a, c, g, or t
  misc_feature (154)..(154): n is a, c, g, or t
  misc_feature (156)..(156): n is a, c, g, or t
  misc_feature (158)..(163): n is a, c, g, or t
  misc_feature (165)..(173): n is a, c, g, or t
  misc_feature (175)..(175): n is a, c, g, or t
  misc_feature (177)..(179): n is a, c, g, or t
  misc_feature (181)..(182): n is a, c, g, or t
  misc_feature (184)..(184): n is a, c, g, or t
  misc_feature (187)..(192): n is a, c, g, or t
  misc_feature (194)..(194): n is a, c, g, or t
  misc_feature (197)..(200): n is a, c, g, or t
  misc_feature (203)..(206): n is a, c, g, or t
  misc_feature (208)..(209): n is a, c, g, or t
  misc_feature (211)..(212): n is a, c, g, or t
  misc_feature (216)..(217): n is a, c, g, or t
  misc_feature (223)..(228): n is a, c, g, or t
  misc_feature (232)..(237): n is a, c, g, or t
  misc_feature (239)..(239): n is a, c, g, or t
  misc_feature (241)..(242): n is a, c, g, or t
  misc_feature (245)..(245): n is a, c, g, or t
  misc_feature (250)..(254): n is a, c, g, or t
  misc_feature (256)..(257): n is a, c, g, or t
  misc_feature (259)..(266): n is a, c, g, or t
  misc_feature (270)..(270): n is a, c, g, or t
  misc_feature (296)..(296): n is a, c, g, or t
  misc_feature (1991)..(1991): n is a, c, g, or t
  misc_feature (3784)..(3784): n is a, c, g, or t
nggggnnnttnnnnnnnnaannaanccnnnttnnnccnaaannnnnnnaaannnnnantngnaaannnnnnnnnnttnnnannttttncnncnannntnnntnnnnnnnnnnnnnnnnnannnnntnnnnnnaanttnnnnngnnnnaannntnantnnnnnnannnnnnnnntnannngnnanggnnnnnncnaannnnaannnncnntnnaaannaaaaannnnnngggnnnnnntnannccnaaaannnnntnntnnnnnnnncccntttttttgaatttgtctatattatgncgtaacaagtgaggcttcgccgatagcagcaggcatctaatcgctgattttcgttttaaataaaaagaaattggcaattcgccaatttcgacaaattcttaatgctcttctgaaggttcagccggaattaactccccaattataaagagaagtacggtaaaaacaacagagattataattgctgttgaaaaatggaatgcagagcctgtcatggaagaaacaacatagctggccatgttgacaagcaaaaacgtccaaaaaaatgttgcgaaatatctcattatcttcacctcgtttattcctgtctttacttatattatcatacaacatttttcatgaaaacggttgtttcgcgatttttttgcgagcctttttgacatttcgtacatacattataaaaggtcatcgatggaaaggtggtgggcaaatggaaggtgtttcggaaagattttttcaaattgaaaacgagtggaatgtcattcatcttccggaaaagccgaacggattcggcatcttgatcattggcgatcgaacccattttgttgaaaatggttcaagctactggctggagcattacgggcggcgtcagctgatcaatacgttaaaaagctgcggatatacattgtttcattccaatctttacggacgccattggggcagccctcacgccgttttgttggcaaaacagctttatcatcttgtcatgaaacaagaaattttaaataaaaaaatccatatactgtctgaaggtataggagcactcgttgcgctgcagttgatggaagagatgccaaattccatccgttcatcggtgatgatcaatccttgtttggacataaaagcccaaatagcggaagagaaaaagaataaatttttttacaaacaaatgataaaagaactatcaaaagcttaccaattagatgaaaaagctgtcacccattatccctttgtccgtatacaagactttgtatcaaaaatacctgtaggcatctggcagaaaatgaacgggggaagctattcctataaaattcatggaaaaaaatatgaggaatggagaaagcagctgaaagctccaattcaattcacattttatttccaggaaaatataaatcggatccatgatatgataagaagtttttacaaagagcatgaaagaatcttatagaaatggaattgaggactgggcgaaaatgctcaataagtgagcaggctgccccctttttgtttgaaaagggcattggactaatctcttcttttttcgcatacgatacaataatagttttttcataaaggaggttttcaaaatgtcaactgccttaaagcagtgtaaacatattttaattgttggggttcatcaatttgaaggctttcatatatgttcaaaactggtagaggaaggattactagtcgatggagtggtaatcgttcctaaaaatccgttgcaaaaaaaaatatgcgaagaagaaatgatgtggctcgggcggaacgcacattttcatttattggaagaagacagctggatagaggatgcttccaaaaagcaatatgatttgatttattattgtcaaacagatcatcaaccgatagacgatgaagctgaaaaacaccgattggaaaaaacggtcgaaatcgcatccctcaagcagactccgattatttttatattttctcttgaaggagaaaatccgctggaanatagggatgaagaaattgacagctggatgcagcaaataggacaaaaatggactttcccttatttatttgtttatcttccaaccgttttcggaccttggcagccgctaggccattggatttcgaacagtttgttggaatgtacaggcatcagccgttccaagacgaatgcgaatgaaaaaattgtcattcgcgacattcttcatattgatgaaatagttccggtgttaacagaatttgacgaagatttgtttgcgaaaaaaacaatttacttgatttccgacgacaaagagcgcatcaagaaggtgatgagcttttttgacatttttcattacatttacaagcctatatcgaaaagcgaacatcatttagttgttccaaagacggtcgaaaacattgaaaagagtttgcaagaattaaaagattttttcctgcaaaatacacgcagactttatacctaaatataaaatttctttacttcattgacggcgtatagcaaaataaaagaggaatgaagtgaaacgtgaaaattttagtactaaatatacatcgtgttaaagaggaagcttcctagagaaacgcctcataagctatatttcgtgacaatcaaattgaccgtaaattcaaaagatcgttttgaacttagctgagatcgatatgtaatcatttcgattattgagaaacctcaccatttcaatgatgatgcagttcactggtttaaaggagttgcttggtatgtataaaaaaatgtttgtgatcatttttattttattatttctcgttggctgcggacaagcatcagaaaaaggaaaactgaaaaaggtgggtttgctcgttcctgaaacgattaatgatcaagtttgggggacaaaagggtataaagggctgttaaaaattcagtctgagctgaatgtagatgttttttataaagaaggaatgaattccgaagcggcggtgagggaggcggtcgaagaatttcacggaaagggagttaatttaattatcgggcacggtcacgaatatgagggtttttttagagatttgctggatcaatatccagatattcatttcgttttttttaatggtgatgcaaaaggcccgaatgccacaagtttaaattttgaggcgcatgccatgggctttttcgcaggaatggtggcagcacatatgacaaaaacaaacgaaatcggaattattgccgcttttgagtggcagcctgaagtggaggggttttatcaaggggcgcaatttgaaaatccaaacgtaaccattcacattgaatatgtccaagggtttgatcatgttgacttggcgcttgagaagctcgataagcttgtcgcagaaaatgtagatgttgtttatccggcaggcgacagatacaacgtgccagtgatcgaaaaagtgaaggaaaaaggaatatattcaattggctttgtttcagatcaaagtgatttgggcgaacaaatggttttaacaagcacagtacagcatgtggatgagttgtatttattagtcgcaaaaaaatttataaaaggcgaactggaaagcgggaatttatattttgattttcaagatggtgtgattgatttagggaagttcagccctctagtagataaagaatttaaaaataaagttttaaaatatgtggaagaatataagaaaacagggaaattgcctaacgaataatgctatggtgagataaataaaataaaaattttgggggatggttgaattcatccccttaatttttaaatagttttttaatttgattgacgaacggctttatttctttaatnattggcttcagctcagataattttgtcacaatatcatcgacttgctcaaaaattttttgatagtctgattgctcgttttgctcgtttttttcggaagttttttcagaatgaaccggaagctgccggccgaacataaattgggtaaaaaaatcgggttctggtgcttctgctttctctttttcatcttcctgccgctcgtttacgttttcatcactc

SEQ ID NO: 1346 - DNA, 4000 bp, Escherichia coli
  misc_feature (1989)..(1989): n is a, c, g, or t
  misc_feature (2227)..(2227): n is a, c, g, or t
  misc_feature (2422)..(2422): n is a, c, g, or t
  misc_feature (2490)..(2490): n is a, c, g, or t
  misc_feature (2556)..(2556): n is a, c, g, or t
  misc_feature (2722)..(2722): n is a, c, g, or t
  misc_feature (3069)..(3069): n is a, c, g, or t
  misc_feature (3212)..(3212): n is a, c, g, or t
  misc_feature (3264)..(3264): n is a, c, g, or t
  misc_feature (3480)..(3480): n is a, c, g, or t
  misc_feature (3545)..(3545): n is a, c, g, or t
  misc_feature (3653)..(3653): n is a, c, g, or t
aatattacaataccttcatggcatgtggaggaaaaagaaaaagtattttcaaatttagaaaaatataaaaataatgattatattgcttggattgggcattctacttttttaattaagttaggtgataatgtaataataactgatccggtcttttcaaaaaatgcaggaccattattttttggcccaaaaaggtatactaagcctgcattaaaattaagtgagattccaaaaacaggtttatttttattaacacacaatcactatgatcatcaagataaggatacaattagaagatatccttataaaaattcaaaagttttaactccattaaaacttggaaagtattttacaagtaatagatttaaagatgttgttgaaatggactggtacgatgaaattaagtttaatgatctcaaaattactctattgccagctgttcactggtcaaaaagaaccttttgggacacaaataaaacattgtggggaaattttttaatagaacataatggaagaaaaatattctttgcttgtgatactgggtatggagatatctataaagatctaggtaaaaaatatggacctattgatctaacaatgattaacattggtgcttatgatttcagaccaatgtttgaaaaatcatactatcacaccacaccagaagaagctctgcaaatagctaaagatctaaacagtaaaaaagttttaggtactcattggggaacttttgttttgtccttggaacctattatggatccaccaaaaagatttaaagataatgcaataaattatggttttgataaagaagacgctattgtatttaaaattggtcaaatagaatctttggaaaatattattaaataattaatttgaaactttttgaattaaagaaatattattgtttgttggtttgtttacttctttagaaatttcatagaattctaaattaggttttttacattcttttaaaaaactagaaccattaagctcgatatttaaatatctattgacatctttttcattaagtatgactggttgtctacgatgaatttctaaaacgtttttaattgcctcttctgtaactaaacaaaattgatcattttcataaattccagcaatataaataatttttttatcttctcttaaaaaataatacggaattttatttctttcttcacgtttccattcatagaaaccatctgctacaacaacacatctagttaattgtattaattttttaaaagatactttttcatcaatcgtttctagtcttgcattaatcaaaggtttaaattcatttttctttgaccaagatggaactaggccccactttaagttttctagagcatttccatttgtatattttttaattactggaagatcttgataaggatgagcattataattctctttatcctctactttaatggctgttttaactaaacttttagttttagaaaccggatttgtaaccacatatcttccacacataattaaatatctcagccgctacaatcaaagtcaatattaactttaatttaaataatttttttattggtttaaaaaatatttagattatatgtcgttaaatttatgaaatctattgaaggtaattttaataatccgaaagtaaatgaattgttaactaaacatttcattgaactaagatcagtttcaccagcaggtagtgcccacgttttagatattgctggtcttaaagatcaaagcattaagttttggagtttatgggataatgatgaattaataggatgtggtgctttaaaatttttagataaaattcatggagaatttaaatcaatcagggttgttgataaatttagaaaaaaaggtgtcggagaaaaaattattaatcaccttatagaagaggcaaaaaaattaggaataaaaaaactgagtattgaaactggttctggaaaattttttgagccagctagaaaactatttgcaaaatttgactttcaaccttgntctccttttgcacactataaagaagatccaaattcatgtttttacactaaaaatttaaattaatttaattagtaattttagattgattttgtaataataatttttttcttgtttgttcaaaatttgtttggactagaatcattaattcttcataaattttttcattttttttagtttttttagttttttcttctaaaaatgttgaaacatattcagttgttgacattcctgtttcttntttgacagctctatttgtaaagtaagcaagtccagcttgagaaacatttccagtggaagcaaaagtaattgcaggaccaaccattgctgatgattgaaaacatcctgtcaaaaacaaacttatacaaaaatataaagttattttttttatctccacattttaatcattactgatttttaatttcaactcaagacngattttgaatttcaactcaagatagttgttttttatactattcattctgagttaattgtctatattcnctgtattctctatgctttttgtaaaaaaaaacataattagaatcttggaacgaaatgatatttagncaattttttgataatgtttcgtgtacatacacatatttgattgcgtctccagaaaaaaaagaagcaataatcatagattcagttttagacaacgtagacatatatttaaaattattaaatgaattagatttaaaattagtaaaagtaatagacactcatatacatncagaccatatttctggaatggcaaaacttagagataaaacaaactgtgtaactttaatgggagacaaaactcctgcagatatagtttctatgagtattgctgatggagaagaaatcaaaataggaaatataaaattaaaagctttatataccccaggacatacatcagaaagttttagttttttaatgaaagacagagtttttacaggcgatacattgttaattcgtggaactggaagaactgattttcaaaatggaaatccatatgactcctataattcaatatttaaaattttattaaaactaccagaagagactttagtataccctgcacacgattataaaggngatttagtaagcactataggtaaagaaaaaaaattaaatccaagacttcaagtgaaatctccagatgaatatgcggaaataatgaataatttaaatttatctaatccaaaacttatggatatagtggttccaaaaaatttaanccttggaattaatttgaataaacaaacaataaataacggattagatgtaganaaatttaaagaagaaatagagaataaggataacattttgattgatttaagagaggaagatgaaattaaaaaatatggaaaaatttcaaattgtacaatgatatcttttcctaaaattgaaagttatttaagtcaaaatgaaaaagaacttaaaaataaaaaaatattgttttattgtgctgttggacacaggtctgcattagcagttcaaatttcnaaatcctacaattatataaattgttttcatttaatcggaggactaaaaaattggaatatgaaagnaatgaagacaatttaatgtcaaaaaatggagttgaaaataaattaccaatttataaattaaaaacaggtaaagagattaaaaaatattatgacctttggactgaaaanaacaactacaacaaagatatggttgattgggattattctgcgccaagagaagcaatttctgtttttgtaaaatataatcaaaataataaaataaaaatttttgatgcgggttgtggtacaggattggtgggtattgaacttaaaaagaatggatataatattatagatggtgctgacttttctcaaagcatgttaaatcaagtacctaaaaatctatatcaaaatttatataaaatagatttaaataaaaaaatatcgttaaaagataatacttatgatgcaattacatgtgttggaacatttacttatggacatgttcatccacctgcacttgatgaaatgactaa

SEQ ID NO: 1347 - DNA, 4000 bp, Escherichia coli
  misc_feature (512)..(512): n is a, c, g, or t
aggcaaactctaaaagcttaatgtcaaaccaaattaccccaatatcagagttaattgatggccttaatatcagattcgttgatgagaaaatcttccttgatgataaggatgttacagattcaatcagatccgaattaattggaaaatatgcttctgaaattgcaaaaaatgcatcaataagagagaaaattttagatgttcaaagatctttctttgtatcaccagggttagttgctgatgggcgtgatatgggaactgtagtcttccctaaggctaaaattaaaatattccttactgcaagcatagaagagcgggtaaacagaagatataaacagttgatattaaaggaaaacaatgttaatctgtccgacctatttgagaaaatcaaattaagggacgaaagtgatacaaacagaaaaatatcaccccttaaggctgcaaaagatgcttatttaattaaaacagataatctaagcattaaccaggcctttgaaaaagtaatggagattatnggtagtaagataaactaagtagcataagctgtctaataaattccaagtttattagattttattaacaaccccatcgctagatgggatcaaatgaaggtaaaaaatttaaaatggcaaccctagaaaaaacaacacaaaaatcatctgaaagtttcgctgatttatttgaagaaagtatggcgcttaaggaaatgcgtcaaggagaggtaattactgcagaagttatatcgattgatagtgactttgtaattgttaatgcaggtttaaaatcagaaagcctaatcaaaacagatgaatttcttgatgataagggcgatgttgaagtaaatttaggtgaccatgtaaaggtatcgatcgaaaaattagaagacggatatggatctacgcttctatcgcgggctagggctaaagaaatgcaagcatggcttgatctagaagatgcaatggaagaatcaagaatagttaatggttatgttagtagtaaggtaaagggaggtttaagagttactgtaaacggcattatggcttttttacccggatctttagttgatattcgaccaatcaaagatacaactccttttgaaaataaagaatgtgaattaaaaataatcaaaattgacagaaaacgaaataatgttgttgtctcaagaaaggcagtattagaagggcaaaatggagttgatctagaagccttaattgatacactcaaagaggggtctgttgttaaaggtattgtaaaaaatataacagattacggagcttttgttgatctgggtggtatagacggattgcttcacataacagacttagcatggaaaagaattaaacatccatccgaaatacttaatataggtgatgaaattgatgccagagtattgaaatttgataaagagaaaaatagggtttcacttggcttaaaacagcttgatgaagatccatgggttggattatcaagaagaagccctgttaaaacaaaagttttcggaaaggtatctaatttaactgattatggtgctttcattgaaattgaaactggtattgaaggattggtgcatgtttctgaaatggactggacaaataaaaatattcatccatcaaaggcagttcaattaggtgatgaagttgaggtaatgattcttgagattgatgaagacagaagaaggttgtcgttaggcatgaaacaatgcaaagataatccatgggacaattttgcaaatagtaataaaaaagacgataaaatcaaaggtaatatcaaatcaattacagactttggtgtatttatcggactgccaggggatattgatggtctaatccacctttcagatattgcttggtctgatcaagaatcagcattaaaaaattataacagaggagatgaggttgaatcagtcatcttatcaatcgatgtagataaagaaagaatttctttaggtattaagcaattatctgatgacccaaatgaggataaaaagactgaaaccacaaaaaaaccaaagaaagaagcgaaggaaaaaactgatgagcctgaaaatgcaggaacaactaatctaggtgcccttctaaaagaaaaactagataataaaaatgactaaatctgaattaatagccctgctttctaataggttttcgcagcttgtgcataaagatgcagagttatcagtaaaaacagttattgactcactaagtaaaagcttaagtgaaggtggtagagctgagataagaggtttcggaagttttagcctacaccacagaccagcaagagtcggtagaaaccctaaaacaggtgaaagagtaaatgttcctgaaaaatttgtcccgcattttaaaccaggcaaagaactaaaaataaaagttgataaataaataagtgcaatttataaaaaacatattcactttatagttaatttgaatatgtttttttttaaaaattatgatcgaatttgaattttggtggttattagtaatacctttattctttatcctagggtgggtttctgctcgtgttgacataaaacaaattattgcggaaagtactaatcttccagcctcgcttttcaaagctctctcataccttaactccaatcaaaatgagagtgcaataactgaacttgaaaaagctgttaaattaaaaaataattcactcgaaatacattttgctcttggctcactgctgagaagagaaggtaaatatgataaggctataaatttacatattgcccttctgaataaaagagaaattacttctgaacaagaagattcaataaaagctgaactagcgcaggattactttaaagctggtctgtatggaagatctgaatctatacttaaagatctaaaaaatgaaaaatattttcagtattcattaaatttattaagagagatatatgtacgggagagagattgggataaagccattgagtctgcttctaatttagagaagacctctggagtttcgtttagaattccaattagtcattatttttgtgaattagcaacaaaccacttaatgaacaaaaaatatggtatggcaaaaacatatcttaaaaaatctctagaagaatcaaaaaactgtgtgagagctaatatacttctcggtgacattgcccatgaagaaaaaaaatatgatgaagctattatttattggaaaaaaattgaatatcagaaaccagaatatctcggcctagtgattcaaaaaataatttctgcttatgaaattcaaaataacgttaacgaagccttatccattctttcaaggtattatgagctttataaacttaaaacaattttaggctcattgtacaaattagttttaaagaatgaaggcatagaaagggctgaggagatagccagaaatgagctaatacaaagaccgagtctgctttcacttgatcaattatttcaaatcttaaccattaagaagtcaaataaaattgaaaatattgagcttattcaacaaacaattaaaaattcaattagtgaaagaagattttttaattgcaatgaatgtggttttaaagcaaaacaatttcattggcaatgcccaggatgtaattcatgggaatcacttccatcagaaccaattgacattactttagaaaattagcttaatgacaaaacaaactgaaatttatgtagcaattgatacaaagtcagctaatgatgcaaaaaaattgattaggcagctccataataagtattgtggaataaaaattggaaaagagctatttaccgcctgtggacccgagattgtattatgggccaaaaaagagggttttaaagtatttttagacttaaagtttcatgacattcccaatactgttatgaaggcatgtgaagctgcttcaagactcaatgtggacataataaacgtccatgctctaggcggtaaagaaatgatggtggccgccaaaagcgctgtctctgataagaaaataaagttgattggggtaacgttgttaacaagtcataataaagattttctagaagag

SEQ ID NO: 1348 - DNA, 4000 bp, Escherichia coli
  misc_feature (24)..(24): n is a, c, g, or t
  misc_feature (126)..(126): n is a, c, g, or t
  misc_feature (258)..(258): n is a, c, g, or t
  misc_feature (519)..(519): n is a, c, g, or t
  misc_feature (1015)..(1015): n is a, c, g, or t
  misc_feature (1393)..(1393): n is a, c, g, or t
  misc_feature (1842)..(1842): n is a, c, g, or t
  misc_feature (1947)..(1947): n is a, c, g, or t
  misc_feature (1992)..(1992): n is a, c, g, or t
  misc_feature (2151)..(2151): n is a, c, g, or t
  misc_feature (2303)..(2303): n is a, c, g, or t
  misc_feature (2834)..(2834): n is a, c, g, or t
  misc_feature (2837)..(2837): n is a, c, g, or t
  misc_feature (2840)..(2840): n is a, c, g, or t
  misc_feature (2945)..(2945): n is a, c, g, or t
  misc_feature (2947)..(2948): n is a, c, g, or t
  misc_feature (3223)..(3223): n is a, c, g, or t
  misc_feature (3754)..(3754): n is a, c, g, or t
  misc_feature (3808)..(3808): n is a, c, g, or t
tgacactgcaccacagccttcttntctacggcgcttgcctcgccgcccatgatcttggcaatggcagcagcagccttggggccgccgggtgcgcacttgtcgcagggcacgccgtccagaacaacngccttggcgtagtcggcacagccggcgtagccgcagccgccgcagtttgcgccggccagacaggcagaaacttcctcaatgcgggggtcttcctccaccgccatgaactttgcggcagccaccagaacgatngcacccacagcgcccacgatggtgcacaggataacagcagatacaatattcatagtcctgttcctcccttacagcgtaacattgaacaggttttcgacgatgccgccgaagcccatgaaggacaggctggtgattgcagctgcgatcagggtgatgggcaggcccttgaagggtgccgggggatcgcaggcttccacgcgcttacgcacgccgctgaacatgaccatggccagcataaagccgcagcctgcgccgatggcncagatcagagcctcgatgtaggcgtagccgaagccgtgtgcagccacatctgcgccgtagtcgcccacgaccagaatggtaacggccagcacgcagcagttggtggtgatcaggggcagataaacgcccagcgagttatacagtgcaacgatgtacttcttgaggaagatctcgatgaactgcaccagcacagcgatgaccagaatgaacacgatggtctgcaggtagctcagaccagccgggtccagaatgaagatctggatggggaaggtaacggccgttgccatgaacatgacgaagatgacagcaccggacataccaacagcggaatccagctttttggaaacgcccaggaacgggcagataccgtagaacttcaccagcacatagttgttgacaaggatcatgctgaagaagatcgcagcgagtttgacgagcatcttattccgcctccttcttcagattgtcaagatcacagcagctcttgcgctcgatncgggcgtccagcttgccttccagccacacacagccggccatcaacaggccaaagcagaagaatgcaccgggagcctgcgtcatgatggacaccttggcaacgctttccggaatgatctggaagcccagccaggtgccgctgcccaggatctcacggatggaggccatcagagtagcggtgagggtgtagccgaggcccatgcccacgccgtccagtgcggaatccaccacattgttcttgcaggcgaacatctcggcacggcccagaatgatacagttgacaacgatcaggggcaggaacacgcccagagcgttgtacaggctttccatgtaggcctgcatgaacatctgcacgatggtcacaaagcctgcaatgatnacgatgtagcagggcagatgcaccttgccggggatgactttccgcagcagggagatcatgatattggagcacaccagcacgaaggtgaaggcggcgcccatgcccagtgcgctggaaactgccgtggtaacggccagaatggagcaggtgcccagaaccagacgcagaacagggttttctttgatgatgccgttggtaaggatgcttaccttggacttattttcttgtgccatttcttaccaacctccttttatgccagctcgttgaagcagttgatacaatcattgatggcagcaaacagagcggtggacgaaatggttgcgccactgtacgcatcgaaatcctgattcatcacaatgttcttggtgccgtccatgccgttgaactgtgccaggaagtcatcggtggacacattggagccgatgcccttggtctgggtagaagcgtcnacccagatgccggtctcggcaccgttggcgtcaaagcccatgatgacggtcaggatgccgccgtcaaagcccttttcctcggccttgatggcaatgccgccatcnggagcctttaccacgccggtaacattggcggtggtgtagtcggtnacttcctccagcgtagctgcgtccgaaacagagggcatcacgctgacataagcagccagcgtggtgcggcgggtgttctccttgataacgggagcggtcatgccgttcaccagagccagcagcaggctgacgatcagagagatgacggtcagcacaacnatgggcttaccggtggtttcccagctggaatttgcagtcttactcatttgccagcaccctccttcgctttctttgcaggcttcacatagccatacggggtctgacgggtcagatcattgatgtacgggacccacaggttcatgaacagcagngcgaaggacacgccctcggtgtagctgccccagtagcggatagcaaaggtaacgatgccaaggcacacgccgtacaccagcttacccttcagggtaaaggggctggtaacgtagtcggtagccatgaacacagcgccgaacagcaggccgccgctcagcacggcaaccagtgcgctgtgcagatccttggtagcgatcaggtagaacacgaacacgctgccaacgtaggaagccgggatggcgatgctgatggtcttggtagccaccagatagatcagacccagcacgatagccagtgcgcaggtctcgcccagcacaccgccgtggatgcccatgaacagatccagcaggctcagcttggagggatctgccacagccagcggggtagccttggacagctgatccaccgctgcatccgggaacacccacttattcatggaaccggcaaagctgataaacagcacgatacggcccaccagagcggggtttgcaaagttcatgccaatgccgccgaacagctgcttgacaacnatnatngccaccagatcgccgatgatcagctgaccgatgggcatacccacgggcacgttcatggccagaatgatgccggtgaccacagcggacaggtcgctgatggggttngnncgcttcagcagcttgcagtacagccactcaaaaaccacacaggccaccacggaaacggcggtgaccagcagggcgcgcacgccgaaaatgatcgcagaggcaaccacgcaggggcacagtgcaacgatcacgttagccatcaggctctgggtggtctcgtcactgcggacgtgcggggaagccgaaacaataagcttcgtatccattacttattgcctccttttttgatttcgccaagatagaaggccttggccagactcatcatctgggtgacngggcgctttgccgggcagacgaaggagcagctgccgcagttgaagcagtagtcagcgtgcagcttgcccagctcctgcacatcgcgggcggcgtaggcctgattgacctccacgggctccagacccatggggcagtactccacgcagcggccgcagcggatgcaggggttgacctgtgcgggctgtgcagctgccttgctcagcaggatcagaccggaagtggtcttggtggtggggtaggaaaggttctccacagcggggcccatcatggcaccgccggcaaccaccttgcccagctcgcccttgacgcccacatagtccagaatgtcctgataagcggtgcccacgggcacaacaacgttctggggctttgcgcaggcatcgccgtccacggtgatggtacgctggaccaccggcataccggtagccagatacttgcccagcgtggaaacgctggtcacgttcatcacgatagcgcctgcatcggcgggcagaccgccgtggggcacctcgcggccgaggcacttctcnatgaggatcagctctgcgccggtgccgtagacactgggcaggggcttgacctcnatagcgctgtcgtccttggtctttttgcacagcaggtcgatgcactcgggcttgttgttctcaataccaatgatgcacttcgggatgccggtatactgcagcacagccttgatgccgcggatgatatcatcgctgcactccagcatctcctgcgtgtcgctggtcagccacacctcgcactcggaggcgttg

SEQ ID NO: 1349 - DNA, 4000 bp, Escherichia coli
  misc_feature (2008)..(2008): n is a, c, g, or t
  misc_feature (2728)..(2728): n is a, c, g, or t
  misc_feature (2971)..(2971): n is a, c, g, or t
  misc_feature (3682)..(3682): n is a, c, g, or t
tggatgtcgggcacgtaatctgtcagcaccacatcatcactgcccggctgggcctgatattcagcaacctggataccatgctgctttagcagccgttcaaggtactgcgccagatattcattgcgcatcgccagccagattttcttatcctgtaagccgtccagcagcggaatggaaggctgtttaccgttgtagatcggaatacggacaataaactggcttcccattcccggctcagactcaacctcaatgtcaccgtccatcatgttgatcagtttttcacagatcgccagccccaatccggtcccctggaaattacgctgtacgccgttgcccacctggaaaaagggatcaaacagtcgggtcaactctttagccggaatacccacaccggtatcacgcgtgcggaacgccagatagccttgtgtgacataggcatgcagaataatacagcccgtatgggtgaatttaatggcgttattcagcaggttagaaatcacctgctgcagtcgcagaggatcaccatcaagtgcctgcggaacatcgtgctcgatatagcagtaaagcgtcaggcgcttcttcaccaccagggagagatagtttccgacaatatgggtgatcacttcgcgcggcgagaaaggtcgcggctctattttcaactgttccgattcaattttggagaagtcgagaatatcgctgatgatcttcaacagcaggctggaagagttattcatcgcggtcaccagcgagtctataccgctcggcagctgccgcgtctgcagcagatccaggttaccaatgatgccatacaacggcgtacgaagttcgtgactgaccgttgccaggaacatggatttcgactggctggcctgctctgccgcgtgggccatttcctgtaaggattgctccatgcgcacgcgggcggaaacatccaccagcacacagatcgccacgttttcattgcggtagcgggaatgcacaaagctgatttgcaggttagtattactgcccgtcaggacatcaacaaagttaacctgctgcccgccgatgatctcatttaatcgcttacggtcttcctgcgtcagcagcgtcagatagttgtgtgccaactcgttactgagaatattggtaccatcgctggtgcgtaaaatgcagatccctaccggcgctgaagcgacaattttacggttgaactgctcgtgctcttccagccggtgtgcgttttcttccgctggcaaaaacatgcgtctctcaaacagccaggcaagcgtaaacagcaggatggcgctcaggatattcagcaacagggcattgatcatcatcagtttgagctgatcgaccagcacatcggtagagaccgaccacaccacgttaagattcgacggtggcaacggttttttcagcaccagctgacggtaaccgtcaagatagccaaaccaggttttatcatcaggcaattcatttaatgaaaagcccaaaccgccccggcgcgaggtcaggagcggagcgtaattttcatccgtaatcgttgccgtgacgggcaggctaccgggctgaataaacgcatcaagctggatattttgctcgacgcccagcagggcctgaagtttatccgccacgtagatcggcatgataacagagaagtttcctacgcctggctgggcgctgctgtttacccagtagaccgggttgcgacgctcctcttccgaactgttgcggtagcgctgaaggttttcctgcaacagcttgaggctgttatcgcggttaacgttgttaccaatagcaaaatccgccagacacttgttatcgccaccaatgaggaacacccggttgagctcataagatgaggcgaaatgactcctccagtaattgatatagttactgagtgagtccagtgagttgcgccaggtcgcgctcatggcggtgcagtcatcactggaaaaaaggggggtaaactgcggttgaatcgtctttcctgccgttgaccgatctgaggcttctcccccgncgctggcgctggtgaggtggttttcagcgatgaacttaagctcgcgcatcttgcccgctgagaggcgaacgtaccagtcaattgtgccgtagttgccagcaaattcctgccgtaccttgttctctttatcgtgaagtacgctaatgatgtagaaggtggtcagcaccgcgcccagtagccagattagcagcgccaacgcgcgaaacagatagcgcgaaatgcgaagcgtcgtgcggaaagagactagatatttcaaaggtaactcgcaggtggcaaggttagtcgcatcgtgggatttttaatgctcatacactagctttatcgcagcaaaaaagccagtcggtgacgggcacccggcgcagtttgggactatttgcccctgaggaaatcatcctttgccaaacctgccgcaaaaaaaacggcaggtcgggtgatccctgacctgccgttgctcttaacgtacgacgcgctaattactcatcgtcgtccgctgcgggtacgtcatcgtcgtcattgtcgacttcaggtacgatatcgtcatccccttccgccacgctgccgtcgatggagtccagctcttcttcttccaccggctcagccacgcgttgcagtccgaccacgttctcgtcctctgccgtacgaatcagaatcacaccctgggtattacggcccacgatgctgacttcagacacacgggttctcaccagggtgccggcatcngtgatcatcatgatctgatcgctgtcgaccacctgcactgcaccaatcaccgggccattacgctcggtcactttgatggagatcacgccctgcgtcgcacgggatttggttggatactcactgttcgcggtacgcttaccgtagccgttctgcgtcacggtgagaatcgcgccctcttcacgcggcacaatcagggaaaccacacgatcgttttgcgccagcttgataccgcgtacgcccgangccgtacggcccatggcacgcacggcagattcggcgaagcgaaccactttaccggcggccgagaacagcatcgcctcgtcgttaccgttggtcagcgctacgccaatcagctcgtcatcatcgcgcaggttaatggcgatgataccggcgctgcgtggacggctgaactcctgcagaccggttttcttcaccgtgccgctcgcggttgccataaagatattgaagccttcggtgtattcgcgcacaggcagaatcgccgtgatacgttcattcgcttcaagcggcaacaggttgacgattggacgtccacgtgccccacggctggcttccggcagctggtaaaccttcatccagtagagtcggccacggctggagaagcacagaatcgtatcgtgggtgtttgccaccaacagacgatcgataaaatcttcttctttaatgcgggcggcagacttgcctttgccaccgcgacgctgcgcttcgtaatcactcagcggctgatattttacatagccctgatgcgacagcgtgacgaccacatcttcctgattgatcaggtcctcgatgttgatgtctgcgctgttcgcagtgatttccgtgcggcgctcatcgccgaactgatcgcgcatcagttccagctcttcgcgaatgacttccatcaggcgctcagaacttcccaggatgtggagcaactccgcaatttgatccagnagctgtttgtattcatccagcagcttttcatgctcaagcccggtcagtttctgtaaacgtaagtccagaatggcctgagcctgctgttcagtcaggtaatatttaccctcacgaataccaaactgcgcttccagccactctgggcgggcagcatcatcaccggcacgctccagcatggcagacacgttgcccagatcccaggattgtgcgatcaggcccgctttcgcttcggcaggcgtgggcgcacggcggatcagctcaatgatcggatcgatgttagccagcgcaatcgccaggccttcaaggatatgcgcacga

SEQ ID NO: 1350 - DNA, 4000 bp, Escherichia coli
  misc_feature (60)..(60): n is a, c, g, or t
  misc_feature (1005)..(1005): n is a, c, g, or t
  misc_feature (1944)..(1944): n is a, c, g, or t
  misc_feature (1965)..(1965): n is a, c, g, or t
  misc_feature (1992)..(1992): n is a, c, g, or t
  misc_feature (2481)..(2481): n is a, c, g, or t
  misc_feature (2627)..(2627): n is a, c, g, or t
  misc_feature (2801)..(2801): n is a, c, g, or t
  misc_feature (2883)..(2883): n is a, c, g, or t
  misc_feature (2894)..(2895): n is a, c, g, or t
  misc_feature (2915)..(2915): n is a, c, g, or t
  misc_feature (2918)..(2918): n is a, c, g, or t
  misc_feature (2921)..(2921): n is a, c, g, or t
  misc_feature (3041)..(3041): n is a, c, g, or t
  misc_feature (3110)..(3110): n is a, c, g, or t
  misc_feature (3134)..(3134): n is a, c, g, or t
  misc_feature (3137)..(3137): n is a, c, g, or t
  misc_feature (3206)..(3206): n is a, c, g, or t
  misc_feature (3610)..(3610): n is a, c, g, or t
  misc_feature (3668)..(3668): n is a, c, g, or t
  misc_feature (3680)..(3680): n is a, c, g, or t
  misc_feature (3864)..(3864): n is a, c, g, or t
  misc_feature (3959)..(3959): n is a, c, g, or t
actggaaccggttatggcctcaccaaggatgcagccaccgagcaagccaaacgggatgcngttgaacagggtctcggcgcctatatgacctccaccactacggtaacagccacctctatagaggataatatttactccaaagctcagggatttgttaagtcctttaaagtgacgaaagaaagcaaagggcccgatggtaactgggaaatcaccatcgaagcagaagtgacggatatgattgatcaagtcatggcagatgaagcagcccttcagacattactcaacgccatgaaccgtcccaggattatttttatggttcgggaacaaaacttgattgataacacgcccaccgattttgctgaaaccaaactgttagccatgttttatgaaaaaggatttgatgtggtagatcggcaaatggttcaagctttgaagggtgatgcagattatggccaagctttagcggggaacgtatccgcggctgccaagatcgcaagccagcttggggctgagattattgttattggtacagccaaaatttcttccggaggtaaaatctataatatgacttctggtcaggccgatatcaatgcaaaaattattcgggtagacacgggtgaaatcttagcggttgtacctcaggcgcggggaaagaaaccccatatatccccatccacggccggcgtgaatgccgccaatcaggccgcggaggcattggggaaaaatatcatttcccaattgatcatcaaatggagtacacagcagtcaaatttcaccaaaatatatattgtgcttaaaggggcagattttatgtcttacatgacatttgagtcattcttaaaagcccagacggtttcaggaattcggaatgcgtacgcgaaaagtttgaatgatggcgtggcggaatatgaagtggaatttgaaggcaaatctcaagccttagccatggggttggcccaaaccagtcccgatgggttgaattttaaggtgaccggattgaccggnaatcgaattacagcagaaattgtacaataattgaggtattctatgaaaagattattcggaatatgcaccctattaattggtatggccttttctcagggtgtggtgacccaattggacaaaggtagcatcaattattcagatcaatccatttcggcgatagggattggatttatcccagtaaatgtgatcaatgcagggcaagcccgccgcttggctttacggattgccaaacaggatgcgcttcgccagctaattgaaattgtaaatggggtaacactcaccagtgaaaccaccatgagcggagccatggttgatgatgtgattaacacgaaggtccgcggatttattcgtggtgcccgtcagatgggaggtccaaagtatttaagcgatacatctgtagaagtagaatattctgttcccatgagtggtatttcagatattatgcttccaccacttacagttgcggtggcacagcccggtgctccgacggaggcggcaacggcaccaacaacgggcggtattaccggtgtgatcattgatgcccgcggactcaaagcacgccctgccatggcacccagaattttagatcaaaatggcaatgcaatctatggccctggtaaatacagtagagaatatgcagtaaccaatggggtagtgggatattctaaaacattagaagcggctcaaaatgacgacagggtcaaagggaatccgctggtggtaaagggggtctcaactgcgggtaaaaacagaaccgatgtggtaatcagcaatgcagatgtttcaaaaattgattcggcgaatcgcagttacaatgtactgaaagattgcagagtgttaattctcctggattaaagtaattttagtaattaagatagtaaaataaggatgcggaataatatgagattaaaacgtatctcaatgttaatcattgggttnttggttagtggtgttgtaggncaggaagaagccaaaacgccaggcatnggaaatattgatgaaaaggatttaaaggttggtgacattgcaccatcttgggcattaatgtatgcgccaggtaagtttgaattcctgaaaaactggtcggaagaagacggaaagcgtcttcgaaaatttacatcccagccggatagacatgccgttctcatgagttttttcgccacttggtgtcagccctgtatgaaggaattgcccattttagaagatgtgtaccaaaagtataaagatgagcgtatcaaattttttctggtggatattacggaagcaactcgaaccaatccaggatatgaagatatgccaaaggctggaccttttttaaaaaagaagggtgtatccatgcaaattttattcgacactcgcggaacagtaatgaagcgctataatgcccagacattgcctcgattgtttatgatggatgggaatcggattatttcacagacaagacggggcttccatgctggggaagaggaaaaattnaccaaagaattgtctgaagaaattgaacgtcttttagcggaattacccccacctaagaatgggaaaaaataggctgtgagccagcccacagggaattgttctgtggatgttttaagttttaaaacaaaagtgagctaattatgagngtatttaaacagattattatatggtgcatggttatgagtgccggttgggcgcaaacaccgggaacccaatccgtgataaatgcagaaacgtctgcccagttggcggaaggtaaacaaaccgtcgctatcttagactttgaagggcggggtatatcccagatggaagcggccacnctcacagacagactcatgagtgaaatggtatccaccaatgcggtgattatggtggaacggaaccagatgaatgaaatcctgnaagaacagggnntgcagcagtccggctgtacntcngcngaatgtgccgccgaagtgggtgccctgttgggtgtacaaagcatgatttccggttcctttggaaaattaggtaatactttcacagtggatgccaaaatgttttccgtggaaacgggtcanaccacgcgcagtgtaagcaagacttataagggagaggtggatggattattgcccatcattgaaattgtngcctgggaactggtcgggctccangcnccagcggatatattagccagggcaggagtaaaagctccggagccagttgcaccaccaaaggaaccacgnaaacccatgagtaagggtgtgaaacgattattatgggcggtattgctggtcggcggcggcggctatggtgcttatgcggcgggattatttgatgtggccccctctcctttacctgaaccgccaaccttaccggagggttaagccatgatgaaaaaattctttttcatcactattttcgggttttccactttgctcagtcagtccgttgtgagcctggatggttccaacgactatctaaccacaaccgaaactaccggtacaaagcttgaaggtgattttactatttccggttgggtcttccccaagggtgatgcgactcagcaggtatttcataacgaactttttgaaatccagtatcaggggtcttattacagacagtttaggatctacccaggcggttacantacaacttggggggaagcttcgatcaatgaatggcaccatattgcggtaacccgtagnagccacactaangcctatgataccctctatgtatatgtggatggcaaacagagtctcatgtttgcaagggatcaatcttcaacaacaacttttgatggtactatgtatttgggccgggaccctgattatggtgaatacttcaggggttttatggatgaatttgccatttggaatacggtcctggattcaaacagcntaaaagaattatataatggcggtgtgcctaaaagcgccaccagcgtgaagtcctccaatatgctctcttactggaaaatggatgatggtacaggnacgtctgcaaccaatgccgtatcaggtagtcccagcctgtc

SEQ ID NO: 1351 - DNA, 4000 bp, Escherichia coli
  misc_feature (1)..(2): n is a, c, g, or t
  misc_feature (4)..(4): n is a, c, g, or t
  misc_feature (6)..(6): n is a, c, g, or t
  misc_feature (8)..(18): n is a, c, g, or t
  misc_feature (20)..(32): n is a, c, g, or t
  misc_feature (34)..(35): n is a, c, g, or t
  misc_feature (37)..(39): n is a, c, g, or t
  misc_feature (41)..(45): n is a, c, g, or t
  misc_feature (47)..(56): n is a, c, g, or t
  misc_feature (59)..(66): n is a, c, g, or t
  misc_feature (68)..(73): n is a, c, g, or t
  misc_feature (75)..(82): n is a, c, g, or t
  misc_feature (84)..(85): n is a, c, g, or t
  misc_feature (87)..(102): n is a, c, g, or t
  misc_feature (104)..(109): n is a, c, g, or t
  misc_feature (112)..(113): n is a, c, g, or t
  misc_feature (115)..(119): n is a, c, g, or t
  misc_feature (122)..(122): n is a, c, g, or t
  misc_feature (124)..(126): n is a, c, g, or t
  misc_feature (128)..(128): n is a, c, g, or t
  misc_feature (130)..(140): n is a, c, g, or t
  misc_feature (142)..(146): n is a, c, g, or t
  misc_feature (148)..(149): n is a, c, g, or t
  misc_feature (151)..(151): n is a, c, g, or t
  misc_feature (153)..(153): n is a, c, g, or t
  misc_feature (155)..(155): n is a, c, g, or t
  misc_feature (159)..(160): n is a, c, g, or t
  misc_feature (162)..(163): n is a, c, g, or t
  misc_feature (165)..(168): n is a, c, g, or t
  misc_feature (171)..(171): n is a, c, g, or t
  misc_feature (173)..(174): n is a, c, g, or t
  misc_feature (176)..(176): n is a, c, g, or t
  misc_feature (179)..(179): n is a, c, g, or t
  misc_feature (182)..(184): n is a, c, g, or t
  misc_feature (187)..(187): n is a, c, g, or t
  misc_feature (189)..(190): n is a, c, g, or t
  misc_feature (193)..(194): n is a, c, g, or t
  misc_feature (196)..(197): n is a, c, g, or t
  misc_feature (199)..(199): n is a, c, g, or t
  misc_feature (201)..(201): n is a, c, g, or t
  misc_feature (206)..(207): n is a, c, g, or t
  misc_feature (212)..(216): n is a, c, g, or t
  misc_feature (218)..(218): n is a, c, g, or t
  misc_feature (221)..(221): n is a, c, g, or t
  misc_feature (223)..(224): n is a, c, g, or t
  misc_feature (226)..(226): n is a, c, g, or t
  misc_feature (229)..(233): n is a, c, g, or t
  misc_feature (237)..(240): n is a, c, g, or t
  misc_feature (244)..(245): n is a, c, g, or t
  misc_feature (247)..(247): n is a, c, g, or t
  misc_feature (249)..(253): n is a, c, g, or t
  misc_feature (258)..(258): n is a, c, g, or t
  misc_feature (261)..(262): n is a, c, g, or t
  misc_feature (267)..(269): n is a, c, g, or t
  misc_feature (271)..(272): n is a, c, g, or t
  misc_feature (274)..(275): n is a, c, g, or t
  misc_feature (281)..(282): n is a, c, g, or t
  misc_feature (287)..(288): n is a, c, g, or t
  misc_feature (291)..(291): n is a, c, g, or t
  misc_feature (299)..(299): n is a, c, g, or t
  misc_feature (306)..(306): n is a, c, g, or t
  misc_feature (308)..(310): n is a, c, g, or t
  misc_feature (314)..(315): n is a, c, g, or t
  misc_feature (321)..(321): n is a, c, g, or t
  misc_feature (323)..(324): n is a, c, g, or t
  misc_feature (326)..(327): n is a, c, g, or t
  misc_feature (330)..(330): n is a, c, g, or t
  misc_feature (334)..(338): n is a, c, g, or t
  misc_feature (340)..(340): n is a, c, g, or t
  misc_feature (342)..(345): n is a, c, g, or t
  misc_feature (347)..(347): n is a, c, g, or t
  misc_feature (361)..(361): n is a, c, g, or t
  misc_feature (404)..(404): n is a, c, g, or t
  misc_feature (447)..(447): n is a, c, g, or t
  misc_feature (450)..(450): n is a, c, g, or t
  misc_feature (484)..(484): n is a, c, g, or t
  misc_feature (491)..(491): n is a, c, g, or t
  misc_feature (494)..(494): n is a, c, g, or t
  misc_feature (498)..(498): n is a, c, g, or t
  misc_feature (502)..(502): n is a, c, g, or t
  misc_feature (507)..(507): n is a, c, g, or t
  misc_feature (509)..(510): n is a, c, g, or t
  misc_feature (513)..(514): n is a, c, g, or t
  misc_feature (516)..(516): n is a, c, g, or t
  misc_feature (523)..(523): n is a, c, g, or t
  misc_feature (525)..(525): n is a, c, g, or t
  misc_feature (529)..(529): n is a, c, g, or t
  misc_feature (536)..(538): n is a, c, g, or t
  misc_feature (543)..(544): n is a, c, g, or t
  misc_feature (550)..(552): n is a, c, g, or t
  misc_feature (556)..(556): n is a, c, g, or t
  misc_feature (560)..(560): n is a, c, g, or t
  misc_feature (570)..(570): n is a, c, g, or t
  misc_feature (573)..(573): n is a, c, g, or t
  misc_feature (578)..(581): n is a, c, g, or t
  misc_feature (589)..(589): n is a, c, g, or t
  misc_feature (592)..(594): n is a, c, g, or t
  misc_feature (598)..(598): n is a, c, g, or t
  misc_feature (604)..(605): n is a, c, g, or t
  misc_feature (610)..(611): n is a, c, g, or t
  misc_feature (613)..(613): n is a, c, g, or t
  misc_feature (619)..(619): n is a, c, g, or t
  misc_feature (628)..(628): n is a, c, g, or t
  misc_feature (632)..(632): n is a, c, g, or t
  misc_feature (637)..(637): n is a, c, g, or t
  misc_feature (639)..(640): n is a, c, g, or t
  misc_feature (642)..(643): n is a, c, g, or t
  misc_feature (645)..(645): n is a, c, g, or t
  misc_feature (647)..(647): n is a, c, g, or t
  misc_feature (649)..(653): n is a, c, g, or t
  misc_feature (655)..(656): n is a, c, g, or t
  misc_feature (658)..(658): n is a, c, g, or t
  misc_feature (665)..(665): n is a, c, g, or t
  misc_feature (668)..(669): n is a, c, g, or t
  misc_feature (677)..(678): n is a, c, g, or t
  misc_feature (681)..(681): n is a, c, g, or t
  misc_feature (684)..(685): n is a, c, g, or t
  misc_feature (687)..(687): n is a, c, g, or t
  misc_feature (690)..(690): n is a, c, g, or t
  misc_feature (692)..(693): n is a, c, g, or t
  misc_feature (697)..(697): n is a, c, g, or t
  misc_feature (699)..(700): n is a, c, g, or t
  misc_feature (707)..(709): n is a, c, g, or t
  misc_feature (711)..(711): n is a, c, g, or t
  misc_feature (713)..(713): n is a, c, g, or t
  misc_feature (718)..(718): n is a, c, g, or t
  misc_feature (722)..(722): n is a, c, g, or t
  misc_feature (726)..(726): n is a, c, g, or t
  misc_feature (730)..(730): n is a, c, g, or t
  misc_feature (733)..(733): n is a, c, g, or t
  misc_feature (740)..(740): n is a, c, g, or t
  misc_feature (743)..(743): n is a, c, g, or t
  misc_feature (745)..(745): n is a, c, g, or t
  misc_feature (747)..(747): n is a, c, g, or t
  misc_feature (750)..(750): n is a, c, g, or t
  misc_feature (754)..(754): n is a, c, g, or t
  misc_feature (757)..(757): n is a, c, g, or t
  misc_feature (760)..(760): n is a, c, g, or t
  misc_feature (763)..(763): n is a, c, g, or t
  misc_feature (765)..(765): n is a, c, g, or t
  misc_feature (769)..(769): n is a, c, g, or t
  misc_feature (771)..(771): n is a, c, g, or t
  misc_feature (773)..(774): n is a, c, g, or t
  misc_feature (777)..(778): n is a, c, g, or t
  misc_feature (780)..(780): n is a, c, g, or t
  misc_feature (783)..(783): n is a, c, g, or t
  misc_feature (787)..(787): n is a, c, g, or t
  misc_feature (789)..(789): n is a, c, g, or t
  misc_feature (793)..(794): n is a, c, g, or t
  misc_feature (797)..(797): n is a, c, g, or t
  misc_feature (799)..(801): n is a, c, g, or t
  misc_feature (803)..(804): n is a, c, g, or t
  misc_feature (806)..(810): n is a, c, g, or t
  misc_feature (813)..(814): n is a, c, g, or t
  misc_feature (816)..(816): n is a, c, g, or t
  misc_feature (821)..(829): n is a, c, g, or t
  misc_feature (831)..(832): n is a, c, g, or t
  misc_feature (834)..(834): n is a, c, g, or t
  misc_feature (839)..(843): n is a, c, g, or t
  misc_feature (845)..(845): n is a, c, g, or t
  misc_feature (847)..(848): n is a, c, g, or t
  misc_feature (851)..(851): n is a, c, g, or t
  misc_feature (854)..(854): n is a, c, g, or t
  misc_feature (857)..(860): n is a, c, g, or t
  misc_feature (863)..(863): n is a, c, g, or t
  misc_feature (865)..(867): n is a, c, g, or t
  misc_feature (871)..(876): n is a, c, g, or t
  misc_feature (879)..(882): n is a, c, g, or t
  misc_feature (885)..(886): n is a, c, g, or t
  misc_feature (889)..(890): n is a, c, g, or t
  misc_feature (892)..(895): n is a, c, g, or t
  misc_feature (899)..(904): n is a, c, g, or t
  misc_feature (906)..(915): n is a, c, g, or t
  misc_feature (918)..(918): n is a, c, g, or t
  misc_feature (920)..(928): n is a, c, g, or t
  misc_feature (930)..(933): n is a, c, g, or t
  misc_feature (936)..(936): n is a, c, g, or t
  misc_feature (938)..(940): n is a, c, g, or t
  misc_feature (944)..(945): n is a, c, g, or t
  misc_feature (949)..(959): n is a, c, g, or t
  misc_feature (962)..(962): n is a, c, g, or t
  misc_feature (965)..(967): n is a, c, g, or t
  misc_feature (969)..(974): n is a, c, g, or t
  misc_feature (976)..(978): n is a, c, g, or t
  misc_feature (980)..(982): n is a, c, g, or t
  misc_feature (986)..(996): n is a, c, g, or t
  misc_feature (998)..(999): n is a, c, g, or t
  misc_feature (1002)..(1002): n is a, c, g, or t
  misc_feature (1004)..(1004): n is a, c, g, or t
  misc_feature (1006)..(1006): n is a, c, g, or t
  misc_feature (1008)..(1010): n is a, c, g, or t
  misc_feature (1012)..(1014): n is a, c, g, or t
  misc_feature (1020)..(1022): n is a, c, g, or t
  misc_feature (1025)..(1026): n is a, c, g, or t
  misc_feature (1028)..(1032): n is a, c, g, or t
  misc_feature (1034)..(1034): n is a, c, g, or t
  misc_feature (1036)..(1037): n is a, c, g, or t
  misc_feature (1040)..(1041): n is a, c, g, or t
  misc_feature (1047)..(1047): n is a, c, g, or t
  misc_feature (1049)..(1049): n is a, c, g, or t
  misc_feature (1053)..(1055): n is a, c, g, or t
  misc_feature (1057)..(1057): n is a, c, g, or t
  misc_feature (1060)..(1065): n is a, c, g, or t
  misc_feature (1069)..(1070): n is a, c, g, or t
  misc_feature (1072)..(1078): n is a, c, g, or t
  misc_feature (1080)..(1085): n is a, c, g, or t
  misc_feature (1088)..(1088): n is a, c, g, or t
  misc_feature (1090)..(1090): n is a, c, g, or t
  misc_feature (1092)..(1094): n is a, c, g, or t
  misc_feature (1099)..(1099): n is a, c, g, or t
  misc_feature (1101)..(1104): n is a, c, g, or t
  misc_feature (1106)..(1106): n is a, c, g, or t
  misc_feature (1110)..(1113): n is a, c, g, or t
  misc_feature (1117)..(1117): n is a, c, g, or t
  misc_feature (1121)..(1122): n is a, c, g, or t
  misc_feature (1126)..(1128): n is a, c, g, or t
  misc_feature (1131)..(1133): n is a, c, g, or t
  misc_feature (1135)..(1138): n is a, c, g, or t
  misc_feature (1140)..(1141): n is a, c, g, or t
  misc_feature (1143)..(1144): n is a, c, g, or t
  misc_feature (1146)..(1153): n is a, c, g, or t
  misc_feature (1157)..(1158): n is a, c, g, or t
  misc_feature (1160)..(1160): n is a, c, g, or t
  misc_feature (1164)..(1167): n is a, c, g, or t
  misc_feature (1171)..(1171): n is a, c, g, or t
  misc_feature (1173)..(1174): n is a, c, g, or t
  misc_feature (1176)..(1176): n is a, c, g, or t
  misc_feature (1183)..(1188): n is a, c, g, or t
  misc_feature (1190)..(1190): n is a, c, g, or t
  misc_feature (1192)..(1196): n is a, c, g, or t
  misc_feature (1200)..(1201): n is a, c, g, or t
  misc_feature (1206)..(1206): n is a, c, g, or t
  misc_feature (1209)..(1209): n is a, c, g, or t
  misc_feature (1212)..(1214): n is a, c, g, or t
  misc_feature (1221)..(1230): n is a, c, g, or t
  misc_feature (1232)..(1234): n is a, c, g, or t
  misc_feature (1236)..(1239): n is a, c, g, or t
  misc_feature (1241)..(1241): n is a, c, g, or t
  misc_feature (1243)..(1243): n is a, c, g, or t
  misc_feature (1245)..(1245): n is a, c, g, or t
  misc_feature (1247)..(1254): n is a, c, g, or t
  misc_feature (1258)..(1260): n is a, c, g, or t
  misc_feature (1263)..(1266): n is a, c, g, or t
  misc_feature (1269)..(1272): n is a, c, g, or t
  misc_feature (1274)..(1277): n is a, c, g, or t
  misc_feature (1279)..(1283): n is a, c, g, or t
  misc_feature (1286)..(1288): n is a, c, g, or t
  misc_feature (1290)..(1291): n is a, c, g, or t
  misc_feature (1293)..(1293): n is a, c, g, or t
  misc_feature (1295)..(1297): n is a, c, g, or t
  misc_feature (1299)..(1302): n is a, c, g, or t
  misc_feature (1304)..(1305): n is a, c, g, or t
  misc_feature (1307)..(1308): n is a, c, g, or t
  misc_feature (1310)..(1314): n is a, c, g, or t
  misc_feature (1316)..(1318): n is a, c, g, or t
  misc_feature (1320)..(1320): n is a, c, g, or t
  misc_feature (1322)..(1324): n is a, c, g, or t
  misc_feature (1326)..(1326): n is a, c, g, or t
  misc_feature (1329)..(1332): n is a, c, g, or t
  misc_feature (1334)..(1334): n is a, c, g, or t
  misc_feature (1336)..(1338): n is a, c, g, or t
  misc_feature (1340)..(1340): n is a, c, g, or t
  misc_feature (1343)..(1347): n is a, c, g, or t
  misc_feature (1349)..(1349): n is a, c, g, or t
  misc_feature (1352)..(1352): n is a, c, g, or t
  misc_feature (1354)..(1354): n is a, c, g, or t
  misc_feature (1356)..(1356): n is a, c, g, or t
  misc_feature (1360)..(1360): n is a, c, g, or t
  misc_feature (1365)..(1371): n is a, c, g, or t
  misc_feature (1376)..(1376): n is a, c, g, or t
  misc_feature (1381)..(1383): n is a, c, g, or t
  misc_feature (1386)..(1390): n is a, c, g, or t
  misc_feature (1392)..(1392): n is a, c, g, or t
  misc_feature (1395)..(1395): n is a, c, g, or t
  misc_feature (1400)..(1407): n is a, c, g, or t
  misc_feature (1410)..(1410): n is a, c, g, or t
  misc_feature (1412)..(1412): n is a, c, g, or t
  misc_feature (1415)..(1416): n is a, c, g, or t
  misc_feature (1418)..(1419): n is a, c, g, or t
  misc_feature (1422)..(1422): n is a, c, g, or t
  misc_feature (1424)..(1425): n is a, c, g, or t
  misc_feature (1428)..(1431): n is a, c, g, or t
  misc_feature (1433)..(1433): n is a, c, g, or t
  misc_feature (1435)..(1435): n is a, c, g, or t
  misc_feature (1437)..(1440): n is a, c, g, or t
  misc_feature (1443)..(1444): n is a, c, g, or t
  misc_feature (1446)..(1449): n is a, c, g, or t
  misc_feature (1452)..(1455): n is a, c, g, or t
  misc_feature (1457)..(1462): n is a, c, g, or t
  misc_feature (1464)..(1464): n is a, c, g, or t
  misc_feature (1466)..(1470): n is a, c, g, or t
  misc_feature (1472)..(1474): n is a, c, g, or t
  misc_feature (1477)..(1480): n is a, c, g, or t
  misc_feature (1482)..(1485): n is a, c, g, or t
  misc_feature (1487)..(1488): n is a, c, g, or t
  misc_feature (1490)..(1494): n is a, c, g, or t
  misc_feature (1496)..(1497): n is a, c, g, or t
  misc_feature (1499)..(1502): n is a, c, g, or t
  misc_feature (1504)..(1510): n is a, c, g, or t
  misc_feature (1513)..(1514): n is a, c, g, or t
  misc_feature (1516)..(1516): n is a, c, g, or t
  misc_feature (1518)..(1533): n is a, c, g, or t
  misc_feature (1535)..(1540): n is a, c, g, or t
  misc_feature (1542)..(1544): n is a, c, g, or t
  misc_feature (1547)..(1547): n is a, c, g, or t
  misc_feature (1549)..(1549): n is a, c, g, or t
  misc_feature (1551)..(1551): n is a, c, g, or t
  misc_feature (1554)..(1555): n is a, c, g, or t
  misc_feature (1559)..(1560): n is a, c, g, or t
  misc_feature (1562)..(1566): n is a, c, g, or t
  misc_feature (1568)..(1571): n is a, c, g, or t
  misc_feature (1573)..(1575): n is a, c, g, or t
  misc_feature (1577)..(1579): n is a, c, g, or t
  misc_feature (1581)..(1584): n is a, c, g, or t
  misc_feature (1586)..(1587): n is a, c, g, or t
  misc_feature (1589)..(1589): n is a, c, g, or t
  misc_feature (1591)..(1591): n is a, c, g, or t
  misc_feature (1593)..(1594): n is a, c, g, or t
  misc_feature (1596)..(1598): n is a, c, g, or t
  misc_feature (1601)..(1601): n is a, c, g, or t
  misc_feature (1603)..(1603): n is a, c, g, or t
  misc_feature (1605)..(1609): n is a, c, g, or t
  misc_feature (1612)..(1615): n is a, c, g, or t
  misc_feature (1619)..(1630): n is a, c, g, or t
  misc_feature (1633)..(1635): n is a, c, g, or t
  misc_feature (1637)..(1639): n is a, c, g, or t
  misc_feature (1646)..(1649): n is a, c, g, or t
  misc_feature (1655)..(1655): n is a, c, g, or t
  misc_feature (1657)..(1658): n is a, c, g, or t
  misc_feature (1882)..(1882): n is a, c, g, or t
  misc_feature (1989)..(1989): n is a, c, g, or t
  misc_feature (1991)..(1991): n is a, c, g, or t
  misc_feature (3519)..(3519): n is a, c, g, or t
  misc_feature (3838)..(3838): n is a, c, g, or t
  misc_feature (3840)..(3841): n is a, c, g, or t
nngnancnnnnnnnnnnntnnnnnnnnnnnnngnntnnncnnnnncnnnnnnnnnnccnnnnnnnntnnnnnntnnnnnnnnanntnnnnnnnnnnnnnnnnannnnnnaanncnnnnnccntnnncngnnnnnnnnnnngnnnnntnntntntncatnntnntnnnnaantnncnacngannnggnannagnntnngnanttggnnacggnnnnntnaangnncnggnnnnnaaannnnctcnnanannnnnattangannataannngnntnntttggnntatannttntaaaaccnccactanannnaaanngaaaancnntnnttncagnnnnngntnnnntnactgtatttgtttnatctaagattaaattaaatcctaaggcacttgttgcttgcacntgcataggagcaatttgataatctgtagatctctctatttctnganctgctgggttaaaccatgatggtctactgtttcnaacagtnttnccancaanatatnanncannanttatatnancatnttcaaannnaaatnnatcagnnnttanatcnttatctttangtntatannnntttgcatntannnaatnaaaatnngaatnnanatcctnaaaaatatnattnttaananngnnancntnnnnntnngntacatanttnnctagaaannttnctnnanatntnnctgntnntttattnnnantnataanaggnttanttantgnattaaanttngnancantaancgnacnaanangtgntnanntanntntancagnanttgnntcngnnntnnannnnnttnnanttttnnnnnnnnntnntnttttnnnnntntnnttnttnttnnnnttntnnnttannnnnnatnnnncanntanngnnnnattnnnnnnannnnnnnnnncanannnnnnnnnannnntanannnaaanntttnnnnnnnnnnntcnttnnnannnnnntnnnannntttnnnnnnnnnnntnntantnantnnntnnnttattnnnganntnnnnntngnnttnnttttanangttnnntnaannnnnncatnnannnnnnntnnnnnntcngntnnngtttngnnnnanattnnnntttnaatnntatnnnaannnannnnannanntnnnnnnnnaatnntngatnnnntatnanntnttgtatnnnnnntnannnnntttnnaaaancanttnnnaaaggannnnnnnnnngnnngnnnntntntntnnnnnnnntttnnncannnnttnnnnannnntnnnnnaannntnntncnnncnnnntnncnnannnnntnnngnannnanttnnnnangnnntntcnnnnntngtntntntggntgttnnnnnnnttgtnaaatnnngtnnnnntntgnctgtnnnnnnnnctntnaannannctntnnatnnnncngnannnnttnnannnngannnncnnnnnntncnnnnncnnntgnnnncnnnncnnannnnnanncnnnngnnnnnnnttnngngnnnnnnnnnnnnnnnntnnnnnnannntcngnancannatanncnnnnnannnngnnnannntnnnncnntncngnnannngtngnannnnnagnnnnagannnnnnnnnnnnatnnntnnnaataaannnntcatanannccagttacactagaatataaagttccagatgcttcatactcagctgaagacagcgctgatagtaacggattaaaatataatccatcataataatctgcaccagttgtacagcttgatgccgttgtactctccgctgcgacatatgatgatcccgcttttctctttgggtagacgggctttataaaataaaactcattgccatatatatcactgcgtaatttaangcctgtcttattagatattaacagatcagataatctagatgcttctggataagagtttaatacgcttattggatatgtgtcagtattcttccaatctatttgtccgngngcgtcatcccaaaagcttatattatcttctctcttgtttatacctgcaacagaataatctaacgtgttttcttggctttgatatccgtaatttcgaagtaatttattattataaatctctacagacgagctctgattatcgtttttatatgtattattttttgatttaaaaattaaaggtgtccgttgcttcatttttatattacggagccgttcacctgttttactatttttaatataaccaacaaccttaacacctggttcgtatttatgagggttcggtacaatatactcactacctgtaaatgcagataaatcgatattaaatgttaacccattagaataaaaattagttgttcctgtatttttaaacgataattggaatggaaaaatttcagtgctctttatgttgagtggagtgctatataagttaggattatatctttgagctagattgtttgttggatttgtattattaaataattgttttattttagcattatgtttattaccggatatatgatataaatcatttgctaaatatttttctattaatcccttttcatgtgtgaattttagattgtctatagttttattttcacctctaaaatatctccctggtaatctttcaaaatttacaaacggatcatttatacctaatagactattaggtgttgagacattattggattgaatttttaatttttttccatttttatttattgatattacttgtagtacattaggtacttcacgaagtacctttctagcaatatttaaatttaaatctttatctatcttatgtatatcatatacaaattcatctgatatgtaattttttaaattaactgaaatattatttgcaattttttgtagtttaatatcactgatttttgcatttgtacgctctcttataaattcatcactatttaacaacctggcaataaaatttttaatgtatttttgtataccaagcttagatgtttttagcttgtttttagttgtagagaatttaacctcttcacgaatgtctcgaatatttcgtaattgggattgaataatttcagcaaaatagtgaattgatagttcaagctcatatatatcatctacatctatcctctcaataaaatcttgtacaggtttatcaagtgttgataaatttaagttgtctataaattgaacgtagatactttttgcatagttggtattagtagtatcattaacttgtttttgatctttccattctataagataattattatatcttactgatagttcagaagcatcagcaatatctgtataataggctttccactcaaggaatgatattgggttggttgtattaaagtctattgtcatatactaagcccctttctaatttgataatctaaattcttgtatattacaccaccagtatcttcccagtctgcacttaaagaggttgtactacgtgtaatagtattataattgttattaaaatctataatactgtttttaatattttcatttgcagatgtcgtgtcgtatgnagtgtatggatagaagtcataaaacccatctagaccacttgaacctgatactgacgtgtctaagggccaaccccagttactatatacgttataagcagataatggatatgcagataatatatccgtatcagcaccagatacagctttactacaaacattttgtggtctaattaaagtaaattcattattaaatctttgccgcgctacaaaattagcggctgttgtaacagtatatgttgatgtagttatcttattatcaaaatctatattcctaccatcagctgagcttgtataaaagtttgaatttaagctttggtcntnncgttcataatctcctaaaagctttgtaatctttatactaaacaaatcatataatcgctttagttctggtggtggagttggtaatacaatatctatatcttcgttaaatagatcgtagaatgattgtaaattatccatattacagtaatcaacatcatta

SEQ ID NO: 1352 - DNA, 4000 bp, Escherichia coli
aggccggatcgtcccaggccagcgagccgatgaacaggctcatggtgaagccgataccggcgcagaccgacacgccgtagagcttcaaccaggttccgccggccggcatcggcgccaggcgcaacaggatgaaggcagcggccggcaggaaaacgccgatctgcttgcccaggaacaggcccagcgcgatgcccagcggcaccggctccagcagcgcggcgaccgatagaccggcaagcggcaggccggcgttggcgagcgcgaagagcggcatgatcaggaacgacacccagggcttgagcgcgtgctccagcacgatgaagggccggtcgtcgggcgcgacgctttcgtcgcgcagcggcaggcagaaagcgatcaccacgcccgccagggtggcgtgcacaccagacttcagcacgcagacccacagcaccgcgccgaccagcagatagggaccgctgcgccgcacgccgagccggttcagtgtcagcatcgtgacgatgcagatcgccgccagcaccagcgccgtcgtcgacagctcggcggtatagaagatggcgatgatcacgatggcgccgaggtcgtcgatgatcgccagcgtgacgaggaagagcttcagccccagcggtacgcgcgagcccagcaccgccaggacgccgacggcgaaggcgatgtcggtggccgctggcaccgcccagccgcgcagcgccacggcgtcgccgacattgaaccaggcgaagatcgccgccggcaccaccatgccaccgagcgccgcgaccatgggcatggcgacctgcgccggcttggacagtgcgccctcgaccacctcgcgcttgatctccagcccgaccagcaggaagaagatcgccatcagcccgtcgttgatccacagcaccagcggcttgctgagccccagctcgccgtagctgatggtgaacttggtggcgaacagccggtcgatggtggcatgcaagggcgagttggcgaggatgatcgccagcgccgccaccgcgatcagcacgatgcccggcgcggcctcgctgtgcaggaaacgatggagacggccgctggccatgggcgactcccggtgccgctcggagatttcgggcccgaattccttccccccgagcgcgggagggccatgaaaaacgcccgggcctttcggacccgggcgttgcgagcgtcgccgctcggtgggtaactagtcgcggtcgccgatcagcgacagcagcatctggaacatgttgacgaagtccaggtacaggttgagcgcgccgaagatggcgaccttctcctgaacgtcggtaccccaggcctcggcgtactgctccttgatctgctgcgtatcgtaggcggtgaagccggcgaagatcagcacgcccaccgccgcgatgatgaagtgcagcatcgagctggcgaggaagatgttcacgacgccggcgatcaggatgccgatcaggcccatgaacaggaaggtgcccatccccgacaggctgcgcttggtcgtgtagccgtagaggctgagcgcggcgaaggcggcggcggtgatgaagaacgtgcgcgccaggctggtgccggtgtagcggtagatcagcagggtgaagccgacgccgttcagcgccacgatcgcccaatagaccatcttggtcgtcgtcacgctcatggtcgcggcgcggaacgaagcgagcaggatcaggccgatcggcgccaggatggcgacccagccaaggatcgtcaggctggtgaccacgcggccgttgggcagcatccccgacttgatgaagatcgcgttcagcgccggcacgctgtagatcagcatcgcgacgatgccggacagcgccaggcccgatgccatatagttgtagacgcgcagcatatggctgcgcagaccggcgtcgaagaccgcctggtcgaccgtcgtcgaacccaccatgggccgagtgtcaaactgagccatttattgcctcccgataggcggacacacacctgccacccatattggcgaaagtcgcgacattatcaatacctgaccgcgatacccggatacgcatccacgacaaagatcacgtcgccgttgatatccccacaaaatttctggctattcattgcgcagcagggccagcggccgttgccgcgtggcgcccaccgcgcccacgaggccgaagcccagggtcagcgccatcgcccccagcacggtcagcgccaccacgtcgggcagcaggatccactccaggttcatcacgaagcggatcaccatccaggccgcgacggcgccgaacgccgccgccgccagcgcggtgacgaagcccagcgcggcgaattcgagcgagaagacgcccagcacacgtccgcgcgaggcgcccagcaccttcatcaccaccgcgtcgtgcacgcgccgccgctgcgtcgccagcatggcgccggccagcaccagcagcccggcgccgatgccgaccacgccgaccacgcgcgccgccaggccgatattggcgaggatcgagctggcgttctccagcgcctccttcacccgcacgatggtgacgttggcgaagtcgcgggtgaccacgtcgaacaccttgtcctcggcgcccggcgccgcgcgcacggtggcgaggaaggtctgcggcgcacgctccagggtgccgggcgcgaagacgaagacgaagttgatcgacagcgagctccagtcgatgcgcctgagattggcgatacgcgcctccacgtcgcggcccagcacgttgacggtgatggtgtcgccgacgcccaacccgtaagccgccgccagctcggcgtcgaaggagatcagcggcgggcctttgtagtccggcggccaccattcgccggcgacaatgcgcgaaccctccggcggtaaggccgcgtaggtcagcccgcgatcgccgtcgatcgaccagcgcgcctgcgaggggatgttggcttccgcgatcggcttgccgccgatccgggtgatgcgcccgcgcagcatcggcaccttgtcggcgccgccgacgccgtcgatcgccgtcaccgccttggtgaaggcatcgacctggctctgctggatgtcgacgaagaagaaggtcggcgcgttgaccgggatgcgtcgcgtgatctggctctgcagattgccctcgatcagcgccaccgcgaccagcacggtgagacccaggccgagcgagagcatcaccgtcggtgtcggcgcgccggggcgatggatattggccagcgccaagcgtagcacggcgaagcgcggcctgccggcccatcgcgccagcagcatcacaacgcgcgccagcagcgggaagacgatgaaggcgccgatcgaaccggcgacgaaccacagcgcgatgcgccggtcgcccgccgtcgccacggtcagcgccgccagcgccaggatcgcagcgccgatgatcgccatgtcgcgcgcccggggacgcgccgcgtcgggcgccaccgcgccgcgcatcaaggtcgcggccggcaccagccgcgccttcatcagcggccacagcgcgaagatgccggccaccagcatgccgaaggcggcggcgatgatcagcggctggccatagacgccgacccgtgcgcgcaccggcagcacgtcggcgaagaaggcgttggcgacgaagggcagggcgacgccgacgatcagccccagcacgacgccgatcgccgccagcacgccgatcagcagcaggtagctgcgcgtgaccagcgccgacggcgcgccgacgcatttgaggatggcgatggtccgcgtacggcccagcagatagctgtcgaccgcgttgccgacgccgacgccgccgaccagcagcgccgccagcccgatcagctcgaggaacacggtgagccgctcggtccaggtgcgcacgccgccgcccgcttcgctcagcccgcgcacgcgccagccggcctccgggaagcgcgcgatcaggtcctggcgataggcctgccagtcggcgcccggccgcagcgcgacgcgataatcgtgggtgcgcag

SEQ ID NO: 1353 - DNA, 4000 bp, Escherichia coli
  misc_feature (4)..(4): n is a, c, g, or t
  misc_feature (6)..(6): n is a, c, g, or t
  misc_feature (61)..(61): n is a, c, g, or t
  misc_feature (115)..(115): n is a, c, g, or t
  misc_feature (148)..(148): n is a, c, g, or t
  misc_feature (220)..(220): n is a, c, g, or t
  misc_feature (244)..(244): n is a, c, g, or t
  misc_feature (253)..(253): n is a, c, g, or t
  misc_feature (307)..(307): n is a, c, g, or t
  misc_feature (320)..(321): n is a, c, g, or t
  misc_feature (430)..(430): n is a, c, g, or t
  misc_feature (481)..(481): n is a, c, g, or t
  misc_feature (508)..(508): n is a, c, g, or t
  misc_feature (517)..(517): n is a, c, g, or t
  misc_feature (619)..(619): n is a, c, g, or t
  misc_feature (898)..(898): n is a, c, g, or t
  misc_feature (946)..(946): n is a, c, g, or t
  misc_feature (1015)..(1015): n is a, c, g, or t
  misc_feature (1033)..(1033): n is a, c, g, or t
  misc_feature (1042)..(1042): n is a, c, g, or t
  misc_feature (1045)..(1045): n is a, c, g, or t
  misc_feature (1069)..(1069): n is a, c, g, or t
  misc_feature (1072)..(1072): n is a, c, g, or t
  misc_feature (1087)..(1087): n is a, c, g, or t
  misc_feature (1121)..(1121): n is a, c, g, or t
  misc_feature (1141)..(1141): n is a, c, g, or t
  misc_feature (1226)..(1226): n is a, c, g, or t
  misc_feature (1234)..(1234): n is a, c, g, or t
  misc_feature (1243)..(1243): n is a, c, g, or t
  misc_feature (1255)..(1255): n is a, c, g, or t
  misc_feature (1309)..(1309): n is a, c, g, or t
  misc_feature (1363)..(1363): n is a, c, g, or t
  misc_feature (1366)..(1366): n is a, c, g, or t
  misc_feature (1486)..(1486): n is a, c, g, or t
  misc_feature (1543)..(1543): n is a, c, g, or t
  misc_feature (1642)..(1642): n is a, c, g, or t
  misc_feature (1672)..(1672): n is a, c, g, or t
  misc_feature (1750)..(1750): n is a, c, g, or t
  misc_feature (1772)..(1772): n is a, c, g, or t
  misc_feature (1923)..(1923): n is a, c, g, or t
  misc_feature (1950)..(1950): n is a, c, g, or t
  misc_feature (1952)..(1952): n is a, c, g, or t
  misc_feature (1954)..(1954): n is a, c, g, or t
  misc_feature (1964)..(1964): n is a, c, g, or t
  misc_feature (1972)..(1972): n is a, c, g, or t
  misc_feature (1981)..(1981): n is a, c, g, or t
  misc_feature (1991)..(1991): n is a, c, g, or t
  misc_feature (1994)..(1994): n is a, c, g, or t
  misc_feature (2001)..(2001): n is a, c, g, or t
  misc_feature (2011)..(2011): n is a, c, g, or t
  misc_feature (2031)..(2031): n is a, c, g, or t
  misc_feature (3348)..(3348): n is a, c, g, or t
tcgngnttctaaaaatgaaattttaaccgattatctgaatgtttctccttttggacgtaanaacaaggggaaaaatattgctggtattgaggaggctgctcaaggtatctttggngtatctgcagcggatttgacagttcctcaggcngcctatctggcaggtttgccacagagcccgattgtctactcaccttatacagctgacggtcaattaaaaaangcagaggatctttcttatggcttngcacgtcancaagatgtactctacaatctttatcgcggtggctatctagataagtcgcagtangaaagctataagnnttatgatatcactaaagatttcaaggctggtgagaagtctgatgccgtaagtcatgactatttgtactattctgtcatgtctgaggctcaggatgtcatgtatgattanctcgttaaacgtgacaaggtatcgagtcaagatttgaaaaatgataagacnaaggaaagctatcgtgagagggccctncaagagctncaaaccggtggctacagcgttaagacaactattgataatgcagtttataatgcgatgcaagatgctgcgagtcaatatggtggcctcctcgaccaaggtggnaatagtggagttgaagtcggaaatgtgctcatggataatgcgactggagcaattctaggatttgttggtggtcgtagttacgaaaataatcaaaataaccatgcctttgatacggcacgctccccaggctcatctattaagcctattattgcttatggaattgctattgatcaaggtttgatgggtagctcaagtatcctttctaactacccaactaattttacgggtggaacgcctattctccatgatggtgataagggtacagctatgatgaacctncaagaggcactcaatacctcatggaacattccagccttttggacttancaaatgcttcaacgtcatgatgttgatgttgagggttacatgaccaagatgggttataagattgctaantacaatatcgagagtttncctcttggnggnggaattgaaaccacggttgcccancangtaaatgcctatcanatgctttcaaatggtggcgtctatgagaagggcnatatgattgatagtattacngaccggactggcgaagttatctatcagcataaatctgaaggggttcaagtcttttcaagagctacggctagcatcatggataacntgctcaangaagtggtngttaagggagcnacaactcaatttcattctgaattgaaaaatgtcaatggtgcagcagcctcagcngactggatgggtaaaacaggaacgacagataactttgcggatgcttggttgatngtntcaacgcctggtattactcttggtggttgggctggttatgacaataatacaccaaccaattctaaaacgggttacacctataatgcgcaatatatggctcgtttgacttccgctatctanaatgccaatccaggtatttttaaaacgggagataagtttaatatcgattcaagtgcnattaaggcaagtgtgctcaaatcaacaggtcttaaaccagcaacagtgtctgtcaatggtcgtaatgtttctgtaagtggtgaaatggttgatacttantgggctaaaaatggacctggagatacgacntacaagtttgctattggtggaactgacagtgactatcaaaaagcctggtctagcattcttggagggcattaggaattnccaagaaaacttgcaaaaaagnaaaaaattaggtataatatagacaactatttgtcgtcttacttggttgaaatattgtccaatcaagagatacagcagttaaatcaacgttttttcggtcagatttagctgctatttttgtgcttatttttaggattttcaagtgttgtaangcatatttaaaggttctaaaaattcananantaagtttttngcttatcnttaatcagntaagtggatnttngtgtttnatcacttgtnaatgggacaagcaactgaanaaggcagaagacaaatatttaaagtgcacgacttgcaaagcaggtctcgaatgtagaaaaggagtagaagacttggcaggacatgacgttcaatacgggaaacatcgtacccgtcgtagtttttcaagaatcaaagaagttcttgatttaccaaacttgattgaaatccaaacggattcattcaaagaattcttggatactggtcttaaagaggtttttgaggatgtacttcctatctcaaacttcacagacactatggaattggaattcgttggttacgaattgaaagagcctaagtatacacttgaagaagctcgtatccacgatgcatcatactcagcacctatctttgtgactttccgtcttattaacaaagaaactggtgaaatcaaaactcaggaagtcttcttcggagatttccctattatgactgagatgggtactttcatcatcaatggtggtgaacgtattatcgtttctcagttggtgcgctcacctggtgtttactttaacgataaggttgataaaaacggtaaagtgggttatggatcaacagttatccctaaccgtggggcatggcttgagcttgaaacagattcaaaagacatcgcctacactcgtatcgaccgtacacgtaagattccattcacaacgcttgtgcgtgcgcttggattctcaggtgatgacgaaattgttgatatctttggtgatagcgagttggttcgtaacaccattgaaaaagatatccacaaaaacccagcagattcacgtactgatgaagcgcttaaagaaatttatgaacgtcttcgtccaggtgaaccaaaaactgccgacagctcacgtagcttgcttgtagctcgtttctttgatccacgtcgttatgacttggctgctgttggtcgttacaaagtcaacaaaaaacttaacatcaagacacgtcttttgggacaaacaattgctgaaaacttggtagatcctgaaacaggtgaaatccttgttgaagctggtactgaaatgacacgtgatgtgattgattcaatcgcagaatacttggatggtgatttgaacaaatttgtatacacaccaaacgattatgcggtggttacagaacctgttgttcttcaaaaattcaaggttgttgcaccaaatgatccagatcgtgtggttacaattgttggtaatgccaacccagatgacaaagttcgtgctttgacaacagcggatatcttggctgaaatgagctacttcctcaaccttgctgaaggtatcggtaaagtagacgatatcgaccaccttggtaaccgtcgtatccgtgcngttggtgaattgcttgctaaccaattccgtattggtttggctcgtatggaacgtaacgtacgtgagcgtatgtcagttcaagataacgaagtcttgacaccacaacaaatcatcaatattcgccctgtaactgcagctgttaaagaattcttcggttcttcacagttgtcacagttcatggaccaacacaacccattgtcagagttgtcacacaaacgtcgtttgtcagccttgggacctggtggtttgacacgtgaccgtgccggatatgaagttcgtgacgtgcactacacgcactacggtcgtatgtgtccaattgaaacacctgaaggacctaacatcggtttgatcaataacttgtcttcatacggacaccttaacaagtatggtttcattcaaacaccatatcgtaaggttgaccgtgcaactggtaaagtaaccaacgaagtagtttggttgactgccgatgaagaagatgagtacacagttgctcaggctaactctaaattgaacgaagatggaacatttgcagaagaaatcgttatgggtcgtcatcaaggtaataaccaagagtacccatcacaccttgtagatttcgtggatgtttctcctaaacaggtagttgccgttgcgacagcatgtattcctttct

SEQ ID NO: 1354 - DNA, 4000 bp, Escherichia coli
  misc_feature (1944)..(1944): n is a, c, g, or t
  misc_feature (1946)..(1946): n is a, c, g, or t
  misc_feature (1953)..(1954): n is a, c, g, or t
  misc_feature (1956)..(1957): n is a, c, g, or t
  misc_feature (1962)..(1962): n is a, c, g, or t
  misc_feature (1969)..(1969): n is a, c, g, or t
  misc_feature (1980)..(1980): n is a, c, g, or t
  misc_feature (1989)..(1989): n is a, c, g, or t
  misc_feature (2001)..(2002): n is a, c, g, or t
  misc_feature (2010)..(2011): n is a, c, g, or t
  misc_feature (2040)..(2041): n is a, c, g, or t
  misc_feature (2046)..(2047): n is a, c, g, or t
  misc_feature (2049)..(2050): n is a, c, g, or t
  misc_feature (2059)..(2059): n is a, c, g, or t
  misc_feature (2062)..(2062): n is a, c, g, or t
  misc_feature (2079)..(2080): n is a, c, g, or t
  misc_feature (3273)..(3273): n is a, c, g, or t
  misc_feature (3448)..(3448): n is a, c, g, or t
  misc_feature (3641)..(3641): n is a, c, g, or t
  misc_feature (3656)..(3656): n is a, c, g, or t
  misc_feature (3753)..(3754): n is a, c, g, or t
  misc_feature (3764)..(3765): n is a, c, g, or t
  misc_feature (3791)..(3791): n is a, c, g, or t
  misc_feature (3795)..(3795): n is a, c, g, or t
  misc_feature (3809)..(3810): n is a, c, g, or t
  misc_feature (3823)..(3823): n is a, c, g, or t
  misc_feature (3825)..(3825): n is a, c, g, or t
  misc_feature (3872)..(3872): n is a, c, g, or t
  misc_feature (3878)..(3878): n is a, c, g, or t
  misc_feature (3911)..(3911): n is a, c, g, or t
  misc_feature (3917)..(3917): n is a, c, g, or t
  misc_feature (3924)..(3924): n is a, c, g, or t
  misc_feature (3926)..(3929): n is a, c, g, or t
  misc_feature (3931)..(3931): n is a, c, g, or t
  misc_feature (3934)..(3934): n is a, c, g, or t
  misc_feature (3936)..(3937): n is a, c, g, or t
  misc_feature (3940)..(3941): n is a, c, g, or t
  misc_feature (3944)..(3945): n is a, c, g, or t
  misc_feature (3947)..(3948): n is a, c, g, or t
  misc_feature (3950)..(3951): n is a, c, g, or t
  misc_feature (3953)..(3953): n is a, c, g, or t
  misc_feature (3956)..(3956): n is a, c, g, or t
  misc_feature (3959)..(3959): n is a, c, g, or t
  misc_feature (3962)..(3962): n is a, c, g, or t
  misc_feature (3964)..(3969): n is a, c, g, or t
  misc_feature (3972)..(3972): n is a, c, g, or t
  misc_feature (3979)..(3979): n is a, c, g, or t
  misc_feature (3984)..(3984): n is a, c, g, or t
  misc_feature (3987)..(3987): n is a, c, g, or t
  misc_feature (3989)..(3989): n is a, c, g, or t
  misc_feature (3992)..(3994): n is a, c, g, or t
  misc_feature (3996)..(3996): n is a, c, g, or t
  misc_feature (3999)..(4000): n is a, c, g, or t
tgtttaaaatggccgtaataagaatttattgttgctaaagttttgtttaattctaaagtctcttttttgtttttgtttaaaaaatacaatttattcttcagccggctgaccactcttctacaaactaaaacataatcgggttttacaaaatatcccagaaaatttattccattatcaatgggctggattttggttttgtctaaattcagttttaagcttaacctttcttccaaaaaattattgattttatttctccaatgcctcaaattctctttgtctctatctaatagaatcaaatcatcaacataacgaacataatatctgcatttaagttccctttttacaaattggtccagctcgtttaaataaagattagcggaaaactgggaagaataattgccgatgggaagtccgcagtgaagaccggaataaaataatgactttcgcggcggaataaatttgaataaagaaacatctcccttggtaacatagtttttggtgggcttattgaaaataatggtttttgccagccataaaacttctttttcccaccaagagggtttgttatgctttgaaaccaactttttaaaaagggaatataaaatgtagtggttaattgccataaaaaagccggaaatatccaattgggcgtaaaatgctctttgggtataatttttagttaccttcctaataaaacttttcaaccttctaactgccaaatgagtccctttgcccttccggcaggaaaaggtatcaaagatgaattttctttcgccaataccttctatctcgttaatcaaaaggtgatgaactattctgtcccgaaaatcagcggcgaatatttctctgggcgagggatctttgatggcaaaacaaattgaacggcccgacctgtatttttttgcttccagctctttctgcagccggaaaagatttctttctaaattccactcaaactccaaagcattaatagtgttccttttgttttcccggcagtccaaataggccctataaagtttttcaaaagtaaatatagttttgtttatcataattttaggaagcccagcgaagccaacccccgatcatttctccaatttctttaacataattggtctgaaggtgggcaaaccgccttttggatattaaatttatttcttgaaccattctcaatctgatttttaactggtcaaaagcaacgcttaattctaaaattttgggatgtttttctttatcaggcagaatgtttacttctaaaactaaatcaaggcacttccaagccaaatcaataatgttttgccctaaagcatacttatattgtttgggaaaatttcttaccatctcataaagaaatttcaaaaactggtaaagttttagatataagggcagtttttggtttttaatcatttttattattagtgaatttaatgctccgcgaggaacatattttacctttaaggctaaatatcgttaatattatccctcgggctgaaattaactccctcacgcaccgcacggaaaagccgtttgccttattgttgtaattgcggttgacgctggtgttattgtaattcaggttgcggttccaggcattggtatctctctcggtagacgaccacaggttggcgttgttgctgagattgttgtaactgccatcagtgttacggtagccgccgggaagaacggaattgcttttgctcttagtcgtactccgggaatctaatgaaaattttcttttcaaagagatcccctaaccaccaatggtctctttattaagaccggcaaaagcggaatcaatttttagccgctctctcctgagggttagctcgacttagcgagcaaaccattcagaaatctggcggagcatatttaatttttaattttttccaaattccaaattccaaaatgccaaattctaatccctcacgcaccgcacggaaaagccgnangccttanngnngtaantgcggtngacgctggtgntattgtaanccaggcggcggnnccaggcannggtatctctctcggtagacgaccacaggnnggcgnngnngctgagatngtngtaactgccatcagtgnnacggtagccgccgggaagaacggctaatccagaagaggcaaagttagagtgatttctaaggagtccgtcagaccaaaggtcatattctcctgccatggctgagccttcgccattggttcctttgtagccggtagctaattcgtcatacaggaattgagttgagcaatccgtgccgccgagatcagaacatatctgacgttcaagggcaacccactcataatggctgggtatatgccagccattagggcatattccctgcacaggggttaaacaagcgggctgggactcgcctgtgccgttgcagctaactgaaccgcacatcatatcggtccaggtgtacaagccgccgtaagtggtgcagttggcagcattgtcggcatagcaatatctggttatggaacaactttgggccgtgtttccattggttacagcaagattctttgccaaccagcattggtcgcctattggaaccataccataagtaacgctgtcgtaagtaatgctgccttcgcagggctgcacttttacggtaacattaactcttaatttattatttgtgtctttagcgatagttggataataataccgattggaaacagaactattataaacagtggctgccgtaccccaggaaaatccggtgcctggatacgaggtggtggtagaggcctgccgggcttcaacatcataaccgtttgtgtagacaataaaagcgttcgcggaatcggcttcaatggaaaaatcattggtggcaacagaaatagtggcactggagttatagtaccagtttgtctcatcagttgaataccagaatacaatcctggttccatcgttaaacgcttgccagtagcgagcgccgtcataccaggttttgcgctggaaagaataggcggtagatgaggcagaagtggagtaaggaaaatatttggcaacaataacatcgcgataaattggcaaactggaggttgaactaaaaccggtcagagaagcagtatggctatgagtttggtgggctgctccggtgccggcttttcctgagccaacggtgccagcagaatctgtggtggtcagcccggtgatatcattatggctgtgggtgctggtgcctgcctgaccgccataagtagatgaagccattaaaaacctttgataaaatgggtcgctttccccatcggaaataacatcccacgggnaagagggcgtatcatcaaaaagaccaatcataccatcggggatagtagtggttgcatcaagttgatataaaaggacagcggtatagggaggtagattgtcaacggcattagtagttgttgctgaaagggtgtgggtgtgggtaatagccgaaactacgccagttgtgccttcttntatagccgaggccgtggtctcgtcgatggtcgaagtaacagtatggctgtgggtggtcgaaccgccgctactcgtagaattactaccccgaatgtaataattgtcttggatgctgtagcgagtccaactgccactaattggcacatcatcaaaaagagcaataatacctgttggaagctcggaaggaacaccnctgttgtattttatnatttttaagccacgatatagtggtacattgctggtggcatttaccgtggcgctgcctgaatgattatgggtggttggagcaacggtcgcagccgctnntccgacgccnnctttatagccaccatcagttgtgttntcanccacattaacagtnnctgtatgagtatngntgtcagaaccactggtggcagagccataactggctgctcctcgtggnaaaacntgccaaaaatcgccactgccacaggaaagacangtccantaatcancnnnngnagnannggnngcnncnncnnanaanaanatnannnnnnctngatcagncgcancancngcnnncngcnn

SEQ ID NO: 1355 - DNA, 4000 bp, Escherichia coli
  misc_feature (1)..(6): n is a, c, g, or t
  misc_feature (8)..(38): n is a, c, g, or t
  misc_feature (40)..(40): n is a, c, g, or t
  misc_feature (42)..(42): n is a, c, g, or t
  misc_feature (44)..(50): n is a, c, g, or t
  misc_feature (52)..(70): n is a, c, g, or t
  misc_feature (72)..(73): n is a, c, g, or t
  misc_feature (75)..(77): n is a, c, g, or t
  misc_feature (79)..(91): n is a, c, g, or t
  misc_feature (93)..(94): n is a, c, g, or t
  misc_feature (97)..(102): n is a, c, g, or t
  misc_feature (104)..(104): n is a, c, g, or t
  misc_feature (106)..(112): n is a, c, g, or t
  misc_feature (114)..(121): n is a, c, g, or t
  misc_feature (123)..(128): n is a, c, g, or t
  misc_feature (130)..(137): n is a, c, g, or t
  misc_feature (140)..(149): n is a, c, g, or t
  misc_feature (152)..(163): n is a, c, g, or t
  misc_feature (165)..(183): n is a, c, g, or t
  misc_feature (185)..(191): n is a, c, g, or t
  misc_feature (193)..(194): n is a, c, g, or t
  misc_feature (196)..(203): n is a, c, g, or t
  misc_feature (206)..(206): n is a, c, g, or t
  misc_feature (209)..(211): n is a, c, g, or t
  misc_feature (216)..(220): n is a, c, g, or t
  misc_feature (226)..(235): n is a, c, g, or t
  misc_feature (238)..(249): n is a, c, g, or t
  misc_feature (252)..(253): n is a, c, g, or t
  misc_feature (258)..(268): n is a, c, g, or t
  misc_feature (272)..(281): n is a, c, g, or t
  misc_feature (283)..(293): n is a, c, g, or t
  misc_feature (296)..(306): n is a, c, g, or t
  misc_feature (308)..(320): n is a, c, g, or t
  misc_feature (323)..(326): n is a, c, g, or t
  misc_feature (329)..(334): n is a, c, g, or t
  misc_feature (337)..(340): n is a, c, g, or t
  misc_feature (342)..(346): n is a, c, g, or t
  misc_feature (348)..(352): n is a, c, g, or t
  misc_feature (355)..(355): n is a, c, g, or t
  misc_feature (358)..(358): n is a, c, g, or t
  misc_feature (360)..(361): n is a, c, g, or t
  misc_feature (363)..(381): n is a, c, g, or t
  misc_feature (385)..(385): n is a, c, g, or t
  misc_feature (389)..(404): n is a, c, g, or t
  misc_feature (406)..(407): n is a, c, g, or t
  misc_feature (411)..(411): n is a, c, g, or t
  misc_feature (413)..(418): n is a, c, g, or t
  misc_feature (421)..(440): n is a, c, g, or t
  misc_feature (442)..(449): n is a, c, g, or t
  misc_feature (451)..(455): n is a, c, g, or t
  misc_feature (457)..(458): n is a, c, g, or t
  misc_feature (460)..(461): n is a, c, g, or t
  misc_feature (463)..(467): n is a, c, g, or t
  misc_feature (469)..(470): n is a, c, g, or t
  misc_feature (472)..(473): n is a, c, g, or t
  misc_feature (477)..(478): n is a, c, g, or t
  misc_feature (481)..(485): n is a, c, g, or t
  misc_feature (487)..(490): n is a, c, g, or t
  misc_feature (493)..(495): n is a, c, g, or t
  misc_feature (498)..(499): n is a, c, g, or t
  misc_feature (502)..(509): n is a, c, g, or t
  misc_feature (511)..(513): n is a, c, g, or t
  misc_feature (515)..(527): n is a, c, g, or t
  misc_feature (529)..(536): n is a, c, g, or t
  misc_feature (538)..(540): n is a, c, g, or t
  misc_feature (544)..(545): n is a, c, g, or t
  misc_feature (547)..(548): n is a, c, g, or t
  misc_feature (550)..(551): n is a, c, g, or t
  misc_feature (553)..(554): n is a, c, g, or t
  misc_feature (556)..(572): n is a, c, g, or t
  misc_feature (574)..(593): n is a, c, g, or t
  misc_feature (595)..(595): n is a, c, g, or t
  misc_feature (599)..(601): n is a, c, g, or t
  misc_feature (603)..(615): n is a, c, g, or t
  misc_feature (618)..(619): n is a, c, g, or t
  misc_feature (621)..(630): n is a, c, g, or t
  misc_feature (632)..(643): n is a, c, g, or t
  misc_feature (648)..(656): n is a, c, g, or t
  misc_feature (659)..(668): n is a, c, g, or t
  misc_feature (670)..(671): n is a, c, g, or t
  misc_feature (674)..(696): n is a, c, g, or t
  misc_feature (699)..(727): n is a, c, g, or t
  misc_feature (730)..(730): n is a, c, g, or t
  misc_feature (733)..(754): n is a, c, g, or t
  misc_feature (757)..(763): n is a, c, g, or t
  misc_feature (765)..(766): n is a, c, g, or t
  misc_feature (768)..(787): n is a, c, g, or t
  misc_feature (790)..(795): n is a, c, g, or t
  misc_feature (799)..(803): n is a, c, g, or t
  misc_feature (806)..(837): n is a, c, g, or t
  misc_feature (841)..(842): n is a, c, g, or t
  misc_feature (846)..(848): n is a, c, g, or t
  misc_feature (850)..(862): n is a, c, g, or t
  misc_feature (865)..(869): n is a, c, g, or t
  misc_feature (873)..(875): n is a, c, g, or t
  misc_feature (877)..(884): n is a, c, g, or t
  misc_feature (887)..(889): n is a, c, g, or t
  misc_feature (893)..(896): n is a, c, g, or t
  misc_feature (898)..(905): n is a, c, g, or t
  misc_feature (907)..(917): n is a, c, g, or t
  misc_feature (919)..(920): n is a, c, g, or t
  misc_feature (922)..(944): n is a, c, g, or t
  misc_feature (946)..(946): n is a, c, g, or t
  misc_feature (949)..(955): n is a, c, g, or t
  misc_feature (958)..(966): n is a, c, g, or t
  misc_feature (969)..(969): n is a, c, g, or t
  misc_feature (973)..(977): n is a, c, g, or t
  misc_feature (980)..(982): n is a, c, g, or t
  misc_feature (987)..(987): n is a, c, g, or t
  misc_feature (990)..(996): n is a, c, g, or t
  misc_feature (998)..(1005): n is a, c, g, or t
  misc_feature (1009)..(1010): n is a, c, g, or t
  misc_feature (1012)..(1013): n is a, c, g, or t
  misc_feature (1015)..(1016): n is a, c, g, or t
  misc_feature (1018)..(1041): n is a, c, g, or t
  misc_feature (1044)..(1046): n is a, c, g, or t
  misc_feature (1050)..(1052): n is a, c, g, or t
  misc_feature (1054)..(1072): n is a, c, g, or t
  misc_feature (1075)..(1078): n is a, c, g, or t
  misc_feature (1080)..(1089): n is a, c, g, or t
  misc_feature (1092)..(1108): n is a, c, g, or t
  misc_feature (1110)..(1116): n is a, c, g, or t
  misc_feature (1119)..(1125): n is a, c, g, or t
  misc_feature (1127)..(1136): n is a, c, g, or t
  misc_feature (1138)..(1139): n is a, c, g, or t
  misc_feature (1142)..(1175): n is a, c, g, or t
  misc_feature (1180)..(1184): n is a, c, g, or t
  misc_feature (1187)..(1197): n is a, c, g, or t
  misc_feature (1202)..(1209): n is a, c, g, or t
  misc_feature (1211)..(1213): n is a, c, g, or t
  misc_feature (1215)..(1218): n is a, c, g, or t
  misc_feature (1220)..(1241): n is a, c, g, or t
  misc_feature (1244)..(1253): n is a, c, g, or t
  misc_feature (1255)..(1255): n is a, c, g, or t
  misc_feature (1258)..(1264): n is a, c, g, or t
  misc_feature (1266)..(1267): n is a, c, g, or t
  misc_feature (1269)..(1273): n is a, c, g, or t
  misc_feature (1276)..(1311): n is a, c, g, or t
  misc_feature (1313)..(1313): n is a, c, g, or t
  misc_feature (1316)..(1330): n is a, c, g, or t
  misc_feature (1332)..(1341): n is a, c, g, or t
  misc_feature (1345)..(1356): n is a, c, g, or t
  misc_feature (1359)..(1359): n is a, c, g, or t
  misc_feature (1362)..(1367): n is a, c, g, or t
  misc_feature (1371)..(1382): n is a, c, g, or t
  misc_feature (1384)..(1384): n is a, c, g, or t
  misc_feature (1388)..(1392): n is a, c, g, or t
  misc_feature (1395)..(1404): n is a, c, g, or t
  misc_feature (1407)..(1409): n is a, c, g, or t
  misc_feature (1413)..(1417): n is a, c, g, or t
  misc_feature (1419)..(1437): n is a, c, g, or t
  misc_feature (1441)..(1449): n is a, c, g, or t
  misc_feature (1451)..(1465): n is a, c, g, or t
  misc_feature (1467)..(1486): n is a, c, g, or t
  misc_feature (1489)..(1507): n is a, c, g, or t
  misc_feature (1509)..(1510): n is a, c, g, or t
  misc_feature (1512)..(1515): n is a, c, g, or t
  misc_feature (1517)..(1519): n is a, c, g, or t
  misc_feature (1523)..(1527): n is a, c, g, or t
  misc_feature (1529)..(1531): n is a, c, g, or t
  misc_feature (1533)..(1537): n is a, c, g, or t
  misc_feature (1540)..(1543): n is a, c, g, or t
  misc_feature (1545)..(1546): n is a, c, g, or t
  misc_feature (1548)..(1551): n is a, c, g, or t
  misc_feature (1555)..(1558): n is a, c, g, or t
  misc_feature (1562)..(1572): n is a, c, g, or t
  misc_feature (1574)..(1575): n is a, c, g, or t
  misc_feature (1577)..(1577): n is a, c, g, or t
  misc_feature (1579)..(1580): n is a, c, g, or t
  misc_feature (1582)..(1583): n is a, c, g, or t
  misc_feature (1585)..(1587): n is a, c, g, or t
  misc_feature (1589)..(1590): n is a, c, g, or t
  misc_feature (1592)..(1592): n is a, c, g, or t
  misc_feature (1595)..(1597): n is a, c, g, or t
  misc_feature (1600)..(1604): n is a, c, g, or t
  misc_feature (1606)..(1606): n is a, c, g, or t
  misc_feature (1608)..(1613): n is a, c, g, or t
  misc_feature (1615)..(1637): n is a, c, g, or t
  misc_feature (1639)..(1640): n is a, c, g, or t
  misc_feature (1642)..(1652): n is a, c, g, or t
  misc_feature (1655)..(1669): n is a, c, g, or t
  misc_feature (1671)..(1671): n is a, c, g, or t
  misc_feature (1673)..(1689): n is a, c, g, or t
  misc_feature (1694)..(1697): n is a, c, g, or t
  misc_feature (1704)..(1725): n is a, c, g, or t
  misc_feature (1732)..(1733): n is a, c, g, or t
  misc_feature (1735)..(1736): n is a, c, g, or t
  misc_feature (1738)..(1740): n is a, c, g, or t
  misc_feature (1746)..(1747): n is a, c, g, or t
  misc_feature (3869)..(3869): n is a, c, g, or t
nnnnnnannnnnnnnnnnnnnnnnnnnnnnnnnnnnnngngnannnnnnntnnnnnnnnnnnnnnnnnnnannannngnnnnnnnnnnnnntnnaannnnnngngnnnnnnngnnnnnnnngnnnnnntnnnnnnnnttnnnnnnnnnnggnnnnnnnnnnnntnnnnnnnnnnnnnnnnnnntnnnnnnnannannnnnnnnccnaannnaaaannnnnaaaaannnnnnnnnnaannnnnnnnnnnnttnnaaaannnnnnnnnnnaaannnnnnnnnntnnnnnnnnnnnttnnnnnnnnnnncnnnnnnnnnnnnnaannnnaannnnnnttnnnntnnnnnannnnnccnaanannannnnnnnnnnnnnnnnnnntttntttnnnnnnnnnnnnnnnngnnaaancnnnnnnttnnnnnnnnnnnnnnnnnnnngnnnnnnnngnnnnngnngnngnnnnntnntnngggnnttnnnnngnnnnaannnttnnccnnnnnnnncnnngnnnnnnnnnnnnntnnnnnnnntnnngggnngnngnngnngnnnnnnnnnnnnnnnnngnnnnnnnnnnnnnnnnnnnntngggnnnannnnnnnnnnnnnttnnannnnnnnnnngnnnnnnnnnnnnggggnnnnnnnnnttnnnnnnnnnngnnccnnnnnnnnnnnnnnnnnnnnnnnttnnnnnnnnnnnnnnnnnnnnnnnnnnnnnccnaannnnnnnnnnnnnnnnnnnnnnaannnnnnnannannnnnnnnnnnnnnnnnnnnttnnnnnncccnnnnnccnnnnnnnnnnnnnnnnnnnnnnnnnnnnnnnngggnntttnnngnnnnnnnnnnnnnttnnnnntttnnnannnnnnnnaannntttnnnngnnnnnnnngnnnnnnnnnnngnngnnnnnnnnnnnnnnnnnnnnnnngnggnnnnnnnaannnnnnnnnttngggnnnnnttnnnttttnggnnnnnnncnnnnnnnntttnngnngnngnnnnnnnnnnnnnnnnnnnnnnnnttnnntttnnngnnnnnnnnnnnnnnnnnnnttnnnnannnnnnnnnnttnnnnnnnnnnnnnnnnntnnnnnnnttnnnnnnntnnnnnnnnnngnnttnnnnnnnnnnnnnnnnnnnnnnnnnnnnnnnnnnttttnnnnnggnnnnnnnnnnnaaaannnnnnnnannngnnnnannnnnnnnnnnnnnnnnnnnnnttnnnnnnnnnncnccnnnnnnntnntnnnnnaannnnnnnnnnnnnnnnnnnnnnnnnnnnnnnnnnnnanaannnnnnnnnnnnnnntnnnnnnnnnnaaannnnnnnnnnnnggnaannnnnnaaannnnnnnnnnnngngggnnnnnggnnnnnnnnnnggnnntttnnnnncnnnnnnnnnnnnnnnnnnngggnnnnnnnnngnnnnnnnnnnnnnnngnnnnnnnnnnnnnnnnnnnnggnnnnnnnnnnnnnnnnnnnanngnnnntnnngggnnnnngnnnannnnnggnnnntnntnnnnaaannnnaaannnnnnnnnnncnntngnntnngnnntnntnaannnttnnnnngngnnnnnnannnnnnnnnnnnnnnnnnnnnnntnnannnnnnnnnnnaannnnnnnnnnnnnnnanannnnnnnnnnnnnnnnnttttnnnnaaaaaannnnnnnnnnnnnnnnnnnnnnttaaaanngnngnnntttttnncccccccctctcctattgagagctagccaaagtaattttccctagcaaactacagccccatctatggaaaaatcagagttaaacgtgtaggcgatctaatacgtgttgttatccttacagccacctttactcacgcctcaaattcaagctgaaccgatccgtagctcttactgagtggcgccaattattgagcgcatagattcaggctgtgccagcaatccgatgcgagttatcatttgtctgacagcaccatctcagtaatatcgtagtttagcatttggagaccgaaacctatgggcggttagcgtaagttatggtaaaaaatatcagaagttcacaattttaaaattttagctcatagcctaagccgcccgttgtactaatatttgtaccgtttttttcaaactgataatctgcattgaatttagtgcgaccatcaggggacgaggtactcaatccaatacctaagccagcgccacaattcatttgggttgagttgccgctggcctgctcgcaattgtagcttggagtaattgttcccaaagacacattgcgtgatctagtgttccaaataaatgggatacggaattctggcgcaaatcgcagcttcaaaagtgaaattttgcctgcgtttaaacttagcgtgtcgtcagtggttccaaaagctcttcctttaaatttcacctgaccgatgtcggaagccccgtatgaaaaggagaaagtaggccaaatttcatagtttcccattctatagaccccagtaatgttactaccaatcgtttgacttaaaacgtcgtaagagctgtcgaggtctaaaaccccattgttaatttttaggctgttacgcctcattcctaccgaggcaagaagatccatgtatatgtctcttgtaagcgtcacgacataatatcctcccgcattaatagcatatccattttggttgccactgaatgtgccgtttagattagacttacccaattccaaacctatgaaataacccagcaaagagttacctgtgggccttttttcaatggcaagattgcctatcacgtaaccgctcacgttcctatcatcatcggcttggacattaaaatcgccaaaactaagcaatcgccatctcttactgaacatgcacttgttttgggaaaaatcaccgctgatgcgaatttcaccatcgttgtccgttattgaaagatccgcactgccgttaacatcaagggacttttcctgactggcttcacaatcttgtgaattaaggatcaaacgctgcctagcgcttcgcatgaggcgcgaattactggcgattgtactgcgcagggcgcggctagcttcgccggtaattacgttgcgaattgctgtttcatttttggcaaattcaaatgccacattacttgcatcaatagaaaagctgttggaggcgatatttccaaaacctattgtgtctgtgacggaattcgctgcaattataataattatagtttgaccaatgactggagttaccctgaatttgtaaacaggggcttctgaagcgtctaaggcagatgctgtgccgttggtaactgtgatgtcatcgagggtaaatccggctacctgctcactgaacgttgcaaccatgtcgaacggttcagtcacagtacttgttggaccagttaaggtgacggtcggagcggtgccatcgtaaaggatatttaattggttggaggctgtattgctattgccaccagcatcagttgcagtagcggctggcacgtttaccgtgacgaccccgtctgcagttggcgtaacgtcaaaggtgtagacgctctgtgacagggttatgagattagaaggcgtgccgttagttatcacggcgtcgtctagcccaaagcccgagacaggctcagaaaatgtagctatcacgagaaacggacctgaaaccagcgaccctgtggtactaagtgtcactgtcggtatgaccgagtctgccactgtaaatgtagaattcgcggcgctggctgcatatcctaagatgtcttcgaccgtagcgccaatggcgacatagacaacttggtctgaggtaaagtcagacgtggggtcgaccgtgattacttgccctgaaatagtggcgtcaaatgctatgtcnttgccgctggcatctgtgtctttgagtgtgattaaagcatccacattgtcatccgtaagtgcagtatcgtcgagtagccgtaccgcctcgttgaaggtaatcgtaatgttgctcgtacttgcaacatccgt

SEQ ID NO: 1356 - DNA, 4000 bp, Escherichia coli
  misc_feature (1985)..(1985): n is a, c, g, or t
  misc_feature (2944)..(2945): n is a, c, g, or t
  misc_feature (2950)..(2950): n is a, c, g, or t
  misc_feature (3522)..(3522): n is a, c, g, or t
  misc_feature (3556)..(3556): n is a, c, g, or t
  misc_feature (3598)..(3598): n is a, c, g, or t
  misc_feature (3624)..(3624): n is a, c, g, or t
  misc_feature (3634)..(3634): n is a, c, g, or t
  misc_feature (3638)..(3638): n is a, c, g, or t
  misc_feature (3642)..(3642): n is a, c, g, or t
  misc_feature (3692)..(3692): n is a, c, g, or t
  misc_feature (3767)..(3767): n is a, c, g, or t
  misc_feature (3788)..(3788): n is a, c, g, or t
  misc_feature (3863)..(3863): n is a, c, g, or t
  misc_feature (3866)..(3866): n is a, c, g, or t
  misc_feature (3923)..(3923): n is a, c, g, or t
tgatgaacctgcacgaaacttacatccaacacagcaagcaggaatttctgatttgttaaaaaatcttgctggatcaaaccaagtcttatacgctacccattcacctttcatgatttttgactatactcctggtaatcttctcgttgtagaacttgataggaaaaaacatctaagtaaaattttttatgagtactggaaagcggacgatgctacacttacgccaattctttatggattggcaaaaggattagtggattcaattactgatagagaagtgggtaataactcacgtcctctcattatagtggaaacaatgtcagatacaatgtatcttaatgcgtttgacaaatttcttcaggatccaaacatatcaatgaatcctctaaatgtagtgccggcatacgctaaaaattcagtattaccactatcaatttttcatcacaatcatggatacaacacatttgttttacttgacaacgattacgaatcaaagcaaattgctgagcaattaaaaaataataaattttcagaaacacaaatcatatttttcgagagtggaggaaaccttcttcaatcaatagaagattatatggtcactgaagattatttatacgccgtaaaccaaacttacgagataaaattgcgcagagaaggatttaccaaccttaccaaagaagaagtactaattcatggaaaaaatggaatcgttgaaaatctaaaggcagtctggaatgaacatggtgatgatgactggggtgaatttgaaagagaggaagtttgcagatacatatctggtaaaattgccttaggcgatgccagtttcttgactgaaaaaacaagagaccgattgcgtgcattatatcgattaattgctgagcgtattcgtcaataccagcatacaatacctacggaacaattttcaaatgaatgatgattgaaaactgtaaaaattcatttaaaatacgaaataaaaacaaaactaaattaaactttaattgctgacaaaaaactgatgaatagcatgaggagatattcaacaattggagtttttacctcagtgctgcttgtagtttctattttcacattattatcgatctcagaagtaaatgcggaggaagtaatttctgtaaacgcaaaaagttatgaaaatacaataattatcgaatttgaaaacgagagtacgtctaaaataaagacaattagaatatggctaggcggagataaatcattcaagtcatttaagacagaaccgggatggggcggtggaaaatattctgatagtaagctgctaatatttaccgcaacaaatacactcaatccaggtgaatcagtaaagtttggtcttacaacaaatgaaaaagtaaatgcaataaattggaaagtgcttgatcaaaatgagaacgagatagatacaagaaaaacgcctattcaggaaatttcctcaacaatttctagttttgttgaacaagaaagcgtgaaaattgaggaagttaaagagactggaagcgctctttatggtacaaagaagttcattccagaaaaatttcgagttggttcagatataagactggtgggaaatggatttggtccgggaaaaaacttacagttgtaccttgataatgctatattaaaatcagttaaaacagatgaacaaggaaactttctaactacaatctcgatatctgagacgtacaaggttgggacaagtgaatttataataaaagatgaatctggaaattttcaaagtactaatattacgattgaagaattaaaaaacagatttttaaagactgaaaaatttgaagttaataatattcctgctaaagttagacttggtgaattgctaactatttcaggtactgcatacccgcaaagtgcgattattcttgcgttccagagtaatgatagagttttagaaaaagttcgtgtagtaacagctaatgcaaatggagaatggatttttgaggaagtgatagaccagaacnacattgttggagaaaagtatgtgatttttaaaaataatcaagataaaacaacaaaaaacctgacgataaaatcaggtaatttaatagaaatttctgcttctgcagtaagatataatctgggagaaactgttagtataactggcacttctgaaccaaacaaaagtactacaatatgggtcaaggatcaaactaaaaaaataacgctctttgatattataacaagtgatggaagtggaaatttgaactatgaatttgttacagatgacacattttctactggaacttatactgtaatagtaaaacaggaagaggggtcagacgctgctgtgtttggtattggtcaatatccgtcaacaaggattgttgtgttggtggagaaaacaaattttgctcttaattctaaagcaatcttaagcattgttggtccaccatcatctaaactgtcgattgcaattttggattccaatgataatctcaaaataagtgattctattacaacaagttccattggtaaaagtaagtatgttttagatttagctgatctttctgcaggggtatatagagctgctgtttctgcaacaaatattcaagattcagttaaattttcaattggtctagaacctggctctggtgcaatttcgttagctacaactagtgaaaattattctcctggtgaatcaattttagttcttgggaatacagggaataatgctagaataactataactcttcttgatccttctggaaacatatccagccaaactgaaattttttcagatgccaatggtaatttttccacagaggatataggaattccatctaatggagtacttggtaattgggaaatcactgcacatagtcgtctggattccaagactattgatattaacgtaagtgttccaacagctaagggtataacgatacaaatagaggaagcagaattcagcattggagacacnntaatnattgtgggaatggcagtttcagacgctagtcgtcttgaaattcaaataattaatcaaagtgatcaagtgattgtatcgttagcaacttctataacatctgatgatacgtttttccttccttggatagttcctagtggttttgacactggaatatataccataagagtaacagataatgtaaacaccgatagttttgaaatattcatacaataattttagtagctcaaaacagtttttatttctcatttattgctacaagtaacatgaatttgaagagaaggatagctgaatattcaaactttccaaaaaaaggtatcttgtttagggattttagtcccattcttggtgatccctctgcaatgtcatttgttgtagaagaattttcaaagcagtttcatccaagagatgttgatgtgtttgcaggaattgaatctagaggatttattgttgcatctattcttgcacaaaaatatagcaagggcatggtaatgctaaggaaagaaggtaaactgccaggaaaaactgtaaaaacttcgtacacaattgaatacggtaaagcagtactagagatncaaaaaaatgcgttaaaggaaggtgagagggtgntaatttgtgacgatttgttagctacaggcggaacagcaaagncggcagcaaaattagtggaaagaatnggcgcaaaanttgntggntttgcatttattattgaattgactgacttgaatggaatcaaagaaataancaactacaaaacagtctcattggtgcaatactgatggttagtgatacagctgagattggaattttcggtggaacnggaatttatgattctgaattnttgcaggatagcaaagaaatcacaattgaaacaccttatggtaaaacatctgatacaattacaataggagaattnaangggaaaaaaattgcattcatgccaagacatggaaaaaaacattctattcctccacanatgataaattattgtgcaaatgtttgggccttcaaggaattaggaattacaagaattgtttccccctcggctgttgg

SEQ ID NO: 1357 - DNA, 4000 bp, Escherichia coli
  misc_feature (1668)..(1668): n is a, c, g, or t
  misc_feature (1947)..(1947): n is a, c, g, or t
  misc_feature (3355)..(3355): n is a, c, g, or t
  misc_feature (3562)..(3562): n is a, c, g, or t
attcttctcgatcagcaattttagctctatctgcacacccaaacttaccgcttccataaactgctgaagttctcattaaataacctacagaagttaataaatctagatctggttgttgaccttttgataatgaatcaacagcatttttaaatactcttaagcttttattggcccttgccaaagcaagttcgcttggtctgtaacgaccgccttcttgcttaggtgtattttgtgccaaataatctatatcctcttgtgttggcacaccatcaaaaagattaaaggttgcatcccaaacttctgcgataactctatccgttctcatgtcagctggtatttcttgtgtaaaaccaaccaatgagtaggttctatttggagtagtaaccgaataaacgcttaagccgtaaccatccttatcaacttcacggcgcgttctctcaaatttccaattctcccgtgacattcgcctaatcaaagttcgcataaagctcaaccgggtaggaaaagatgagcccattctatcgagacgcataaccgtttcaggtgatctcataaaatcagattcattctctattaatacagtttcgctagacataataaatattataaagattcaaaagatgcgtcgaaaaaatttaaccagtttttacccatgaccaattcaacgtcattttcagaaaaacctatggactttaaaccatttgaaatgtttacaaaatcacgattatctcgaaaccactcgggctgatctggaaatcctgcaaaactggccgaaccttcaccgaagtcacgatcattagtccatgtgccatttcgcatccactctacaacgctatcaggttgattttgacataggtcagttccaataccgatattattcatccccataatttctgcagtatcggcaatcatattacaaaaactttctaatgtgcagtctgaaccatccttaaggtggtgtgggtagacagaaaaaccaagcatactattactttctccaagcgcctttagaacttcgtttgacttatttctcagcgcaggatgccagaacgttggatttgcatgcgtgattgcaataggacgctctgatatttctatagcttctagggtagatctctctgaggaatgactcatatcgaccactagtccaaccctattcatttctttaataacctgtttacccattctcgtaattcctgggtcgttttcttcataacagccagttcctaaaagactttgattgttataggttaactgcataaaccttgcacctagttgatgacatacttcaacgaggccaatattatcttcgataggggagcagttttgatagccaaaaaagattgctgttcttccttctttttgagcctttctgacatcagctgcagttcggccaagaaaaattaaatttgagtagtcctcaaaacgacggttccagtcaataacattttggaccatctcctgaaagtcttcgtgataacaaattgtaacgtgaacagcactcagaccgccttggttaatttgcttaaatatctcctcactccaattattgtattgaagtgcatcaataaatagtgaagggtgcgccattatggatttccgctagaaatataagaagtcttaacttgagtataaagctctttggcataagttccttgctctctaggnccaaagcttgaattttttctacctccaaatgggacatgatagtccgtacctgctgtcggtaagttcaccataacgcagccactttctgcattccttctaaagtgacttgctcttgagagagactgagtaataattcctgaaacaagtccaaattctgtgtcatttgcaaccgataatgcctcttcataatctgcaactttgatgacgcaagccatcggtgcaaaaagctcctcacgattaactctcatagagttgtttcccccaattaataatgctggntgcatataaaaaccaggattatcaagctcaagcttgttacctccacagaccacttcacagccctcttcttttgctaaagccatatatttgaggttggaatcaagttgctgttgacttgcggctggaccaatttgagtgccttcttgaagcgcgtcaccgaccttaagagctgaagtggattggctcatgcgttctacaaactcatcatgaatggaggcatgaacaactagtctagaagacgcggtacatttttgaccagtactaccaaaagcacctccagtagcagccgcaacagcgacatccatatcagcatcatccattaccacaagtgggtttttagagcctaactctaactgaaactttgttaaatttttagcggctgcgcctgcaatctgacgacccacatcataagatccagtaaaactgattgcatgcacttttggactttcagccaacgactgtccaattgatgaacctgagcccattactaaattaaacaaaccctttggaatatcttgcttggaaatgatttcagttaatgctactgcacttgctggtgttaagttcgcaggcttccaaataacagcattaccaaatgctagtgctggagcaattttccagctcgccgttgctgttggaaagttccatggcgagatgattgcgactgttcccattggctctctgcgaacgtcaatttcaatattaggtctgactgaatccgcagtatcaccaccctgccttaggacctctgctgcatagtaagtaaaaaattgacctgccctatatacttctcctttgccttcagcaactggcttaccttcctctctggatagcagctccccaagttcagcgcttcgcgccatcatctcttcaccaatcttcatcaatacagcttgacgctgctcaaggcctgttgcagcccattgtctttgggcaacctgagccgaattgagagcatcctctaattgtgagttactggcttgagcaaattctccaatgacatcgtttgtattcgatggattgatattagaaattgaacttgcgccttttacccagtcgcccgcaatgtagttgttagaaagattagacatgattttatttcatttttcaaaaatttaaattttactctttattattgatttatcaagaatataagcacatatctaaatatagtatttttcaagtttccatgaaaaaaaatgttgcattaagtaattaattaatctaggatactttcattaaatagaaagaaattaatatgcccaattctgctgaaagacttggaagagcggctcgaagaagtgaccgcctaaaagtcaaaattgaaatgctgccgactttacgtcgaaatatccctcttacagagccaatgaatgaagagcagattgagaaaatggatgacgcttcnctgtctattctggaggaagttggcgtagaatttcatgatcctattgcactagaacactggaaggaagctggagccagtgtagagggtgagagggtgcgctttgatagaggtctaattcgagaactcatcaaatcaattccagagagcatcacaatgcatgcccgagatccagagaagtcacttgaaattggtggaaataactctatntttgttccaatgacaggtgctccgtttctgactgatcttgaaaataaaaggcgtatgcctaccctggatgatcttgctaactttcataagctttctcatatgctccctgccattcattcgagtgcccatcacatcgtagaacccatggatcatgcaatttctcatagacatttgaggataacttattcatcaatgaagcactccgataagacctttatgggtatgaccagtagtggtaagaatgctgaggatgtaattgagatgtgtaagattctctttggtgaaaaattcattgatacgcacccagtagtcaccggcaacattaatggaaactccccactagtttgggatcaaaccatgctctcagctttaagggttttttcagcacacaatcaacctgttctctgctctcctttcgttcttggtggcgccaacact

SEQ ID NO: 1358 - DNA, 4000 bp, Escherichia coli
  misc_feature (489)..(489): n is a, c, g, or t
  misc_feature (891)..(891): n is a, c, g, or t
  misc_feature (1023)..(1023): n is a, c, g, or t
  misc_feature (1281)..(1281): n is a, c, g, or t
  misc_feature (1515)..(1515): n is a, c, g, or t
  misc_feature (1544)..(1544): n is a, c, g, or t
  misc_feature (1556)..(1556): n is a, c, g, or t
  misc_feature (1562)..(1562): n is a, c, g, or t
  misc_feature (1980)..(1980): n is a, c, g, or t
  misc_feature (1987)..(1987): n is a, c, g, or t
  misc_feature (1991)..(1991): n is a, c, g, or t
  misc_feature (1993)..(1993): n is a, c, g, or t
  misc_feature (2003)..(2003): n is a, c, g, or t
  misc_feature (2006)..(2006): n is a, c, g, or t
  misc_feature (2015)..(2015): n is a, c, g, or t
  misc_feature (2017)..(2017): n is a, c, g, or t
  misc_feature (2030)..(2031): n is a, c, g, or t
  misc_feature (2038)..(2038): n is a, c, g, or t
  misc_feature (2052)..(2052): n is a, c, g, or t
  misc_feature (2060)..(2060): n is a, c, g, or t
  misc_feature (2062)..(2062): n is a, c, g, or t
  misc_feature (2064)..(2065): n is a, c, g, or t
  misc_feature (2067)..(2067): n is a, c, g, or t
  misc_feature (2673)..(2673): n is a, c, g, or t
  misc_feature (2703)..(2703): n is a, c, g, or t
  misc_feature (2709)..(2709): n is a, c, g, or t
  misc_feature (2781)..(2781): n is a, c, g, or t
  misc_feature (2793)..(2793): n is a, c, g, or t
  misc_feature (2796)..(2796): n is a, c, g, or t
  misc_feature (2953)..(2953): n is a, c, g, or t
  misc_feature (2955)..(2955): n is a, c, g, or t
  misc_feature (2985)..(2985): n is a, c, g, or t
  misc_feature (3033)..(3033): n is a, c, g, or t
  misc_feature (3063)..(3063): n is a, c, g, or t
  misc_feature (3120)..(3120): n is a, c, g, or t
  misc_feature (3204)..(3204): n is a, c, g, or t
  misc_feature (3297)..(3297): n is a, c, g, or t
  misc_feature (3420)..(3420): n is a, c, g, or t
  misc_feature (3504)..(3504): n is a, c, g, or t
  misc_feature (3549)..(3549): n is a, c, g, or t
gactccatataagactgggagtgacgaccggagtagatcatatcctgccactgcttcaccatgcccagcacccggttattcaggttcagcaccagcaccggcagatcgtactgcagcgcggtggaaagctcctgaatgttcatctggatactgccatcgcccgttacgcagatgactgtttcgtccggcagcgccatcttcacgcccagcgcagcaggcaggccaaagcccatggtgcccagaccgccggagttgatccagcgacgcggtttgtcgaaaggataatagagcgcagcaaacatctggtgctggcccacatccgaggtcacatacgcatcgcctttggtcagacggctgatggtttcaatcaccgcctgcggcttgattttgtcgctggtgcgatcaaattccaggcagtgacgactgcgccagccctcaatctcctgccaccagtcgtgcaggctctcagcgcgctggctttcgctttgngccagtaactccagcatctgctgcagcacctgcttcgcatcaccgacaatcgggatatccgccgccaccgtcttagagatagaggtcgggtcgatatcgatatgcatcaccgtggcgttgggacaatacttcgccaggttgttggtggtgcggtcatcaaagcgaacaccaataccaaaaatcaggtcggtattgtgcatcgtcatgttggcttcgtacgtgccgtgcataccgagcatgccaacgcactgacgatgagtgccagggaacgcgcccaggcccatcagcgaggtcgtcaccggaatattcaggctttcggccagctttaacagttccgcttcgcagcctgcggtaatggcaccaccaccggcgtagatcaccggcttcttcgcggccagcaangtggtcagcgcacgcttaatctgacctttatggccctgaatagtcggattgtaggagcgcatgctcaccgtatccggccagtgataaggcaacttgttggccggattcagaatatctttcggcagatcgatnaccaccggccccggacgtccggtggaagccagccagaacgcctttttcaacacggttgggatctcttcggtacttttcaccaggaagctgtgcttcactaccggacgagagatgccgaccatgtcgcactcctgaaaggcgtcatagccaatcagcgacgagggaacctgacccgagaggatcaccagcggaatcgagtccatataggcggtggcgataccggtaatcgcattggttgcgccgggtccggaggtgacnagcaccacgccgacttcaccggtggcgcgcgccaggccgtcagccatgtgcaccgcaccctgctcatgacgcaccagaatgtgatcgatacccccgacggtttgcagcgcatcatagatatccaacactgcgccacccggataaccgaatacctgcttaacgccctgatcgattaacgaacggacgaccatttcggctcctgacaacatctccatcttctgcctccaggcttgnggacccggctctgttaatacgcccgttancgcgtaccacanagcccnggtgcctgctttgccaatcaaaatcttatgtttatgcatgacagcggaaacaactgccgctgtccggttacagagaaatctgttgagtttatttttctgagagtaggtcgattaccataaccgcagttaaccgggcaggcaaaccgcaaacccacgtaaattaaaaggcaggggcgtaaaggctctgcccgataagaattggctgcgcggattaaactaattacgcggcagaaccgcagaggaaaatgctgattaagaaattattttcagcgtgatctaagaaataacgaaaacttattacccggctgccctggcccacaatcgcctgacacttttcttttctggcgtaattaaccattaaatcgttgaagcgcattcgattatgctaaagagcaggtgatatatcctgtatcctcgngagacancttncngataaagtcnttnattttcaananaataaaatcaaanncccgcanaatcagtgctcatncccgggtngntnncntccgcagccactacggcgctgttcattacgctgcctgaccgttaaataacagaatatcttcctctggcaccactaagaatacccctgcattgaaggttgacatccctgagtgattccagtaccaatatgtacagcacaacattttataaggtttgaatccatgtttcgttctgttcgccttctcggtctactactaaacgcactcagcttgcgcggtagacttgtgggcggaatcaaacactgattcaaacctgctgaaagttaaaaacccgcgcctgtcgcgggtttttttatgctcgttgccaggccagaaaaagcataaggatgattacgatgagccagcaagtcattattttcgataccactctgcgcgacggtgagcaggcattacaggccagcctgagtgtgaaagaaaaattgcagattgctttagcgctggagcgcatgggcgtggatgtgatggaagtcggtttcccggtctcctcaccgggcgactttgagtctgtgcagaccattgcgcgcaccattaaaaacagtcgggtttgcggtctggcacgctgtgtggaaaaagatattgatgcggcgtacgaatcactgcgcgttgcngaagccttccgtattcatacctttatcgcnacctcnccgatgcacatcgccaccaaactgcgcagcacgctgccggaagtgattgagcgtgcggtgcatatggtgaancgtgcgcgtaantanaccagcgacgttgagttctcctgcgaagatggcggccgtaccccgattgatgacctgtgccggatggtagaagccacgattaacgccggtgccaccaccatcaacatcccggataccgttggctacaccctgccaggcgagtatgcccacatcatcngngagctgatgaatcgcgttcctaacatcganaaagcgattatctctgttcacacccacgatgacctgggtatggcaacnggcaacgccctggctgccgtacaggcgggngcgcgtcaggttgaaggaacgatgaatggcctgggtgaacgtgccggtaactgtgcnctggaagaggtgatcatggcgattaaaacccgccagcagatcatgaacgtgcataccaatatcaatcatcaggaaatctaccgnaccagccagatggtcagccagatctgcaacatgccgatcccggcgaacaaggcagtggtcggctctaacgccttcgctcactcctcgggtatncatcaggatggcgtgctgaagaaccgcgagaactatgaaatcctgacgccggaatcgatcggcttacacaaaatccagctgaacctgacctcacgttctggccgcgcggcggtaaaacatcgnatggaagagatgggctatgccgagcaggattacaatctggatacgctgtatgacgccttcctgaaactggccgataaaaaaggncaggttttcgattacgacctggaagcgctggccttcatcaacaancagaatgaagagccggaacatttccagctgcacgaatttaacgtccagaccggttccagcatcaccgccaccgcctctgtcaatctgggctgcggcgatgtcgctaaatcggatgcagccaccggtaatggcccggttgacgcggtctaccaggcgattaaccgtatcacccagttcgacgctgagctggttaactacaagctgaccgcgaaaggccacggcgagaatgcgctgggtcaggtcgatatcgtcgtgagctacaacggccgcaagttccacggcattggtctggcgaccgatattgtggagtcctccgccaaagcgatggtcaacgctctgaacaatatctggcgtgcccgtcaggttgaacaagaattgcagcgcaaatttaaagatcagaaggaaaccgtataaccatgtccagctcatctcatatcgcagttttacccgg

SEQ ID NO: 1359 - DNA, 4000 bp, Escherichia coli
  misc_feature (136)..(136): n is a, c, g, or t
  misc_feature (191)..(191): n is a, c, g, or t
  misc_feature (220)..(220): n is a, c, g, or t
  misc_feature (494)..(494): n is a, c, g, or t
  misc_feature (1944)..(1944): n is a, c, g, or t
  misc_feature (1991)..(1991): n is a, c, g, or t
  misc_feature (2049)..(2049): n is a, c, g, or t
  misc_feature (2290)..(2290): n is a, c, g, or t
  misc_feature (2319)..(2319): n is a, c, g, or t
  misc_feature (3560)..(3560): n is a, c, g, or t
  misc_feature (3625)..(3625): n is a, c, g, or t
  misc_feature (3664)..(3664): n is a, c, g, or t
  misc_feature (3811)..(3811): n is a, c, g, or t
  misc_feature (4000)..(4000): n is a, c, g, or t
agacgctcgagctcgccgacttcccgcactacctcgggctgatcgaagaggaggcgttccggtgcaaagagatcaccgggaccctgctccagctcgtccgcgatcccgggagccgccgcgccccgaccgacctcancgcgctcgtcctcaaggcgaccgagctcctcttccaccagccccgcttcgccganggccggttcgtgaccgagctcgaccaggngctcccggcggtcgcggtcaacgagggccagatccgccaggtcttcatcgccctcgcctcgaacgcgctcgaggcgatggaggggcgcggccggctgacggtgcgctcgcgcctgcatcgcggcgaggtcgaggtggagttcgaggacgaggggccgggcgttccggacgaggtcctgccgcgtatcttcgacccattcttcacgaccaagccgccggggcaggggaccggcctcggactcgccatcgcccaggggatcgtgacggaccacggnggccggatcgaggtcacctcgcggcccggcaaggggagcctcttccgggtggtgctgcccgcgtgagttgcaaggtccgcgtcctggtcgccgacgacgagcgcaacctgcgcgagctcatcatgcgcgagctcgcgcgcaaggggcacgacgtggacggcgtcggcgacggcgccgcggcgctcgagcggctcgtggcggcgccgtacgacgtcgtggtcctcgacatgaagatgccgaagaaggagggtatcgaggtcctgcgcgagctccagtccttccccgagcatccgcaggtgatcgtgatgacgggctttcaggaggtctccacggcggtcgaggcgatgaagctcggcgcctacgactacctcaccaagcccatgaagatcgaggagctcgacgtcctcatccgcaaggccgcggagaaggcccagctcctccgcgacaacgaggcgctgcgcgcgtacgccccgggcgccgagccgttcggtggcatcctcaccaagagtccccagatgcaggaggtcctccggatcatcgagcggattgcgcccaccgactcctcggtgctcgtcctgggcgcgagcggtaccggcaaggagctggtggcgcgcgcgatccacgagcgctcggcgcgagccgggcggcccttcgtccccatccactgcggcgccctgccgcgtgaggtgttcgagtcggagctcttcggccacgagaagggcgcgttcacaggcgcggtgggcgccaagcccgggctcgtcgagctggccgacggcggcaccctcttgctcgacgagatcggcgagatggagccggacagccaggtgaagctcctgcgcgccctcgagaccggcaccttcttccgcgtcggcgccacgcggccgcggcgcgtggacgtgcggctcgtggcggcgaccaaccgcgacctcgccgaggcgatgaagacgggcgagttccgccaggacctctacttccggatcaacacgatcatgatcaagctgccgcccctccgggagcggcgggaggacatcgcgctcctggccaaccacttcgtggtggccaacgccacgtacggcgccaagcggctcggcccccgcgccctcgccgtgctcgaggggtacgcatggcccggcaacgtccgcgagctgctccacgccatcgagcgcgcggtgatcctctcgaagggcgaggagatccagccggaggacctgccgccggaggtcttgggcgcgccgccggcgccggccgtttcgtcgggggcgagcctcgaaacgatggagcgccagcacatcgtcacgacgctgcgccaggtcggcggccaccggggcaaggccgcggcgctgctcgccatcgacccgaagacgctctaccggaagatcatcgcgtacgggatcgcgcccgacgagttcaggtgagaaccccccgggtgatcggctctcctgcccacccnaaaagttgacgcccgccaggctgacctggtgcaatggccgaggccancgcgaggagccggcacattctaaagcagctactggtgagcgtcgggctgttcgtcgcnctgcccagtgtggcagcggctcagcgcatcgcgctggacgcgtcggcctgggttccgagtgtcatggccgccgaggccaaggtcgaaggcggggccctgccaggcacggccttcgacttcaagcaggatcttggaatcgacgacgagccgctggccgatctccgcctcagcgtcttcaccgggccgaacagcaggctgcgcctggcgtatacccgcgcgagctacgcgggcgacacgatcntcgatcgaacaatccagttcaacgggtcngttttcccggcctcgacccgcgtcgtgtccgacctcgacctgcactatgcgcgactcgggtggatctggcagctcccggtgatcccggacaaactgagagtgggtccggtcgtcgaggccaaggccttcgtggccagcgctacgctggacgcgccagcgaccacgccgcgactgcgagagaccgagagggtcgccgtcgtgatcccgagcgccggcctggcgctcgacctgagcctgcaccccctgatcgacctgttcgccgagggctccgccctgactctgggcgaccggggacgggtcatcgacgccgaggcgggggtgcgcgtccacctggtcaagttcctcaccatgatcgccgggtatcggttcttcgaggtgcgcggcgaggaggaccacagtttcgcgcggctgcaactgtccggcccgttcgtcggcgtgaccttcaggttctgaccgagcgcgtcgcgcgctaagtccttaacgtgcttgcgcgctccggccgtgcgtgtacactggacctgtcggccggatgggccggatctcgcctccgatgcaacgtgtcttccggttcgcggggcgtgtacgaccagcggaagacagtccgagggggttcacatggcgtcaaaactgtatatcggcggtctcgcgtactcgaccacgagcgacgggcttcgcgagttcttcagccagtccggcagcgtcctgtcggcgacggtgattaccgatcggttctccgggcagtcacgcggcttcggcttcgtcgagatggcgacggcggaagaggcgcagaacgcgatcgctcagctcaacgggcgggagctcgacggccggaagatcacggtcgaggtctcgaacccgcagggccagcgcaccggcggcccgcggcccggcggcaatcggccgagcggcggcgggcgtggccctggcgggggacgcggtccggggggcgggcgcgacagcggctacgcccaccggccctcgaagcccgtgaagtggtagtgcggacttctggaattcgcggggctggggccccgccgtccgaggtttcggagggggccctcaggccccctccgagctaaagatccggtcgtagcggccgtactcgcgggccgcgtccatgaaccacttcacggcgtccggatccgagcgcggcgggatctcgcacgaggtggacaggatgaacgccgaggtcctcgcggccgtgtcgatgcagcgccggacgtcggcggccatcgcctccnggctcgtcttctcgaacttcgtcgcgtccacgttgccgatcgcgacgacgcggccgcgggacacntccgtgaaccgcttgagctggtccacgtagagcttcggntccgcctgctggtcgaggtcgaacgagatcgtcgtgaagccgcaccgaatgaggtcctcgtagatcgggtaggtcgttccgcagatgtgtgtcgtcacgccgaccttcttcgccttgaagtaatccacgagctccttgtggtagggngcgatgaactcccggtaattgtcgggcgagatcaggctgatcgaggcggtgggctccgagaagctgagcccgatgcccgtggccacgatcgcgtctccccagttcttgcagaagtcggtcgtgatccgcatcaggtcatggatgaacttcgggtcctcgaaggtgtccaggagcatcgtctcggggttn

SEQ ID NO: 1360 - DNA, 4000 bp, Escherichia coli
  misc_feature (99)..(99): n is a, c, g, or t
  misc_feature (448)..(448): n is a, c, g, or t
  misc_feature (761)..(761): n is a, c, g, or t
  misc_feature (1229)..(1229): n is a, c, g, or t
  misc_feature (1982)..(1986): n is a, c, g, or t
  misc_feature (1988)..(1988): n is a, c, g, or t
  misc_feature (1991)..(1997): n is a, c, g, or t
  misc_feature (1999)..(1999): n is a, c, g, or t
  misc_feature (2002)..(2006): n is a, c, g, or t
  misc_feature (2152)..(2152): n is a, c, g, or t
  misc_feature (2166)..(2168): n is a, c, g, or t
  misc_feature (2173)..(2174): n is a, c, g, or t
  misc_feature (2179)..(2179): n is a, c, g, or t
  misc_feature (2182)..(2183): n is a, c, g, or t
  misc_feature (2185)..(2185): n is a, c, g, or t
  misc_feature (2191)..(2191): n is a, c, g, or t
  misc_feature (2193)..(2193): n is a, c, g, or t
  misc_feature (2195)..(2198): n is a, c, g, or t
  misc_feature (2200)..(2200): n is a, c, g, or t
  misc_feature (2203)..(2204): n is a, c, g, or t
  misc_feature (2207)..(2207): n is a, c, g, or t
  misc_feature (2209)..(2211): n is a, c, g, or t
  misc_feature (2213)..(2213): n is a, c, g, or t
  misc_feature (2215)..(2218): n is a, c, g, or t
  misc_feature (2220)..(2224): n is a, c, g, or t
  misc_feature (2226)..(2231): n is a, c, g, or t
  misc_feature (2233)..(2239): n is a, c, g, or t
  misc_feature (2243)..(2246): n is a, c, g, or t
  misc_feature (2251)..(2251): n is a, c, g, or t
  misc_feature (2254)..(2254): n is a, c, g, or t
  misc_feature (2260)..(2263): n is a, c, g, or t
  misc_feature (2265)..(2269): n is a, c, g, or t
  misc_feature (2272)..(2274): n is a, c, g, or t
  misc_feature (2278)..(2278): n is a, c, g, or t
  misc_feature (2283)..(2289): n is a, c, g, or t
  misc_feature (2293)..(2293): n is a, c, g, or t
  misc_feature (2295)..(2303): n is a, c, g, or t
  misc_feature (2306)..(2310): n is a, c, g, or t
  misc_feature (2312)..(2312): n is a, c, g, or t
  misc_feature (2315)..(2315): n is a, c, g, or t
  misc_feature (2317)..(2322): n is a, c, g, or t
  misc_feature (2325)..(2328): n is a, c, g, or t
  misc_feature (2330)..(2330): n is a, c, g, or t
  misc_feature (2333)..(2334): n is a, c, g, or t
  misc_feature (2336)..(2337): n is a, c, g, or t
  misc_feature (2340)..(2343): n is a, c, g, or t
  misc_feature (2345)..(2351): n is a, c, g, or t
  misc_feature (2354)..(2355): n is a, c, g, or t
  misc_feature (2357)..(2366): n is a, c, g, or t
  misc_feature (2369)..(2372): n is a, c, g, or t
  misc_feature (2375)..(2376): n is a, c, g, or t
  misc_feature (2378)..(2384): n is a, c, g, or t
  misc_feature (2386)..(2386): n is a, c, g, or t
  misc_feature (2389)..(2393): n is a, c, g, or t
  misc_feature (2396)..(2397): n is a, c, g, or t
  misc_feature (2403)..(2403): n is a, c, g, or t
  misc_feature (2407)..(2415): n is a, c, g, or t
  misc_feature (2418)..(2422): n is a, c, g, or t
  misc_feature (2425)..(2426): n is a, c, g, or t
  misc_feature (2429)..(2429): n is a, c, g, or t
  misc_feature (2432)..(2434): n is a, c, g, or t
  misc_feature (2441)..(2442): n is a, c, g, or t
  misc_feature (2446)..(2448): n is a, c, g, or t
  misc_feature (2451)..(2460): n is a, c, g, or t
  misc_feature (2463)..(2465): n is a, c, g, or t
  misc_feature (2467)..(2468): n is a, c, g, or t
  misc_feature (2470)..(2490): n is a, c, g, or t
  misc_feature (2492)..(2497): n is a, c, g, or t
  misc_feature (2501)..(2502): n is a, c, g, or t
  misc_feature (2504)..(2510): n is a, c, g, or t
  misc_feature (2512)..(2531): n is a, c, g, or t
  misc_feature (2533)..(2538): n is a, c, g, or t
  misc_feature (2540)..(2540): n is a, c, g, or t
  misc_feature (2543)..(2546): n is a, c, g, or t
  misc_feature (2548)..(2567): n is a, c, g, or t
  misc_feature (2569)..(2573): n is a, c, g, or t
  misc_feature (2577)..(2588): n is a, c, g, or t
  misc_feature (2591)..(2592): n is a, c, g, or t
  misc_feature (2594)..(2594): n is a, c, g, or t
  misc_feature (2597)..(2598): n is a, c, g, or t
  misc_feature (2600)..(2603): n is a, c, g, or t
  misc_feature (2605)..(2609): n is a, c, g, or t
  misc_feature (2611)..(2616): n is a, c, g, or t
  misc_feature (2618)..(2619): n is a, c, g, or t
  misc_feature (2621)..(2622): n is a, c, g, or t
  misc_feature (2624)..(2633): n is a, c, g, or t
  misc_feature (2635)..(2637): n is a, c, g, or t
  misc_feature (2643)..(2643): n is a, c, g, or t
  misc_feature (2645)..(2651): n is a, c, g, or t
  misc_feature (2653)..(2658): n is a, c, g, or t
  misc_feature (2660)..(2664): n is a, c, g, or t
  misc_feature (2667)..(2667): n is a, c, g, or t
  misc_feature (2669)..(2676): n is a, c, g, or t
  misc_feature (2678)..(2679): n is a, c, g, or t
  misc_feature (2681)..(2694): n is a, c, g, or t
  misc_feature (2696)..(2701): n is a, c, g, or t
  misc_feature (2704)..(2705): n is a, c, g, or t
  misc_feature (2707)..(2715): n is a, c, g, or t
  misc_feature (2717)..(2723): n is a, c, g, or t
  misc_feature (2726)..(2730): n is a, c, g, or t
  misc_feature (2732)..(2732): n is a, c, g, or t
  misc_feature (2735)..(2735): n is a, c, g, or t
  misc_feature (2737)..(2757): n is a, c, g, or t
  misc_feature (2759)..(2760): n is a, c, g, or t
  misc_feature (2768)..(2769): n is a, c, g, or t
  misc_feature (2771)..(2771): n is a, c, g, or t
  misc_feature (2773)..(2783): n is a, c, g, or t
  misc_feature (2786)..(2794): n is a, c, g, or t
  misc_feature (2798)..(2798): n is a, c, g, or t
  misc_feature (2800)..(2802): n is a, c, g, or t
  misc_feature (2804)..(2811): n is a, c, g, or t
  misc_feature (2815)..(2815): n is a, c, g, or t
  misc_feature (2817)..(2817): n is a, c, g, or t
  misc_feature (2819)..(2819): n is a, c, g, or t
  misc_feature (2822)..(2832): n is a, c, g, or t
  misc_feature (2834)..(2843): n is a, c, g, or t
  misc_feature (2845)..(2845): n is a, c, g, or t
  misc_feature (2847)..(2849): n is a, c, g, or t
  misc_feature (2851)..(2853): n is a, c, g, or t
  misc_feature (2857)..(2858): n is a, c, g, or t
  misc_feature (2860)..(2865): n is a, c, g, or t
  misc_feature (2869)..(2882): n is a, c, g, or t
  misc_feature (2885)..(2886): n is a, c, g, or t
  misc_feature (2888)..(2895): n is a, c, g, or t
  misc_feature (2897)..(2906): n is a, c, g, or t
  misc_feature (2908)..(2912): n is a, c, g, or t
  misc_feature (2915)..(2918): n is a, c, g, or t
  misc_feature (2921)..(2925): n is a, c, g, or t
  misc_feature (2930)..(2930): n is a, c, g, or t
  misc_feature (2933)..(2937): n is a, c, g, or t
  misc_feature (2942)..(2948): n is a, c, g, or t
  misc_feature (2950)..(2951): n is a, c, g, or t
  misc_feature (2953)..(2955): n is a, c, g, or t
  misc_feature (2960)..(2966): n is a, c, g, or t
  misc_feature (2968)..(2972): n is a, c, g, or t
  misc_feature (2975)..(2997): n is a, c, g, or t
  misc_feature (2999)..(3003): n is a, c, g, or t
  misc_feature (3005)..(3023): n is a, c, g, or t
  misc_feature (3026)..(3030): n is a, c, g, or t
  misc_feature (3032)..(3038): n is a, c, g, or t
  misc_feature (3040)..(3052): n is a, c, g, or t
  misc_feature (3055)..(3105): n is a, c, g, or t
  misc_feature (3107)..(3117): n is a, c, g, or t
  misc_feature (3119)..(3119): n is a, c, g, or t
  misc_feature (3121)..(3121): n is a, c, g, or t
  misc_feature (3125)..(3129): n is a, c, g, or t
  misc_feature (3131)..(3132): n is a, c, g, or t
  misc_feature (3135)..(3137): n is a, c, g, or t
  misc_feature (3139)..(3144): n is a, c, g, or t
  misc_feature (3146)..(3146): n is a, c, g, or t
  misc_feature (3148)..(3158): n is a, c, g, or t
  misc_feature (3160)..(3172): n is a, c, g, or t
  misc_feature (3175)..(3180): n is a, c, g, or t
  misc_feature (3182)..(3185): n is a, c, g, or t
  misc_feature (3187)..(3191): n is a, c, g, or t
  misc_feature (3194)..(3205): n is a, c, g, or t
  misc_feature (3207)..(3207): n is a, c, g, or t
  misc_feature (3209)..(3220): n is a, c, g, or t
  misc_feature (3222)..(3228): n is a, c, g, or t
  misc_feature (3232)..(3236): n is a, c, g, or t
  misc_feature (3238)..(3269): n is a, c, g, or t
  misc_feature (3272)..(3281): n is a, c, g, or t
  misc_feature (3290)..(3291): n is a, c, g, or t
  misc_feature (3293)..(3294): n is a, c, g, or t
  misc_feature (3298)..(3299): n is a, c, g, or t
  misc_feature (3303)..(3317): n is a, c, g, or t
  misc_feature (3326)..(3329): n is a, c, g, or t
  misc_feature (3331)..(3340): n is a, c, g, or t
  misc_feature (3343)..(3343): n is a, c, g, or t
  misc_feature (3345)..(3348): n is a, c, g, or t
  misc_feature (3350)..(3353): n is a, c, g, or t
  misc_feature (3358)..(3363): n is a, c, g, or t
  misc_feature (3365)..(3365): n is a, c, g, or t
  misc_feature (3367)..(3369): n is a, c, g, or t
  misc_feature (3372)..(3377): n is a, c, g, or t
  misc_feature (3379)..(3385): n is a, c, g, or t
  misc_feature (3387)..(3391): n is a, c, g, or t
  misc_feature (3394)..(3395): n is a, c, g, or t
  misc_feature (3397)..(3398): n is a, c, g, or t
  misc_feature (3401)..(3401): n is a, c, g, or t
  misc_feature (3404)..(3404): n is a, c, g, or t
  misc_feature (3407)..(3407): n is a, c, g, or t
  misc_feature (3409)..(3414): n is a, c, g, or t
  misc_feature (3416)..(3425): n is a, c, g, or t
  misc_feature (3430)..(3431): n is a, c, g, or t
  misc_feature (3433)..(3448): n is a, c, g, or t
  misc_feature (3450)..(3474): n is a, c, g, or t
  misc_feature (3476)..(3481): n is a, c, g, or t
  misc_feature (3483)..(3484): n is a, c, g, or t
  misc_feature (3487)..(3493): n is a, c, g, or t
  misc_feature (3496)..(3496): n is a, c, g, or t
  misc_feature (3499)..(3504): n is a, c, g, or t
  misc_feature (3506)..(3511): n is a, c, g, or t
  misc_feature (3513)..(3513): n is a, c, g, or t
  misc_feature (3516)..(3520): n is a, c, g, or t
  misc_feature (3523)..(3524): n is a, c, g, or t
  misc_feature (3526)..(3548): n is a, c, g, or t
  misc_feature (3550)..(3551): n is a, c, g, or t
  misc_feature (3553)..(3555): n is a, c, g, or t
  misc_feature (3557)..(3559): n is a, c, g, or t
  misc_feature (3562)..(3569): n is a, c, g, or t
  misc_feature (3571)..(3576): n is a, c, g, or t
  misc_feature (3578)..(3582): n is a, c, g, or t
  misc_feature (3584)..(3594): n is a, c, g, or t
  misc_feature (3597)..(3601): n is a, c, g, or t
  misc_feature (3603)..(3603): n is a, c, g, or t
  misc_feature (3605)..(3611): n is a, c, g, or t
  misc_feature (3614)..(3622): n is a, c, g, or t
  misc_feature (3624)..(3628): n is a, c, g, or t
  misc_feature (3631)..(3631): n is a, c, g, or t
  misc_feature (3634)..(3636): n is a, c, g, or t
  misc_feature (3640)..(3641): n is a, c, g, or t
  misc_feature (3643)..(3643): n is a, c, g, or t
  misc_feature (3645)..(3651): n is a, c, g, or t
  misc_feature (3653)..(3656): n is a, c, g, or t
  misc_feature (3659)..(3670): n is a, c, g, or t
  misc_feature (3673)..(3678): n is a, c, g, or t
  misc_feature (3680)..(3683): n is a, c, g, or t
  misc_feature (3686)..(3688): n is a, c, g, or t
  misc_feature (3690)..(3694): n is a, c, g, or t
  misc_feature (3697)..(3700): n is a, c, g, or t
  misc_feature (3703)..(3706): n is a, c, g, or t
  misc_feature (3708)..(3709): n is a, c, g, or t
  misc_feature (3711)..(3711): n is a, c, g, or t
  misc_feature (3713)..(3713): n is a, c, g, or t
  misc_feature (3715)..(3715): n is a, c, g, or t
  misc_feature (3719)..(3723): n is a, c, g, or t
  misc_feature (3725)..(3727): n is a, c, g, or t
  misc_feature (3730)..(3734): n is a, c, g, or t
  misc_feature (3736)..(3736): n is a, c, g, or t
  misc_feature (3738)..(3738): n is a, c, g, or t
  misc_feature (3741)..(3746): n is a, c, g, or t
  misc_feature (3748)..(3749): n is a, c, g, or t
  misc_feature (3751)..(3751): n is a, c, g, or t
  misc_feature (3753)..(3753): n is a, c, g, or t
  misc_feature (3756)..(3765): n is a, c, g, or t
  misc_feature (3769)..(3774): n is a, c, g, or t
  misc_feature (3777)..(3782): n is a, c, g, or t
  misc_feature (3785)..(3786): n is a, c, g, or t
  misc_feature (3788)..(3790): n is a, c, g, or t
  misc_feature (3792)..(3793): n is a, c, g, or t
  misc_feature (3795)..(3798): n is a, c, g, or t
  misc_feature (3800)..(3805): n is a, c, g, or t
  misc_feature (3807)..(3810): n is a, c, g, or t
  misc_feature (3812)..(3812): n is a, c, g, or t
  misc_feature (3814)..(3815): n is a, c, g, or t
  misc_feature (3817)..(3821): n is a, c, g, or t
  misc_feature (3823)..(3824): n is a, c, g, or t
  misc_feature (3826)..(3833): n is a, c, g, or t
  misc_feature (3835)..(3835): n is a, c, g, or t
  misc_feature (3837)..(3841): n is a, c, g, or t
  misc_feature (3844)..(3852): n is a, c, g, or t
  misc_feature (3854)..(3857): n is a, c, g, or t
  misc_feature (3860)..(3864): n is a, c, g, or t
  misc_feature (3866)..(3866): n is a, c, g, or t
  misc_feature (3868)..(3869): n is a, c, g, or t
  misc_feature (3872)..(3877): n is a, c, g, or t
  misc_feature (3879)..(3888): n is a, c, g, or t
  misc_feature (3891)..(3899): n is a, c, g, or t
  misc_feature (3903)..(3903): n is a, c, g, or t
  misc_feature (3906)..(3912): n is a, c, g, or t
  misc_feature (3914)..(3915): n is a, c, g, or t
  misc_feature (3917)..(3920): n is a, c, g, or t
  misc_feature (3931)..(3933): n is a, c, g, or t
  misc_feature (3939)..(3939): n is a, c, g, or t
  misc_feature (3942)..(3946): n is a, c, g, or t
  misc_feature (3948)..(3949): n is a, c, g, or t
  misc_feature (3952)..(3955): n is a, c, g, or t
  misc_feature (3957)..(3957): n is a, c, g, or t
  misc_feature (3960)..(3961): n is a, c, g, or t
  misc_feature (3963)..(3963): n is a, c, g, or t
  misc_feature (3965)..(3965): n is a, c, g, or t
  misc_feature (3967)..(3967): n is a, c, g, or t
  misc_feature (3975)..(3975): n is a, c, g, or t
  misc_feature (3982)..(3982): n is a, c, g, or t
  misc_feature (3984)..(3985): n is a, c, g, or t
  misc_feature (3990)..(3992): n is a, c, g, or t
  misc_feature (4000)..(4000): n is a, c, g, or t
gcagccacccttgaaagagtgcgtaacagctcactggtcaagtggtcctgcgccgatgatgtaacggggctcaagcacgacaccgaagctgcgggatcnctcatatggctcggccatggggggcgacctccatggtccaggccgagggatcggtaggggagcgttctgacgcgagtgaagcggcggggtaacccagcggtggacgcgtcagaagtgagaatgccggcatgagtagcgaaagacgggggaggagcccgtccgccgaatgcccaagggttcctggggaaggttcatccgcccagggttagtcgggacctaaggcgaggccgagaggcgtagccgatggacgactggttgatattccagtaccacctcatccgcgccaagcccgaatccgaggtactaagggaaccccttcgggggctaccgaccaactcggtactagggnagcgaaggggggacgcaggagggtaggtcgacccacgcgatggtcgtcgtggggcaagtgcgtaggggggttccccaggcaaatccggggagccatcaaccctgaggcacgatgccgagccgctctaggtgaagcgactgatcccatgctgccgagaaaagcctctagcgagtggttgaggtgcccgtaccccaaaccgactcaggtgggcaagtagagaatactcaggcgatcgagagaaccctggttaaggaactcggcaaattgcctccgtaacttcgggagaaggaggaccacggtagggtgacggccntcgcggcccgagctcgatgtggtggcacaaaccaggcccaagcgactgtttactaaaaacacaggtccgtgcgaagtcgtaagacgatgtatacggactgacacctgcccggtgctggaacgttacggggaggggtcagctcccttcggggggcgaagctccgaacctaagcgccagtaaacggcggccgtaactataacggtcctaaggtagcgaaattccttgtcgggtaagttccgacctgcacgaatggtgcaacgacttgggcactgtctcaaccggggactcggcgaaattgcagtacgagtaaagatgctcgttacccgcgacaggacggaaagaccccgggacctttactgcagcttggtgttgggttctggcagatgttgcgtaggataggcgggaggcttcgaagcccgggctccggctcgggtggagccaaccttgaaataccgcccttcatctgtngggactctaacctcggtccgtgatccggatcggggacagcgcctggtgggcagtttgactggggcggttgcctcctaaagcgtaacggaggcgcccaaaggttccctcagcctggttggcaatcaggcgtcgagtgcaagggcacaagggagcttgactgcgagaccgacgggtcgagcaggtgcgaaagcagggcctagtgatctgacgactccttgtggaagggtcgtcactcaacggctaaaaggtaccccggggataacaggctgatcgctcccaagagtccatatcgacggagcggtttggcacctcgatgtcggctcgtctcatcctggggctggagcaggtcccaagggtcgggctgttcgcccgttaaagaggcacgcgagctgggtttagaacgtcgtgagacagttcggtccctatccgtcgtgggcgtaggagacttgcggggagctgcccctagtacgagaggaccggggcggacgaacctctggtgtgccagttgtcgcgccagcggcacggctggttagccacgttcggaagagataagcgctgaaagcatctaagtgcgaaactcgcccctagatgaggtctcccactgggcaaccaggtaaggcccctcgcagactacgaggttgataggccggaggtgtacgcgtggcaacacgttgagccgaccggtactaataggccgaggacttgactttgctcgcgctcgctatcgcagttcccgagctctgctcgggggcnnnnntnccnnnnnnntnccnnnnncaacggatcgggagacgccgtttcggtggtcatagcggaggggaaacacccggtcccatcccgaacccggaagttaagccctccagcgccgatggtactgcccgggcaactgggtgggagagtaggtcgccgccggacaccttcgnaagagccgcccccnnnggggnngcttntcnngntggggncncnnnngngcnnccngnnncncnnnngnnnnncnnnnnngnnnnnnncccnnnncgggnccnaagggnnnncnnnnnggnnncccncccgnnnnnnncccngnnnnnnnnnccnnnnncnggncnnnnnnccnnnncnggnngnnggnnnngnnnnnnnccnngnnnnnnnnnnccnnnnggnncnnnnnnncnggnnnnnccnngggggnggcnnnnnnnnnggnnnnngcnnagnggnnnccccccnngggnnnggnnnnnnnnnnggnnntnngnnnnnnnnnnnnnnnnnnnnngnnnnnnccgnngnnnnnnncnnnnnnnnnnnnnnnnnnnngnnnnnncnggnnnncnnnnnnnnnnnnnnnnnnnncnnnnncccnnnnnnnnnnnngcnngnccnncnnnncnnnnncnnnnnngnngnngnnnnnnnnnncnnngggggngnnnnnnncnnnnnngnnnnnggngnnnnnnnngnncnnnnnnnnnnnnnngnnnnnnggnnannnnnnnnngnnnnnnnggnnnnncnccngnnnnnnnnnnnnnnnnnnnnngnnggggcccnngngnnnnnnnnnnnggnnnnnnnnngggnannncnnnnnnnnggcngncnggnnnnnnnnnnncnnnnnnnnnntncnnnannncccnngnnnnnncccnnnnnnnnnnnnnnccnngnnnnnnnngnnnnnnnnnncnnnnnccnnnnccnnnnncctcnccnnnnnccccnnnnnnncnngnnnccccnnnnnnntnnnnnggnnnnnnnnnnnnnnnnnnnnnnncnnnnngnnnnnnnnnnnnnnnnnnnccnnnnngnnnnnnngnnnnnnnnnnnnncgnnnnnnnnnnnnnnnnnnnnnnnnnnnnnnnnnnnnnnnnnnnnnnnnnnncnnnnnnnnnnncncncccnnnnncnnggnnncnnnnnngnannnnnnnnnnncnnnnnnnnnnnnnccnnnnnncnnnngnnnnnggnnnnnnnnnnnnanannnnnnnnnnnncnnnnnnncccnnnnngnnnnnnnnnnnnnnnnnnnnnnnnnnnnnnnnggnnnnnnnnnnggggggggnngnngggnngggnnnnnnnnnnnnnnnggggggggnnnncnnnnnnnnnnccngnnnnannnngcccnnnnnngngnnnccnnnnnncnnnnnnngnnnnnggnngnnccnggnggngnnnnnncnnnnnnnnnncgccnncnnnnnnnnnnnnnnnncnnnnnnnnnnnnnnnnnnnnnnnnngnnnnnnannggnnnnnnnggnccnnnnnngnnnnnngnggnnnnnggnncnnnnnnnnnnnnnnnnnnnnnnngnngnnngnnnggnnnnnnnngnnnnnngnnnnncnnnnnnnnnnnccnnnnngngnnnnnnnggnnnnnnnnngnnnnnccnccnnncccnncngnnnnnnncnnnnggnnnnnnnnnnnnggnnnnnngnnnnggnnngnnnnnccnnnnccnnnncnntncnancccnnnnncnnnggnnnnnangnggnnnnnngnncngnttnnnnnnnnnngggnnnnnnggnnnnnnggnngnnngnngnnnngnnnnnntnnnngncnncnnnnnanngnnnnnnnncngnnnnnccnnnnnnnnncnnnnaannnnncngnnccnnnnnngnnnnnnnnnnggnnnnnnnnngggnggnnnnnnngnncnnnncgaaggggggnnnttgganggnnnnngnnaannnngnggnncncncnggcaccgnggccgcngnnccggnnnaacgccgn

SEQ ID NO: 1361 - DNA, 4000 bp, Escherichia coli
  misc_feature (1)..(1): n is a, c, g, or t
  misc_feature (4)..(5): n is a, c, g, or t
  misc_feature (8)..(9): n is a, c, g, or t
  misc_feature (12)..(13): n is a, c, g, or t
  misc_feature (16)..(17): n is a, c, g, or t
  misc_feature (19)..(19): n is a, c, g, or t
  misc_feature (21)..(25): n is a, c, g, or t
  misc_feature (27)..(32): n is a, c, g, or t
  misc_feature (34)..(34): n is a, c, g, or t
  misc_feature (36)..(39): n is a, c, g, or t
  misc_feature (41)..(49): n is a, c, g, or t
  misc_feature (51)..(52): n is a, c, g, or t
  misc_feature (58)..(63): n is a, c, g, or t
  misc_feature (66)..(66): n is a, c, g, or t
  misc_feature (68)..(70): n is a, c, g, or t
  misc_feature (72)..(74): n is a, c, g, or t
  misc_feature (76)..(78): n is a, c, g, or t
  misc_feature (80)..(84): n is a, c, g, or t
  misc_feature (86)..(86): n is a, c, g, or t
  misc_feature (90)..(90): n is a, c, g, or t
  misc_feature (92)..(93): n is a, c, g, or t
  misc_feature (97)..(97): n is a, c, g, or t
  misc_feature (99)..(99): n is a, c, g, or t
  misc_feature (101)..(102): n is a, c, g, or t
  misc_feature (104)..(105): n is a, c, g, or t
  misc_feature (107)..(115): n is a, c, g, or t
  misc_feature (117)..(119): n is a, c, g, or t
  misc_feature (121)..(123): n is a, c, g, or t
  misc_feature (128)..(131): n is a, c, g, or t
  misc_feature (133)..(134): n is a, c, g, or t
  misc_feature (136)..(137): n is a, c, g, or t
  misc_feature (139)..(139): n is a, c, g, or t
  misc_feature (141)..(141): n is a, c, g, or t
  misc_feature (145)..(147): n is a, c, g, or t
  misc_feature (149)..(152): n is a, c, g, or t
  misc_feature (154)..(157): n is a, c, g, or t
  misc_feature (159)..(159): n is a, c, g, or t
  misc_feature (161)..(161): n is a, c, g, or t
  misc_feature (163)..(163): n is a, c, g, or t
  misc_feature (165)..(168): n is a, c, g, or t
  misc_feature (172)..(179): n is a, c, g, or t
  misc_feature (181)..(184): n is a, c, g, or t
  misc_feature (186)..(189): n is a, c, g, or t
  misc_feature (191)..(191): n is a, c, g, or t
  misc_feature (193)..(197): n is a, c, g, or t
  misc_feature (199)..(206): n is a, c, g, or t
  misc_feature (209)..(211): n is a, c, g, or t
  misc_feature (213)..(213): n is a, c, g, or t
  misc_feature (215)..(215): n is a, c, g, or t
  misc_feature (217)..(221): n is a, c, g, or t
  misc_feature (223)..(225): n is a, c, g, or t
  misc_feature (229)..(230): n is a, c, g, or t
  misc_feature (233)..(236): n is a, c, g, or t
  misc_feature (238)..(239): n is a, c, g, or t
  misc_feature (242)..(243): n is a, c, g, or t
  misc_feature (245)..(245): n is a, c, g, or t
  misc_feature (247)..(248): n is a, c, g, or t
  misc_feature (250)..(250): n is a, c, g, or t
  misc_feature (253)..(255): n is a, c, g, or t
  misc_feature (259)..(259): n is a, c, g, or t
  misc_feature (261)..(261): n is a, c, g, or t
  misc_feature (263)..(264): n is a, c, g, or t
  misc_feature (268)..(269): n is a, c, g, or t
  misc_feature (271)..(271): n is a, c, g, or t
  misc_feature (273)..(276): n is a, c, g, or t
  misc_feature (278)..(284): n is a, c, g, or t
  misc_feature (287)..(289): n is a, c, g, or t
  misc_feature (293)..(298): n is a, c, g, or t
  misc_feature (300)..(303): n is a, c, g, or t
  misc_feature (305)..(311): n is a, c, g, or t
  misc_feature (313)..(313): n is a, c, g, or t
  misc_feature (315)..(324): n is a, c, g, or t
  misc_feature (326)..(326): n is a, c, g, or t
  misc_feature (329)..(329): n is a, c, g, or t
  misc_feature (335)..(336): n is a, c, g, or t
  misc_feature (338)..(341): n is a, c, g, or t
  misc_feature (343)..(344): n is a, c, g, or t
  misc_feature (346)..(346): n is a, c, g, or t
  misc_feature (350)..(357): n is a, c, g, or t
  misc_feature (360)..(363): n is a, c, g, or t
  misc_feature (365)..(366): n is a, c, g, or t
  misc_feature (370)..(371): n is a, c, g, or t
  misc_feature (374)..(377): n is a, c, g, or t
  misc_feature (380)..(380): n is a, c, g, or t
  misc_feature (382)..(385): n is a, c, g, or t
  misc_feature (388)..(392): n is a, c, g, or t
  misc_feature (394)..(395): n is a, c, g, or t
  misc_feature (397)..(397): n is a, c, g, or t
  misc_feature (399)..(402): n is a, c, g, or t
  misc_feature (405)..(405): n is a, c, g, or t
  misc_feature (411)..(411): n is a, c, g, or t
  misc_feature (413)..(413): n is a, c, g, or t
  misc_feature (415)..(417): n is a, c, g, or t
  misc_feature (420)..(422): n is a, c, g, or t
  misc_feature (424)..(426): n is a, c, g, or t
  misc_feature (428)..(428): n is a, c, g, or t
  misc_feature (430)..(433): n is a, c, g, or t
  misc_feature (436)..(436): n is a, c, g, or t
  misc_feature (438)..(438): n is a, c, g, or t
  misc_feature (441)..(443): n is a, c, g, or t
  misc_feature (446)..(446): n is a, c, g, or t
  misc_feature (448)..(448): n is a, c, g, or t
  misc_feature (450)..(451): n is a, c, g, or t
  misc_feature (453)..(453): n is a, c, g, or t
  misc_feature (455)..(456): n is a, c, g, or t
  misc_feature (459)..(460): n is a, c, g, or t
  misc_feature (462)..(466): n is a, c, g, or t
  misc_feature (468)..(468): n is a, c, g, or t
  misc_feature (470)..(475): n is a, c, g, or t
  misc_feature (477)..(478): n is a, c, g, or t
  misc_feature (480)..(482): n is a, c, g, or t
  misc_feature (484)..(484): n is a, c, g, or t
  misc_feature (487)..(488): n is a, c, g, or t
  misc_feature (490)..(491): n is a, c, g, or t
  misc_feature (493)..(493): n is a, c, g, or t
  misc_feature (498)..(505): n is a, c, g, or t
  misc_feature (510)..(510): n is a, c, g, or t
  misc_feature (513)..(513): n is a, c, g, or t
  misc_feature (517)..(518): n is a, c, g, or t
  misc_feature (521)..(522): n is a, c, g, or t
  misc_feature (525)..(526): n is a, c, g, or t
  misc_feature (528)..(530): n is a, c, g, or t
  misc_feature (533)..(534): n is a, c, g, or t
  misc_feature (536)..(538): n is a, c, g, or t
  misc_feature (540)..(544): n is a, c, g, or t
  misc_feature (546)..(547): n is a, c, g, or t
  misc_feature (549)..(549): n is a, c, g, or t
  misc_feature (551)..(552): n is a, c, g, or t
  misc_feature (554)..(561): n is a, c, g, or t
  misc_feature (563)..(564): n is a, c, g, or t
  misc_feature (567)..(568): n is a, c, g, or t
  misc_feature (570)..(570): n is a, c, g, or t
  misc_feature (572)..(573): n is a, c, g, or t
  misc_feature (575)..(575): n is a, c, g, or t
  misc_feature (577)..(577): n is a, c, g, or t
  misc_feature (579)..(580): n is a, c, g, or t
  misc_feature (590)..(590): n is a, c, g, or t
  misc_feature (592)..(593): n is a, c, g, or t
  misc_feature (595)..(595): n is a, c, g, or t
  misc_feature (597)..(600): n is a, c, g, or t
  misc_feature (603)..(603): n is a, c, g, or t
  misc_feature (606)..(606): n is a, c, g, or t
  misc_feature (609)..(609): n is a, c, g, or t
  misc_feature (615)..(615): n is a, c, g, or t
  misc_feature (617)..(620): n is a, c, g, or t
  misc_feature (624)..(625): n is a, c, g, or t
  misc_feature (627)..(630): n is a, c, g, or t
  misc_feature (632)..(632): n is a, c, g, or t
  misc_feature (634)..(638): n is a, c, g, or t
  misc_feature (640)..(640): n is a, c, g, or t
  misc_feature (644)..(644): n is a, c, g, or t
  misc_feature (647)..(648): n is a, c, g, or t
  misc_feature (650)..(650): n is a, c, g, or t
  misc_feature (655)..(655): n is a, c, g, or t
  misc_feature (659)..(659): n is a, c, g, or t
  misc_feature (661)..(661): n is a, c, g, or t
  misc_feature (663)..(663): n is a, c, g, or t
  misc_feature (665)..(666): n is a, c, g, or t
  misc_feature (669)..(669): n is a, c, g, or t
  misc_feature (671)..(671): n is a, c, g, or t
  misc_feature (673)..(674): n is a, c, g, or t
  misc_feature (676)..(678): n is a, c, g, or t
  misc_feature (680)..(680): n is a, c, g, or t
  misc_feature (683)..(683): n is a, c, g, or t
  misc_feature (685)..(692): n is a, c, g, or t
  misc_feature (695)..(697): n is a, c, g, or t
  misc_feature (700)..(701): n is a, c, g, or t
  misc_feature (703)..(703): n is a, c, g, or t
  misc_feature (705)..(705): n is a, c, g, or t
  misc_feature (707)..(707): n is a, c, g, or t
  misc_feature (709)..(709): n is a, c, g, or t
  misc_feature (712)..(713): n is a, c, g, or t
  misc_feature (715)..(715): n is a, c, g, or t
  misc_feature (719)..(719): n is a, c, g, or t
  misc_feature (723)..(724): n is a, c, g, or t
  misc_feature (726)..(728): n is a, c, g, or t
  misc_feature (730)..(730): n is a, c, g, or t
  misc_feature (732)..(733): n is a, c, g, or t
  misc_feature (736)..(739): n is a, c, g, or t
  misc_feature (741)..(743): n is a, c, g, or t
  misc_feature (745)..(746): n is a, c, g, or t
  misc_feature (748)..(748): n is a, c, g, or t
  misc_feature (750)..(750): n is a, c, g, or t
  misc_feature (752)..(752): n is a, c, g, or t
  misc_feature (756)..(758): n is a, c, g, or t
  misc_feature (762)..(763): n is a, c, g, or t
  misc_feature (765)..(765): n is a, c, g, or t
  misc_feature (767)..(768): n is a, c, g, or t
  misc_feature (770)..(770): n is a, c, g, or t
  misc_feature (773)..(774): n is a, c, g, or t
  misc_feature (776)..(776): n is a, c, g, or t
  misc_feature (779)..(779): n is a, c, g, or t
  misc_feature (784)..(784): n is a, c, g, or t
  misc_feature (786)..(786): n is a, c, g, or t
  misc_feature (789)..(792): n is a, c, g, or t
  misc_feature (794)..(795): n is a, c, g, or t
  misc_feature (799)..(799): n is a, c, g, or t
  misc_feature (801)..(801): n is a, c, g, or t
  misc_feature (803)..(803): n is a, c, g, or t
  misc_feature (807)..(808): n is a, c, g, or t
  misc_feature (811)..(812): n is a, c, g, or t
  misc_feature (815)..(816): n is a, c, g, or t
  misc_feature (818)..(821): n is a, c, g, or t
  misc_feature (823)..(823): n is a, c, g, or t
  misc_feature (828)..(829): n is a, c, g, or t
  misc_feature (833)..(833): n is a, c, g, or t
  misc_feature (835)..(838): n is a, c, g, or t
  misc_feature (840)..(842): n is a, c, g, or t
  misc_feature (844)..(844): n is a, c, g, or t
  misc_feature (847)..(847): n is a, c, g, or t
  misc_feature (849)..(849): n is a, c, g, or t
  misc_feature (853)..(853): n is a, c, g, or t
  misc_feature (856)..(856): n is a, c, g, or t
  misc_feature (858)..(862): n is a, c, g, or t
  misc_feature (864)..(865): n is a, c, g, or t
  misc_feature (867)..(868): n is a, c, g, or t
  misc_feature (870)..(871): n is a, c, g, or t
  misc_feature (873)..(873): n is a, c, g, or t
  misc_feature (875)..(876): n is a, c, g, or t
  misc_feature (879)..(879): n is a, c, g, or t
  misc_feature (883)..(883): n is a, c, g, or t
  misc_feature (885)..(888): n is a, c, g, or t
  misc_feature (890)..(892): n is a, c, g, or t
  misc_feature (896)..(896): n is a, c, g, or t
  misc_feature (899)..(899): n is a, c, g, or t
  misc_feature (901)..(902): n is a, c, g, or t
  misc_feature (904)..(904): n is a, c, g, or t
  misc_feature (907)..(907): n is a, c, g, or t
  misc_feature (909)..(910): n is a, c, g, or t
  misc_feature (912)..(913): n is a, c, g, or t
  misc_feature (916)..(920): n is a, c, g, or t
  misc_feature (922)..(922): n is a, c, g, or t
  misc_feature (924)..(930): n is a, c, g, or t
  misc_feature (933)..(934): n is a, c, g, or t
  misc_feature (936)..(937): n is a, c, g, or t
  misc_feature (940)..(940): n is a, c, g, or t
  misc_feature (946)..(946): n is a, c, g, or t
  misc_feature (950)..(956): n is a, c, g, or t
  misc_feature (960)..(961): n is a, c, g, or t
  misc_feature (964)..(964): n is a, c, g, or t
  misc_feature (966)..(967): n is a, c, g, or t
  misc_feature (971)..(973): n is a, c, g, or t
  misc_feature (976)..(979): n is a, c, g, or t
  misc_feature (982)..(982): n is a, c, g, or t
  misc_feature (984)..(984): n is a, c, g, or t
  misc_feature (988)..(990): n is a, c, g, or t
  misc_feature (993)..(993): n is a, c, g, or t
  misc_feature (995)..(995): n is a, c, g, or t
  misc_feature (997)..(997): n is a, c, g, or t
  misc_feature (1003)..(1003): n is a, c, g, or t
  misc_feature (1006)..(1006): n is a, c, g, or t
  misc_feature (1010)..(1011): n is a, c, g, or t
  misc_feature (1014)..(1014): n is a, c, g, or t
  misc_feature (1016)..(1016): n is a, c, g, or t
  misc_feature (1019)..(1019): n is a, c, g, or t
  misc_feature (1021)..(1022): n is a, c, g, or t
  misc_feature (1024)..(1024): n is a, c, g, or t
  misc_feature (1026)..(1026): n is a, c, g, or t
  misc_feature (1028)..(1031): n is a, c, g, or t
  misc_feature (1033)..(1033): n is a, c, g, or t
  misc_feature (1037)..(1037): n is a, c, g, or t
  misc_feature (1040)..(1040): n is a, c, g, or t
  misc_feature (1045)..(1045): n is a, c, g, or t
  misc_feature (1048)..(1048): n is a, c, g, or t
  misc_feature (1050)..(1050): n is a, c, g, or t
  misc_feature (1054)..(1054): n is a, c, g, or t
  misc_feature (1056)..(1056): n is a, c, g, or t
  misc_feature (1058)..(1058): n is a, c, g, or t
  misc_feature (1060)..(1061): n is a, c, g, or t
  misc_feature (1064)..(1064): n is a, c, g, or t
  misc_feature (1066)..(1067): n is a, c, g, or t
  misc_feature (1069)..(1070): n is a, c, g, or t
  misc_feature (1073)..(1073): n is a, c, g, or t
  misc_feature (1075)..(1075): n is a, c, g, or t
  misc_feature (1077)..(1078): n is a, c, g, or t
  misc_feature (1080)..(1080): n is a, c, g, or t
  misc_feature (1083)..(1083): n is a, c, g, or t
  misc_feature (1085)..(1086): n is a, c, g, or t
  misc_feature (1089)..(1091): n is a, c, g, or t
  misc_feature (1094)..(1096): n is a, c, g, or t
  misc_feature (1098)..(1098): n is a, c, g, or t
  misc_feature (1102)..(1104): n is a, c, g, or t
  misc_feature (1107)..(1107): n is a, c, g, or t
  misc_feature (1110)..(1110): n is a, c, g, or t
  misc_feature (1114)..(1116): n is a, c, g, or t
  misc_feature (1118)..(1121): n is a, c, g, or t
  misc_feature (1124)..(1124): n is a, c, g, or t
  misc_feature (1126)..(1126): n is a, c, g, or t
  misc_feature (1128)..(1133): n is a, c, g, or t
  misc_feature (1135)..(1135): n is a, c, g, or t
  misc_feature (1137)..(1137): n is a, c, g, or t
  misc_feature (1144)..(1144): n is a, c, g, or t
  misc_feature (1148)..(1149): n is a, c, g, or t
  misc_feature (1152)..(1153): n is a, c, g, or t
  misc_feature (1157)..(1158): n is a, c, g, or t
  misc_feature (1160)..(1160): n is a, c, g, or t
  misc_feature (1162)..(1163): n is a, c, g, or t
  misc_feature (1166)..(1168): n is a, c, g, or t
  misc_feature (1172)..(1172): n is a, c, g, or t
  misc_feature (1175)..(1178): n is a, c, g, or t
  misc_feature (1180)..(1180): n is a, c, g, or t
  misc_feature (1182)..(1183): n is a, c, g, or t
  misc_feature (1186)..(1188): n is a, c, g, or t
  misc_feature (1191)..(1191): n is a, c, g, or t
  misc_feature (1198)..(1198): n is a, c, g, or t
  misc_feature (1200)..(1200): n is a, c, g, or t
  misc_feature (1205)..(1207): n is a, c, g, or t
  misc_feature (1267)..(1267): n is a, c, g, or t
  misc_feature (1423)..(1423): n is a, c, g, or t
  misc_feature (1517)..(1517): n is a, c, g, or t
  misc_feature (1967)..(1967): n is a, c, g, or t
  misc_feature (1969)..(1969): n is a, c, g, or t
  misc_feature (1972)..(1972): n is a, c, g, or t
  misc_feature (1983)..(1986): n is a, c, g, or t
  misc_feature (1988)..(1993): n is a, c, g, or t
  misc_feature (2000)..(2003): n is a, c, g, or t
  misc_feature (2005)..(2011): n is a, c, g, or t
  misc_feature (2013)..(2014): n is a, c, g, or t
  misc_feature (2016)..(2021): n is a, c, g, or t
  misc_feature (2023)..(2026): n is a, c, g, or t
  misc_feature (2030)..(2031): n is a, c, g, or t
  misc_feature (2034)..(2036): n is a, c, g, or t
  misc_feature (2038)..(2043): n is a, c, g, or t
  misc_feature (2051)..(2051): n is a, c, g, or t
  misc_feature (2331)..(2331): n is a, c, g, or t
  misc_feature (2384)..(2384): n is a, c, g, or t
  misc_feature (2430)..(2430): n is a, c, g, or t
  misc_feature (2443)..(2443): n is a, c, g, or t
  misc_feature (2468)..(2470): n is a, c, g, or t
  misc_feature (2479)..(2489): n is a, c, g, or t
  misc_feature (2496)..(2496): n is a, c, g, or t
  misc_feature (2498)..(2498): n is a, c, g, or t
  misc_feature (2500)..(2502): n is a, c, g, or t
  misc_feature (2504)..(2508): n is a, c, g, or t
  misc_feature (2510)..(2513): n is a, c, g, or t
  misc_feature (2515)..(2519): n is a, c, g, or t
  misc_feature (2521)..(2526): n is a, c, g, or t
  misc_feature (2528)..(2529): n is a, c, g, or t
  misc_feature (2531)..(2537): n is a, c, g, or t
  misc_feature (2540)..(2544): n is a, c, g, or t
  misc_feature (2547)..(2560): n is a, c, g, or t
  misc_feature (2562)..(2562): n is a, c, g, or t
  misc_feature (2564)..(2578): n is a, c, g, or t
  misc_feature (2580)..(2583): n is a, c, g, or t
  misc_feature (2586)..(2593): n is a, c, g, or t
  misc_feature (2595)..(2596): n is a, c, g, or t
  misc_feature (2600)..(2600): n is a, c, g, or t
  misc_feature (2605)..(2607): n is a, c, g, or t
  misc_feature (2613)..(2614): n is a, c, g, or t
  misc_feature (2616)..(2618): n is a, c, g, or t
  misc_feature (2621)..(2623): n is a, c, g, or t
  misc_feature (2626)..(2628): n is a, c, g, or t
  misc_feature (2630)..(2630): n is a, c, g, or t
  misc_feature (2632)..(2632): n is a, c, g, or t
  misc_feature (2636)..(2637): n is a, c, g, or t
  misc_feature (2639)..(2639): n is a, c, g, or t
  misc_feature (2641)..(2646): n is a, c, g, or t
  misc_feature (2649)..(2649): n is a, c, g, or t
  misc_feature (2651)..(2651): n is a, c, g, or t
  misc_feature (2653)..(2656): n is a, c, g, or t
  misc_feature (2658)..(2658): n is a, c, g, or t
  misc_feature (2660)..(2666): n is a, c, g, or t
  misc_feature (2668)..(2669): n is a, c, g, or t
  misc_feature (2671)..(2671): n is a, c, g, or t
  misc_feature (2673)..(2674): n is a, c, g, or t
  misc_feature (2676)..(2676): n is a, c, g, or t
  misc_feature (2678)..(2686): n is a, c, g, or t
  misc_feature (2688)..(2688): n is a, c, g, or t
  misc_feature (2693)..(2711): n is a, c, g, or t
  misc_feature (2713)..(2715): n is a, c, g, or t
  misc_feature (2717)..(2717): n is a, c, g, or t
  misc_feature (2719)..(2719): n is a, c, g, or t
  misc_feature (2721)..(2725): n is a, c, g, or t
  misc_feature (2727)..(2732): n is a, c, g, or t
  misc_feature (2734)..(2735): n is a, c, g, or t
  misc_feature (2737)..(2742): n is a, c, g, or t
  misc_feature (2745)..(2749): n is a, c, g, or t
  misc_feature (2752)..(2752): n is a, c, g, or t
  misc_feature (2754)..(2758): n is a, c, g, or t
  misc_feature (2760)..(2760): n is a, c, g, or t
  misc_feature (2762)..(2766): n is a, c, g, or t
  misc_feature (2768)..(2769): n is a, c, g, or t
  misc_feature (2771)..(2772): n is a, c, g, or t
  misc_feature (2774)..(2775): n is a, c, g, or t
  misc_feature (2778)..(2779): n is a, c, g, or t
  misc_feature (2781)..(2783): n is a, c, g, or t
  misc_feature (2785)..(2785): n is a, c, g, or t
  misc_feature (2787)..(2787): n is a, c, g, or t
  misc_feature (2790)..(2795): n is a, c, g, or t
  misc_feature (2797)..(2803): n is a, c, g, or t
  misc_feature (2806)..(2807): n is a, c, g, or t
  misc_feature (2809)..(2809): n is a, c, g, or t
  misc_feature (2811)..(2814): n is a, c, g, or t
  misc_feature (2821)..(2821): n is a, c, g, or t
  misc_feature (2825)..(2825): n is a, c, g, or t
  misc_feature (2829)..(2829): n is a, c, g, or t
  misc_feature (2832)..(2833): n is a, c, g, or t
  misc_feature (2835)..(2835): n is a, c, g, or t
  misc_feature (2837)..(2838): n is a, c, g, or t
  misc_feature (2840)..(2840): n is a, c, g, or t
  misc_feature (2843)..(2845): n is a, c, g, or t
  misc_feature (2847)..(2848): n is a, c, g, or t
  misc_feature (2850)..(2854): n is a, c, g, or t
  misc_feature (2856)..(2856): n is a, c, g, or t
  misc_feature (2859)..(2859): n is a, c, g, or t
  misc_feature (2861)..(2861): n is a, c, g, or t
  misc_feature (2863)..(2865): n is a, c, g, or t
  misc_feature (2867)..(2870): n is a, c, g, or t
  misc_feature (2872)..(2872): n is a, c, g, or t
  misc_feature (2874)..(2893): n is a, c, g, or t
  misc_feature (2895)..(2905): n is a, c, g, or t
  misc_feature (2907)..(2910): n is a, c, g, or t
  misc_feature (2914)..(2914): n is a, c, g, or t
  misc_feature (2916)..(2917): n is a, c, g, or t
  misc_feature (2919)..(2920): n is a, c, g, or t
  misc_feature (2922)..(2922): n is a, c, g, or t
  misc_feature (2926)..(2926): n is a, c, g, or t
  misc_feature (2929)..(2929): n is a, c, g, or t
  misc_feature (2931)..(2934): n is a, c, g, or t
  misc_feature (2936)..(2945): n is a, c, g, or t
  misc_feature (2947)..(2947): n is a, c, g, or t
  misc_feature (2949)..(2950): n is a, c, g, or t
  misc_feature (2952)..(2960): n is a, c, g, or t
  misc_feature (2962)..(2962): n is a, c, g, or t
  misc_feature (2964)..(2964): n is a, c, g, or t
  misc_feature (2967)..(2967): n is a, c, g, or t
  misc_feature (2971)..(2971): n is a, c, g, or t
  misc_feature (2973)..(2973): n is a, c, g, or t
  misc_feature (2977)..(2977): n is a, c, g, or t
  misc_feature (2979)..(2979): n is a, c, g, or t
  misc_feature (2981)..(2981): n is a, c, g, or t
  misc_feature (2985)..(2986): n is a, c, g, or t
  misc_feature (2988)..(2988): n is a, c, g, or t
  misc_feature (2990)..(2990): n is a, c, g, or t
  misc_feature (2992)..(2994): n is a, c, g, or t
  misc_feature (2998)..(2999): n is a, c, g, or t
  misc_feature (3002)..(3003): n is a, c, g, or t
  misc_feature (3007)..(3010): n is a, c, g, or t
  misc_feature (3012)..(3016): n is a, c, g, or t
  misc_feature (3018)..(3020): n is a, c, g, or t
  misc_feature (3024)..(3024): n is a, c, g, or t
  misc_feature (3026)..(3031): n is a, c, g, or t
  misc_feature (3033)..(3038): n is a, c, g, or t
  misc_feature (3041)..(3042): n is a, c, g, or t
  misc_feature (3044)..(3044): n is a, c, g, or t
  misc_feature (3046)..(3046): n is a, c, g, or t
  misc_feature (3048)..(3049): n is a, c, g, or t
  misc_feature (3054)..(3073): n is a, c, g, or t
  misc_feature (3075)..(3075): n is a, c, g, or t
  misc_feature (3077)..(3078): n is a, c, g, or t
  misc_feature (3080)..(3080): n is a, c, g, or t
  misc_feature (3082)..(3082): n is a, c, g, or t
  misc_feature (3084)..(3085): n is a, c, g, or t
  misc_feature (3089)..(3090): n is a, c, g, or t
  misc_feature (3094)..(3095): n is a, c, g, or t
  misc_feature (3097)..(3098): n is a, c, g, or t
  misc_feature (3102)..(3105): n is a, c, g, or t
  misc_feature (3109)..(3109): n is a, c, g, or t
  misc_feature (3111)..(3112): n is a, c, g, or t
  misc_feature (3114)..(3114): n is a, c, g, or t
  misc_feature (3119)..(3121): n is a, c, g, or t
  misc_feature (3124)..(3125): n is a, c, g, or t
  misc_feature (3127)..(3128): n is a, c, g, or t
  misc_feature (3130)..(3131): n is a, c, g, or t
  misc_feature (3133)..(3133): n is a, c, g, or t
  misc_feature (3135)..(3135): n is a, c, g, or t
  misc_feature (3137)..(3140): n is a, c, g, or t
  misc_feature (3147)..(3148): n is a, c, g, or t
  misc_feature (3153)..(3153): n is a, c, g, or t
  misc_feature (3158)..(3159): n is a, c, g, or t
  misc_feature (3163)..(3163): n is a, c, g, or t
  misc_feature (3167)..(3169): n is a, c, g, or t
  misc_feature (3172)..(3173): n is a, c, g, or t
  misc_feature (3175)..(3175): n is a, c, g, or t
  misc_feature (3178)..(3178): n is a, c, g, or t
  misc_feature (3181)..(3184): n is a, c, g, or t
  misc_feature (3186)..(3187): n is a, c, g, or t
  misc_feature (3190)..(3191): n is a, c, g, or t
  misc_feature (3193)..(3194): n is a, c, g, or t
  misc_feature (3196)..(3197): n is a, c, g, or t
  misc_feature (3200)..(3200): n is a, c, g, or t
  misc_feature (3204)..(3204): n is a, c, g, or t
  misc_feature (3206)..(3207): n is a, c, g, or t
  misc_feature (3209)..(3209): n is a, c, g, or t
  misc_feature (3211)..(3212): n is a, c, g, or t
  misc_feature (3215)..(3217): n is a, c, g, or t
  misc_feature (3220)..(3221): n is a, c, g, or t
  misc_feature (3223)..(3224): n is a, c, g, or t
  misc_feature (3226)..(3228): n is a, c, g, or t
  misc_feature (3233)..(3233): n is a, c, g, or t
  misc_feature (3236)..(3237): n is a, c, g, or t
  misc_feature (3245)..(3246): n is a, c, g, or t
  misc_feature (3250)..(3256): n is a, c, g, or t
  misc_feature (3258)..(3259): n is a, c, g, or t
  misc_feature (3263)..(3264): n is a, c, g, or t
  misc_feature (3267)..(3267): n is a, c, g, or t
  misc_feature (3269)..(3269): n is a, c, g, or t
  misc_feature (3275)..(3278): n is a, c, g, or t
  misc_feature (3280)..(3284): n is a, c, g, or t
  misc_feature (3286)..(3287): n is a, c, g, or t
  misc_feature (3289)..(3293): n is a, c, g, or t
  misc_feature (3300)..(3309): n is a, c, g, or t
  misc_feature (3311)..(3311): n is a, c, g, or t
  misc_feature (3313)..(3313): n is a, c, g, or t
  misc_feature (3315)..(3316): n is a, c, g, or t
  misc_feature (3318)..(3318): n is a, c, g, or t
  misc_feature (3322)..(3322): n is a, c, g, or t
  misc_feature (3325)..(3326): n is a, c, g, or t
  misc_feature (3328)..(3328): n is a, c, g, or t
  misc_feature (3331)..(3332): n is a, c, g, or t
  misc_feature (3334)..(3338): n is a, c, g, or t
  misc_feature (3340)..(3341): n is a, c, g, or t
  misc_feature (3343)..(3344): n is a, c, g, or t
  misc_feature (3347)..(3349): n is a, c, g, or t
  misc_feature (3353)..(3353): n is a, c, g, or t
  misc_feature (3355)..(3358): n is a, c, g, or t
  misc_feature (3360)..(3363): n is a, c, g, or t
  misc_feature (3365)..(3365): n is a, c, g, or t
  misc_feature (3367)..(3372): n is a, c, g, or t
  misc_feature (3374)..(3375): n is a, c, g, or t
  misc_feature (3377)..(3378): n is a, c, g, or t
  misc_feature (3380)..(3380): n is a, c, g, or t
  misc_feature (3383)..(3383): n is a, c, g, or t
  misc_feature (3386)..(3386): n is a, c, g, or t
  misc_feature (3388)..(3389): n is a, c, g, or t
  misc_feature (3391)..(3392): n is a, c, g, or t
  misc_feature (3394)..(3396): n is a, c, g, or t
  misc_feature (3398)..(3398): n is a, c, g, or t
  misc_feature (3400)..(3401): n is a, c, g, or t
  misc_feature (3404)..(3405): n is a, c, g, or t
  misc_feature (3415)..(3416): n is a, c, g, or t
  misc_feature (3419)..(3419): n is a, c, g, or t
  misc_feature (3421)..(3421): n is a, c, g, or t
  misc_feature (3423)..(3424): n is a, c, g, or t
  misc_feature (3427)..(3427): n is a, c, g, or t
  misc_feature (3429)..(3430): n is a, c, g, or t
  misc_feature (3432)..(3433): n is a, c, g, or t
  misc_feature (3435)..(3436): n is a, c, g, or t
  misc_feature (3438)..(3439): n is a, c, g, or t
  misc_feature (3441)..(3441): n is a, c, g, or t
  misc_feature (3444)..(3445): n is a, c, g, or t
  misc_feature (3447)..(3451): n is a, c, g, or t
  misc_feature (3453)..(3454): n is a, c, g, or t
  misc_feature (3456)..(3458): n is a, c, g, or t
  misc_feature (3461)..(3464): n is a, c, g, or t
  misc_feature (3467)..(3467): n is a, c, g, or t
  misc_feature (3469)..(3469): n is a, c, g, or t
  misc_feature (3473)..(3473): n is a, c, g, or t
  misc_feature (3475)..(3483): n is a, c, g, or t
  misc_feature (3485)..(3487): n is a, c, g, or t
  misc_feature (3491)..(3491): n is a, c, g, or t
  misc_feature (3493)..(3495): n is a, c, g, or t
  misc_feature (3497)..(3499): n is a, c, g, or t
  misc_feature (3501)..(3502): n is a, c, g, or t
  misc_feature (3505)..(3507): n is a, c, g, or t
  misc_feature (3509)..(3514): n is a, c, g, or t
  misc_feature (3517)..(3517): n is a, c, g, or t
  misc_feature (3519)..(3519): n is a, c, g, or t
  misc_feature (3521)..(3521): n is a, c, g, or t
  misc_feature (3523)..(3524): n is a, c, g, or t
  misc_feature (3527)..(3528): n is a, c, g, or t
  misc_feature (3532)..(3532): n is a, c, g, or t
  misc_feature (3534)..(3534): n is a, c, g, or t
  misc_feature (3536)..(3536): n is a, c, g, or t
  misc_feature (3540)..(3540): n is a, c, g, or t
  misc_feature (3543)..(3543): n is a, c, g, or t
  misc_feature (3548)..(3548): n is a, c, g, or t
  misc_feature (3551)..(3551): n is a, c, g, or t
  misc_feature (3553)..(3555): n is a, c, g, or t
  misc_feature (3560)..(3560): n is a, c, g, or t
  misc_feature (3562)..(3562): n is a, c, g, or t
  misc_feature (3565)..(3565): n is a, c, g, or t
  misc_feature (3567)..(3568): n is a, c, g, or t
  misc_feature (3574)..(3579): n is a, c, g, or t
  misc_feature (3581)..(3582): n is a, c, g, or t
  misc_feature (3584)..(3585): n is a, c, g, or t
  misc_feature (3587)..(3587): n is a, c, g, or t
  misc_feature (3592)..(3593): n is a, c, g, or t
  misc_feature (3596)..(3597): n is a, c, g, or t
  misc_feature (3601)..(3601): n is a, c, g, or t
  misc_feature (3605)..(3605): n is a, c, g, or t
  misc_feature (3607)..(3607): n is a, c, g, or t
  misc_feature (3609)..(3612): n is a, c, g, or t
  misc_feature (3614)..(3614): n is a, c, g, or t
  misc_feature (3617)..(3617): n is a, c, g, or t
  misc_feature (3620)..(3620): n is a, c, g, or t
  misc_feature (3623)..(3624): n is a, c, g, or t
  misc_feature (3626)..(3627): n is a, c, g, or t
  misc_feature (3629)..(3629): n is a, c, g, or t
  misc_feature (3632)..(3632): n is a, c, g, or t
  misc_feature (3636)..(3636): n is a, c, g, or t
  misc_feature (3638)..(3638): n is a, c, g, or t
  misc_feature (3643)..(3646): n is a, c, g, or t
  misc_feature (3651)..(3651): n is a, c, g, or t
  misc_feature (3654)..(3654): n is a, c, g, or t
  misc_feature (3657)..(3659): n is a, c, g, or t
  misc_feature (3661)..(3662): n is a, c, g, or t
  misc_feature (3664)..(3664): n is a, c, g, or t
  misc_feature (3667)..(3668): n is a, c, g, or t
  misc_feature (3671)..(3671): n is a, c, g, or t
  misc_feature (3676)..(3676): n is a, c, g, or t
  misc_feature (3679)..(3680): n is a, c, g, or t
  misc_feature (3683)..(3683): n is a, c, g, or t
  misc_feature (3686)..(3687): n is a, c, g, or t
  misc_feature (3689)..(3691): n is a, c, g, or t
  misc_feature (3695)..(3698): n is a, c, g, or t
  misc_feature (3702)..(3703): n is a, c, g, or t
  misc_feature (3706)..(3708): n is a, c, g, or t
  misc_feature (3711)..(3714): n is a, c, g, or t
  misc_feature (3718)..(3719): n is a, c, g, or t
  misc_feature (3724)..(3724): n is a, c, g, or t
  misc_feature (3727)..(3728): n is a, c, g, or t
  misc_feature (3730)..(3730): n is a, c, g, or t
  misc_feature (3736)..(3737): n is a, c, g, or t
  misc_feature (3741)..(3741): n is a, c, g, or t
  misc_feature (3744)..(3744): n is a, c, g, or t
  misc_feature (3748)..(3749): n is a, c, g, or t
  misc_feature (3751)..(3754): n is a, c, g, or t
  misc_feature (3756)..(3756): n is a, c, g, or t
  misc_feature (3758)..(3758): n is a, c, g, or t
  misc_feature (3763)..(3763): n is a, c, g, or t
  misc_feature (3765)..(3765): n is a, c, g, or t
  misc_feature (3770)..(3770): n is a, c, g, or t
  misc_feature (3773)..(3774): n is a, c, g, or t
  misc_feature (3779)..(3781): n is a, c, g, or t
  misc_feature (3785)..(3785): n is a, c, g, or t
  misc_feature (3787)..(3789): n is a, c, g, or t
  misc_feature (3792)..(3793): n is a, c, g, or t
  misc_feature (3795)..(3795): n is a, c, g, or t
  misc_feature (3797)..(3797): n is a, c, g, or t
  misc_feature (3800)..(3802): n is a, c, g, or t
  misc_feature (3804)..(3805): n is a, c, g, or t
  misc_feature (3810)..(3811): n is a, c, g, or t
  misc_feature (3814)..(3814): n is a, c, g, or t
  misc_feature (3816)..(3816): n is a, c, g, or t
  misc_feature (3819)..(3819): n is a, c, g, or t
  misc_feature (3822)..(3822): n is a, c, g, or t
  misc_feature (3824)..(3826): n is a, c, g, or t
  misc_feature (3834)..(3837): n is a, c, g, or t
  misc_feature (3839)..(3841): n is a, c, g, or t
  misc_feature (3843)..(3843): n is a, c, g, or t
  misc_feature (3845)..(3846): n is a, c, g, or t
  misc_feature (3848)..(3848): n is a, c, g, or t
  misc_feature (3852)..(3852): n is a, c, g, or t
  misc_feature (3854)..(3855): n is a, c, g, or t
  misc_feature (3858)..(3862): n is a, c, g, or t
  misc_feature (3865)..(3867): n is a, c, g, or t
  misc_feature (3869)..(3869): n is a, c, g, or t
  misc_feature (3871)..(3871): n is a, c, g, or t
  misc_feature (3875)..(3876): n is a, c, g, or t
  misc_feature (3878)..(3878): n is a, c, g, or t
  misc_feature (3880)..(3881): n is a, c, g, or t
  misc_feature (3888)..(3888): n is a, c, g, or t
  misc_feature (3890)..(3890): n is a, c, g, or t
  misc_feature (3893)..(3894): n is a, c, g, or t
  misc_feature (3896)..(3900): n is a, c, g, or t
  misc_feature (3902)..(3902): n is a, c, g, or t
  misc_feature (3908)..(3909): n is a, c, g, or t
  misc_feature (3911)..(3911): n is a, c, g, or t
  misc_feature (3915)..(3917): n is a, c, g, or t
  misc_feature (3920)..(3921): n is a, c, g, or t
  misc_feature (3923)..(3923): n is a, c, g, or t
  misc_feature (3925)..(3925): n is a, c, g, or t
  misc_feature (3929)..(3930): n is a, c, g, or t
  misc_feature (3932)..(3935): n is a, c, g, or t
  misc_feature (3940)..(3940): n is a, c, g, or t
  misc_feature (3944)..(3945): n is a, c, g, or t
  misc_feature (3948)..(3948): n is a, c, g, or t
  misc_feature (3950)..(3955): n is a, c, g, or t
  misc_feature (3957)..(3957): n is a, c, g, or t
  misc_feature (3960)..(3960): n is a, c, g, or t
  misc_feature (3962)..(3962): n is a, c, g, or t
  misc_feature (3964)..(3964): n is a, c, g, or t
  misc_feature (3966)..(3966): n is a, c, g, or t
  misc_feature (3971)..(3971): n is a, c, g, or t
  misc_feature (3974)..(3974): n is a, c, g, or t
  misc_feature (3980)..(3980): n is a, c, g, or t
  misc_feature (3983)..(3983): n is a, c, g, or t
  misc_feature (3985)..(3986): n is a, c, g, or t
  misc_feature (3989)..(3989): n is a, c, g, or t
  misc_feature (3992)..(3992): n is a, c, g, or t
  misc_feature (3994)..(3994): n is a, c, g, or t
  misc_feature (3996)..(3996): n is a, c, g, or t
  misc_feature (3998)..(3999): n is a, c, g, or t
ntannttnnatnntanngnannnnntnnnnnngnannnngnnnnnnnnnannaacaannnnnntanannncnnncnnncnnnnngntttnanntaananannanngnnnnnnnnntnnncnnnacagnnnngnnannananacannncnnnntnnnntngnangnnnngttnnnnnnnnannnnannnnancnnnnngnnnnnnnnttnnntntntnnnnnannncagnncannnnannatnntntnntngannnaaananannaaanntncnnnnannnnnnnttnnntttnnnnnnannnnannnnnnncncnnnnnnnnnnanaanagaaannannnnanngnaaannnnnnnngcnnnncnnaacnnaannnnctncnnnntannnnnanngnannnnaanaagaananannnacnnnannntntnnnnaananagnnnagngnannanannaannannnnngngnnnnnntnncnnngnagnnannanaaacnnnnnnnnaaaanaanaaannaannaanntnnngtnnannnannnnntnntnannannnnnnnncnnatnnangnntntntnnaaaaaaaaananncnannnnaanaanaanaaaaanannnngggnncnnnnangnnnnntnaaanaanncnaacanaatntnancnnaanantnngnnnanaanannnnnnnnttnnnggnnanantntnganntnggtntttnncnnncncnnaannnntnnncnntngngnaagnnnaagnntnanntnttnnanaantttcncnaannnnanncccncngntttnnaannttnngnnnnanaaaanntttntnnnngnnnanaanangcgnganannnnntnnanntnnangnnaanaaangnnnntnnnaaanaantnngnttngnncnnaannnnnanannnnnnnttnngnnttnaaaaanaaannnnnnnaaannttntnnaaannnggnnnnaantnaaannnatntntntttttnaangggnnttntnttntnnanangnnnnangganaanttttnttntnaaantngncnnaananntnnaanantnngnaangnnagnnnaannncnaaannnggnggnaaannnannnnttntntnnnnnncncnaaaaaanaaanngtnnaaanntntnnaannnaaanttnnnncntnnggnnnttntttatanancctcnnngtaggtacgtgtaccaaaagagaaacaacgaaataatatttaaaagaagcaataatgccnaaacaaaaaacaaaatctagtgcaaagaagcgtttcaagctaacaggtactggtaaaatcaaaagaaagcacgcttttaagagtcacatcttaacaaagaagtctaaaaaacgtaagcttaaattaactcacgatggtttggtagacaaatctgangagagtaatgtaaaacaaatgcttcgaatgaagtaattgctttgcggttaactaaattttataaccctggagttaggccaatataaaagaactnacacaaatgagtcgcctgctacaaaaaacaattaaattatgccaagatcagtaaacagcgttgccaaaagagcacgtagaaaaaaagtattaaaacaagccaaaggttactttggaagaagaaagaatgtttggacggtagccaaaaatgcagtagacaaagcaatgtcttactcatacagagaccgtagaaacaaaaagagaacttttagagcattgtggatcacgcgtatcaacgcaggtgcacgccaacacggaatgtcttactctcaatttatgggagggatgaaaacagcaggaattgaattgaaccgtaaggttcttgcagatttagcaatgaatcatccagaagcttttgaagcaattgtaaagaaagtaaaataagacaatccaataatcatattatttcgtagtaaaaatcccgttgcaaatgcaacgggatttttttatntnctntacctaaaaannnngnnnnnnaaaaaannnncnnnnnnnanncnnnnnngnnnntttnnttnnnannnnnnaaagtgtnttacattttattaattctatctatcaaggctcttcctttagcttcaagctcttgatttactgctttaaaatgcgctttggcattctcaaggtctctttggttaacctttacaatcaattcatcaaatcctacaattgcatcatcaatgatagattgagactctttggtttcttttgaagggtttgttaactcccaaatgtatacagcttcaatgatatctcccattacgtagttgatatctttttttaaatctctcttatttgccataatgtgttccgcnaagtgcggtttttaaattactaattaataagttgcaaagttacaaactcttanacaatataaccttgcaaaagtaaagcagttttttctttaattttcntaccataacaacnccaattagacatcctctggcctacnnntcaaaaaannnnnnnnnnnttttttntntnnntnnnnntnnnncnnnnnannnnnngnntnnnnnnnaannnnnctnnnnnnnnnnnnnntnannnnnnnnnnnnnnnannnnatnnnnnnnntnnaatnttatnnnaaaccnnannntgnnntgnnntngntttnntntnnnnnntgncntnnnntncnnnnnnncnntncnntncnnnnnnnnnanctcgnnnnnnnnnnnnnnnnnnncnnnantntnnnnncnnnnnntnntnnnnnncannnnntgntnnnnnantnnnnnannanncnntgnntnnnananaannnnnntnnnnnnngtnngntnnnnaacaaancccntctnttnntntnntnttnnngnncnnnnntntanantnnncnnnncntnnnnnnnnnnnnnnnnnnnngnnnnnnnnnnnannnnaggngnntnntntttntgnannnngnnnnnnnnnnanannannnnnnnnntntnatncaananaaanananaaanngntntnnntaannttnntttnnnntnnnnntnnntttntnnnnnnannnnnnttnncntntnnttttnnnnnnnnnnnnnnnnnnnntntnntntnanntaanntaanntnntttnnnncaanannanaaaannntanngnnanngnanannnnaaaaaanntaaantaaanncaangcannntanntnaancannnnannaanncnntnnaanaaanannancnnaannnttnntnnannnataanaannaaaaaaannaaannnnnnnannccannccnangcaaannnntnnnnntnngnnnnnaaaaaannnnnnnnnntncnannanaaanaannantannannnnnanncnnaannntaanannnntnnnntntnnnnnntnncnntngcnctngnncnngnnncngnngcnnttgcatttgnnttngntnnagntnnanncnnanntntanntnnnnntnntnnnttnnnnatngntatngnnnnnnnnntnnntggngnnngnnngnntannntnnnnnnagnancngnngcnntggnantngtantgnttttnctnannnaaaangnaantnnggttgnnnnnncnntnncngttcnnatnnaaancctngncnnnnantgnttnttnntnncnttnttantngttgnnnnaattnaanttnnngnngntannttnaaatnagnnaanttnntnnncctnnnncccnnccnnntannnntggnntttgnaanngntttggnnatcntantttnntnnnntnancttgntnttttnaannaaaannnaaangnnnaanngnantgnnngnntgggnntancnttnggntnnngttagggnnnntnnncntnncnatgncnnttnnnnntgnnntncntaanntnannaaaaaantnccnncnnnnntnattgcnntngtgnnngtnncngnaatnntnnnntttgnaaanntanannnnnntnccntngncncattnatnaaaganggngnnggngangnantnna

SEQ ID NO: 1362 - DNA, 4000 bp, Escherichia coli
  misc_feature (2189)..(2189): n is a, c, g, or t
  misc_feature (3703)..(3703): n is a, c, g, or t
ggaaagtccgtatggttcagttaaatgaatcttacagcaacgaaagtgaattgaaaaacctaatcataactttagagcgcgcacctaagcaaaaagcagttttaatggcgcttttaagtagtggaaattccaaggatgtttggcaggaagtcgaacatttaaaaaaacaggcagctgtaggaagtgctcctttcaaggcccttattgataggggtgtactcaaggaagagtttcaagaaaaaaatcgagtattaattcaatcaactccagatgagaataaggccaaaaccctttcacctgctcaaaatagagcctttattgaattgaatgaaaaattgaaaaaggatagggtagtattgtttgaaggggttactgcttcaggaaaaacagaggtctacattcgtttaatcgaagaagaattaaaaaagggcaagcaagtactctacctcttgcccgaaatttcacttacttcacagattgtttcacgcttatccgcacgttttggaagtcgggttttggtttatcattcgcgtttttccattcacgaaagaactgaagtttggaatcgagttttagaaggaaatcaaaaaggacaagttgtagtaggagcacgttctgcagtgttattgccttttaaagatatagggttagtgatagtagatgaagaacacgaaaactcctataagcagtttgaccctgcaccgagatatcaagcaagggacagtgctatttatctcgctaatgcaatgaatacttctgtggttttgggatctgcaactccctcgatggaaaccgctgaaaacgctcgaaatggaaaatacggctgggttaaattaacagcgcgttatggtggagtagctctacccaacatccagttaatcgaccttaaggaagctcatcgtaaaaagacaatgaaagaaatgttttcatttcaactgattgaagctattcaaaatacgttagagctaggtaaacaggttattttatttcaaaacagaagaggatatgcaccgataatggagtgtgaaagttgtggtcattcaccccagtgcacccaatgcgatgtctctatgacctatcatcaagcccaaaatcaattgaggtgtcattattgtgggtataacgttccaatgcccacccagtgtcatgcttgtggaatgccaacactatctactaaaggagtaggtactcaacagattgaagaacaaattcaaaaatattttcctcaagcctccgtgaggagaatggattgggatagtactagaggaaaatggagttttgatcaaattattgaagattttgacaaagaacgcatacaaatactggtgggtacccagatggtggtcaaagggttggattttaaaaatgtattattagtgggtgtgatcaatgcagatcatgttttgaatttacccgattttagagcacatgaaagaagttatcaaatgctctgtcaagttgcaggtcgtgctggtagatccgatcaaaaaggacaagtcttaatacagacctttcagccaagtcatccaatattacaacaagtaattaaccacgattttgatgctttatttgaagtgcaaaagaatgaacgaaagcaatttcgctatcctccttactttagaatgatacgtataactttcaaaagccgtcaatttgaaacagtaacaacagcctcagattggttttccagcgtaattaagcagtcttataaaggtactgtgcttggtcctgtattgcctcctgtgtctcgagtacgcaatcaatacatcaaacatttgataataaaagtagatcatcagctcaatacttcaacggtaaagaagttagtaaacaaaaccttcaagagttttcaggcgatagcggcttttcggtcggttcgggtaaattttgatgtagatccgtattaaaaataaaaaggaggaataaattcctcctttttgccccaaatcttaccatgaacttaacctacttatgttcaggtgatgtaaatgtagaataatattttgaaaaagcaaggacaataatatattaaataaaaaggaggaataaattcctcctttttgccccaaatcttaccatgaacttaacctacttatgttcaggtgatgtaaatgtagaataatattttttaaaagcaagaaaatatattaaataaatttttaaaatattcagcacaatttttattcaanaactcgtcctgtttttagattttatagaatgaaataatctttttattttattttgctttatcagaagagaactgtacttttgcagtcctaaaatataatatatgaatcattacgaatctgttttcattttaaatcccgttctatctgagactcagatagaggaagcagttcaaaagtatgttagctttattaaagcccaagaggggtcattgacccatcaagaaaattggggtcttaaaaagcttgcttatcctattgaaaataagaaaagcggcttctatcatcttcttgaatttactgctcctaacgaaactgtatcagctttagagctcgaatttcgcagagacgaacgcgtcatgcgctacctcactgtgaagttggacaagcacgcgcaagcatgggcggaaaaaagaaaaaaaagaaacaaagcaaaagcataagcaatgtctaagatagaagaacaaaacactggaaaaaaagaaggggaaattcgataccttaccccgttaaatatcgatacttcttcacagaaaaaatactgtcgtttcaaacgctcaggtattaagtatgtggactacaaggaccctgattttttattgaaatttgtaaatgagcaaggtaaaattttacctagaagacttaccggtacttctttaaaataccaacgtaaggtttctgtagctgttaaaagagcacgtcatctggctttaatgccttatgtagctgatatgttaaaataataaagcactcatcatggaattaatattaaaagaagacgtacaaaatcttgggtttaaagacgacatcgtgagtgttaaaaacggttacggtagaaattttttaattccccaagggaaagcagttatcgcaacaactactgctcgtaaggtgctggctgaaaatttaaaacaacgtgcttttaaagaacagtccatcatagatgaagcgaataaaagagccgatgaaatcaaagcccttgaaattaagttggcttctaaagtagggtcaggagacaaattgtttggatcaatcaccaatgcagatttagctcaagccatcagtgcaaagactagtgaacttgacaaaaagtttatttctcttcctggtaaatccatcaaacgcctcggtaaatacgttgcccaagtgaggttacaccgagaggtaagttttgaactaccatttgaaatagtggcagacactacagcctaaaactatcaaaacccactctcaagtgggtttttttatatccctttcctatgcgataccacaaactatcagaagcacagtttcgtgagatgcacaaagaattttctatatttttagcagctcaagggattaataaaaaagaatgggataaaataaaagaggagtcactggaaaaggttgatcatctcttgaatgcatttagtgatatggtatgggataggattataagtacttgtgcctatctagaattctcaaccccagatcagctatacctttttcatactcaagaaaagagtgcaacagtgttngtagtaaaaataagccctcaattcacagatttaactactgaagcaggttttgagatactcttgaatcagcttcattctgataaagtaacactgtacaccgcatcaaagccctacactcccagtagaaacgaatttatatatagttatttaaaaaagggggctaccctttcaaagggtgggcgctatagtcgtttacaaagttatttttccaattcgtcaaaataaaagatatttgtagaacaaaatacactatggcaattaaaccagcgacaacaaaagggacgcgtgatttttcat

SEQ ID NO: 1363 - DNA, 4000 bp, Escherichia coli
  misc_feature (1)..(1438): n is a, c, g, or t
  misc_feature (1484)..(1484): n is a, c, g, or t
  misc_feature (1489)..(1489): n is a, c, g, or t
  misc_feature (1497)..(1502): n is a, c, g, or t
  misc_feature (1507)..(1507): n is a, c, g, or t
  misc_feature (1509)..(1510): n is a, c, g, or t
  misc_feature (1512)..(1513): n is a, c, g, or t
  misc_feature (1515)..(1518): n is a, c, g, or t
  misc_feature (1520)..(1522): n is a, c, g, or t
  misc_feature (1524)..(1530): n is a, c, g, or t
  misc_feature (1532)..(1533): n is a, c, g, or t
  misc_feature (1536)..(1536): n is a, c, g, or t
  misc_feature (1538)..(1542): n is a, c, g, or t
  misc_feature (1544)..(1548): n is a, c, g, or t
  misc_feature (1551)..(1555): n is a, c, g, or t
  misc_feature (1985)..(1985): n is a, c, g, or t
  misc_feature (1992)..(1992): n is a, c, g, or t
  misc_feature (1996)..(1996): n is a, c, g, or t
nnnnnnnnnnnnnnnnnnnnnnnnnnnnnnnnnnnnnnnnnnnnnnnnnnnnnnnnnnnnnnnnnnnnnnnnnnnnnnnnnnnnnnnnnnnnnnnnnnnnnnnnnnnnnnnnnnnnnnnnnnnnnnnnnnnnnnnnnnnnnnnnnnnnnnnnnnnnnnnnnnnnnnnnnnnnnnnnnnnnnnnnnnnnnnnnnnnnnnnnnnnnnnnnnnnnnnnnnnnnnnnnnnnnnnnnnnnnnnnnnnnnnnnnnnnnnnnnnnnnnnnnnnnnnnnnnnnnnnnnnnnnnnnnnnnnnnnnnnnnnnnnnnnnnnnnnnnnnnnnnnnnnnnnnnnnnnnnnnnnnnnnnnnnnnnnnnnnnnnnnnnnnnnnnnnnnnnnnnnnnnnnnnnnnnnnnnnnnnnnnnnnnnnnnnnnnnnnnnnnnnnnnnnnnnnnnnnnnnnnnnnnnnnnnnnnnnnnnnnnnnnnnnnnnnnnnnnnnnnnnnnnnnnnnnnnnnnnnnnnnnnnnnnnnnnnnnnnnnnnnnnnnnnnnnnnnnnnnnnnnnnnnnnnnnnnnnnnnnnnnnnnnnnnnnnnnnnnnnnnnnnnnnnnnnnnnnnnnnnnnnnnnnnnnnnnnnnnnnnnnnnnnnnnnnnnnnnnnnnnnnnnnnnnnnnnnnnnnnnnnnnnnnnnnnnnnnnnnnnnnnnnnnnnnnnnnnnnnnnnnnnnnnnnnnnnnnnnnnnnnnnnnnnnnnnnnnnnnnnnnnnnnnnnnnnnnnnnnnnnnnnnnnnnnnnnnnnnnnnnnnnnnnnnnnnnnnnnnnnnnnnnnnnnnnnnnnnnnnnnnnnnnnnnnnnnnnnnnnnnnnnnnnnnnnnnnnnnnnnnnnnnnnnnnnnnnnnnnnnnnnnnnnnnnnnnnnnnnnnnnnnnnnnnnnnnnnnnnnnnnnnnnnnnnnnnnnnnnnnnnnnnnnnnnnnnnnnnnnnnnnnnnnnnnnnnnnnnnnnnnnnnnnnnnnnnnnnnnnnnnnnnnnnnnnnnnnnnnnnnnnnnnnnnnnnnnnnnnnnnnnnnnnnnnnnnnnnnnnnnnnnnnnnnnnnnnnnnnnnnnnnnnnnnnnnnnnnnnnnnnnnnnnnnnnnnnnnnnnnnnnnnnnnnnnnnnnnnnnnnnnnnnnnnnnnnnnnnnnnnnnnnnnnnnnnnnnnnnnnnnnnnnnnnnnnnnnnnnnnnnnnnnnnnnnnnnnnnnnnnnnnnnnnnnnnnnnnnnnnnnnnnnnnnnnnnnnnnnnnnnnnnnnnnnnnnnnnnnnnnnnnnnnnnnnnnnnnnnnnnnnnnnnnnnnnnnnnnnnnnnnnnnnnnnnnnnnnnnnnnnnnnnnnnnnnnnnnnnnnnnnnnnnnnnnnnnnnnnnnnnnnnnnnnnnnnnnnnnnnnnnnnnnnnnnnnnnnnnnnnnnnnnnnnnnnnnnnnnnccagcaataggaggaatgcttcgaagacatctcttccctaataaanttttnattaaaannnnnnaattnannanntnnnntnnnannnnnnntnnttnannnnntnnnnnatnnnnnaaaaaaaaaaaaaaaaaaaaaaaaaaaaaaaaaatcatgacaatatcactaatattaaatatttcctattttctccacaactttaaattactataattaaaatattatttctattattattatagaataaaaataacaaaataaataaattttatttaaaacttttttttttttaaaaattattaattttttttatttatttaatattctttttttacacatttataaatttaaaaattaaataataatgattaattacgagatacaaattatgaaaaaaaaaatgtatattctatttaaaattatttacttcgaaattataattagattataaaaataattattatacaaaattattttttctaaataaaaatataaaaaataaacataattatattattattaaaaattttgaaatttcgttgttttntttttantttnattttttaaaaaaaaaaaaaaaaaaaaaaaaaaaggaatgcttggattttgtttttttttataaatattaaattctaatcattttataaaaatacatataagttaaggataaaattaaactactttttcttctctttgaatgaattaattttatattttttttttctttatattcttttttttaaattgtaataattaaattatcaaattccatttaaatttttctgaatttttttgttattaataatttttagaatttcttttattgacttcattttatacagtgaattataaaaattctttaaattttatttcacctttttttcattttctttcttcttcttccttgctgaaaataaaattaagtgaaaaacaagatagacaatgaaatagctctttttctttttttttcgtaatattttttattgaaatactaattatttaatacttctaaatttttcaaaaattttctttggaatagataattcattttttttctttttttttgccttcattcaaatcaaaagcttcttttgtactttctttaaaagaataaataatttaatgaatataaaaatttaattcattaatacgaagaactcgaatgtaaaaaaatatatatatatttttttaaaacaagtttctcctaaaaataaattaaatgcttaaatggttgttttcctttatcatatttattgattttattcctttcctttctttttctttcttgttttaaaaatcttttgataaaaaaattttattcttcgaatgtgaaaacattttttctaaaaaaaaacttatattaataaaattaatattataattttatcttattcataataaattataaattatgtcataaaagattttttgtgtattttttttttgttttataattttttaaattatactttttttacaaattagtttgtaaaaaaataagcttttaataattatgacgttatatttaaacaactattaactactaatttaagtttctttaaaaaaaatgaaaaattaaaaatgtcatggttttttaataaataataactatattaatatttataatattcaaaaaaaataattaaatagtttaaattcatttataaaataatatctaatttttataaataattctaataaaatattatttaatttttttcttcctttgttcactcctatttcgttttattttattaaataatctatattatttaattaataatttaatgtgaaacaaagaaataaaaaagttatgatataaatatattactttttaaaataaaaactattatattttttatatcttttctaattctatgttaaatatataactactaaatgattgtaaatttgaatatctataaagaaaaaatgcattgtaaaaaaattattaaatagtactttttcttttttctttaatccttctttttgtaatattaaaaaaaactaatcatgggtttatatgggtttaaattaaataaaatagttttaaaatatgattaaatgttttgcgcaattaataatttttcataaattaaatatgtatatataggaatcccatattggaattataaataaattaaaaacccttccccacactttaaatttaattttttaataatattttaaaaggatattggaaaaaaaaacttttaaaacgttaaacgtaaaataatttaaaataacttataaatattaaataagaaaaagagaaaaactaaatattgttttttttctctttttctccccttgattttttttaaataatttaatgacggtaagtaacagtaccacgagtgaaaatgaataaatcatccataactctaagacccttgttacgaattaaaggagtagtaccaacagtgaatacatcatccttttggttagctgggaaagtctttggacgtaattgaccagcagagttgtatggaccacaaatttgaccactagtagtcatacgaacttcatctaaaagctttaaacgaagaagttgagagataa

SEQ ID NO: 1364 - DNA, 4000 bp, Escherichia coli
  misc_feature (1)..(14): n is a, c, g, or t
  misc_feature (16)..(17): n is a, c, g, or t
  misc_feature (19)..(20): n is a, c, g, or t
  misc_feature (22)..(23): n is a, c, g, or t
  misc_feature (25)..(26): n is a, c, g, or t
  misc_feature (28)..(34): n is a, c, g, or t
  misc_feature (37)..(38): n is a, c, g, or t
  misc_feature (40)..(47): n is a, c, g, or t
  misc_feature (49)..(50): n is a, c, g, or t
  misc_feature (53)..(53): n is a, c, g, or t
  misc_feature (56)..(56): n is a, c, g, or t
  misc_feature (58)..(59): n is a, c, g, or t
  misc_feature (61)..(62): n is a, c, g, or t
  misc_feature (64)..(65): n is a, c, g, or t
  misc_feature (67)..(69): n is a, c, g, or t
  misc_feature (72)..(77): n is a, c, g, or t
  misc_feature (79)..(79): n is a, c, g, or t
  misc_feature (82)..(84): n is a, c, g, or t
  misc_feature (86)..(89): n is a, c, g, or t
  misc_feature (91)..(92): n is a, c, g, or t
  misc_feature (94)..(94): n is a, c, g, or t
  misc_feature (97)..(98): n is a, c, g, or t
  misc_feature (100)..(101): n is a, c, g, or t
  misc_feature (103)..(103): n is a, c, g, or t
  misc_feature (105)..(109): n is a, c, g, or t
  misc_feature (112)..(118): n is a, c, g, or t
  misc_feature (121)..(122): n is a, c, g, or t
  misc_feature (124)..(125): n is a, c, g, or t
  misc_feature (127)..(127): n is a, c, g, or t
  misc_feature (129)..(131): n is a, c, g, or t
  misc_feature (133)..(133): n is a, c, g, or t
  misc_feature (136)..(136): n is a, c, g, or t
  misc_feature (139)..(140): n is a, c, g, or t
  misc_feature (142)..(144): n is a, c, g, or t
  misc_feature (146)..(146): n is a, c, g, or t
  misc_feature (148)..(148): n is a, c, g, or t
  misc_feature (150)..(152): n is a, c, g, or t
  misc_feature (154)..(155): n is a, c, g, or t
  misc_feature (157)..(158): n is a, c, g, or t
  misc_feature (160)..(167): n is a, c, g, or t
  misc_feature (169)..(170): n is a, c, g, or t
  misc_feature (172)..(176): n is a, c, g, or t
  misc_feature (178)..(178): n is a, c, g, or t
  misc_feature (180)..(181): n is a, c, g, or t
  misc_feature (183)..(188): n is a, c, g, or t
  misc_feature (190)..(192): n is a, c, g, or t
  misc_feature (194)..(196): n is a, c, g, or t
  misc_feature (198)..(198): n is a, c, g, or t
  misc_feature (200)..(200): n is a, c, g, or t
  misc_feature (202)..(202): n is a, c, g, or t
  misc_feature (204)..(206): n is a, c, g, or t
  misc_feature (208)..(213): n is a, c, g, or t
  misc_feature (220)..(222): n is a, c, g, or t
  misc_feature (224)..(225): n is a, c, g, or t
  misc_feature (227)..(228): n is a, c, g, or t
  misc_feature (230)..(230): n is a, c, g, or t
  misc_feature (233)..(234): n is a, c, g, or t
  misc_feature (236)..(237): n is a, c, g, or t
  misc_feature (239)..(239): n is a, c, g, or t
  misc_feature (245)..(246): n is a, c, g, or t
  misc_feature (248)..(248): n is a, c, g, or t
  misc_feature (250)..(253): n is a, c, g, or t
  misc_feature (256)..(259): n is a, c, g, or t
  misc_feature (262)..(262): n is a, c, g, or t
  misc_feature (264)..(266): n is a, c, g, or t
  misc_feature (269)..(272): n is a, c, g, or t
  misc_feature (274)..(274): n is a, c, g, or t
  misc_feature (276)..(278): n is a, c, g, or t
  misc_feature (280)..(282): n is a, c, g, or t
  misc_feature (284)..(285): n is a, c, g, or t
  misc_feature (287)..(288): n is a, c, g, or t
  misc_feature (290)..(291): n is a, c, g, or t
  misc_feature (293)..(300): n is a, c, g, or t
  misc_feature (302)..(303): n is a, c, g, or t
  misc_feature (305)..(305): n is a, c, g, or t
  misc_feature (310)..(310): n is a, c, g, or t
  misc_feature (312)..(313): n is a, c, g, or t
  misc_feature (315)..(317): n is a, c, g, or t
  misc_feature (322)..(328): n is a, c, g, or t
  misc_feature (331)..(337): n is a, c, g, or t
  misc_feature (339)..(341): n is a, c, g, or t
  misc_feature (344)..(344): n is a, c, g, or t
  misc_feature (346)..(346): n is a, c, g, or t
  misc_feature (348)..(351): n is a, c, g, or t
  misc_feature (354)..(362): n is a, c, g, or t
  misc_feature (365)..(369): n is a, c, g, or t
  misc_feature (371)..(379): n is a, c, g, or t
  misc_feature (384)..(387): n is a, c, g, or t
  misc_feature (389)..(390): n is a, c, g, or t
  misc_feature (392)..(393): n is a, c, g, or t
  misc_feature (395)..(404): n is a, c, g, or t
  misc_feature (406)..(412): n is a, c, g, or t
  misc_feature (415)..(416): n is a, c, g, or t
  misc_feature (418)..(419): n is a, c, g, or t
  misc_feature (421)..(430): n is a, c, g, or t
  misc_feature (432)..(433): n is a, c, g, or t
  misc_feature (435)..(435): n is a, c, g, or t
  misc_feature (437)..(438): n is a, c, g, or t
  misc_feature (442)..(442): n is a, c, g, or t
  misc_feature (444)..(449): n is a, c, g, or t
  misc_feature (451)..(451): n is a, c, g, or t
  misc_feature (456)..(459): n is a, c, g, or t
  misc_feature (464)..(473): n is a, c, g, or t
  misc_feature (475)..(479): n is a, c, g, or t
  misc_feature (481)..(483): n is a, c, g, or t
  misc_feature (489)..(495): n is a, c, g, or t
  misc_feature (497)..(498): n is a, c, g, or t
  misc_feature (500)..(500): n is a, c, g, or t
  misc_feature (502)..(503): n is a, c, g, or t
  misc_feature (509)..(513): n is a, c, g, or t
  misc_feature (515)..(516): n is a, c, g, or t
  misc_feature (518)..(518): n is a, c, g, or t
  misc_feature (520)..(520): n is a, c, g, or t
  misc_feature (522)..(522): n is a, c, g, or t
  misc_feature (525)..(525): n is a, c, g, or t
  misc_feature (528)..(529): n is a, c, g, or t
  misc_feature (531)..(532): n is a, c, g, or t
  misc_feature (534)..(535): n is a, c, g, or t
  misc_feature (538)..(538): n is a, c, g, or t
  misc_feature (540)..(544): n is a, c, g, or t
  misc_feature (546)..(548): n is a, c, g, or t
  misc_feature (551)..(551): n is a, c, g, or t
  misc_feature (553)..(553): n is a, c, g, or t
  misc_feature (555)..(557): n is a, c, g, or t
  misc_feature (559)..(561): n is a, c, g, or t
  misc_feature (564)..(568): n is a, c, g, or t
  misc_feature (571)..(571): n is a, c, g, or t
  misc_feature (573)..(578): n is a, c, g, or t
  misc_feature (581)..(592): n is a, c, g, or t
  misc_feature (594)..(599): n is a, c, g, or t
  misc_feature (601)..(604): n is a, c, g, or t
  misc_feature (606)..(606): n is a, c, g, or t
  misc_feature (609)..(609): n is a, c, g, or t
  misc_feature (611)..(618): n is a, c, g, or t
  misc_feature (621)..(623): n is a, c, g, or t
  misc_feature (625)..(629): n is a, c, g, or t
  misc_feature (631)..(634): n is a, c, g, or t
  misc_feature (636)..(651): n is a, c, g, or t
  misc_feature (653)..(654): n is a, c, g, or t
  misc_feature (657)..(658): n is a, c, g, or t
  misc_feature (660)..(664): n is a, c, g, or t
  misc_feature (666)..(667): n is a, c, g, or t
  misc_feature (669)..(675): n is a, c, g, or t
  misc_feature (677)..(680): n is a, c, g, or t
  misc_feature (684)..(686): n is a, c, g, or t
  misc_feature (688)..(691): n is a, c, g, or t
  misc_feature (693)..(693): n is a, c, g, or t
  misc_feature (695)..(698): n is a, c, g, or t
  misc_feature (700)..(710): n is a, c, g, or t
  misc_feature (712)..(713): n is a, c, g, or t
  misc_feature (715)..(715): n is a, c, g, or t
  misc_feature (717)..(724): n is a, c, g, or t
  misc_feature (726)..(730): n is a, c, g, or t
  misc_feature (732)..(733): n is a, c, g, or t
  misc_feature (735)..(739): n is a, c, g, or t
  misc_feature (742)..(745): n is a, c, g, or t
  misc_feature (748)..(751): n is a, c, g, or t
  misc_feature (753)..(753): n is a, c, g, or t
  misc_feature (755)..(755): n is a, c, g, or t
  misc_feature (757)..(760): n is a, c, g, or t
  misc_feature (762)..(762): n is a, c, g, or t
  misc_feature (764)..(764): n is a, c, g, or t
  misc_feature (766)..(766): n is a, c, g, or t
  misc_feature (768)..(768): n is a, c, g, or t
  misc_feature (770)..(772): n is a, c, g, or t
  misc_feature (774)..(775): n is a, c, g, or t
  misc_feature (778)..(781): n is a, c, g, or t
  misc_feature (783)..(783): n is a, c, g, or t
  misc_feature (789)..(790): n is a, c, g, or t
  misc_feature (792)..(803): n is a, c, g, or t
  misc_feature (805)..(809): n is a, c, g, or t
  misc_feature (811)..(813): n is a, c, g, or t
  misc_feature (815)..(820): n is a, c, g, or t
  misc_feature (822)..(824): n is a, c, g, or t
  misc_feature (826)..(835): n is a, c, g, or t
  misc_feature (837)..(838): n is a, c, g, or t
  misc_feature (840)..(840): n is a, c, g, or t
  misc_feature (842)..(843): n is a, c, g, or t
  misc_feature (845)..(845): n is a, c, g, or t
  misc_feature (847)..(847): n is a, c, g, or t
  misc_feature (849)..(850): n is a, c, g, or t
  misc_feature (852)..(853): n is a, c, g, or t
  misc_feature (855)..(856): n is a, c, g, or t
  misc_feature (859)..(862): n is a, c, g, or t
  misc_feature (864)..(870): n is a, c, g, or t
  misc_feature (872)..(872): n is a, c, g, or t
  misc_feature (874)..(874): n is a, c, g, or t
  misc_feature (876)..(880): n is a, c, g, or t
  misc_feature (882)..(882): n is a, c, g, or t
  misc_feature (884)..(895): n is a, c, g, or t
  misc_feature (898)..(901): n is a, c, g, or t
  misc_feature (903)..(905): n is a, c, g, or t
  misc_feature (908)..(912): n is a, c, g, or t
  misc_feature (914)..(915): n is a, c, g, or t
  misc_feature (917)..(920): n is a, c, g, or t
  misc_feature (923)..(924): n is a, c, g, or t
  misc_feature (926)..(929): n is a, c, g, or t
  misc_feature (931)..(935): n is a, c, g, or t
  misc_feature (937)..(947): n is a, c, g, or t
  misc_feature (949)..(952): n is a, c, g, or t
  misc_feature (954)..(961): n is a, c, g, or t
  misc_feature (964)..(966): n is a, c, g, or t
  misc_feature (969)..(969): n is a, c, g, or t
  misc_feature (971)..(971): n is a, c, g, or t
  misc_feature (974)..(976): n is a, c, g, or t
  misc_feature (978)..(978): n is a, c, g, or t
  misc_feature (980)..(981): n is a, c, g, or t
  misc_feature (983)..(984): n is a, c, g, or t
  misc_feature (986)..(990): n is a, c, g, or t
  misc_feature (992)..(993): n is a, c, g, or t
  misc_feature (996)..(1004): n is a, c, g, or t
  misc_feature (1007)..(1007): n is a, c, g, or t
  misc_feature (1009)..(1011): n is a, c, g, or t
  misc_feature (1013)..(1013): n is a, c, g, or t
  misc_feature (1015)..(1015): n is a, c, g, or t
  misc_feature (1017)..(1022): n is a, c, g, or t
  misc_feature (1024)..(1024): n is a, c, g, or t
  misc_feature (1027)..(1027): n is a, c, g, or t
  misc_feature (1029)..(1029): n is a, c, g, or t
  misc_feature (1031)..(1031): n is a, c, g, or t
  misc_feature (1033)..(1035): n is a, c, g, or t
  misc_feature (1037)..(1037): n is a, c, g, or t
  misc_feature (1039)..(1039): n is a, c, g, or t
  misc_feature (1042)..(1047): n is a, c, g, or t
  misc_feature (1049)..(1050): n is a, c, g, or t
  misc_feature (1052)..(1056): n is a, c, g, or t
  misc_feature (1059)..(1065): n is a, c, g, or t
  misc_feature (1067)..(1068): n is a, c, g, or t
  misc_feature (1071)..(1072): n is a, c, g, or t
  misc_feature (1075)..(1075): n is a, c, g, or t
  misc_feature (1077)..(1079): n is a, c, g, or t
  misc_feature (1081)..(1082): n is a, c, g, or t
  misc_feature (1084)..(1084): n is a, c, g, or t
  misc_feature (1086)..(1087): n is a, c, g, or t
  misc_feature (1089)..(1090): n is a, c, g, or t
  misc_feature (1092)..(1094): n is a, c, g, or t
  misc_feature (1096)..(1096): n is a, c, g, or t
  misc_feature (1099)..(1102): n is a, c, g, or t
  misc_feature (1104)..(1104): n is a, c, g, or t
  misc_feature (1106)..(1113): n is a, c, g, or t
  misc_feature (1116)..(1116): n is a, c, g, or t
  misc_feature (1118)..(1123): n is a, c, g, or t
  misc_feature (1126)..(1126): n is a, c, g, or t
  misc_feature (1128)..(1134): n is a, c, g, or t
  misc_feature (1136)..(1137): n is a, c, g, or t
  misc_feature (1139)..(1139): n is a, c, g, or t
  misc_feature (1141)..(1145): n is a, c, g, or t
  misc_feature (1148)..(1148): n is a, c, g, or t
  misc_feature (1152)..(1153): n is a, c, g, or t
  misc_feature (1155)..(1166): n is a, c, g, or t
  misc_feature (1168)..(1170): n is a, c, g, or t
  misc_feature (1172)..(1172): n is a, c, g, or t
  misc_feature (1174)..(1174): n is a, c, g, or t
  misc_feature (1176)..(1178): n is a, c, g, or t
  misc_feature (1180)..(1181): n is a, c, g, or t
  misc_feature (1183)..(1183): n is a, c, g, or t
  misc_feature (1185)..(1188): n is a, c, g, or t
  misc_feature (1190)..(1190): n is a, c, g, or t
  misc_feature (1192)..(1195): n is a, c, g, or t
  misc_feature (1200)..(1201): n is a, c, g, or t
  misc_feature (1204)..(1205): n is a, c, g, or t
  misc_feature (1207)..(1207): n is a, c, g, or t
  misc_feature (1211)..(1216): n is a, c, g, or t
  misc_feature (1218)..(1222): n is a, c, g, or t
  misc_feature (1226)..(1228): n is a, c, g, or t
  misc_feature (1230)..(1230): n is a, c, g, or t
  misc_feature (1232)..(1232): n is a, c, g, or t
  misc_feature (1234)..(1235): n is a, c, g, or t
  misc_feature (1242)..(1243): n is a, c, g, or t
  misc_feature (1245)..(1250): n is a, c, g, or t
  misc_feature (1254)..(1256): n is a, c, g, or t
  misc_feature (1259)..(1260): n is a, c, g, or t
  misc_feature (1262)..(1262): n is a, c, g, or t
  misc_feature (1266)..(1268): n is a, c, g, or t
  misc_feature (1270)..(1272): n is a, c, g, or t
  misc_feature (1275)..(1275): n is a, c, g, or t
  misc_feature (1277)..(1277): n is a, c, g, or t
  misc_feature (1281)..(1282): n is a, c, g, or t
  misc_feature (1284)..(1287): n is a, c, g, or t
  misc_feature (1289)..(1289): n is a, c, g, or t
  misc_feature (1291)..(1294): n is a, c, g, or t
  misc_feature (1296)..(1298): n is a, c, g, or t
  misc_feature (1300)..(1300): n is a, c, g, or t
  misc_feature (1323)..(1323): n is a, c, g, or t
  misc_feature (1609)..(1609): n is a, c, g, or t
  misc_feature (2136)..(2136): n is a, c, g, or t
  misc_feature (2181)..(2181): n is a, c, g, or t
  misc_feature (2455)..(2455): n is a, c, g, or t
  misc_feature (2461)..(2461): n is a, c, g, or t
  misc_feature (2572)..(2572): n is a, c, g, or t
  misc_feature (2596)..(2596): n is a, c, g, or t
  misc_feature (2605)..(2605): n is a, c, g, or t
  misc_feature (2662)..(2662): n is a, c, g, or t
  misc_feature (2671)..(2671): n is a, c, g, or t
  misc_feature (2686)..(2686): n is a, c, g, or t
  misc_feature (2689)..(2689): n is a, c, g, or t
  misc_feature (2699)..(2699): n is a, c, g, or t
  misc_feature (2761)..(2761): n is a, c, g, or t
  misc_feature (2764)..(2764): n is a, c, g, or t
  misc_feature (2773)..(2773): n is a, c, g, or t
  misc_feature (2827)..(2827): n is a, c, g, or t
  misc_feature (2836)..(2836): n is a, c, g, or t
  misc_feature (2974)..(2974): n is a, c, g, or t
  misc_feature (2995)..(2995): n is a, c, g, or t
  misc_feature (3076)..(3076): n is a, c, g, or t
  misc_feature (3175)..(3175): n is a, c, g, or t
  misc_feature (3214)..(3214): n is a, c, g, or t
  misc_feature (3244)..(3245): n is a, c, g, or t
  misc_feature (3247)..(3247): n is a, c, g, or t
  misc_feature (3253)..(3253): n is a, c, g, or t
  misc_feature (3340)..(3340): n is a, c, g, or t
  misc_feature (3430)..(3430): n is a, c, g, or t
  misc_feature (3461)..(3461): n is a, c, g, or t
  misc_feature (3463)..(3463): n is a, c, g, or t
  misc_feature (3469)..(3469): n is a, c, g, or t
  misc_feature (3496)..(3496): n is a, c, g, or t
  misc_feature (3574)..(3574): n is a, c, g, or t
  misc_feature (3649)..(3649): n is a, c, g, or t
  misc_feature (3652)..(3652): n is a, c, g, or t
  misc_feature (3759)..(3761): n is a, c, g, or t
  misc_feature (3799)..(3799): n is a, c, g, or t
nnnnnnnnnnnnnntnntnntnntnntnnnnnnnttnntnnnnnnnntnntcntcntnntnntnntnnnaannnnnntnctnnnannnntnntncannanntncnnnnnttnnnnnnnttnntnntncnnntnttncannannngntncnnnanntnntnnnnnnnntnntnnnnnancnntnnnnnnannngnnntnantncnnntnnnnnnttttttnnncnnanncnaannanncntttttnncntnnnnaannnnttncnnnaannnntngnnntnnngnnanncnnannnnnnnnanncnttttngnntnnnttttnnnnnnnaannnnnnntnnnttnantnnnnttnnnnnnnnnaannnnncnnnnnnnnnaaaannnntnntnntnnnnnnnnnntnnnnnnnttnnannannnnnnnnnnannantnntttncnnnnnntnttttnnnnttttnnnnnnnnnntnnnnngnnntttttnnnnnnngnnantnncttttnnnnntnntngnanttnaanngnntnnttnannnnnannnttngncnnncnnnaannnnnttncnnnnnnccnnnnnnnnnnnnannnnnntnnnnanccnannnnnnnnaannngnnnnntnnnngnnnnnnnnnnnnnnnnannttnncnnnnncnncnnnnnnntnnnntttnnntnnnnancnnnntnnnnnnnnnnntnntnannnnnnnnannnnngnnannnnnaannnnggnnnngntngnnnnantngnancnnnannaannnncntgtttnnannnnnnnnnnnngnnnnntnnntnnnnnnannncnnnnnnnnnngnnantnnantnannanngnnaannnncnnnnnnntngntnnnnncntnnnnnnnnnnnnaannnntnnnttnnnnntnnannnnttnntnnnntnnnnngnnnnnnnnnnnannnntnnnnnnnnaannnttnanttnnngntnnannannnnntnnttnnnnnnnnnttngnnntngnannnnnntnaangnancnnnantnaannnnnnannannnnnaannnnnnnannccnnaancnnnanntncnncnnannngnttnnnnancnnnnnnnnaantnnnnnnaantnnnnnnnannantnnnnnccnaaanncnnnnnnnnnnnncnnnantngnnnanntncnnnngncnnnnaaaannaanntnaaannnnnnannnnnaaannnantngnnttttttnntnnnnnnaaannnccnncntttnnnannnttnantttnnannnntncnnnntnnnantaggaatcttaatttttaggtantaatgtagctaattttaaaacatgcatcatactgcttttcatttcttgataagacatttgtacgatgggttgacgagcaatgacgataaaatctacatcttgcgccaattggtcgtccagttccattaaaatatgacggattcttctttttagacgattacgcgtaaccgcatttccaagttttttgctgacagagattcccacacgaaaatgggattggtcttccttattatatttataaataacgaattgacggttcgctgtcgattttcccttgtggaatacnttttgaaattcgcggtctttctttactcgaaacgatttcttcatctacttgaatctctccagtcactcaaatggtttttaaaaaaaaagaccactgagacgttcagtgatctaagctgctaaaacttttctacctttacggcgtctgcttgctaatactctacggccattttttgtgctcatacgtttacggaatccgtgaactttttgacgtttgcgtttgcttggttgatatgttcttttcattcgtgtgcacctcctactgtaaatgaaatatctagtctccctagacagtctagtacattataaatataaaatgtttacttgtcaatataaactatctaatcactaaattactgaagtatcataacataatcagactaaaaatttctacaaataactgttgatttcgctctatttttttagttattcacatcgatggtggatagtttttttgcataaaagacgatttccacagacttataaacaatttatccacaaaataacatcctgtttacaaaaattatncacaatggtggataactctattaaattccttttatatcaactttntttgttgtttataactgctctttttttgtgtatatctctgtgaatttccacttttttattcgacttatccaccgttttgtggataaacttatccaaatctcactttttttgtgattttctccatccgattgtggaaaacttttttgaaagatggtacactgttaaatggattagaatcttgaaaacgatagaaggaggtgcatttatgaattccatccaagaattttggaaactattattagaacactttgaaaaaacaaattccgaatttacntttaancactggattaaaccagctgaaccgattcgaattgaacaaaatattctctatattaaagtgccttctaaaacatttgcgagatattggcaagataaccttattagagacatnatggaaattggatatgattacttnagacaatcntttgaaccacgttttatcgattcagaagatgaaggtccagtaaacactccattccancaaggagtngaagaaattcaaccnaanattcctgaanctccaacaatggttgccatcgaggaagactcgcatttgaatcctaaatatacatttgaaacnttnattattggnaaaggaaaccaaatggccacggctgccgcgcattacgttgcggataatcctggnaatacctanaaccctcttttcttctatggaggtgtaggtcttggaaaaactcatttaatgcaagccattgggaataaatataagaagagccatccaaacgcacgtgtcaaatacgtgacgagtgaagagtttatgaatgaaatgatngcttcgattggatcaaaaacnccgcaagaattccgcaatcgttaccgtaatgtggatatcttactggtcgatgatattcaattcctagcgaaaaaagaagcnactcaagaagagttcttccatacatttaatgcgcttttcaataaccaaaaacaaatcgtattaacgagtgaccgtcaaccaacggaaattaaagaattncaagaacgtctcgtttctcgtttcgtatcggggttatcngtcgatatcactccaccagacttagaaacnngnattgcnatcttacaaaataaagcacaatcacttggatttaatattcctattgaagtgttgagttatgtcgcaggtcatattcaatcaaacgtncgtgaattagaaggagctctgatgcgtcttcaagcgtactcagtgatggttggtcaagatatttcaacagacctggctgcagaagcgttncaatcgttccttcctggaggcgacgaaaaantnctttcnattcatgatatccaaagcgccgttgcnaaatactacaatattacggtcgaagatattaaaggaaagaaaagaacgaagacaatggttcaaccgcgtcaaatcgcnatgtacctttctcgtgaattaacacgtgtttctcttcaaaagattggtgctgattttggtcgtgaccactcaacngtnattcacgcctatgaaaaaattagccaagaagctaaagatgatccagaaacgattcgcgtgattaatgaaatcaagcattcgctcggttattaagctgtggataagtnnnaaaaaacggtggagttttccacaatggttatccacaantaaaaatggtctctgttataaggaaaatagacttttccacaatatacacaggccctactactattactattttattaataaataaattaaatataaaagcacaccctaaaggaggcagttatgaaattttcagtaaacagacaagggttcttaaaaaatcttgtagatgtgcaacgtgcaattccatcaaaaacaacaatt

SEQ ID NO: 1365 - DNA, 4000 bp, Escherichia coli
  misc_feature (169)..(169): n is a, c, g, or t
  misc_feature (196)..(196): n is a, c, g, or t
  misc_feature (1988)..(1988): n is a, c, g, or t
  misc_feature (2677)..(2677): n is a, c, g, or t
  misc_feature (3423)..(3423): n is a, c, g, or t
cttcgaccgccaggtcgtcgttccgcgtcccgacatcgatggccgcgagcagattctcggcgttcacatgaagaaggtgccgctggcgcccgacgtcgacgcgcgcgtcatcgctcggggcacgcccggcttctccggcgccgacctcgccaacctcgtcaacgaggcngcgttgctggccgcccgccgcggcaancggctggtcgcgatgaaggagttcgaggaggccaaggacaaggtgctgatgggcaccgagcgcaagtccatggtgatgaccgaggacgagaagcgcatgaccgcctatcacgaggccggccacgccatcgtcgccctccacgagcccgcctcggatccgatccacaaggcgacgatcattccgcgcggccgcgcgctgggaatggtcatgcgcttgccagagcgcgacagctattcctatcaccgcgacaagatgtacgcgaacctcgccgtctcgatgggcggacgcgtcgcggaagaagtcatcttcggctatcacaaggtctcttcgggggcgtccagcgacattcaatatgcaacgacgctcgcgcgcgacatggtcacgcgctggggcatgtccgacgcattggggccgctccaatatgccgagccggacgaggaggtgttcctcggctattcggtcaaccgcacgcgccagatgtcgaacgagaccgcgcaggcgatcgacaacgagatccgccggatcgtcgaggaaggctacgagcgcgccaagcacgtcctcgacgagcaccgcgacgagctggaatcgctcgcgcaggccttgctcgagttcgaaactctgtcgggcgacgagatcaagaaggtcctggccggcgaaaccatagatcgcggcggcgcaaagggcccaacgatcccggccgccggctcctcgatccccaaggccaagcgtcccaagagcggaaccattggcgggccggcagccgccggcgtctagttcggaggccgttcacgcccaaacgcggtccctcggcgacgcggcgttcgcggagtggatctgaccatgcgcaaggcaatcgtcctgagttttgccctatcccttgcagcgccggcgctcgccgcgccgtccggcagcgcgcagagcttcctcgatcgcgcgaacaggctcaaggcgaaggggccgctggcattgttcgacggcgactatgcgcgcctcaaggccgaggccaccgccgccggaaagtcgatcggtgacgatcgcattgccgccgagcgcgccggcaggccgatcctctactgttcgccttcgccgcgcgcccggctcggctcgttcgagttcatcgatgggctggaggccattccgccggcggagcgcgctcgaatggacctgaagcaggcgatgcttcgcgtccttcagaagaaatacccctgccgccgctaaggcgacgagctacatcgctccgatcgcgaccgatgccgcaaagaacagcgccgcggcaatgaatgcgaaggtcagcagcgccatggttcgcatgatcgcgctgaacttccccagctcataggtctgcttcagatgccggtacatgtggaacggcggcacgaagaacagcagggacgcgatggtcgtgaagccgatggacacaaggagcccgccggcgatcaccagcatcatcatgaacgaaagcgagtaagtgacgaataccgcgtggtcgtaggtgttgtatcgccgcctgagcgggaacagcagccacatgaagggtatcgacagcgggatcagcatccagctgaacttggacaccgaatcctggacccgcatcgagacgacttccggattgtccttggcgttctggatgaagggccggatccagcccggcatgtcgtcgccgggatcgtttacgaccatcggcgtgccgctcagcatcttctgggtgtcggcaatgtcctccttgcgcttggcgatcttgcggtcgagctgggcgaggtccttgcccgccgccgcgccggccttgcgctgngcctcgagcttggcgagcttggccgtgtcgtccttgatctcggtcttgaggccctccttgaaggtcgtggtaccggcgccgccgagcgccccggtgaaattgagcaccgcgaacatcgcgaagaccgtgaagaggtagagggcgatcggcgagatgaaccgggcgcgctcgccggcgatgtagcggcgggtcatgatcccggggcaccaggcgagcatcggcagggtgcgccagatcttgccttcgaaattgaacaaggcggtgacgaaatcctggaagaaagcccttaccgagcggtggatgtgggctttctggccgcaggccgcgcaataggggccggtcagcttcgctccgcagttgaggcaattcctctcatgggtgtggccgtccgctacggcctcgcccgcacccggctcgaccgctcgggcgagcaacccgccggtgaccgcatcgccgatcgcgtcgaaatcccccatggggcggatattaggcgggcatcggcgctcatgctagctgccgctggtgcctcgcatcggtctcctcggcggctcgttcaatcccgcgcaccgcgggcaccggcggatcagcctggaagcgatccgggcgctcggcctcgacgaggtctggtggctggtctcgcccggcaatcccttgaaggcgggcgcgaaggacatggcgcgcttcgaggngcggttcgcgtcggctgaagtgatggctcgcggcgcccgcatccgggtcagcgatttcgagcggcgcgagggcatccgctactcgatcgacaccgtccgcaggctcaagcggcggcaccccgagcaccgcttcatctggttgctcggaagcgacaccctgccaaattttcacaaatggcgcgattataggaatttagcccgcgaactgccggttgccgtgattcgccgtcccggttatgattcagcggcccacgcggcgtgcgcgatgggctggctgaggcggttcgtccacccgtccggccaggcgagccactggacggaatggagtgcaccggcgatcgtcttccttcgcctgccccccgatccgacctccgctaccgccattcgcgcgcaagacccaagctggtatcgccgatcctcttcgctcgcgcagcgtcgcgggcggacggccatgcccctgtccgccaggagaccccttgaccgagcaccccgctgaagcagccgacacgagcgggcgtccccccgcgagcgtcgatgaactccacaagctcgttctgaaatcgctcgacgacgaccaggcgcaggaggtcgtctcgatcccgctcgcgggcaagtcgaacatcgcggaccatatggtgatcgcgtccggccgctcgacccgccaggtcgcgtccatggccgttaagcttgccgacaagataaaagagcaatttgggcgaaacgtcaggatcgaggggcttccggcngcggactgggtgctgatcgacgccgacgacgtgatcgtgcacatattccgtcccgaagtcagaaatttttacaatttggaacgaatgtgggcatttggggatgaatcgatgagcgctgcgcgcgggtgagggacatgcggttcattgggattctactgtcgcttctggcgttcgttgccgtcccggcgactgcggcgtcttcgcccgacctcgtcaccgtggagcagcagctgagcgcgatgctcgcggactcgtcggccgacgtcggaatcgccgcgctcgatctcaacaccggcgagacgatcagcatcaagggcgacacgcccttcccgatggcgagcacggtcaaggtcgcgatcgccgcgctctatctgtcgcaggtcgaccatggccagaagacgctcgacgactcgatccacggccagcctgtccggaccttgatgaacaagatgctgatttacagcgacaatcacgccgccgatatcctgttcaaggacgtcggcgggccgcgcgcggtgcatcactatctgacgaccaacgggatccatggcgttcgcgtcgaccgcaccatcgccca

SEQ ID NO: 1366 - DNA, 4000 bp, Escherichia coli
  misc_feature (10)..(10): n is a, c, g, or t
  misc_feature (37)..(37): n is a, c, g, or t
  misc_feature (75)..(75): n is a, c, g, or t
  misc_feature (87)..(88): n is a, c, g, or t
  misc_feature (94)..(94): n is a, c, g, or t
  misc_feature (109)..(109): n is a, c, g, or t
  misc_feature (170)..(170): n is a, c, g, or t
  misc_feature (200)..(200): n is a, c, g, or t
  misc_feature (309)..(309): n is a, c, g, or t
  misc_feature (324)..(324): n is a, c, g, or t
  misc_feature (336)..(336): n is a, c, g, or t
  misc_feature (396)..(396): n is a, c, g, or t
  misc_feature (539)..(539): n is a, c, g, or t
  misc_feature (541)..(545): n is a, c, g, or t
  misc_feature (547)..(548): n is a, c, g, or t
  misc_feature (553)..(555): n is a, c, g, or t
  misc_feature (557)..(557): n is a, c, g, or t
  misc_feature (559)..(559): n is a, c, g, or t
  misc_feature (562)..(563): n is a, c, g, or t
  misc_feature (566)..(566): n is a, c, g, or t
  misc_feature (569)..(575): n is a, c, g, or t
  misc_feature (577)..(577): n is a, c, g, or t
  misc_feature (579)..(582): n is a, c, g, or t
  misc_feature (584)..(585): n is a, c, g, or t
  misc_feature (587)..(587): n is a, c, g, or t
  misc_feature (589)..(593): n is a, c, g, or t
  misc_feature (595)..(595): n is a, c, g, or t
  misc_feature (597)..(597): n is a, c, g, or t
  misc_feature (599)..(599): n is a, c, g, or t
  misc_feature (602)..(602): n is a, c, g, or t
  misc_feature (604)..(608): n is a, c, g, or t
  misc_feature (611)..(611): n is a, c, g, or t
  misc_feature (613)..(613): n is a, c, g, or t
  misc_feature (617)..(619): n is a, c, g, or t
  misc_feature (621)..(622): n is a, c, g, or t
  misc_feature (625)..(628): n is a, c, g, or t
  misc_feature (630)..(635): n is a, c, g, or t
  misc_feature (637)..(644): n is a, c, g, or t
  misc_feature (646)..(647): n is a, c, g, or t
  misc_feature (649)..(649): n is a, c, g, or t
  misc_feature (652)..(653): n is a, c, g, or t
  misc_feature (660)..(662): n is a, c, g, or t
  misc_feature (664)..(664): n is a, c, g, or t
  misc_feature (666)..(667): n is a, c, g, or t
  misc_feature (670)..(670): n is a, c, g, or t
  misc_feature (672)..(682): n is a, c, g, or t
  misc_feature (685)..(686): n is a, c, g, or t
  misc_feature (689)..(689): n is a, c, g, or t
  misc_feature (694)..(698): n is a, c, g, or t
  misc_feature (700)..(700): n is a, c, g, or t
  misc_feature (704)..(710): n is a, c, g, or t
  misc_feature (716)..(716): n is a, c, g, or t
  misc_feature (718)..(720): n is a, c, g, or t
  misc_feature (722)..(722): n is a, c, g, or t
  misc_feature (724)..(725): n is a, c, g, or t
  misc_feature (727)..(728): n is a, c, g, or t
  misc_feature (730)..(740): n is a, c, g, or t
  misc_feature (742)..(743): n is a, c, g, or t
  misc_feature (745)..(747): n is a, c, g, or t
  misc_feature (749)..(749): n is a, c, g, or t
  misc_feature (752)..(752): n is a, c, g, or t
  misc_feature (755)..(755): n is a, c, g, or t
  misc_feature (757)..(760): n is a, c, g, or t
  misc_feature (763)..(763): n is a, c, g, or t
  misc_feature (765)..(766): n is a, c, g, or t
  misc_feature (769)..(773): n is a, c, g, or t
  misc_feature (776)..(781): n is a, c, g, or t
  misc_feature (783)..(784): n is a, c, g, or t
  misc_feature (786)..(786): n is a, c, g, or t
  misc_feature (788)..(789): n is a, c, g, or t
  misc_feature (794)..(796): n is a, c, g, or t
  misc_feature (798)..(806): n is a, c, g, or t
  misc_feature (808)..(808): n is a, c, g, or t
  misc_feature (812)..(814): n is a, c, g, or t
  misc_feature (820)..(822): n is a, c, g, or t
  misc_feature (824)..(827): n is a, c, g, or t
  misc_feature (829)..(836): n is a, c, g, or t
  misc_feature (838)..(845): n is a, c, g, or t
  misc_feature (847)..(848): n is a, c, g, or t
  misc_feature (850)..(852): n is a, c, g, or t
  misc_feature (854)..(855): n is a, c, g, or t
  misc_feature (857)..(862): n is a, c, g, or t
  misc_feature (865)..(869): n is a, c, g, or t
  misc_feature (871)..(872): n is a, c, g, or t
  misc_feature (874)..(874): n is a, c, g, or t
  misc_feature (877)..(878): n is a, c, g, or t
  misc_feature (880)..(882): n is a, c, g, or t
  misc_feature (884)..(884): n is a, c, g, or t
  misc_feature (890)..(891): n is a, c, g, or t
  misc_feature (893)..(910): n is a, c, g, or t
  misc_feature (913)..(919): n is a, c, g, or t
  misc_feature (921)..(930): n is a, c, g, or t
  misc_feature (932)..(938): n is a, c, g, or t
  misc_feature (940)..(940): n is a, c, g, or t
  misc_feature (942)..(946): n is a, c, g, or t
  misc_feature (948)..(950): n is a, c, g, or t
  misc_feature (953)..(965): n is a, c, g, or t
  misc_feature (968)..(968): n is a, c, g, or t
  misc_feature (970)..(971): n is a, c, g, or t
  misc_feature (973)..(973): n is a, c, g, or t
  misc_feature (975)..(976): n is a, c, g, or t
  misc_feature (980)..(980): n is a, c, g, or t
  misc_feature (982)..(986): n is a, c, g, or t
  misc_feature (988)..(990): n is a, c, g, or t
  misc_feature (992)..(993): n is a, c, g, or t
  misc_feature (995)..(1001): n is a, c, g, or t
  misc_feature (1004)..(1008): n is a, c, g, or t
  misc_feature (1010)..(1010): n is a, c, g, or t
  misc_feature (1012)..(1013): n is a, c, g, or t
  misc_feature (1015)..(1016): n is a, c, g, or t
  misc_feature (1018)..(1018): n is a, c, g, or t
  misc_feature (1022)..(1031): n is a, c, g, or t
  misc_feature (1033)..(1038): n is a, c, g, or t
  misc_feature (1041)..(1043): n is a, c, g, or t
  misc_feature (1045)..(1045): n is a, c, g, or t
  misc_feature (1050)..(1055): n is a, c, g, or t
  misc_feature (1057)..(1063): n is a, c, g, or t
  misc_feature (1065)..(1065): n is a, c, g, or t
  misc_feature (1069)..(1072): n is a, c, g, or t
  misc_feature (1074)..(1074): n is a, c, g, or t
  misc_feature (1077)..(1079): n is a, c, g, or t
  misc_feature (1093)..(1093): n is a, c, g, or t
  misc_feature (1105)..(1105): n is a, c, g, or t
  misc_feature (1108)..(1108): n is a, c, g, or t
  misc_feature (1129)..(1129): n is a, c, g, or t
  misc_feature (1134)..(1134): n is a, c, g, or t
  misc_feature (1137)..(1138): n is a, c, g, or t
  misc_feature (1986)..(1986): n is a, c, g, or t
  misc_feature (1989)..(1989): n is a, c, g, or t
  misc_feature (2011)..(2011): n is a, c, g, or t
  misc_feature (2021)..(2021): n is a, c, g, or t
  misc_feature (2487)..(2487): n is a, c, g, or t
  misc_feature (2545)..(2545): n is a, c, g, or t
  misc_feature (3079)..(3079): n is a, c, g, or t
  misc_feature (3281)..(3281): n is a, c, g, or t
  misc_feature (3827)..(3827): n is a, c, g, or t
  misc_feature (3986)..(3986): n is a, c, g, or t
ggagccgtcnggaagggtgatcgtgagttccgccatngcgggtcaggcctcctggtggatcgtctgcgtgctcgncgtctggaatcnncccgtngagccggccgtgccntgaatccccatgtccatcctgtgagggtatgggagttccccgtccgggacgcagacgatancgaccctcccctccacgatcgtccacccgncccggccctaggattccgaaccgaacgaccgaccgggacaaccggcagctacgaaaggttcaggcacgtggggatcgtcgacggcaagcgactgctcatcaccggggtnctcaccgatgcatcnctggccttctcngtggcccggctggcccaggaggagggcgccgaggtggtgctcaccggggcgggcagaggnctgcgcctcaccgaacgaacggcgcgcaagttgccccatccggtcgaggtgctggaattcgacgtgacctcgcgcgagcagaccgatgccctgcgtcaacggctcaccgagacctgggggcgggtggacggcgcactacacgncnnnnnanncgccnnngnantcnnccnggnnnnnnncntnnnngnngncnnnnngncngncgngnnnnnggncntggnnntnnccnnnnannnnnncnnnnnnnngnncnagnnggtggcnnngntnntgncnnnnnnnnnnnccnncgncggannnnncntcgnnnnnnncttcgncnnncncnncnncnnnnnnnnnnncnncnnnanggncgncnnnnagncnnccnnnnngtnnnnnncnngntnnctggnnngnnnnnnnnncngggnnnacatcnnngnnnncnnnnnnnncnnnnnnnngnncnnnannannnnnnccnnnnncnntnccnncnnngntgcctnngnnnnnnnnnnnnnnnnnnggnnnnnnntnnnnnnnnnngnnnnnnncncnnnnncnnncgnnnnnnnnnnnnnggncnngntnncggncnnnnncnnngnnannnnnnncgnnnnngngnncnncnacgnnnnnnnnnncnnnnnnggnnncngaccnnnnnncnnnnnnncngccnnnntnccnnnctcagtcgtagagngagacgttgctnccngcccggtccgtgcagtgggcntcggncannggatacgggttgacggcgttctgtgcaccacccgggtggtactcgaagtgcaggtggacgccctgggcgttgccgctgtcgcccatgtagccgatcacgtcaccggcctccacctcaccctccctgccgtaggccgagaggtgcgccccgtagtagtagtcgccgtcggcggccaccaggtcgaaggatcgccccccgacgctgtcccaccggtaggagacgactccgtccaccggcgccaggagcgggtcgtggcgcttgccgacgaggtccacgccctcgtggctccgcccgcctgatcgtggagccccccaggtgtcgcggaacttcgtgcgtgcgccgatcggacacacccagtcagccgacgtgatctggcggaccaccgccgaacggttgctccgggtgtgggcaccacgcctgagttgcctccgactggtctccgagaggccatcgaagacgtcgtcgtaggtggaccgcatgcggtcggcgtccctcacgatgtcggcgaccatccggttcacctgcaggagcgccgcagccgccgacctctgcctggatcgtgcggaggcgagcaggcgggccatcgagcgatagcgggtctcagcctcggccaggcccgccacggccagcggcaacacgtcagaggcggcctcgatcagcggcagcagccccgcatcccgctcgatgacgagggcccgtgacgggtcgctggtgaagaccacggaccgttccgacacctgggcgacggcagtcgagggaagggccaggaggagcgcgacggacgcgccgaccaggccggggaggcgggacaccgccggattctatccgctggttgattcccgaccgtnacnggccggtatggccccggtcacngcgttccctnctcggactcgtcgggaatctcccccacgagttcctctaccacgtcatccatggacaggatccccacccaggatccggaaccatccacgaccaccgccatctggctgcgggatcgccgcaggccctgcaggacgtcgtccagcaggaggtccgtgtgcagcaccagcaggctgcgtatcgactccaatggcaccggctcgtcccgagcctcgggtggaagcctgagcaggtccttggcgtgcaccatgcccacgacctcacccgtgcgtcgatccagcaccggaagtcgggtgtggccgctggaggccatgacatcctccacctccaccagcggtagccgcctgtccacggccaccaccgacggccgggccaccatcacagatgccgccgtctgccgtcccaggtccagcactcctgtcaacaggtcgtgctcgaagctttcgatgagtccttcatcacgcgacgcntccagcagggcggtgagttccggcgctccgaccgcccggcggatctcgtcgacgggcntgaggccgaagggccgtaccgccatggcggccaaccggtcgactacgacgattccgggtctcaggaccgcgacgaacgccccgtgcagccgaaccgtccagcgaagcgtccgctccggatcggcaatcgcgaagttcttcggaaccagctcaccgaacagcatctggaacacggcaaccagcccgatcgccagcaccagtgccgtcgtggacgacacacctgacggcaggccggcggcatcggccagggactcgaggtgacgtccgatcgtcggctcggccaggatgcccagggcgatgctgctcaccgtgattcccagttgcgcccccgacatctggaccctcaggtcccgtcgtgcggccagagccctggacgccgacacggagccctccgccgctgccgcctcgaggctggacggacgtgccgccaccagggcgaactcggtcgccacgaacagtgcgttcacggccacgagggctacgacgaccagcagcgagagcaggatcatgtggaatccccgccgtcgggaggaangacgatccggagagtggcgatccgccgaccctccaccgccaccacctcgatcttccagccttcgtgctcgaccatcgccgtcggctgcggcaggcgccccaggcgttggaggacgaagccggcgagggtctcgtacgggcccggaggcaaccggagtccggtgatgtccgccacctcgtccaggttcagtcgacccgacacnacgttgcgtcccggcccgtccaacctggtgcgcaccacccgggtgtcgtgctcgtcgtcgatctcgccgactatctcctcaagggcgtcctccaccgtgacgattcccgccgtacccccgtgctcgtcgaccacgacggccatgtggccccggtgctcacgcaggtcggcgagcaggtcatccaggaagcgggtctcgggaacggcaagcacgtcatgcatcagctcgacgaccggggcatgcccacgcaacgctgccggcctccgcaggagggacttcacgtgtaccacgcccacgacgtggtcgagatcggattcgaagaccggaaagcgcgagtggccggtcctcgccgacctctccaggaggtcagccccagttgcgtccagacggagtgcctccacgtccagcctcggtacgagcacgtcggcaaccatcttctcgctgaaccggatcgatcgggtgaacagctccacgtcggaactgtccaacgtggcgtccgaggactcccgcaccaggtcacccagctcgtcgagcgtgcgcgaggancccagttcctcgcgtggctccacccccacccaccgcaggaccgcattggccgacccgttcaggaccacgacgacaggtcgcacgaccaccccgtaggcgagcaccagcggagccagtcgacgcgacaccgcttccggcgccgcaagggccacgtacttnggcacctgctcccc

SEQ ID NO: 1367 - DNA, 4000 bp, Escherichia coli
  misc_feature (449)..(449): n is a, c, g, or t
  misc_feature (1252)..(1252): n is a, c, g, or t
  misc_feature (1987)..(1987): n is a, c, g, or t
  misc_feature (2526)..(2526): n is a, c, g, or t
  misc_feature (2529)..(2529): n is a, c, g, or t
  misc_feature (2547)..(2547): n is a, c, g, or t
  misc_feature (2749)..(2749): n is a, c, g, or t
  misc_feature (2972)..(2972): n is a, c, g, or t
  misc_feature (3620)..(3620): n is a, c, g, or t
taagagtaatataactaatattaaaaaacgtttcataccttgaaattaaattaagctttcctcacaaaaacatggctcaatggataaaaactgaattcggttccatcgctttacttagtaatcatgacccctttcctaagactgatcaagcgcttattgaacctaatggccttatcgcaatatcaaaaacacttgaagctaaaaaaattattgaggcttataagcaaggaatatttccttggttcaatgaacacgaacctattttatggtggtcacccgatccaagattaatattgttccctgaagaccttataatttcatcgtcactatccaagaaaattaggaaaaataattatcgatttttaatagacaatgatttttcatctattattaaacattgcagtgagattaaaagaaaaggccaagatggcacatggattgacgatcgnattattaatgcatacacagaattacatcaatcaaaaattgctcattcttttgaaatctatgttaatgaaaatctcgtcggcggcctttatggaatagttttagatggcgttttctttggtgaatctatgtttcattatgaaagagacgcctctaaaatagcttttgttcttgccattcagcatctaaaaaacataggcattaagatggtagactgtcagatgaaaacgaatcatcttttaagtttaggtgctaaagagatctctcgtgaccgatttattcaactacttaatacttatattaaaacatgagccttcctgacgaattatcaagtcataagattcaattctacgtcacaacaagttatgcctgtggctacatagaaggtcgagcatctcaatcattagttgctacgcctcatcaccttattagccaaaaacacttcgatgatcttataaaaaaaggctttcgaaggagcggtaaatttacgtacaaaccttattgcgaactttgtagtgcatgtattcctattcgtatcaatgttaaagattttatgcgctcaaaaagcgctaaaagaattattaaaaatcatcagcatcttcaaacttctgtacttcccctttcctttcacgaggatcatttcaagctttatttggaatatcaaaaaaatagacatgaaaaaataaaagcaacggatgatgatgttaatcagtacagtgagtttttattacaaagcaatattgatagtcgattaattcaatttcaagatcaaggggatttaaaaattgtaagttttgtcgatatngttgaagacggcatttctgcggtgtatacattttttgatacgtctgataaatcattcagctatggaacttattccatactatggctcattaattggtgtgctgaaaaaaaattagattatgtttatttgggctactggattcaagaaagcaaaaagatgaattacaaaactcactttaaaccttttgagctattcatcaataacgaatggcgatcatttaatagtgaacatgatacaattcaattgttaaacaatatcaaataaatcaactatatacagtgaataaaattcttatttttggtgtcggtcttatcggaggatctattgcactctctgcaaaaaaatcaggtctcgcttcagatattgttggcgtcggcagaaaccaagataatctcaatgatgccattaaacttaaacttattgatcgtacgagccaagaattaaataaagatattgcagaggctcatatcattattattgcaacaccggtggcgcaattccccttgatacttaaaacgattcaacctcatttatcttcacataccattatcactgatgttggaagtaccaaaacaagtgttattgagtcagcaaaacaaattttaggtagtcaatactcacagtttattggcggtcaccctattgctggatctgaaaaacatggtgcaacggcagcacatattgatttatttaaagataaaaatgtgattttaacgccagatcaagatacatctnctcgtgcaaaagaggtaattgaagcgctatggaaaaatgcaggcgctatagtttcaaatatgtctcatagcgatcatgacaaaatattttcaacaatcagccatcttccacatcttttagctttttcactcgtggatatgattacccaaagagcaaatgcaaatgaacttttaaaatttgctgcaagtggatttaaagattttacaagaattgcagcaagctctcctgagatgtggaaagacattacactcgcaaataaaaaatttatccttgatgatattaagcactttgaaaatcaaatcaaattgctaaaagaagctattgagcatgaagatgaaaaaaagattttgacgttattcgaaaatgcaagcaaaactcgaagcgaatggtctcgataatttaagcgcatgacaaatcaaaagaaattaaaagctgttcaatctgtttctggtcaagttactctccctggatctaaaagtatcactaaccgtattcttcttttgtctgccattgcagatggtgcaacaactatcataggnccncttgtttctgatgacacncttcatatgattgatgcattaaaaaaacttcaagttgatcttacgcaaaaagataatggtgacattctcattcatggtactcgaggtaattttaaaaataaatcagctgaaatttttttaggtaatgcgggtactgcatttaggcctttaactgcagcattatctttttccaagggccaatacacgctaagcggtttgcctngaatgcatgaacgccctattaaagatcttgttgacgcgctcttgcaattaaatgcagatataacctatctcggtcaagaaggttatcctcctttaaagatatctccatctgaaattatgattaacggtcctataaaaattaggggggatatttcaagtcaatttttaacatctcttctaatggcaatgccacttacaaaaaaagaagtggttattgaaatcgngggtgatttaatttcaaaaccttacattgatattacgcttaatctaatggcgcgatttggtatacatgttaaaaaaatagactggaaacattttgttattcccggttcaagttcctacgtgagcccaggtgaaatatttgttgaaggtgacgcttcatcggcctcttatttcttagcagcaggggcgcttgccggcgatatcgaagttaaaggtattggtagaaatagcattcaaggtgatgtgaaattcgctgaggctttagtacttatgggcgctgacataaatatccttgaagcatctattcaggttacaaaagtcgctgctcttcaagcaataaatcttgattgtaatcatattccagatgctgcgatgacgcttgcggtattagccctatttgcaaaaggcacgactaagcttcttaatattggaagctggcgcgttaaagaaactgatcgcattaaagccatggcaactgaacttagaaaattaggtgcggctgttactgaaggtaatgattttatagaaatcacacctcctcttaagattaaagagcatgttgagattgatacttatgacgatcatcgaatggctatgtgtttttctctagttagtctaagaaatataccaatcacaattaacgacccggngtgtgtcaacaaaacatttccaacttactttgaggtcttagaaagtatagtaaagacataaatgacatctcacattcctattatcgcgattgacggcccttcagcttctggaaaaggaacagttgctaaacttgttgcggaaaaactaaattttcactatctagattcagggtcaatctaccgaacgatcgcttatgcaggtcgcttacaaaatatacccctcaataatgaggctttacttcttaaagttctcgagaaagctaacttaagctttaaaaatgatcatattttactcaatggtaaagatgtatctgaggctatacgtagcgaggaatcgggtcgaggagcctctgaagttgcggttcacagagctctcagag

SEQ ID NO: 1368 - DNA, 4000 bp, Escherichia coli
  misc_feature (214)..(214): n is a, c, g, or t
  misc_feature (220)..(220): n is a, c, g, or t
  misc_feature (277)..(277): n is a, c, g, or t
  misc_feature (575)..(576): n is a, c, g, or t
  misc_feature (1964)..(1964): n is a, c, g, or t
  misc_feature (1985)..(1985): n is a, c, g, or t
  misc_feature (1987)..(1987): n is a, c, g, or t
  misc_feature (2805)..(2805): n is a, c, g, or t
  misc_feature (2850)..(2850): n is a, c, g, or t
  misc_feature (3264)..(3264): n is a, c, g, or t
  misc_feature (3363)..(3363): n is a, c, g, or t
ggatcgctccgccgggaagatgctcatgatgactgccgtcacggaggcattggcaaagccgtagcaaaggccggcaaacgcaagtgcggatatcgcccaaggaagcgatgcattgcgctcggcgatgtaggccacgctgcccagtccaaggatcgaaagtccggcgagcaagaaggctacgttggatcttttggcggccagcaatggctccgtnatgaancacgcgagaaagccggccgccgccatcggcaggcagcccagtccaaataccaacccnctttggcgcaagtcgacctgaatgaaataggatgcccacagcatcgaaccgacgatagccgcgaacgtgaacacgcccacgcatacctgcggcgccatcgccaacccacgcatccacgtgtcaagccgcagcgcggcttcgcgtttcacaagcagccagatgatgagcgcggcggccagcgcgtagcagagcatggcccagtcatactggcctacaaaaaccgcaaccgccgcaagcatggcggccaccgccagctcacccagaatcgaaggcctgcgtgccgtgcttggcggcgcgnntttttcacgaatccggaagccgacaaagacgataggaatcgtggcaagagcggtcacccagaagattgaccgccagccccaggcatccaacagcatgccgcccaacacgggtgacagaccaaaacccgccatcccggcggcggaccagatactcatcgccgccgctaatttgctgggaggcgtgtgagagcgcaacagcacaagcgcggatggcgacagtaacgcggcgaatgcgccttgaacaaaacgcaggccgatcaatagcgcttcagcgctgaccagcgcacagaagattgacgtgaccgcgaaccccgtcatgctcaacaggaaaatccggcgcgcgcccaggcggtcgcacagcgcgccgccgggccgcagaccggcaatccgcgccaacagatagcccgagataatccactgcacttgcgcggcggtgaagtgcaggtccgatgcgatatgcggaagcgcgaggctcaccgcgccgcccatcgacgcgccaacatacgttgccgccgcagcgccgacgaccaccagtttctcgctggcgcttaaccgaggggcgggcggcgtttggatcattggcgtcctcaatgaccaacggcggtcaggtcatgcggcataaaggttgtatcccatcgccttcgccacggccgccaccatcagctgcccccggacgctattgcccacggggtccaaaggcggcgagaacgcagcaattcccatcttgcctggcacaacagcaagaatgccgccgccaacgccactctttgccggcaggccaaccgtataggcccaatcgccagagctgccgtacatgccttccatggtcatttccgccaaaagaaatggggcattggcagccgtaagcacacgttctttggtgatgggattgacgcccttgccagcaatcgtggcgcccatcgtcgccaactgcacggtggataccagcgttgagcactgacgcgtatagacgtcgcacgcctccatggggtcgcagtacatggcgtcggccgagtacagcagccaggcaatcgcgcgattatggaaattcgtgctttgctcggattggttgacgtcgtgcgacatctcaagctttgcgccggcaagccgcgactgcatgtcgaggatgcgcgtccagcgttcttcgacggaacttgccttgatgacgcttgtggtcgacatcgcgccggcgttgaccagcggagacaaaggcttgtcgccatgcaattccaatgcaatgaccgaattgaacggcagtccggtcgggtccgcgcctatcttttcctgtacggcgtccggccccacatcctccaaggccagcgccagggtgcagactttggaaattgactcgatggcgaacgggtagtcggtgtcgccggcggcgaagncgtcgccgtcgacggtcacgncnacgacgcctgacaggtcggacggcacctttgccagatagggaatgtagtcagcgttggcgccgcctggcgccgcgtgatgttgagcgtaggcagccgccaccgccgccttcagcgtattgagatcaatagccatgagaatctccggcgatcaccgggaaatccgtttatcggatttcccggattcacctatcaggttctggaggaaggcgagcccgccgagccgcttgccgccggcgaagcgctgcttgtagccacgggcgtacccgtcaccgttgtgctgggtaccgtctttttttcctgccaggtgaacggcgcaaaatcactgtccgcatcacgccagccgggtttgcgcaccatgtagatcaagaacggaatgatgcagaagaagacggtcaagcccaccagtatttcaacgtacgtggaggggctgcccacggagatctgactgggcggaatgaagctgaagacaaacgccagcaaggaaccgacgaatccggcgccaccgatgatgtacatccccatgtccccgcccggtatgcggtagggccgcggacggtcgggctggctgcggcgcagataaattgccgcggcgaacatcaacaggtacatcaccagatagaggatgaccgtcagctggctcagcatctggtacaccgcctgcaccgaaggcagcaccacgaacagcgtcgccaacaggctcacgatgaccgcctgaagcaacaggatgtgcgtggccatgccgtgcgaattggtgtgttgccaccaccgcggcaaatagcccgccttagccaccaccaacaagccggacgatgggccngccacccaggtcaccacacccgcaagcaccccaatggccaaggcnacggcgacgacgggacccagccaggccacgccagcccacttgaacatgtcgttgtaggccaccagcagactctgtgtgaggttgatgtctgactgagggatgacaaacgcaatcgccagcgtacccagcacgaagatcagcaccgtgcccaccgccgacaacatgatggcgatggggtagttgcgtttcgggttgtcgacttcctggacgtggatggcgttcatttccatgccggcataaaacaggaagatgcttgccgccagcacgatgttgtcaaagttggtgaagtcgggaatcacctcaccccaagacaacttgatttgcggcgtgttgcccgcaaacaaatacgagaaccccagcacgatgaggataattgccggaatgatggtgccgactatccccccccacttgganacctttgcaaaggtctccacgccacggaacgcaatgaatgtggctagccaatagatgccgagcacgatggccaggatgaagtacttgttggcggacagngcttcatcccatcgctggtccggcccgatgaacgccagggataccgccccgaacgtgagcgcggtaggaaaccagacggtgacctcgacccacaacatgaacatggcgaggaaggccaggcgtggcccgaaggcctcgcccacccagcggaagatcccgcctttctcggaccatcccgttgccagttcagctgcaaccagcgatacgggaattaggaaaaatacggcggcaaagaggtaatagaagatggagctcaagccgtattcggcttctgccggcaaaccacgcaggctgaccaccgcgacgatgttcatgatcgcgacggtgccgattccgagtttcttgagcgacggcttgctcaccgctttgtttggaagcgagtcaggcatagatcattcccccagaatggagatctattgacgatcgtgtgggatagcttcagaccaggttcaggtgtggttgaacccttcttcactggcgacgccgtgcaacgacgggtgctcagccagataggccagtgcgcccttcatgtcctcgatcagcagcgctgcgaaatccatctcgaacccgcgccggcacatgatgcgcatcacgacggtgtcagacatcttcccgttcagtgcgaatgccggcactt

SEQ ID NO: 1369 - DNA, 4000 bp, Escherichia coli
  misc_feature (78)..(78): n is a, c, g, or t
  misc_feature (1010)..(1010): n is a, c, g, or t
  misc_feature (2632)..(2632): n is a, c, g, or t
attttacttccctccttaacaattttacctttccctaactctaaaatttcattaattcctggaagctctacccctaanccatttcccctaggatatctaaatgcacatggtctatcgttgatgctcaccgcagtattaatcattctaacgagttcagcttcatcactagcggccatcaccacgaaatttggcaaagtggataaataagtaatatcaaaagcacccgcatgtgtgggtccatctgcaccaactaaacctgctctatcaattgcaaatctaacaggaagactttgaatagcaacatcgtgaacaacctggtcgtaagctctttgaagaaaggtagagtaaattgcagcaaaaggtttataaccttccgtggttagacccgctgcaaatgtcactgcatgctgttctgcaattccaacatcaaacattcgatctggaaatttttttccaaaaatatccatgccagtacctgaaggcatagctcctgtaattcctataattttcgtatcgttttcagcatgtttaattaaagtgttagcaaacactttcgtataagatggtgtattagatcttggtttagattgttctccagtaacaacattaaatttactaacaccatgatatttatctctagaatcctcggctggcttatatcctttgcccttttttgtaacgacatgaaccaagataggcccatcatattttaaatttttaacattattcaaaactggaattaaactgtccaaattatgaccatcaatcggtccaacataataaaaaccaagttcgttaaataacgttcctccggaaactatatctcttataaatacttcagcttttcctgctttatctttaaacttttttgaaaatatagaagtaatagatttaatagtttctctgaaactaaagtaagtctttccagataacagctttgctaaatatgaactcatggctccaacaggtctcgcaattgacatgtcgttatcatttaaaactacaattanttttgatttcatcgctcccgcattattcattgcctcataagccatacctgcactcatagctccatctcctattacagcaataacatgattagaatctttcgataggctttttgcaactgccatacccaatgatgaagaaatagaagtcgaactatgagctgctccaaaagtatcatattcactttctgatctttttgtaaaacccgaaagacctccaccttttcttaaagttctgattctatctcttcgaccagtaattattttatgaggataagcttgatgcccaacgtcccaaaccaatttatcttttggtgtatcaaatacgtaatgtaacgcgatggttaattctactacccccaaacccgctcctaagtgtccaccagttgttgaaacaacatcaatcaattcctctctaagctcttttaccaattgcttgagttcttcttcttttaattttcttaaatctgatggataattaacatgatctaacaaactagttttcgacatttaaaattctcttgttaatatgaattcaatagattctaataaatcgttggctttaataccatattttttaatttgttgatccaattttttttttagagttttagcaaaatttaatgtttcgctatagcctaataaatttaccaatgttgcctttcctttcttttcgtcacttttagttggctttccaactgtcgcactatcacctttataatcaattaaatcatcgacaatttgaaacagtaaaccaatttgtaaaccgatctctttcaataattttctttttttgatattatattcattaataacagcaatactttcacaacagaaaccaaacaattctccagtttttttcttttgcatattaattatattcttttttgaaatatttttattttcaaaagtcaaatctaaatattgaccaccagctagaccggaatgaccagaacaattagataacgctctgattagctcaactttaatcttttgtgatatctttaaatcactaccagacaaaatttcaaacgctaaagtaagcaaggaatttccagctaagatagcagtaaattcattaaattttttatgtgtcgaaggtctacctcttctcaaatcatcgttatccattgaaggcaaatcatcgtgcattaatgaatatgagtgcaaacattcaactgccgcaccaataataattaattttttgtagtctattctaaaaatttttccagtattaactactatggccgatctaaatcgtttaccaccagagaaaacaccatatttcatgggtttaattaagtgcgacttactattttgttttgaaaaaacacttttcaagtatgagtctgtgtcctgtgcaatagtgtttaatttaccggaaaaatttgccatataagttatttcaaatctttagaggaaatttttccatttttatctaaggtggactgtttaatttcattagcttttttcttaaattgctcttgaatatgaaaatttaaatatatcattctgttatattgttctatcgagctctctaggtcagtctcggtattttctagctttgtaattatttctttaatttcgctttgtgcttcttttatggattttgtgcttatatcagntggaatattttttaatttcataatatatccatatactaattaatttatgaaaaatatctattcaaatatatataaaccaaatttgattaacttaaaaaaagcaaaaaaaaacatagaaaataataatattattggaatgccaactgaaaccgtttatggcctagcaggaaacgcttactccaataaatcagttacaaaaatttttaaattaaaaaaaagaccaatttttaatcctcttataattcactttaaaaacttaaaggatttaaaaaatgacgcaatcttgaataatacttttacaaaactttataaggctttttgcccaggaccaattacttttatattaaaaagaaagatcaaatcaaagatttctaaaatagctactgcaagaaaaaaaactgttgctgttagaattcctaaacataaagttgcaagaaatttgcttaaaattttaaatgcaccacttgcagctccaagtgcaaatatcgcgtctaaacttagcccaacttgtgcaaaagatgttgtggatgaatttggaaataaaattaaattcatactggatggcggtcaatgtaaaattggacttgaatcgacaataatagatttaactgtaaaacccactattttaagaccaggaagtatatctgctgaaaaaattcagaaaatattaaaaaaaaaaattactattaataataagccaaaaaaaatcaaagggcccggacaattaaaattacattactcccccggaataccaattataatgaacaggaaatatcctgaaaaaaatcaggcatttattagttttggaaaaaaatttaaacacggaaaaaataattttaatctgagtaaaaatggcagtttaaaagaagcggcaaataatttatataaaatcatgagaaaaataaaaaaaagaaattttaaatcaatagctgtcactcaaatacctaatattgaactaggtcgcgcaatcaacgatagactgataaaagcgtcaaataaatgaataaagaaacaattatagttgatggtttaactaagcaatttaaaaacatattagctgtcaataatataagttttaaaattggtaaaggtaaaattattggtctcctcggaccgaatggatgtggtaagtcaactaccataggtatgatgcttggtttgataaaacctagttcaggaacagttattatcaatggtcaaaatattgaacagaaccgaacagacttgctggaaaaaatgaattttatttctccatatgttgaattgccaaaaaaactaacagttgaagaaaaccttaaggtttatggaagattatatggagtaaaaaatttaaaagataaaatttctgatttaatggaaaaattaaat

SEQ ID NO: 1370 - DNA, 4000 bp, Escherichia coli
  misc_feature (408)..(408): n is a, c, g, or t
  misc_feature (1654)..(1654): n is a, c, g, or t
  misc_feature (1682)..(1682): n is a, c, g, or t
  misc_feature (1800)..(1800): n is a, c, g, or t
  misc_feature (1804)..(1804): n is a, c, g, or t
  misc_feature (1808)..(1808): n is a, c, g, or t
  misc_feature (1986)..(1986): n is a, c, g, or t
  misc_feature (3855)..(3855): n is a, c, g, or t
  misc_feature (3858)..(3858): n is a, c, g, or t
acattacaaacgcccagatcggttacgtgtcagagtacggtgagccggaagagaatataccggcgcggccgtggctcaagccgggcattgaagcggcacagggccagatcaacaagcgccttgatgccgctgccaacgctgcgctcaacggcgatgaccggcgagtgaagcagcagatgaacggcgcaggccaggccgctgtcacgtcgatcaagggccgcataaccgcgggcatcgagccggagcttgcgagttacacgatttcggaacgccagcgcatcggcgcgctgggcacaacgccgttgatacgcacgggcgcctttctgaactcgatcacatatgtgctggtcaagtagcatgactatccagctaggtcgtatcaccacatctgggttgttcgccaccccnatccagcgcacgcggcgaacggctaccgtgaacgactacggcgagacgcagaccacgagcataaccgaatacatccgcgcgacggttacgaccgcaagcgggctggccgcggagcgcatacctgacgcaacacagcgcgtcggcgctatcgtagtgtcgacgactttcgagctactagacgccaaggccggtcaccagccggacactttgaccgtcaaaggcgctgactacaccgtcgcagcggttgagaactacgcccagaacggctactatagggcgctttgcacagtgcgggcggcgtccggcacgtgaatcgaaaaggcgagacggtatgaccaaatatgcaaacaacgacacactgaccagcagcgatgcgtgggcgtgttcctggcatcgccgagatcagcgggcatagagtatggcgccgccaactaacactaccgcaaccggcggctacctgcagccaaccaatagggcgtatggcgacatgctactccatcccgtccacgacgttatcgcgggctgtacgggcattggcgagtcgctcatccggccgcgctggcagcgcgaaccgccgcagcgcccgcggcacgataccaattgggtagcgttcggcgtacagacgatcaaccaagacgcctgggcggcggaaggcgaaggcttttcggcgcgccatgaacagattgagtttctgtgctcgttctacggcccagacgccatggacaacgttgcgcggttcacgacgaccgcgcaactgagcgcgaaccttgagctggccgagtattatggcctgtactacggatcatgctcgcagatcacgcccgcgcccgttcttttgaacgagcaatattacaacagatatgacgtaacagtagagtatcggagacgtgttgaattaaggtatgatgttctaactgtatcgtcgaccgcggtcgatttacacaatgacgttggaatgcctaaacagcacgtggttatcacggaatgagtattggagaaagatatgagtgaagggctttcagtcagcgacattgtaaacgtcgacgttaatctgtcgccgatcgcggcgggcacgcgcaacttcggttcgctgctgctgctcggcaacacgcccacaattgcggttggcgaagacccgcgcgagtacagccagatggaaggcgtcgccgcggattttggggtcaacgatcctgagtaccaggccgctgctgcgttttttgcgcagtcgcccaagcccaattttctntacattgcgcgatgggccgcgacggccnccgctgcgaagctcaacggtggttttctcgccgatgccgcgcccggcgacttcaccggtatcagcgacggcgagctgagcatcgagatcgacagcgtactagtgacagcaaacgtcgntgantcgncacccattgatttgacgggcgaaacgtcgctgaatggtgtggcgtcggcaattcaaaccgcgctttcggcattttcgaccggcaccgaggttatttggaattcgagcttttcccggtttgaggtaacgtccggcacgacaggtgttacatccactattgcctatgccacacccactgngggcggcggtaccgacctggcacccttgcttggcctcaccgttgaatatgcgtcggcaccgttccagggcgtcgatgctcaggaacttgaccaggccgtgcaggatcaagcaaaccggtcgaccgcgtggtacggtctggcgctggcggcggaggctaccgacgacgctattgttgcgacagcggatgttatcgaagcgcagggcacgtcgcgcatatttggcgtgacgacccaagacccgcagaccgtcgactcaactattgtcgacgacctggcctcacgcctgatggaaggcggctacgctcgcacagcaattcagtacagttcaagcgatccctacgctttcgtaagcgcaatgggccgcgcgttcaccgttaattacacggcgcagaacaccgtcatcacgctcaaattcaagcaggagcccggaacccaggcggagttgctgaacacaacccaggcgcgcacgcttgcggacaagaattgcaacgtgtttgtcaagtacaacaacgctaccgccatcctacaggagggcgtcatgtgcaacggcgactacttcgatgagcggcacgggcttgattggttgcagaattatattcagacaaacctgtacaacttgctctacacgtcgcagacgaaaatcccgcagactgatccgggcgtcaaccaactccagacgaacgttgagcggtcttgcgcgcaagccgtcgtgaatggcctactggccgcgggcgtttggcaatccacagttgtgttcgggtcgttgcacaccggtgatacgctgcccaagggctactacacctatgccgcaccgatccgtacacagagcgcatccgaccgagcagcgcgcaaatcacccgcgatccaggtggcggcgaagctcgccggcgcggttcattccgttgacgttatcgtaaacgtcaaccgctaggagaccacaacatggcaacgtatagttttggagacgttagcgcgacgctggccgcccccggcgcgtccatcgcgcttggtgccggttcggcaaacgcggaagagggcatcaccctgtcgttcaccaccgaccgcaatatgatgacgattggcgcggacggcgagggcatgcagaccaagcgccaggacaagtccggcacggtcacaatccgcctactcaaaacgtcgccgaccaacgcgctactcaataccgcgttcaccgcccagtctgtcgattcagcaatgtggggcctcaacgttataacggtcagcaacagccaggccggcgacctttgggcctgccgcgaatgtgccttcgttcgcatcccggattacacctatgcgcaagacggcgacaccgttgagtgggagttccatgctgtgaagattgatccagtaatcggggcgtataacgtatgaccaccgaaatccaccacaagggcgcgacttaccggatcgacaatctgacggcatttcagcagttgcacgtatcgcggcgtatttcgccgctgatcgcgccactgctgccgatcgttcaggacttggagagtgaatctgttagcctagaagatgccgcagcgcatcttgggcctatcacagacctgctcgcgagcctcggcgacgaaaccgttgagtatattgtcaacacgacgttgagcgttgttaagcgcgagcagggcaactactattacccgatctgggcgaacggtcagctgatgtacgacgacctgacgatggcggacggcatgcagctggcctaccaagtcattgtggatcagctgggcggttttatcgacggattcctgcaaagcgccgggcaggagtccgtgtcggcgaagacaccagcgagtaccgcgaactagggccggaagaatggcttatgcgccctgtgattaaggnctngtgccggtatgagtcgctaatcgacgggacggtggggctggaagatattgcgttcatgaacgatatgattggagcctacgatggctgaagagaacgtcatgcgcagcttcgtgacgaagctgggcttcaaggtcgatgataa

SEQ ID NO: 1371 - DNA, 4000 bp, Escherichia coli
  misc_feature (1986)..(1986): n is a, c, g, or t
  misc_feature (1991)..(1991): n is a, c, g, or t
  misc_feature (2010)..(2010): n is a, c, g, or t
  misc_feature (2064)..(2064): n is a, c, g, or t
aagagcagaagttgctggatttacagattcttattacaagtatggaactgttccattggtacttaaaaagaatttaaaaaaatattcaacatggaaatctttaaacaataaagatgtaacgattgctacaacacttgggacttctcaagaggaaaaagctaaagagttctttcctttgtctaaattacaatcagttgagtcacctgcaagagactttcaagaagtattagctggtagagctgatggaaacattacaagttcaacagaggctaataaattagttgtcaagtaccctcaattagcaattgttcctgatggagaaaaaaatcctgcctttttagcaatgatggttagtaaaaatgatcaagtttggaatgattatgtaaatgagtggatcaaaagtaaaaaatcctctggtttctttaataaactactcgctaaatataatttaaaaagcttataaaaaattagatattaatctctaattcattataactttaagagtgaaaaatttactttttttacttttaattttaccccttacctcttgtagtggtcaggaattgggttggtttattctatcacctaacaatgttgaaggtttaacaaacctaaaatttttattaagtggtttaactacaactatttatatttcagtagtatctataattatatctgcaattttagggtttatcgttgcaattccttctttagctaagaataaatttttaacatacataaatattggatatgtggaaattgtaagagcaataccgttacttgttttaatattatggatttattatggtttacctataatgactggattaagtttcagtccatttgtgtctggaataattgcgctggcaataagtgaaagtgcttttcaagcagaaatttttagagcaggaataaactcaattaaaaaatcacaatgggaagcaggctcatcactgggtttaactttttataaaaggttaagattagtaattcttccacaagcaattaaaaatatccttcctgcattaggcaaccagtttgtatatgtattaaaaatgtcttcattggtatcaattataggtattggtgacttaacaagaaaagcaaatgaattagttgtgtcaacctatagaccattagaaatttatacatttttaatcttggaatatttaattttgatattaattgtttctttcatagtaagaaaatttgaaaaaaaacttaaacaagatggtaataattaatgagtaatttagactatgatgttgaactaaatgatggtgttattacttttaaaaacattaatactacacttggttttgttcggtataatgagacagccgaagtggagtatatttttgttaaccccatgtttagacgtcaaggacttgctaaaaaactattaagtatcgttgaggaaaaaactaaaatcaaacccacacctcaagacccaatcagtcctttaggtgaaaagctctttaaaattaataaacaagagattaactagaattttggagcacctgttaacagaactaccctattagctttaatttttcttagattttctgtaatcccaaggataatcaaattccatagaccacatacctattttattaattcttgcataatcttcatcagatacaaatttttttgaataccttctataggcaaatgcatagccacttctaactaaataacttgataagctttcgttattaacaaaacattcagccagtgttcttttgtattgatcttttccttcactaatacattcaacgctattgtttgaaattttatcaataaggatttgttttgctgtaattccacaaggatccttagctccttcgttaaggcaagtttgttttaattcaggtgtatctatccctgtaaatctaattttttctccattaagatgaattgtgtctccatctacaattttgattgtttgagatttgacttggttaatagttaaaataaatattagtnctganacactaataagaaaaatgnctttttttttgtttaaaaacattatttaaaaaatatccaataaagatgattacngcaatacccataaaccaattggttgccatgatggtataaaaaatatccgcataatctcctcctctaatattaattacataccataatgataagaacggaaatgcagttaaccttagaacgcttaagtaaagactataaattggttttttaagtgcctgaaagactgctgttgtaataaagaatactgggtaaataggagctattaatgcagcaacttttaaatatatagcaccatgataaatagcttctacattatctgtaaactgagatacaaaaaactctgcaccgaagaataaaaccacacctgctacggccataaacgatgatccaaaaaataatgccttagtataaagctctctaatacggttataatttttagcaccaaagttttgtccaccgatagaaagtactgctgtatttaaaccaattactggaagtaagaagacttgctcaactcttaaagctgcaccatagcctgctgttgcaagatcaccaaattgtccaataaaatataatatgttaaaaatacctactccaataaacaacatactaatcataattggcattgcttgtgcgaacaattctttaagaagaataaacttaggaataaagcatttaatagataaatactttcttaatttacatgagttaattttataggctaaataaatagtaccaatagattgagcgataacagttgctattgcaaggccacctataccataagctggaacaattccgtatccccagataaataatgggtttaaaaaaatatttaaaaagaagctaaagataagaacatttctataacttttagtatctccctgtgcatttaaagctccatttaaagagatttggatcataactataaatgttccataaaaaattatatctaaatactctctagttaaagcgataccagcagcatcagagcccataacactcaagagaaaattagaggcgtttaatccaaataaagtaactacaatagaagtaaccaatgaaaaaattactgattgagcaataaatagtgaagctttattaatttttttagcacctaataaattgccaatacatgagttcgttgcagctccaataccaacaccaacagcaatgataacaaaatatatgggaaatgacttagcaatagcacctatagcttctgcagaaattctacccgcaaaccatgtatcaactaaattataaaatgtttgaaataatgaaccaacacttgctgggatagttacttttctaagtaattcccaaattggatctttagttaatttaatggctttggacaattatttttcctatttaaattctttttgaaatatatgcttcgatccagtctttttagcaaggtttatttgcttttgtctcattcgaaatctctctttttgagtttgagttaaattatcatgacagtttacgcatgaaacaccctcctcatattttttagacttcttatcttttggtgaaaccggttttctacatccactacacattgagtatgtgccagttattaatccatgtttaacactgattctgttatcaaagacaaaacattccccattccataaactttcctttttcttaatattttttaaataatttaaaattccaccttttaactgataaacatttttaaaaccttttttttctaaaaatactgaagctttctcacatcttattccaccagtacaaaacattgcaattggttttgttttttttagtttattcaggtattttggaaattctctaaaattagcaacatcaggattaactgatcttttaaaggtacccacattatattcaaatggttttcttgaatctaaaactaatgtgtctttatcattaattaacttattccattttttaggatctatatgattatttttcttattttttgatgacaaagaaagacccatgggaacta

SEQ ID NO: 1372 - DNA, 4000 bp, Escherichia coli
  misc_feature (320)..(320): n is a, c, g, or t
  misc_feature (524)..(524): n is a, c, g, or t
  misc_feature (1680)..(1680): n is a, c, g, or t
  misc_feature (1845)..(1845): n is a, c, g, or t
  misc_feature (1985)..(1985): n is a, c, g, or t
  misc_feature (2133)..(2133): n is a, c, g, or t
  misc_feature (2211)..(2211): n is a, c, g, or t
  misc_feature (3175)..(3175): n is a, c, g, or t
gagctttgtctccatctgcactaagattgcagtctgtagctgccgaagcatctgtgttgctcagtgctttagcgaaggcattaccagtagaatgtacgtattctgagcgtactgtccagtctttaaccttgtattctgcagagaaggcatagcgtcgttgttgcaggctacgtacaccagagtgtgtggttccggctgcgtctgtccacgtacccttgcgagcatacgaacctgtccagccgaaacaacctaagcgcataccttcaacaggcattacccatacgccaccaatgatgttcttctgctggtcgacatctctnacgttgataccctgtccgtcgaaaactccaacttgatagtgtacaaggttcctaccagcattattctttaagaagtcaccttgtatctgtacaccaatatctcgaccgtttgaaggatgcgcaccagcacggtcagagaagcttgccaacttctgaacactttgtgctacgctcatgaaaccttggtcgatagggtggataggnttgtcgaatgtaaatggattcttgaactgtcccgccttaacacggaagaagtcatacttctgccactcgatgaataagtcgactacacggggtgatgcgcccaaagtagaggtgttaccattaaactgtaactgtgctttccaataccaatcatttaagatacggccatcaagagagacacgaccaagacggaggttgaatgtgtttgacttgttgttatgcataccattgtattggtattgaacgataccaaagcctgacagcttaacgttattaatccatttcggtgcttcttgtgctttgctgagaagcgagcatagcatcataacagataagataattgtttttctcataactatatgaatttaggtaatgataatatcttaggttgataacttggctgttaacgatgcaaagatagtgttttatcaaacataaacaaaatattatgatgtttttattgtgtgtttttctttgtgatggcgattgataatgttatccttatatataataaggtgaaattgtctgtgatgtcagtaacaaaggaggaaaaacctgtgaactgacaagacagacaatttttctttcgatattatagctttactatctcttttctaatagtactacattctcaacgtgtggggtgtgagggaacatgtctacgggttgaacagctgctaccttgtagtcaacatcgagtagagcgaggtcgcgtgcctgtgtggcagggttgcaactcacataaacaattcgttttggacttgctccaaggattacgtttacaacgtcttggtgcatgccagcacgtggagggtcggtgatgatgacgtctggacgaccgtgttcatggatgaagtcttccgtaaggatgtctttcatgtcacctgcatagaagagcgtattgtctattttattaacctcagaattgacctttgcgtcttctatagcttctggaacatactcaataccaataacttgtttggccttcttggcgacgaaattggctatggttcccgttcctgtatacaggtcgtaaacaagttcgtcacctgtaaggttagcaaactcgcgcgctacagaataaagatggtatgcttgttcggtattggtttgatagaagctctttggtcccaccttaaacttcaagtcctccatngtctcaaagatatggtcatttcccttgaagagagtgaggtcgaggtcgttaaaggtgtcgttacctttctgattatcaacgtagaagagtgatgtaatctgtgggaaacggtcggcaatatgctgcattaatgcttttgcacgttcgtcatctccctcctcatcntagtggaactgtatgagtaccatccattcgccggtattagagttacgcaccataatatcacggagtaggccatgctgtgcacgaatgtcatagaacttcatccctgtctggtgtgcatagtcgcgaatgtcattacgtanctcattacagaggttgtccatcaaccagcatttctcgatagggtagaccttgtcaaaagctcctgtgatgtggaatccgatagctccttcttctaagccagcgtcttctggcagagcttgaagctcctcagctgtgtaccatctcttnttagcgcagccgaattcgagcttgttacgatattcctttgtatgtaccgaacccatgatagggcggaactcaggaagntcaaccttgccgatacggcttagttggtcgtaaacttgttgttgctttgcctttagttgctcttcgtaagggaggttctgccacttacaaccaccgcagataccgaaatgttcacacataggttcttgacgaatattgctcttgctaatgaagcggatgacggtagcttcacagtagttgcgcttcttcttgcgtatctgaaggtctacaacgtctcctggtactacaaaaggaacaaagataaccttgtcgtctacgtgcgtaacacactttccttcggctgctacagcctctattgtgacattctccagaatgggtaatggctttctttttctactcataatctgttttgtatttcgttgcaaagttactaattttttcttgtttgtggtttacatgatgatatttatcggttctgtgtacgccaacaaagtaaaaatgtaaggtcaacatagcaaattttacagaaaagtttgctactttacctatttattggtatatttgcactatacaaataactaaaattcattatcatttttaacttatgagcgaaaagagagtttatacctttggtaatggtaaggctgaaggtaaagctgacatgagaaatctccttggaggcaagggtgctaacttggcagagatgaatcttattggtgttccggttcctccaggctttacaattaccacagatgtatgtacagagtattatgagaaaggtaaagagactgtagtaggtttgctaaaggcagaagtagagaacagcgttaaacatgttgaaagtttaatgaactcaacctttggagacccatctaaccctctgttggtgagtgtacgttcaggtgcacgtgcttctatgcctggtatgatggataccattcttaaccttggtcttaatgatgctgtggttgatggattggttaagaagacaggtaatgcacgttttgcttatgacagttatcgncgttttgtacagatgtacggcgacgttgtattgggcatgaagcctgtaaataaggaagatatcgacccattcgaggctattattcagaaggttaaggctgagcgtggcattaagcttgataacgagatgaccgttgatgacttgaagcaacttgttgtactcttcaagaatgctatcaaggaacagaccggtaaggaattcccaaatgatcctatggagcagttgtggggtgctatatgcgctgtgttcgactcatggatgaacgagcgtgctatcctttatcgtaagatggaaggtattccacaggagtggggtacagccgtaaccgtacaggctatggtatttggtaatatgggtgatagctctgctacaggtgtttgcttctctcgtgatgctggtactggtgagaatctcttcaatggtgagtatcttatcaacgcacagggtgaggatgttgttgcaggtatccgtactccacagcagattactaaggaaggttcactccgttgggctgctcagcagaatatcgatgaagagactcgtgctgctaagtatccttctatggaagaggctatgcctgaactttatgcacagctgtttgccctccaggataagttggagaagcactaccatgatatgcaggatatggagttcactgtacaagaaggtaagctctggttcctccagactcgtaacggtaagcgtacaggtactgctatggttaagattgctatggaccttcttcacgagggagagattgacgagaagactgcactcttgcgttgtgaaccaaataaactcgacgagcttcttcatcctgtattc

SEQ ID NO: 1373 - DNA, 4000 bp, Escherichia coli
  misc_feature (472)..(472): n is a, c, g, or t
  misc_feature (572)..(572): n is a, c, g, or t
  misc_feature (1041)..(1041): n is a, c, g, or t
  misc_feature (1095)..(1095): n is a, c, g, or t
  misc_feature (1146)..(1146): n is a, c, g, or t
  misc_feature (1227)..(1227): n is a, c, g, or t
  misc_feature (1584)..(1584): n is a, c, g, or t
  misc_feature (1658)..(1658): n is a, c, g, or t
  misc_feature (1662)..(1662): n is a, c, g, or t
  misc_feature (1665)..(1665): n is a, c, g, or t
  misc_feature (1674)..(1674): n is a, c, g, or t
  misc_feature (1983)..(1983): n is a, c, g, or t
  misc_feature (1988)..(1988): n is a, c, g, or t
  misc_feature (2279)..(2279): n is a, c, g, or t
  misc_feature (2432)..(2432): n is a, c, g, or t
  misc_feature (2879)..(2879): n is a, c, g, or t
  misc_feature (2981)..(2981): n is a, c, g, or t
  misc_feature (3050)..(3050): n is a, c, g, or t
  misc_feature (3429)..(3429): n is a, c, g, or t
cctctggtaagcccgccagcagaatcgcgcccaagatgacacccgggatgtgtcccaagccacccaggacaaccatcgcgacgatcatgatggactccatcagtgagaatgattctggtgagacgaagccttggaaagccgcgaacaaaacacccgaaatgccaccaaatgatgcccccataccgaaggccatcaatttgaggttacgggtgtttagtcccattgccttggccgcgatttcgtcttcacgaatggccatccaagcccggccgatgcgcgagttttcaattcgatagcaaataaagatggtcatgatgaccatcaacaagaacaggtagtagtacagcgagaccgattcgatcgtcacaaaacccaaatctagcggtcgcccaaaatcgacaccgaacaggttgacgtcatcaatgcgcatcaaacctttcggtccattcgtgatgttgatgggacgatccanattgagcagaaaaatacgcacaatctcaccaaaacccaaggtcacgatcgccagatagtcaccgcgtagcttgagggttggcgcccctaaaagcatgccngccacacccgcaatgaacgctgcgatcgccaaaacaacccatatgttgtagtggacgccatctggaaatgcgctggccaagtttgcgaattggctcaacaagtgaggcgaagccaataagccaaacacataagcgccgacggcaaagaacgcgacgtagcccaagtccaacaagcccgcgtaccccacaacaatattcagccccaacgccagcatgatgtagagcaacaccatatcgatgatgcgtacccaagagttaccgaatggctgtaacaagaatggcaacaccatcaacaagatgccgcacgccaagaagacaataaatttatttcgctttgagttcatatgctttgcctcttcatgcgcgatcggcgacgcgctcacccatcagaccagacggtcgcaacgtcagcaccacaatcagcacaacgaacgcgaagatgtccgagtactggctacccaaaacaccnccggttagagcacctaagtagcctgcgccaatgccctcaatcaagccgagcgcnagccccccgaccaccgcgccgcccaagttaccgataccaccgaagacggcngcagtaaatgctttaaggccaggcatgaaacccataaagtgctggaccgtaccgtagttaagcgcccacatcacgcccgcnaatgcggccaaaacggcgccgatcacaaacgtaaccgaaatcacggtatcgggtcggatccccatcagaccagcaacacgcgggttctcagccgtcgctcgcatcgcgcgtcccagcttggttcggttaaccaggtaaagcaacccggccaacgtcactgcagttgcgcccagaataaaaatttgtgtcactgagatcacggcaccgccaatggcgatgggctcggttggcaacacagcagggaatggctttggattgggcttccaaatgatcatcgccatggtttgcaagaacaatgacataccgatcgcggtgatcagcggcgccaaacgaggcgcgttgcgcagcgggcggtangcaacccgctcgatcgtgaaattcaggatgccacacacaacaaaggagatgagcaacgccaggatgaggagganccanccnggtgcaccnggcatggcatcctgcatgatgctgatcacactccaactggtcatggcgccgaccatcagcacctcgccgtgggcaaagttaatcaggccaataatgccgtaaaccatcgtgtagccgagcgccacgagcgcatacatgctgcctaaaacaagaccattgatgatctgttgcagaaaaatatccataaaagaattgctccattgggccaccgataaggggcagcgatctggggtcctgcgcgcgaggaccgcgcggcgaacccgtgattgtagccaacctaaacttacaaattaggttgaatgtggtaanccgcngatcgggtaaaccctagagaggccgatggccgctggattcaacgggcgactttgtttgggggggtggcaccggcatttagcgcccgcaactccgcgagacgggcaccaattttgatctccaagccacggtccacaggctcataaaaacgttcagacgtcagtccctcaggcaggtaagtttcgccagctgcaaaggcccccggctcatcgtgagcgtagcgatagcccatcccgtgcgccatttccttcatgagagccgtcggcgcattgcgcaaatggttgggtaccggncgggaaccgtcgcgcttcaccagcgataccgctgatttgtaggccagataagcggcattcgatttgggggccatcgcgaggtagatggcgcactgcgccaatgcgagctcgccctcgggggagcccagccgctcatagacttcactggcatcnaaagccgttcgcagtgcccggggatcagccagcccgatgtcttcattggccatgcggatgagacgccgagccacataccgcgggtctgccccgccatcaagcaaacgaaccaaccaatacaacgcggcgtctgggtcagagccacggaccgatttatgcagggcgctgatggtgtcataaaagacatcaccccctttgtcgctacggcgcaaggtctcacccagcgagcgcaacagccaatcgtctgataccgtccgaaccttttgctgaagcgcgctaacgcaaatgatttcgagcgtatttaaaaggcggcgtgcatcaccatccgcataacgaaccaaccgatcagccgcatcggcatcgaattgaggcatgtcgggttcaagacaagccctggctaaaagcacgtgcaaagcatcatccgagagcccgcgaagcacgtagacngcggctcgagataacaaagcgctgttgacctcaaaagacgggttctcggtcgtcgcaccgataaaggtgaacaagccagactcgacatgtggcaaaaatgcntcctgctgactcttgttgaagcggtgaacctcatcaacaaaaacaagggttgcacgtgggaccagatcnctaagggcttgttgcgctctctcgacagcctcacgtatctccttgacaccacccaatacggcgctgattgtgatgaattgcgcatcaaaggcctgcgccattaaactggcaatcgttgtcttccccacacccggtgggccccacaaaatgcaactgtggggttggccactttcaaaagccagtcgcaagggcaatccgtcacccaacagatggtcttggccaatgacatcaatcaatgctttgggacgcagccgctgcgccagcggtacatgactaccggcgcgaggcgcgcttgcagttgagccgctcatgggcgaatgatatcggcacccgacggcggcacgaagcgaaaaacggcagcctcggccccattttctancgccgccagttttgcaaaacgcatgtccgaggtttggccgaaattatcaaccatcaccaaagcacgcaactgcgtcgaatcgaagccaacacgcatgagcttgagagtgccatcgggctgtttggggacagcttcaacccatttcagcccaccctcggtcggcatcggggtcaacacataaacggcgcgaagcgcattcaagtcgccactccccgccacaagagccgcaggcgtattgccaagggcttgcgcctgatctcgaacggtgacttggttcaaatccggatcccaaagccatagcgaacgcccatcggcgacgatggtctgtggaaaaggcttttggtagtcaaatcgaaacttaccggggcgcgagaacatgaactcacccgtggaacgggtttgtttggcacgcgtttgccctgacttcatgggggcggtcacggtttgctcaaaactgagctgcccagacggggtggcgcgcaaaaggctttgcaaatcgctaacgctatcggcccaggcgggatgcgccacggcgatcgcgcaaaaaaacagtgcgacgaagtgccgtttg

SEQ ID NO: 1374 - DNA, 4000 bp, Escherichia coli
  misc_feature (669)..(669): n is a, c, g, or t
  misc_feature (2852)..(2852): n is a, c, g, or t
  misc_feature (3878)..(3878): n is a, c, g, or t
  misc_feature (3901)..(3901): n is a, c, g, or t
  misc_feature (3930)..(3930): n is a, c, g, or t
ttggtaaccaaagttcatgttgaggtcgtgaagttgtgtaaagatggctacacggtatttatgattggtcatgctggacatcctgaagtagaaggcaccatgggccaagtagataaaggtatcttcttaattgagagtattgcggatgtagaaaagcttactttctcagccaatgagaatttagcctttgtcacgcaaaccaccctatcggtagacgaaactaaagaaattgtgaatgcactcaccaaaaagttccctaaaattattcaacctaagaagcaagatatttgctatgccacgcaaaaccgccaagatgcggtcaagtttatggctcctcaagtagagctagtgattgtcgtgggtagtaaggcaagttcgaactccaatcgcctgcgagaattggctgaaaaacttggcgtaccggcctacatggtggatgccccagagcagctccaggcagagtggtttgtaggcaagaagcgtatcggtcttacagcaggagcttcagcgccagagagtctagcgcaagcgatcgtagcgcgcattcaagagcttggcccacgccaagtacgctctttagacggcgttgtggaagatgtgactttctccctgcctaagaatttaacccacccaagttaagcgggaagtattgaggctcaaactactttnttaagaagtgttcttaagattgcacacatcgtcatgatttcttcattagagaccgtgagagcgggcataaaacgaagaagatcgggacgaggggaattaatcaacaagccttcaggttgatgctctctcgctaaatcaactaattttccgccaatatccttgcccagcattaaggcacgcagtaatcctttgcctcgctcgccttgaaggccgaactcagacgatagctttagtaattcggattggagcaatgcacctttagtgacaaccgattgcaaaaatcctggagctagcagctgctcgattacgctaattccgactgcggtcatcaaggcatttccgttataagtaccgccttgatctcccggcacaaaacaggcaacctcatccctacagagtagcgcagctaatggcacgcctccaccgattcctttgcccaaggacatgatgtcaggttcaatcccataattttgataggcaaacaacttaccagttcggccaaagccagcttgaacttcatcaacaattaacagcagattatgttctttagtcagttggcgtaaatcgcgcatgaactgatcatcgcatggaatcacaccaccctcaccttgaactggctccagcatcaccgccacactcttgtctgtgatgcatttcttcacggagttaatgtcgttaagctctgcttttggaaaacccggtacttgcggcgcaaacatcgtatcccaaccaggcttacccgaggcactcatagttgccaacgtgcgtccatggaaactatggtcaaaagtaattatttcgtaggccccatttttatggagttgcccccactttctagctagcttaatcgcaccctcatttgcctctgcaccactatttgcgaagaagactttatcaaagcagctattttcagttaatagatccgataaacggatcattggctcgttgtaaaaagcaggactcggattaattaatttttgggcttgctgatgcaaggcgttcacaatcccaggattgcaatgacccaaacaattgacagcccagccttgtaagaaatctaaatagcgtttgccattctggtcggttagccacgaaccctttccctccaccatgacgatgtcaggtcgtttagtgataaacatcaccgaatgggcatcaacgggacgagggtcaataggtttgttcattacgtaatcatacaaaagatcggcaaataatgggtatttagtctacccacttaggtctaagcacccactaaatcagcctcactggtaaaggaatcggcaaaaaactcatcttcaggtaactgacactctctcataaaatcagttcgagctgcctgaatgacgaccggcgccccacaggcatagacctggtatttagaaagatcagagaagtcttgcatgacagcgtgatggacaaagccagttcttccggtccatccatcatcaggtaaggcctccgatatgacgggggtgtaatgaaagtttgggagtgagagtgtaaattcgtggcagagggcatccatgtataaatcctttggacgcctgccgccccagtaaaaatagatctctcggcttatctttttttcctgaatatgaagcaatatggctttaattggtgcaaagcctgtaccagatgctaaaaagataatgggtttcttagactcttcttgtaagaagaagcttcctaggggaccctcaaagcgcaatatatccttttctttaatcttcctaccatcactcgcctgtccaaaaagggggtcggtaaacaagccgcccgatagatgacgaatatgtagctcgagcggcccctcctcatgcggcgcgcttgcaattgaatatgcacgtcgtttattgtctttaagtaggaactctagatactgtcctgccaagaactggaaacgctcactcgcaggaagctgcaacttcaaaatagctacatcgtcacttggaaattcaattgtattaattcggcaaggaactttacgaaccggtatatccccgccaccttgaacctcacgcacatcgatgaggaggttggattgtggatgcgcacaacataatagagtggcgccagccgtttcatccgatggatttaaggcgctctggctatggtccccatgggatacctttcccgagaggagtttgcctttgcaggagccacacgcaccatttttacanccatagggtaggttaatgccttgacgaagagccgcctcgagaacggtctcatcgtcctctaccaaaaacgttttaccactcatctttagctcaacctgatacgacaattccacttctcctaataaaaacattacgatgctgggtatgacttgtatttcttctgcatttcgtcgcccccgaatcctcatcattggctgtggggatattggacaacgcgttgttgcccatttaggaaaaacacaggccaaaccaaaaatctttgcactgagctcaagcccagagcgctttgcagcactgcgccaacaaggcatcacacccatcgagggtaaccttgatcaccctgagaccttgtggcgaattacccgcttagcatccaaggtgattcatctagcgcctcctcaaaatgaaggtgaaaacgatcttcgaacacgcaatctcatccaaattttatcccagggggcaggatctgtcagacgctttgtctacgtcagcactacaggggtatacggcaatcgtcatggtgattatgtggacgaaaccagcgcacccttagcaaccagtgcgcgttccaagcgacgtttggatgctgaatctgttttgcgacattgggcaattcatcagggtgtcaatctcagcattttgagggtgccagggatttatggccccaatcgcttaccgattgagcgcttacaagcaaacacgcccgccctcaacagtaaagaggatgcgtattccaaccacattcatgcagatgatttagccagacttgtacttggagccctttttattggaaagcctcaacggattgtgaatgcgtgtgacggcagtgagcaaaagatgggggactattttgatgaggttgcaactgctctaaatttaccaaaacctaaacgcttatctcgggaagaagttcgttctgcagtaagccccatgctttggtcgtttatgtctgaatcgcggcgtgttcgtaatgcacggctgaccgagttaaaacgcaaattactctacccgaaagtggctgactanctaaagacccttaaaagatagtnattacttccagctatcttttagaccaacnctttggttaaagactaagtgacctggtttgctatcaaggcgatcagcaacaaaataaccatggcgctcaa

SEQ ID NO: 1375 - DNA, 4000 bp, Escherichia coli
  misc_feature (56)..(56): n is a, c, g, or t
  misc_feature (251)..(251): n is a, c, g, or t
  misc_feature (293)..(293): n is a, c, g, or t
  misc_feature (335)..(335): n is a, c, g, or t
  misc_feature (548)..(548): n is a, c, g, or t
  misc_feature (1079)..(1079): n is a, c, g, or t
  misc_feature (1379)..(1379): n is a, c, g, or t
  misc_feature (1487)..(1487): n is a, c, g, or t
  misc_feature (1506)..(1506): n is a, c, g, or t
  misc_feature (1922)..(1922): n is a, c, g, or t
  misc_feature (1988)..(1988): n is a, c, g, or t
  misc_feature (1997)..(1997): n is a, c, g, or t
  misc_feature (2015)..(2015): n is a, c, g, or t
  misc_feature (2162)..(2162): n is a, c, g, or t
  misc_feature (2165)..(2165): n is a, c, g, or t
  misc_feature (2494)..(2494): n is a, c, g, or t
  misc_feature (2827)..(2827): n is a, c, g, or t
  misc_feature (3614)..(3614): n is a, c, g, or t
  misc_feature (3881)..(3881): n is a, c, g, or t
cagtagcgtagagtacatcaggatttgcaggtgaaatatccataccgattctcccnacatctcctcccggaaatccgttttctaccttattccaatgcgctccgccatcggtgcttttgtacatcgcgctgttggggccgccgctgaggtgcgtgtacacgtgtcttctacgttgatgggcggtggcataaagcgtttgtgggtcgcgcggatccatatgaatttcgttgaaaccagtatggtcgtcgacntatagaatacgcgtccaagtttgaccgccattttttgattcntaaataccgcgttctccgccggaggaccacaatggaccatangctgccacgtaaatatgatttccattcgtagggtttatggcaatcatgccaatatgttcgcttgtttcaagaccacttttggtccaggtttttcccgcatcacgactcacataaagaccgtctccgtaagccactgagcgctggttgttgttttctcctgttccaacccaaattacattagagttgttagggtcaatcgcgatacaacctgtnctgtagctgccttggctgtcgaatataggttcgaaagtggtgccattattcgtggttttccagacgcccgaagaggccaatgccaagtacattgttccggggtttttcgtatcaacggctaaatctgcgattcgtccagaagtggttgcagggccgacgttgcgaaatttgaacgcactgaggctggttttcgcccaaagcggctggtcttccttgcttttgcgctgggcttgtgcaggaagcgtgaatagaattgcaaaaagaacgactacggctgaggtagtacggcgaaatgaatggctcattcggaagagtatttaaatgaattggaccacaataagtgcagtcactgcaaattacgttaaaagatgcaaaacgccttagaatttccaggtcgacccgatggacagcatagagcgctgtctcgtgatggctagtgcctcggtataggttgcactgaacgggtaatattgtgtggattgacggagttggctccagctcatgaaaaaggtgtggccttcgctttgtaangagatgcctaaactgcgacgccactgcgcgtcttgcccttgttgaaaggcattggtatagccgctacctgcgcgcactgtgatggggcctaaacgcaattcagcccctgcagcaaaggtatgttggtcgtccaattcttcgttgacgatttggttgaggtaccgttcttctctgctcaaagctgcagcaaaaccgtgtgggatgtaggtgtgactcaacgtgataaggcctaatcggccacctactaacgtgaaacccgacttgagcttcggcgcagtcatcatgctccattggtagagnagaccgtatccttctgctttcgatatgatttggttgacggaagaacggaacgcaatcatctccgtatcccagttttgtgtaaaactgtacacctgaggaaggtcaacngcaattccaatgcgcatancttgtgtagggcggtataaaagtcctgcgttcgcagtgatgccaatgccactgttgtcccaataatccacaacatcaaaggaggtgaggtctgtagtttcgctgtagctctcttcatgcgtcaccgtcactttttcgaaagagtgcacgattttaaccgatgcgccgtagtaaagctgtttgctcgcttctgcaccaaagcccaaagtccattgatttttcattccggtacggcggagatcgtgctcgaagtctgtgttgttgagatttgcggtgctgtagtattcacccgtcgtgtcgttgcggtcggaagcatagctttggtagagcatgtcttcatacggacctacccacggtagatcgtctggcgaataatagtggctgttttctaaccattgctgctggatgctgcccccnccagtctgattgtaacgtaagttttgacgaaataaatcgtctgaattgtaggtaaagaaaatattnacacccgantcaggctctttacttatntagccaaggttggcaacattcatacttagggcattcccggttgggaagttgttgctgtttttgaaatgcgtcgtactgtagaaggaaagatcgctaccgaatgcagcctgtcggtagaggcctgctccagcaggattttcagcaagngcngtgaaagaaccactcattgcggtcattgcgccggagaggctattgtaacgtgcatcaccccacaaaaccggctggttaagcgtcgcaaagtagtccacactttggctcttacctagaaaagtcaaaaagaggagtagtgacagtaatcgaagttttttcatcgtctacgagagccgcttgagttggaagtggttccgctacgtgttggagcggaaggcgtgtacgtactgtttgttgaaggtgcgctctcgctgcggaaactggcgctccgttcgtagcttgatcgtgtcgttggagcatattgcttctcattgcgcgtggatcgaatnggttgaaccgcactcgagggcctgctgctgccagttgggcgcattgtcgaaggctgacgaagtgatttttgagcagattcgacaagcggttctgcccaccctctggaagtcttcgatactggtgcggaagccccctctgtaacgacttcgcttctccaatctgaagaataattggcaatgcgaccgctggtactcccttgtccgccgcttctgcggtatttgtttggacggcggccaccgtaatttacccccgttttaatagggtcatttgagggtgaggaagtggtgttgccaaaattggtcactccattccacgcattccatccgttgccntatggattatagccgtatccgtatgcattgtacccataagggttatagcccatgccccatgtgttgttccagccgtatggattgtagccaaaaggttgcatgccccaattgttattccatccgaatgaattgtatccagaggtgtggtagcccatcgaactccaagcgtttccgcccatgccattgttccattgtggatagtaataggtgccgaatcccggggtccaatagcttctgccgttgttccaccagttagaggatgatccttgaagtggtgttacgagcattgattgttcgccttcccagatgagtgcatagtcatcctcagtatatggctcgctatccattactcccatggattttgcaccggcaaatcgcggcgcaggaagcgcagggttgtaataattttcgtcctcgaaataattatccgtcaaactcacagaagtcccacatgatgataacatgagggaagaaatgaaaagtagtagtatgggcttcttcataacttcagtagatttgcgtttcagattaaccaaggtacaaaagttataccaagctaaaattcatggcaaaatatctcacaacacgcgaggaggattactcaaaatggtacaatgaattggtagtcaaagctgatttggctcaaaattcaggtgtgcgcggttctatggtgataaagccctatggctttgctatttgggaaagcatccaagcggatcttgacagacggtttaaggaaacgggtcacatgaacgcgtatttcccgctattcataccgaaatcatanttttccaaagaagcttcacacgtggacggttttgccaaggaatgtgcggtagtgactcattatagattaatggatgaccccaatggtggtggcgtagtcgtagatccttcggcgaaattggaggaggaattgattgtccgccccacgtctgaaaccattatttgggacacttacaaagattggatacagagttaccgcgaccttcctattctagtgaatcaatgggcgaacgtggtacgttgggaaatgcgtacacgcttattcctnagaacgtcagagtttttatggcaagaaggtcataccgctcacgctacgaaggaagaggccatcactgaggcagagacgatgttaaatgtctacacggactttgttcaggacgtcatggc

SEQ ID NO: 1376 - DNA, 4000 bp, Escherichia coli
  misc_feature (1987)..(1987): n is a, c, g, or t
  misc_feature (1990)..(1990): n is a, c, g, or t
  misc_feature (1997)..(1997): n is a, c, g, or t
  misc_feature (2424)..(2424): n is a, c, g, or t
  misc_feature (2426)..(2426): n is a, c, g, or t
  misc_feature (2428)..(2428): n is a, c, g, or t
  misc_feature (2438)..(2438): n is a, c, g, or t
  misc_feature (2461)..(2462): n is a, c, g, or t
  misc_feature (2470)..(2471): n is a, c, g, or t
  misc_feature (2476)..(2476): n is a, c, g, or t
  misc_feature (2480)..(2480): n is a, c, g, or t
  misc_feature (2488)..(2488): n is a, c, g, or t
  misc_feature (2491)..(2491): n is a, c, g, or t
cgtaaaattcataatttatagaacaagaattaaagtaattgttgttccaatcaagataatacaaatttaatctctaaaggtaattatattatctctaaagattataaatgtggttggcgtgaccttaagaaataggctaaacctttatattcctttgcttcctctactattatcaaatccaaggagaggatgaatattacttctcctaaagatcaattagttcgttaggctgaatattataggaattttgcttcagatattactagccatagtttaaatagcaattattgaactgttgtttttagaaacagtcagagatattctcagtcatagaatattaatgatcccataactatcaccgaatttagaattattgttctatcaatgaagaataataagacatcagaccctgataatatttccactgaattttacaaagcaatgttttacggtatggatctagaagaaaagtaccctagttccacaaaatgtcttgaaattttattaaataaagtttcatatcttaatatatatttataatgtatttttacgtttaaatgtatacaatatattaatattttttaataattaataaataaagtaatggacaatctctttagagtctaaaaaaaaaaaaattgttatatatatatataaaatagatatttttttgttatagtttttgtacataataataatgtaccaatatataaattattatttattatctattattttttatttattatatattatttactatttactatttatttatttattatttattacttagaagtattaatattaatttgtaataaataataaataataaacattatttattacaaattaatattaatacttctaatggtcgtatcatattcttgttgggcaaagggttatacaagaatttgaatggtctatcgttataaaacactatattcggtgacaagcccctgaaaggaataataaaaaaacatgaaaattttattaatttgtcatttacaatctaaaattgttggatacaaacaaaataatggtaatatttttatttttcttccagatgaaaaaaaaaagttattaaaaacctcaatctaataaaagaagaaaagaaaaattattaatcaaatattcaataaatacaagattgattttctatctagcattttatcatgcttgataataataacgatattttacatatattcatattttaaacaaaatttttaaaattttggataatttattaaaaaaaattagaagaaacgataaataattgctgaaaaacagaattaatatagaaaaaagcttaagaaatgaattaaatataaagataattagttgaaatacttaatatccatgattatacatttattaacgcccaataatttttcactatgtttaatacaagacatatcgaaataaagttttatttcacttttactgaaaacaattagtaaaactccgtaatatttttacatattaccattatttttattaccattattttctatatcactaataagcaaatcatatggaaaatcaataaggtatcaaagctttctataacttcttttggaggagtacaatattacaaccaagagaacaacataaataaaaatattcatttgtcatgaattatcttattatgatatgtttcctttttgttttgtcttattatcactatatatagacatagctttaatccacatcataagattttatattacattacatatgcgattttaaatttttcgtatttcatatatttctattaaatttttccacataatactttaattatttttttattatttatcaatttaataaaaaaatatattatttagattaattaatgaatcaaaaaaagtttatttcttttttaatgaataaaaattaaaaaaataaaaaggaattacaattataatatagcaaatgatatatgtttaataaaaatatgtagtaaaaaaaaaaaaaaaaatanatnattttanaaattaaaataagtataaataataactattgtaataaaaataataataataatatgctacatttatatgatgctaaaacaactgtgtattgaatgtatatatatatatattcaactttatatatatatcatttataaaatgtatataacattaatatatgataataaaaaaatattgtatatatttatttggaatttatatcaaattagtttatatataaatgtacttgttatttttaaaacactttaaataatttttataagtatatgtatatatacatatactaattaagtaatcaattaaaatatatatatatatatacattaccgaagaattactgataaaacaatatatatatataatatatagttatagatttatttgtaattatgtttttttttttttttttttttttttaaaaaaaatntntntaaataaatntttataaaaaaaaaataataatnntttaatannattantctnaaaatatnaantatttcaagtaattttatttcttagctaaagaccttttaaaatatataatacgatacaacaatacatattatctataatattatttttttataataattttattacataattttttttttaacactatttaattagtaaaaacatattttattaaaatcatttatttttaattaaaacaatttttattgtgaaataattattttataatgaaatgtttactatagatagggaaattattggcaatatacgttcaaccaaatttattattatgttctaataatttagcattataacagagaaactagtattaagagaaatgaaaaaaaaaaaaaaatttttttctacaaaatttttacttatttaattggtttttattaatttatttattacagattattagaattattaaaaaattattataattttatggctataataattaattaataaggaataataaatagaaataatagcaatacaataactataaaataataataagtataataaataaattaataaagatcaattaaataattaaaaattataatactggtttcactgtaataatattgatttattgatttatcagaccatgataataaattattattctttattatttttattttattattattaatatgaaatttttaataattttaatacaagtacataatgtataatgtatatagatatgtatacattaaatctttattattgaaatattttattataatattataaattaacatgtgatttgattgaaagtaaaccaatcaaattcatattgataattgtttactatcaaaagagaattgataataataatttttaatactctcttttatttgagaagtgttacaatatggtatgttaaagattaatgaataatcaaaatgaatgatgaatgatgaacgatgaattatttagtttgataaaatttttattatggtgaattagtgatgtatatgtgcttgacattgcattaatttaaaattaaaaaatactttaattattatttacaaataataacgatgtaatggaaaaattgatggattgttgaaaatgttttgtttttgattttgttctttttaaaaataataaaaatggatgagaaataaaaatttaaaagtttaaaagttattctaacagttattattttttatttattataaatgatatattaaaatataatggtaaattatattagtccatcgtcgtatctgacaaaaactcattccaacacattcttcgtctccttaacactaacattgatggtaagcaaaagcttcaatttgctttaacttccattcgtggttgtggtagacgttacgctaacattgtttgtaagaaggctgaaatcgatctttccaagcggtaaatgtcttagaatgaaataagaataaaaatattgtgaagataaattagttttttattattattattaatattggtaaatattggtaaatatacttattattttaaaaaatattataaattaatag

SEQ ID NO: 1377 - DNA, 4000 bp, Escherichia coli
  misc_feature (1)..(180): n is a, c, g, or t
  misc_feature (465)..(467): n is a, c, g, or t
  misc_feature (469)..(472): n is a, c, g, or t
  misc_feature (477)..(478): n is a, c, g, or t
  misc_feature (480)..(481): n is a, c, g, or t
  misc_feature (486)..(486): n is a, c, g, or t
  misc_feature (489)..(489): n is a, c, g, or t
  misc_feature (491)..(491): n is a, c, g, or t
  misc_feature (493)..(494): n is a, c, g, or t
  misc_feature (496)..(499): n is a, c, g, or t
  misc_feature (502)..(502): n is a, c, g, or t
  misc_feature (505)..(505): n is a, c, g, or t
  misc_feature (507)..(508): n is a, c, g, or t
  misc_feature (513)..(513): n is a, c, g, or t
  misc_feature (515)..(515): n is a, c, g, or t
  misc_feature (520)..(523): n is a, c, g, or t
  misc_feature (525)..(526): n is a, c, g, or t
  misc_feature (528)..(529): n is a, c, g, or t
  misc_feature (532)..(535): n is a, c, g, or t
  misc_feature (538)..(538): n is a, c, g, or t
  misc_feature (540)..(543): n is a, c, g, or t
  misc_feature (546)..(548): n is a, c, g, or t
  misc_feature (553)..(553): n is a, c, g, or t
  misc_feature (555)..(555): n is a, c, g, or t
  misc_feature (560)..(560): n is a, c, g, or t
  misc_feature (563)..(566): n is a, c, g, or t
  misc_feature (570)..(570): n is a, c, g, or t
  misc_feature (572)..(572): n is a, c, g, or t
  misc_feature (577)..(577): n is a, c, g, or t
  misc_feature (581)..(584): n is a, c, g, or t
  misc_feature (589)..(589): n is a, c, g, or t
  misc_feature (591)..(593): n is a, c, g, or t
  misc_feature (595)..(596): n is a, c, g, or t
  misc_feature (599)..(599): n is a, c, g, or t
  misc_feature (601)..(601): n is a, c, g, or t
  misc_feature (605)..(605): n is a, c, g, or t
  misc_feature (609)..(609): n is a, c, g, or t
  misc_feature (612)..(615): n is a, c, g, or t
  misc_feature (624)..(624): n is a, c, g, or t
  misc_feature (626)..(627): n is a, c, g, or t
  misc_feature (629)..(630): n is a, c, g, or t
  misc_feature (634)..(634): n is a, c, g, or t
  misc_feature (638)..(638): n is a, c, g, or t
  misc_feature (645)..(646): n is a, c, g, or t
  misc_feature (649)..(649): n is a, c, g, or t
  misc_feature (651)..(652): n is a, c, g, or t
  misc_feature (656)..(657): n is a, c, g, or t
  misc_feature (659)..(661): n is a, c, g, or t
  misc_feature (663)..(663): n is a, c, g, or t
  misc_feature (665)..(665): n is a, c, g, or t
  misc_feature (670)..(670): n is a, c, g, or t
  misc_feature (674)..(674): n is a, c, g, or t
  misc_feature (678)..(678): n is a, c, g, or t
  misc_feature (682)..(682): n is a, c, g, or t
  misc_feature (684)..(684): n is a, c, g, or t
  misc_feature (686)..(686): n is a, c, g, or t
  misc_feature (693)..(694): n is a, c, g, or t
  misc_feature (696)..(699): n is a, c, g, or t
  misc_feature (701)..(701): n is a, c, g, or t
  misc_feature (703)..(709): n is a, c, g, or t
  misc_feature (711)..(717): n is a, c, g, or t
  misc_feature (719)..(721): n is a, c, g, or t
  misc_feature (723)..(726): n is a, c, g, or t
  misc_feature (728)..(729): n is a, c, g, or t
  misc_feature (731)..(731): n is a, c, g, or t
  misc_feature (733)..(737): n is a, c, g, or t
  misc_feature (741)..(747): n is a, c, g, or t
  misc_feature (749)..(752): n is a, c, g, or t
  misc_feature (754)..(754): n is a, c, g, or t
  misc_feature (756)..(765): n is a, c, g, or t
  misc_feature (767)..(772): n is a, c, g, or t
  misc_feature (775)..(775): n is a, c, g, or t
  misc_feature (778)..(780): n is a, c, g, or t
  misc_feature (782)..(782): n is a, c, g, or t
  misc_feature (785)..(788): n is a, c, g, or t
  misc_feature (791)..(796): n is a, c, g, or t
  misc_feature (798)..(807): n is a, c, g, or t
  misc_feature (810)..(823): n is a, c, g, or t
  misc_feature (825)..(825): n is a, c, g, or t
  misc_feature (827)..(832): n is a, c, g, or t
  misc_feature (834)..(837): n is a, c, g, or t
  misc_feature (839)..(840): n is a, c, g, or t
  misc_feature (842)..(842): n is a, c, g, or t
  misc_feature (844)..(844): n is a, c, g, or t
  misc_feature (846)..(858): n is a, c, g, or t
  misc_feature (860)..(878): n is a, c, g, or t
  misc_feature (880)..(897): n is a, c, g, or t
  misc_feature (899)..(900): n is a, c, g, or t
  misc_feature (903)..(905): n is a, c, g, or t
  misc_feature (907)..(911): n is a, c, g, or t
  misc_feature (913)..(914): n is a, c, g, or t
  misc_feature (919)..(932): n is a, c, g, or t
  misc_feature (934)..(938): n is a, c, g, or t
  misc_feature (940)..(940): n is a, c, g, or t
  misc_feature (942)..(943): n is a, c, g, or t
  misc_feature (946)..(950): n is a, c, g, or t
  misc_feature (952)..(960): n is a, c, g, or t
  misc_feature (962)..(969): n is a, c, g, or t
  misc_feature (971)..(972): n is a, c, g, or t
  misc_feature (974)..(979): n is a, c, g, or t
  misc_feature (981)..(982): n is a, c, g, or t
  misc_feature (984)..(987): n is a, c, g, or t
  misc_feature (989)..(992): n is a, c, g, or t
  misc_feature (994)..(999): n is a, c, g, or t
  misc_feature (1001)..(1002): n is a, c, g, or t
  misc_feature (1004)..(1008): n is a, c, g, or t
  misc_feature (1010)..(1014): n is a, c, g, or t
  misc_feature (1016)..(1017): n is a, c, g, or t
  misc_feature (1019)..(1019): n is a, c, g, or t
  misc_feature (1021)..(1030): n is a, c, g, or t
  misc_feature (1033)..(1039): n is a, c, g, or t
  misc_feature (1041)..(1042): n is a, c, g, or t
  misc_feature (1044)..(1045): n is a, c, g, or t
  misc_feature (1047)..(1050): n is a, c, g, or t
  misc_feature (1052)..(1053): n is a, c, g, or t
  misc_feature (1055)..(1056): n is a, c, g, or t
  misc_feature (1058)..(1062): n is a, c, g, or t
  misc_feature (1065)..(1080): n is a, c, g, or t
  misc_feature (1082)..(1084): n is a, c, g, or t
  misc_feature (1087)..(1091): n is a, c, g, or t
  misc_feature (1093)..(1099): n is a, c, g, or t
  misc_feature (1101)..(1107): n is a, c, g, or t
  misc_feature (1109)..(1117): n is a, c, g, or t
  misc_feature (1119)..(1120): n is a, c, g, or t
  misc_feature (1122)..(1123): n is a, c, g, or t
  misc_feature (1126)..(1128): n is a, c, g, or t
  misc_feature (1130)..(1132): n is a, c, g, or t
  misc_feature (1134)..(1134): n is a, c, g, or t
  misc_feature (1136)..(1136): n is a, c, g, or t
  misc_feature (1138)..(1140): n is a, c, g, or t
  misc_feature (1143)..(1144): n is a, c, g, or t
  misc_feature (1146)..(1146): n is a, c, g, or t
  misc_feature (1149)..(1149): n is a, c, g, or t
  misc_feature (1151)..(1158): n is a, c, g, or t
  misc_feature (1160)..(1171): n is a, c, g, or t
  misc_feature (1173)..(1173): n is a, c, g, or t
  misc_feature (1175)..(1175): n is a, c, g, or t
  misc_feature (1178)..(1179): n is a, c, g, or t
  misc_feature (1181)..(1181): n is a, c, g, or t
  misc_feature (1184)..(1188): n is a, c, g, or t
  misc_feature (1190)..(1193): n is a, c, g, or t
  misc_feature (1198)..(1210): n is a, c, g, or t
  misc_feature (1212)..(1213): n is a, c, g, or t
  misc_feature (1215)..(1218): n is a, c, g, or t
  misc_feature (1220)..(1221): n is a, c, g, or t
  misc_feature (1223)..(1225): n is a, c, g, or t
  misc_feature (1227)..(1230): n is a, c, g, or t
  misc_feature (1232)..(1235): n is a, c, g, or t
  misc_feature (1237)..(1237): n is a, c, g, or t
  misc_feature (1239)..(1240): n is a, c, g, or t
  misc_feature (1242)..(1242): n is a, c, g, or t
  misc_feature (1244)..(1259): n is a, c, g, or t
  misc_feature (1261)..(1267): n is a, c, g, or t
  misc_feature (1269)..(1272): n is a, c, g, or t
  misc_feature (1274)..(1276): n is a, c, g, or t
  misc_feature (1280)..(1282): n is a, c, g, or t
  misc_feature (1284)..(1284): n is a, c, g, or t
  misc_feature (1286)..(1296): n is a, c, g, or t
  misc_feature (1298)..(1301): n is a, c, g, or t
  misc_feature (1304)..(1305): n is a, c, g, or t
  misc_feature (1307)..(1328): n is a, c, g, or t
  misc_feature (1330)..(1331): n is a, c, g, or t
  misc_feature (1333)..(1335): n is a, c, g, or t
  misc_feature (1337)..(1338): n is a, c, g, or t
  misc_feature (1340)..(1343): n is a, c, g, or t
  misc_feature (1345)..(1346): n is a, c, g, or t
  misc_feature (1348)..(1348): n is a, c, g, or t
  misc_feature (1350)..(1350): n is a, c, g, or t
  misc_feature (1353)..(1355): n is a, c, g, or t
  misc_feature (1357)..(1358): n is a, c, g, or t
  misc_feature (1360)..(1360): n is a, c, g, or t
  misc_feature (1362)..(1372): n is a, c, g, or t
  misc_feature (1374)..(1376): n is a, c, g, or t
  misc_feature (1378)..(1384): n is a, c, g, or t
  misc_feature (1386)..(1389): n is a, c, g, or t
  misc_feature (1391)..(1392): n is a, c, g, or t
  misc_feature (1394)..(1395): n is a, c, g, or t
  misc_feature (1397)..(1403): n is a, c, g, or t
  misc_feature (1405)..(1412): n is a, c, g, or t
  misc_feature (1414)..(1414): n is a, c, g, or t
  misc_feature (1416)..(1419): n is a, c, g, or t
  misc_feature (1421)..(1427): n is a, c, g, or t
  misc_feature (1429)..(1429): n is a, c, g, or t
  misc_feature (1431)..(1440): n is a, c, g, or t
  misc_feature (1442)..(1450): n is a, c, g, or t
  misc_feature (1452)..(1460): n is a, c, g, or t
  misc_feature (1462)..(1466): n is a, c, g, or t
  misc_feature (1470)..(1472): n is a, c, g, or t
  misc_feature (1474)..(1476): n is a, c, g, or t
  misc_feature (1478)..(1478): n is a, c, g, or t
  misc_feature (1480)..(1484): n is a, c, g, or t
  misc_feature (1487)..(1497): n is a, c, g, or t
  misc_feature (1499)..(1501): n is a, c, g, or t
  misc_feature (1503)..(1503): n is a, c, g, or t
  misc_feature (1505)..(1509): n is a, c, g, or t
  misc_feature (1511)..(1514): n is a, c, g, or t
  misc_feature (1516)..(1516): n is a, c, g, or t
  misc_feature (1518)..(1519): n is a, c, g, or t
  misc_feature (1521)..(1537): n is a, c, g, or t
  misc_feature (1539)..(1551): n is a, c, g, or t
  misc_feature (1554)..(1554): n is a, c, g, or t
  misc_feature (1556)..(1558): n is a, c, g, or t
  misc_feature (1560)..(1565): n is a, c, g, or t
  misc_feature (1567)..(1567): n is a, c, g, or t
  misc_feature (1569)..(1570): n is a, c, g, or t
  misc_feature (1572)..(1572): n is a, c, g, or t
  misc_feature (1574)..(1574): n is a, c, g, or t
  misc_feature (1576)..(1583): n is a, c, g, or t
  misc_feature (1586)..(1591): n is a, c, g, or t
  misc_feature (1593)..(1595): n is a, c, g, or t
  misc_feature (1598)..(1598): n is a, c, g, or t
  misc_feature (1600)..(1601): n is a, c, g, or t
  misc_feature (1607)..(1607): n is a, c, g, or t
  misc_feature (1610)..(1611): n is a, c, g, or t
  misc_feature (1613)..(1613): n is a, c, g, or t
  misc_feature (1617)..(1619): n is a, c, g, or t
  misc_feature (1621)..(1624): n is a, c, g, or t
  misc_feature (1626)..(1626): n is a, c, g, or t
  misc_feature (1628)..(1629): n is a, c, g, or t
  misc_feature (1632)..(1633): n is a, c, g, or t
  misc_feature (1635)..(1636): n is a, c, g, or t
  misc_feature (1638)..(1638): n is a, c, g, or t
  misc_feature (1640)..(1641): n is a, c, g, or t
  misc_feature (1646)..(1650): n is a, c, g, or t
  misc_feature (1652)..(1654): n is a, c, g, or t
  misc_feature (1656)..(1656): n is a, c, g, or t
  misc_feature (1658)..(1660): n is a, c, g, or t
  misc_feature (1662)..(1664): n is a, c, g, or t
  misc_feature (1669)..(1669): n is a, c, g, or t
  misc_feature (1671)..(1671): n is a, c, g, or t
  misc_feature (1673)..(1673): n is a, c, g, or t
  misc_feature (1675)..(1678): n is a, c, g, or t
  misc_feature (1680)..(1682): n is a, c, g, or t
  misc_feature (1684)..(1687): n is a, c, g, or t
  misc_feature (1689)..(1691): n is a, c, g, or t
  misc_feature (1694)..(1694): n is a, c, g, or t
  misc_feature (1697)..(1699): n is a, c, g, or t
  misc_feature (1702)..(1707): n is a, c, g, or t
  misc_feature (1710)..(1715): n is a, c, g, or t
  misc_feature (1717)..(1717): n is a, c, g, or t
  misc_feature (1719)..(1719): n is a, c, g, or t
  misc_feature (1722)..(1723): n is a, c, g, or t
  misc_feature (1728)..(1728): n is a, c, g, or t
  misc_feature (1730)..(1733): n is a, c, g, or t
  misc_feature (1735)..(1738): n is a, c, g, or t
  misc_feature (1741)..(1741): n is a, c, g, or t
  misc_feature (1743)..(1743): n is a, c, g, or t
  misc_feature (1747)..(1747): n is a, c, g, or t
  misc_feature (1785)..(1785): n is a, c, g, or t
  misc_feature (1963)..(1963): n is a, c, g, or t
  misc_feature (1965)..(1965): n is a, c, g, or t
  misc_feature (1971)..(1972): n is a, c, g, or t
  misc_feature (1977)..(1977): n is a, c, g, or t
  misc_feature (1987)..(1987): n is a, c, g, or t
  misc_feature (1991)..(1991): n is a, c, g, or t
  misc_feature (2079)..(2079): n is a, c, g, or t
nnnnnnnnnnnnnnnnnnnnnnnnnnnnnnnnnnnnnnnnnnnnnnnnnnnnnnnnnnnnnnnnnnnnnnnnnnnnnnnnnnnnnnnnnnnnnnnnnnnnnnnnnnnnnnnnnnnnnnnnnnnnnnnnnnnnnnnnnnnnnnnnnnnnnnnnnnnnnnnnnnnnnnnnnnnnnnnnnnnngccgaccagttctcaagatttggctcagcttggggaggcccatcataccggaaacgccctgcatgatcctgactctctctggcctagcggcggcgtcgctctaagcacgcgctagcgagacgagcattgctgctgatcgcagacccccaattgaggcttgggccctgacacgcaacgcactcgaattaattcgggcggcacttaacactagctacgagcgcgcaacgtaagaaaacactgaaaccagcgttttaagacaaggtattcccgttgttctcttttacnnnannnngatcnngnnccagngcnananngnnnntgnccntnnccatnancatannnntnncnnttnnnnttncnnnntcnnncatgntngcgantannnncagnancatgnccannnntgatnannngnnatngnagcnccancannnntcaacacgnanncnnagcncatnatcattnngcncnnctanntnnngntngtgtnaggngcgngcgngntncccatgnngnnnngngnnnnnnncnnnnnnnannncnnnncnnanannnnncacnnnnnnncnnnncncnnnnnnnnnncnnnnnncancgnnnanggnnnncgnnnnnncnnnnnnnnnnatnnnnnnnnnnnnnncncnnnnnncnnnngnnancncnnnnnnnnnnnnngnnnnnnnnnnnnnnnnnnnannnnnnnnnnnnnnnnnngnngcnnntnnnnntnnagatnnnnnnnnnnnnnnannnnntnanngtnnnnnannnnnnnnnannnnnnnngnntnnnnnncnngnnnngnnnntnnnnnntnncnnnnncnnnnncnncncnnnnnnnnnnctnnnnnnncnncnncnnnncnngnncnnnnnccnnnnnnnnnnnnnnnnannncgnnnnntnnnnnnncnnnnnnncnnnnnnnnnanncnncannntnnncncnannnccnngntcntnnnnnnnnannnnnnnnnnnnangnttnngngtnnnnntnnnnatcgnnnnnnnnnnnnntnngnnnntnnannntnnnngnnnntngnngntnnnnnnnnnnnnnnnntnnnnnnntnnnntnnncgtnnncngnnnnnnnnnnncnnnnganngnnnnnnnnnnnnnnnnnnnnnngnnannngnncnnnntnncncntcnnncnngngnnnnnnnnnnncnnncnnnnnnncnnnncnngnncnnnnnnntnnnnnnnncnannnncnnnnnnnancnnnnnnnnnncnnnnnnnnncnnnnnnnnncnnnnntctnnngnnntngnnnnnagnnnnnnnnnnnannntncnnnnncnnnntncnntnnnnnnnnnnnnnnnnncnnnnnnnnnnnnntgntnnngnnnnnngntnntntntnnnnnnnnttnnnnnntnnnttntnnttattnatnntnaatnnntnnnnantnnttnntnntngnnactgnnnnntnnntncnnncnnnttgcnantngnnnntnnntnnnngnnnctngcnnntgnnnnnngannnnnngncnctnnccctngnnnntnnnnctntngctnttggctcttggctcttggctcttggctcttggctcttngctttcgactttcgactttcgactttcgactttcagcctgctagagcctagttcttagtcttatctcttaggtctaacttggatttctttaatgttctgtttgcgggtttatcctagctgcttcctcgctgcttgctgcttgctgcttgctgcttgctgcttgctgcttgctgcttgntncttgtnncttgnttcttgtttnttgntttttggtttttggtttttggtttttggtttttggtttttggtttttgcgggatgttgatggatctcatccattgtgcacgataggtntaggtcttaacctagggccaccaaacccaaaaagcagtcaagggccctgttgcgtccagcgctgaaacagtcctcccaatgctcgaagcaccggcctagggggcaacttagcagcagctagagcggcttgattcagtcgtccaggcacgcacaccacctcttgagaaaagagcgcttcgatacctgcacgtgcaacatactccggggacagaacaagcgcctcaggcagctcatccaaaggtagttcggcaacgaggtccgtgcgagtgatccccgggcagagcgcggtcaaactgatgcccgagcctcttaactcctcgttcagggcttccgtgagcattagaagatatgccttggcagcgccgtactgagccaaccctgggacgggatgaaacgctcccatggaggcaacattcaaaatacgaccctttcgacgtgccttcatctgaggaatcagccgatgcataagcagtgacggcgtggtcatattgagttgcattaagccttcaacgccgtgaggctcggtctctaaaaacgatttgtggggtgcgccacccgcattattgacaagaatgtcgatctcccgatcagcgacagccgccaataactctgagggtccctctggcttcgacaaatcgatcgcgagacaaacgggctccgcagttttgggcaaactggccgccaccgctgcaagccgctcaagacctcgagccaccaagatgagccgcagcccccgctcggcaaggcctcgtgcaatcgccgcgccaataccggcggatgcgccagtaactaacgccgtggctggtcgggctttgctagcactcactgcaggaccctcctcgtttgctgggacccatcattcacgaccgcgcggctgtcttcttcataggcttctttattgccttcttcatcgcctcttggtcaatcgaaccaattgaatgaacgggttttgaagcactaacaccgctaggactgtgatttaaagggtgaaaattgttccagataatcaatctcttcgctgacataacgccgctcttctgacagaaagcgatcgaccgccgctttgaatcccgaatgcgcaatatagtgggcgctataggtttcacttggcaagtagccccgtgcaagcttgtgttcgccctgagcgcccgcttcaactcgctcaagcccgcgctcaatcgcgaactctatcgcctggtagtagcagacttcgaaatgcaaaaacggacgatgctcgatacagccccaatttcggccaaacaagcattcacttccaataaagttgatcgcgccggcaatgtatcggtcaccagaacggcacatcaccaataaaattcggtcggccatcgtctcacccactcgcgagaaaaacgatcgggtcaaatagggcgacccccactttcgactaccagtatccatataaaagcgaaaaaaatgatcccagtgtgtttcggtgatcatgtccccggtgagtcgctcaatcacgagatcaccctgaaccgcatctcgtctttcacgccgaatgttcttgcgttttttactcgacagatcggacaagaaggcatcaaagctgtcgtagtcttgattctgccagtggtactgcttatgcgtgcgtaggagccatccttcttcacctcgccttcgccacgcagcttggtccaggaagttaatgtgaactgagctgatatcgtgatggtctgccagttgttgggcgccacgtgcaagcgcggtttcggccgccacatccatcgtcagcaggcggcgcccggtcgcaggtgtgaaaggcacggcactgagaagctttgggtaatagcggccgccggctctttcgaaggcgtcggcccaactataatcaaagatatattcgccttgggaatgccctttcaaatataaaggcatcacgccgcacaccgcatcagcg

SEQ ID NO: 1378 - DNA, 4000 bp, Escherichia coli
  misc_feature (1152)..(1152): n is a, c, g, or t
  misc_feature (1979)..(1979): n is a, c, g, or t
  misc_feature (1985)..(1985): n is a, c, g, or t
cttcgtcatacatccttctcaatggtggaggtagtacccaaacttgagaagcttatagactttgatatcccagaggaagatatggatatacagtttacacgttcgggtggtccaggtggacaaaacgtaaacaaacgcgagacagcggtaaggatagtgcacagagagtctgggctttctgtacatatagacggagagcgttctcaagcacaaaacaaagaaaaggcattagagcttttaaggggaaagcttttcaaaaagcgcgaagaagaccgtaaaaagcatgaaaaaggtctatcagtgagtgctactacaagcatagaatggggaagccagatacgctcttacgtgcttcatccgtataagatggttaaagaccacaggacagatgtagaggtccgtgatgtagagaaagtcttggacggtgagatacaagattttctagacgcggaaaagaatttagagtaaaatagatagatattatcatctatgatttattttgatcaagtttcaaaactatacactggtgggcatacagcacttgataaagtgactctatcaatcgccccaaaagaattcgtctctattgtcgggcattcaggtgctggtaagacaacactcatcaaaatgcttttagcagaagatattcctacgcaaggaggtgtcttttttgagtcgtctgacatccacggatttaggagaccacaacttaatagttttagaagacgcataggaactgtgtttcaagacttcagacttttgccgaataagactgcatatgaaaacatcgcttttgctatggaggcagcaggtaagagtgacgaagagatagcttctgacgtacctcatgtgttggagcttgtagaccttggcgacaagatgtggaactttccacatgaactttcaggtggtgaaaaacaaagagtggcaatagcgcgcgctattgtgaatcaacctgatattataatagccgacgagcctacaggaaacctagacccgataaatacatttgagatagtacagattttaaaaaagattaacgacttaggtacaatggtaatacttacaactcacaacaaaggtgtggtagattcagttggtgggcgagtaataacgatggatagtggacgagtaatacgagatgataagaanggtaaatatgctttataaaattaaggagccagagcaaagcgaaggcgactataattttaaaagcccccttcttttaccagctttgctggataaggagggggcaatatgatgctaagacttcttttacacctttggtgaaaaggagatgggcacaaattagattttgctttatgttacaatgtattatgtatatttaataaagaaaaaaagtaaaggtggagacttttatattggatatacttctaatttagaaaataggttggatcaacatggtgttttaaaagaagatttaatatattatgaagcttataaggataaatatgatgcaactacacgtgaacaacaattgaaagaatttaaaagttcatggggtcaattaaaaaaaagaattatgcgaagtaaattataaaaattaacccacctccttttccagctgatatgctggcaaaagaagggggtgatgattttctaaacactcacttcgttcgcgaagaaaatctatcatgataggaataaatttaaaaagaataataaaatcaggttttgtgagtttctggagaaacggagtagtttcttttgcttcaatccttgtgatgacgatgactctcttcatgcttggttcaatcctttttgtaaatgcgacgcttgacgcttcacttactcaaatccgcgacaaagtagatatcaatgtatactttgtaaccacagcaccagaggacgacatactaacccttaaaacctctatagagacacttcctgaagttgcaaacgtagaatacgtctctcgtgagaaggctcttgcagagtttacgcttcgccatcagaangaccancttacattacaagctctagaggagctcggcgagaacccgctcggcgctaatttgaatattaaagctaaagagacttcacaatacgaaggcatagcgactttcttggaaggcgagaccgctctctctacgcttgacgatactcctattatagacaaggtgaattatttacagaacaaaaccgcaatagacaaactaagtaagatagttgattcagcagaaaggtttgggtttattataattgcaatactcgtcatcgcatcattgattatttctttcaatactatacggctggctatctatacgtctaaagacgaaatagcggtaatgaagctcgtcggtgctagcaattcttacattcgcggaccgtttgtgtttgaaggtattatgtatggtatcgtcgcgggcctcgtcacccttatactcttctatcccttgaccgtctggctcgggccacttactgaaaacttctttagtgatataaatctgtttgattattatataaatagtttttcaaaaatattctttattgtcttaggttcaggtatattgctcggtgcaatatcaagttacattgcagtgtggaggtatcttaggaaataatgaaaaagaaacataaatatatatttgtaataggaggagtaatttccggagttgggaaaggtattactacatcatcaatagcgaaaatcatccaagcacgcggacttaaagtcactgcacttaagatagacccgtatgtaaacgtagacgcaggtactatgaaccccacagagcatggggaagtgtttgtgcttgccgatggcgacgagacagaccaagacatgggcaattacgaacgcttcttaggtgtgacgctcgacaggctcaactacatgacgacagggcgtgtgtaccagagtgttatagaaaacgaacgcaacctcgcttacaaaggcaagtgtgtgcaagtagtgccacacataccgcttgagactataggacgtatcaagaatgcagcaaaaaaagcagatgctgatgttacggtaatagaggtaggtgggacagtaggtgagtatgagaatatcctcttcttagaatctgcacgtatgatgaagatagaaaacccagacgatgtagcatttataatggtgtcttacctcccaacccctgctaaagtcggcgagatgaagacaaagccgacacaacatgcgacgcgccttgcaaaccaagccggcatacagcccgatgtcataatagctcgtagtgaacttcctattgatcaaaagagaaaagagaagttggcattgttttgtaatattgcgccagagcaagtggtgtcagcccctgatgcagacagtatttacgacataccgcttaattttgagaaagataatattggggatatagttctggatcgtttgaagctcaagaaaacaaagtcaaaaacaggacttaagagttgggaagactttgtgaaaagaagtaagaaggttttagctggtaaaaaagaagttcacatagcaatagttggtaagtattttgatacaggggacttcgtactctctgacgcttacatttctattatagaggcacttaagttctcagcctatgatgtgggagtgaagccggtcttgcattggctgagctctaaagagtttgataaaccaagttcacttaaaaagctttcaaagtatgacggcatactaatccctggtgggtttggtgagacaggtatagacggcaagcttaaagtaatacaatatgcgcgcgagaagaagataccgtactttgggatctgctatggtatgcagttggcagtgatagagtatgcgcgcaatgtcctgaagatgaaagatgcaaatacagcagagatagatagcgaagccaaagagttagtgatagatataatgcccgaccaaaaagaaaaattaaaagataaaaattatggaggtagtatgcgactcggctcataccctgcaaagttagagaaggggagcatagcgcgcaaggcttatggtacagatacgataagtgaa

SEQ ID NO: 1379 - DNA, 4000 bp, Escherichia coli
  misc_feature (3)..(3): n is a, c, g, or t
  misc_feature (5)..(5): n is a, c, g, or t
  misc_feature (7)..(7): n is a, c, g, or t
  misc_feature (16)..(19): n is a, c, g, or t
  misc_feature (22)..(23): n is a, c, g, or t
  misc_feature (26)..(30): n is a, c, g, or t
  misc_feature (33)..(41): n is a, c, g, or t
  misc_feature (43)..(43): n is a, c, g, or t
  misc_feature (46)..(49): n is a, c, g, or t
  misc_feature (51)..(51): n is a, c, g, or t
  misc_feature (53)..(53): n is a, c, g, or t
  misc_feature (55)..(55): n is a, c, g, or t
  misc_feature (58)..(62): n is a, c, g, or t
  misc_feature (69)..(69): n is a, c, g, or t
  misc_feature (71)..(75): n is a, c, g, or t
  misc_feature (79)..(79): n is a, c, g, or t
  misc_feature (85)..(87): n is a, c, g, or t
  misc_feature (89)..(89): n is a, c, g, or t
  misc_feature (94)..(94): n is a, c, g, or t
  misc_feature (97)..(97): n is a, c, g, or t
  misc_feature (99)..(99): n is a, c, g, or t
  misc_feature (102)..(102): n is a, c, g, or t
  misc_feature (108)..(108): n is a, c, g, or t
  misc_feature (111)..(111): n is a, c, g, or t
  misc_feature (114)..(114): n is a, c, g, or t
  misc_feature (116)..(116): n is a, c, g, or t
  misc_feature (118)..(118): n is a, c, g, or t
  misc_feature (124)..(124): n is a, c, g, or t
  misc_feature (133)..(133): n is a, c, g, or t
  misc_feature (136)..(137): n is a, c, g, or t
  misc_feature (142)..(142): n is a, c, g, or t
  misc_feature (146)..(146): n is a, c, g, or t
  misc_feature (149)..(150): n is a, c, g, or t
  misc_feature (153)..(153): n is a, c, g, or t
  misc_feature (155)..(157): n is a, c, g, or t
  misc_feature (160)..(160): n is a, c, g, or t
  misc_feature (163)..(163): n is a, c, g, or t
  misc_feature (166)..(166): n is a, c, g, or t
  misc_feature (170)..(171): n is a, c, g, or t
  misc_feature (174)..(175): n is a, c, g, or t
  misc_feature (179)..(181): n is a, c, g, or t
  misc_feature (184)..(184): n is a, c, g, or t
  misc_feature (187)..(190): n is a, c, g, or t
  misc_feature (198)..(200): n is a, c, g, or t
  misc_feature (205)..(207): n is a, c, g, or t
  misc_feature (209)..(209): n is a, c, g, or t
  misc_feature (212)..(212): n is a, c, g, or t
  misc_feature (215)..(215): n is a, c, g, or t
  misc_feature (218)..(218): n is a, c, g, or t
  misc_feature (221)..(223): n is a, c, g, or t
  misc_feature (226)..(226): n is a, c, g, or t
  misc_feature (228)..(228): n is a, c, g, or t
  misc_feature (231)..(231): n is a, c, g, or t
  misc_feature (234)..(234): n is a, c, g, or t
  misc_feature (236)..(239): n is a, c, g, or t
  misc_feature (241)..(242): n is a, c, g, or t
  misc_feature (244)..(244): n is a, c, g, or t
  misc_feature (247)..(247): n is a, c, g, or t
  misc_feature (251)..(251): n is a, c, g, or t
  misc_feature (256)..(257): n is a, c, g, or t
  misc_feature (260)..(260): n is a, c, g, or t
  misc_feature (265)..(267): n is a, c, g, or t
  misc_feature (271)..(272): n is a, c, g, or t
  misc_feature (276)..(280): n is a, c, g, or t
  misc_feature (282)..(282): n is a, c, g, or t
  misc_feature (284)..(291): n is a, c, g, or t
  misc_feature (293)..(296): n is a, c, g, or t
  misc_feature (298)..(304): n is a, c, g, or t
  misc_feature (307)..(308): n is a, c, g, or t
  misc_feature (311)..(311): n is a, c, g, or t
  misc_feature (314)..(317): n is a, c, g, or t
  misc_feature (319)..(320): n is a, c, g, or t
  misc_feature (323)..(332): n is a, c, g, or t
  misc_feature (334)..(336): n is a, c, g, or t
  misc_feature (339)..(339): n is a, c, g, or t
  misc_feature (344)..(347): n is a, c, g, or t
  misc_feature (349)..(349): n is a, c, g, or t
  misc_feature (352)..(352): n is a, c, g, or t
  misc_feature (354)..(366): n is a, c, g, or t
  misc_feature (369)..(369): n is a, c, g, or t
  misc_feature (371)..(371): n is a, c, g, or t
  misc_feature (373)..(377): n is a, c, g, or t
  misc_feature (379)..(389): n is a, c, g, or t
  misc_feature (394)..(394): n is a, c, g, or t
  misc_feature (397)..(397): n is a, c, g, or t
  misc_feature (402)..(407): n is a, c, g, or t
  misc_feature (409)..(409): n is a, c, g, or t
  misc_feature (411)..(414): n is a, c, g, or t
  misc_feature (416)..(416): n is a, c, g, or t
  misc_feature (418)..(421): n is a, c, g, or t
  misc_feature (425)..(426): n is a, c, g, or t
  misc_feature (428)..(430): n is a, c, g, or t
  misc_feature (432)..(432): n is a, c, g, or t
  misc_feature (437)..(437): n is a, c, g, or t
  misc_feature (439)..(440): n is a, c, g, or t
  misc_feature (442)..(444): n is a, c, g, or t
  misc_feature (449)..(449): n is a, c, g, or t
  misc_feature (452)..(452): n is a, c, g, or t
  misc_feature (454)..(455): n is a, c, g, or t
  misc_feature (457)..(459): n is a, c, g, or t
  misc_feature (461)..(462): n is a, c, g, or t
  misc_feature (464)..(465): n is a, c, g, or t
  misc_feature (469)..(471): n is a, c, g, or t
  misc_feature (473)..(473): n is a, c, g, or t
  misc_feature (475)..(475): n is a, c, g, or t
  misc_feature (479)..(479): n is a, c, g, or t
  misc_feature (481)..(481): n is a, c, g, or t
  misc_feature (486)..(493): n is a, c, g, or t
  misc_feature (496)..(496): n is a, c, g, or t
  misc_feature (499)..(499): n is a, c, g, or t
  misc_feature (504)..(504): n is a, c, g, or t
  misc_feature (507)..(508): n is a, c, g, or t
  misc_feature (511)..(513): n is a, c, g, or t
  misc_feature (516)..(517): n is a, c, g, or t
  misc_feature (520)..(524): n is a, c, g, or t
  misc_feature (527)..(527): n is a, c, g, or t
  misc_feature (529)..(530): n is a, c, g, or t
  misc_feature (534)..(536): n is a, c, g, or t
  misc_feature (539)..(541): n is a, c, g, or t
  misc_feature (545)..(545): n is a, c, g, or t
  misc_feature (549)..(549): n is a, c, g, or t
  misc_feature (553)..(553): n is a, c, g, or t
  misc_feature (556)..(557): n is a, c, g, or t
  misc_feature (559)..(565): n is a, c, g, or t
  misc_feature (569)..(569): n is a, c, g, or t
  misc_feature (571)..(572): n is a, c, g, or t
  misc_feature (574)..(575): n is a, c, g, or t
  misc_feature (578)..(582): n is a, c, g, or t
  misc_feature (585)..(586): n is a, c, g, or t
  misc_feature (589)..(597): n is a, c, g, or t
  misc_feature (604)..(604): n is a, c, g, or t
  misc_feature (607)..(608): n is a, c, g, or t
  misc_feature (611)..(612): n is a, c, g, or t
  misc_feature (617)..(617): n is a, c, g, or t
  misc_feature (622)..(624): n is a, c, g, or t
  misc_feature (628)..(630): n is a, c, g, or t
  misc_feature (632)..(632): n is a, c, g, or t
  misc_feature (638)..(638): n is a, c, g, or t
  misc_feature (642)..(642): n is a, c, g, or t
  misc_feature (647)..(647): n is a, c, g, or t
  misc_feature (650)..(650): n is a, c, g, or t
  misc_feature (655)..(655): n is a, c, g, or t
  misc_feature (662)..(662): n is a, c, g, or t
  misc_feature (667)..(667): n is a, c, g, or t
  misc_feature (670)..(670): n is a, c, g, or t
  misc_feature (673)..(675): n is a, c, g, or t
  misc_feature (683)..(683): n is a, c, g, or t
  misc_feature (686)..(688): n is a, c, g, or t
  misc_feature (691)..(691): n is a, c, g, or t
  misc_feature (694)..(698): n is a, c, g, or t
  misc_feature (703)..(705): n is a, c, g, or t
  misc_feature (715)..(715): n is a, c, g, or t
  misc_feature (718)..(718): n is a, c, g, or t
  misc_feature (721)..(721): n is a, c, g, or t
  misc_feature (724)..(725): n is a, c, g, or t
  misc_feature (734)..(734): n is a, c, g, or t
  misc_feature (738)..(742): n is a, c, g, or t
  misc_feature (745)..(745): n is a, c, g, or t
  misc_feature (748)..(748): n is a, c, g, or t
  misc_feature (752)..(753): n is a, c, g, or t
  misc_feature (756)..(760): n is a, c, g, or t
  misc_feature (763)..(763): n is a, c, g, or t
  misc_feature (765)..(768): n is a, c, g, or t
  misc_feature (773)..(773): n is a, c, g, or t
  misc_feature (778)..(779): n is a, c, g, or t
  misc_feature (782)..(783): n is a, c, g, or t
  misc_feature (786)..(787): n is a, c, g, or t
  misc_feature (792)..(793): n is a, c, g, or t
  misc_feature (796)..(797): n is a, c, g, or t
  misc_feature (800)..(800): n is a, c, g, or t
  misc_feature (803)..(804): n is a, c, g, or t
  misc_feature (809)..(809): n is a, c, g, or t
  misc_feature (814)..(816): n is a, c, g, or t
  misc_feature (819)..(820): n is a, c, g, or t
  misc_feature (825)..(826): n is a, c, g, or t
  misc_feature (830)..(831): n is a, c, g, or t
  misc_feature (842)..(842): n is a, c, g, or t
  misc_feature (844)..(844): n is a, c, g, or t
  misc_feature (849)..(849): n is a, c, g, or t
  misc_feature (854)..(855): n is a, c, g, or t
  misc_feature (857)..(858): n is a, c, g, or t
  misc_feature (861)..(862): n is a, c, g, or t
  misc_feature (865)..(865): n is a, c, g, or t
  misc_feature (869)..(869): n is a, c, g, or t
  misc_feature (877)..(877): n is a, c, g, or t
  misc_feature (879)..(879): n is a, c, g, or t
  misc_feature (882)..(886): n is a, c, g, or t
  misc_feature (889)..(889): n is a, c, g, or t
  misc_feature (894)..(894): n is a, c, g, or t
  misc_feature (898)..(898): n is a, c, g, or t
  misc_feature (903)..(903): n is a, c, g, or t
  misc_feature (906)..(907): n is a, c, g, or t
  misc_feature (915)..(915): n is a, c, g, or t
  misc_feature (918)..(918): n is a, c, g, or t
  misc_feature (921)..(921): n is a, c, g, or t
  misc_feature (928)..(928): n is a, c, g, or t
  misc_feature (933)..(933): n is a, c, g, or t
  misc_feature (935)..(935): n is a, c, g, or t
  misc_feature (937)..(938): n is a, c, g, or t
  misc_feature (940)..(941): n is a, c, g, or t
  misc_feature (946)..(947): n is a, c, g, or t
  misc_feature (951)..(953): n is a, c, g, or t
  misc_feature (955)..(957): n is a, c, g, or t
  misc_feature (960)..(960): n is a, c, g, or t
  misc_feature (965)..(966): n is a, c, g, or t
  misc_feature (971)..(972): n is a, c, g, or t
  misc_feature (974)..(974): n is a, c, g, or t
  misc_feature (978)..(979): n is a, c, g, or t
  misc_feature (984)..(987): n is a, c, g, or t
  misc_feature (990)..(992): n is a, c, g, or t
  misc_feature (994)..(994): n is a, c, g, or t
  misc_feature (996)..(997): n is a, c, g, or t
  misc_feature (1000)..(1000): n is a, c, g, or t
  misc_feature (1005)..(1007): n is a, c, g, or t
  misc_feature (1010)..(1010): n is a, c, g, or t
  misc_feature (1012)..(1016): n is a, c, g, or t
  misc_feature (1023)..(1023): n is a, c, g, or t
  misc_feature (1027)..(1028): n is a, c, g, or t
  misc_feature (1031)..(1032): n is a, c, g, or t
  misc_feature (1035)..(1035): n is a, c, g, or t
  misc_feature (1037)..(1037): n is a, c, g, or t
  misc_feature (1039)..(1046): n is a, c, g, or t
  misc_feature (1048)..(1051): n is a, c, g, or t
  misc_feature (1053)..(1054): n is a, c, g, or t
  misc_feature (1057)..(1057): n is a, c, g, or t
  misc_feature (1061)..(1061): n is a, c, g, or t
  misc_feature (1064)..(1066): n is a, c, g, or t
  misc_feature (1069)..(1070): n is a, c, g, or t
  misc_feature (1072)..(1073): n is a, c, g, or t
  misc_feature (1079)..(1079): n is a, c, g, or t
  misc_feature (1081)..(1081): n is a, c, g, or t
  misc_feature (1084)..(1087): n is a, c, g, or t
  misc_feature (1093)..(1094): n is a, c, g, or t
  misc_feature (1096)..(1096): n is a, c, g, or t
  misc_feature (1098)..(1099): n is a, c, g, or t
  misc_feature (1102)..(1102): n is a, c, g, or t
  misc_feature (1110)..(1110): n is a, c, g, or t
  misc_feature (1113)..(1114): n is a, c, g, or t
  misc_feature (1118)..(1119): n is a, c, g, or t
  misc_feature (1122)..(1122): n is a, c, g, or t
  misc_feature (1124)..(1125): n is a, c, g, or t
  misc_feature (1129)..(1129): n is a, c, g, or t
  misc_feature (1131)..(1131): n is a, c, g, or t
  misc_feature (1136)..(1136): n is a, c, g, or t
  misc_feature (1140)..(1140): n is a, c, g, or t
  misc_feature (1147)..(1147): n is a, c, g, or t
  misc_feature (1149)..(1150): n is a, c, g, or t
  misc_feature (1156)..(1157): n is a, c, g, or t
  misc_feature (1162)..(1162): n is a, c, g, or t
  misc_feature (1166)..(1166): n is a, c, g, or t
  misc_feature (1169)..(1173): n is a, c, g, or t
  misc_feature (1176)..(1176): n is a, c, g, or t
  misc_feature (1179)..(1179): n is a, c, g, or t
  misc_feature (1182)..(1183): n is a, c, g, or t
  misc_feature (1187)..(1188): n is a, c, g, or t
  misc_feature (1191)..(1191): n is a, c, g, or t
  misc_feature (1199)..(1199): n is a, c, g, or t
  misc_feature (1201)..(1201): n is a, c, g, or t
  misc_feature (1211)..(1211): n is a, c, g, or t
  misc_feature (1213)..(1219): n is a, c, g, or t
  misc_feature (1223)..(1225): n is a, c, g, or t
  misc_feature (1227)..(1228): n is a, c, g, or t
  misc_feature (1233)..(1234): n is a, c, g, or t
  misc_feature (1237)..(1237): n is a, c, g, or t
  misc_feature (1242)..(1242): n is a, c, g, or t
  misc_feature (1245)..(1245): n is a, c, g, or t
  misc_feature (1247)..(1247): n is a, c, g, or t
  misc_feature (1250)..(1251): n is a, c, g, or t
  misc_feature (1255)..(1259): n is a, c, g, or t
  misc_feature (1261)..(1263): n is a, c, g, or t
  misc_feature (1271)..(1271): n is a, c, g, or t
  misc_feature (1273)..(1273): n is a, c, g, or t
  misc_feature (1277)..(1278): n is a, c, g, or t
  misc_feature (1284)..(1287): n is a, c, g, or t
  misc_feature (1298)..(1298): n is a, c, g, or t
  misc_feature (1303)..(1304): n is a, c, g, or t
  misc_feature (1307)..(1308): n is a, c, g, or t
  misc_feature (1313)..(1315): n is a, c, g, or t
  misc_feature (1319)..(1319): n is a, c, g, or t
  misc_feature (1322)..(1322): n is a, c, g, or t
  misc_feature (1327)..(1328): n is a, c, g, or t
  misc_feature (1331)..(1331): n is a, c, g, or t
  misc_feature (1334)..(1336): n is a, c, g, or t
  misc_feature (1339)..(1339): n is a, c, g, or t
  misc_feature (1341)..(1343): n is a, c, g, or t
  misc_feature (1348)..(1348): n is a, c, g, or t
  misc_feature (1356)..(1356): n is a, c, g, or t
  misc_feature (1361)..(1361): n is a, c, g, or t
  misc_feature (1366)..(1368): n is a, c, g, or t
  misc_feature (1372)..(1372): n is a, c, g, or t
  misc_feature (1375)..(1375): n is a, c, g, or t
  misc_feature (1379)..(1379): n is a, c, g, or t
  misc_feature (1382)..(1382): n is a, c, g, or t
  misc_feature (1386)..(1386): n is a, c, g, or t
  misc_feature (1389)..(1390): n is a, c, g, or t
  misc_feature (1394)..(1403): n is a, c, g, or t
  misc_feature (1408)..(1409): n is a, c, g, or t
  misc_feature (1411)..(1411): n is a, c, g, or t
  misc_feature (1415)..(1420): n is a, c, g, or t
  misc_feature (1423)..(1424): n is a, c, g, or t
  misc_feature (1427)..(1427): n is a, c, g, or t
  misc_feature (1430)..(1430): n is a, c, g, or t
  misc_feature (1433)..(1433): n is a, c, g, or t
  misc_feature (1436)..(1436): n is a, c, g, or t
  misc_feature (1442)..(1443): n is a, c, g, or t
  misc_feature (1445)..(1445): n is a, c, g, or t
  misc_feature (1513)..(1513): n is a, c, g, or t
  misc_feature (1515)..(1517): n is a, c, g, or t
  misc_feature (1520)..(1520): n is a, c, g, or t
  misc_feature (1525)..(1526): n is a, c, g, or t
  misc_feature (1534)..(1534): n is a, c, g, or t
  misc_feature (1546)..(1546): n is a, c, g, or t
  misc_feature (1552)..(1552): n is a, c, g, or t
  misc_feature (1556)..(1556): n is a, c, g, or t
  misc_feature (1561)..(1562): n is a, c, g, or t
  misc_feature (1566)..(1567): n is a, c, g, or t
  misc_feature (1576)..(1576): n is a, c, g, or t
  misc_feature (1586)..(1587): n is a, c, g, or t
  misc_feature (1589)..(1589): n is a, c, g, or t
  misc_feature (1591)..(1591): n is a, c, g, or t
  misc_feature (1593)..(1594): n is a, c, g, or t
  misc_feature (1600)..(1601): n is a, c, g, or t
  misc_feature (1604)..(1604): n is a, c, g, or t
  misc_feature (1615)..(1615): n is a, c, g, or t
  misc_feature (1618)..(1619): n is a, c, g, or t
  misc_feature (1631)..(1631): n is a, c, g, or t
  misc_feature (1634)..(1634): n is a, c, g, or t
  misc_feature (1639)..(1640): n is a, c, g, or t
  misc_feature (1642)..(1642): n is a, c, g, or t
  misc_feature (1644)..(1644): n is a, c, g, or t
  misc_feature (1646)..(1646): n is a, c, g, or t
  misc_feature (1652)..(1652): n is a, c, g, or t
  misc_feature (1654)..(1657): n is a, c, g, or t
  misc_feature (1663)..(1663): n is a, c, g, or t
  misc_feature (1669)..(1676): n is a, c, g, or t
  misc_feature (1678)..(1678): n is a, c, g, or t
  misc_feature (1681)..(1681): n is a, c, g, or t
  misc_feature (1683)..(1687): n is a, c, g, or t
  misc_feature (1696)..(1696): n is a, c, g, or t
  misc_feature (1702)..(1706): n is a, c, g, or t
  misc_feature (1708)..(1709): n is a, c, g, or t
  misc_feature (1711)..(1711): n is a, c, g, or t
  misc_feature (1714)..(1714): n is a, c, g, or t
  misc_feature (1718)..(1720): n is a, c, g, or t
  misc_feature (1724)..(1724): n is a, c, g, or t
  misc_feature (1730)..(1730): n is a, c, g, or t
  misc_feature (1735)..(1735): n is a, c, g, or t
  misc_feature (1738)..(1738): n is a, c, g, or t
  misc_feature (1743)..(1743): n is a, c, g, or t
  misc_feature (1747)..(1748): n is a, c, g, or t
  misc_feature (1753)..(1753): n is a, c, g, or t
  misc_feature (1837)..(1837): n is a, c, g, or t
  misc_feature (1935)..(1935): n is a, c, g, or t
  misc_feature (1984)..(1984): n is a, c, g, or t
  misc_feature (1986)..(1986): n is a, c, g, or t
  misc_feature (1992)..(1992): n is a, c, g, or t
  misc_feature (1995)..(1995): n is a, c, g, or t
  misc_feature (2013)..(2013): n is a, c, g, or t
  misc_feature (2033)..(2033): n is a, c, g, or t
  misc_feature (2354)..(2354): n is a, c, g, or t
  misc_feature (3084)..(3084): n is a, c, g, or t
  misc_feature (3173)..(3173): n is a, c, g, or t
aanantnaaaaaattnnnnttnnttnnnnnggnnnnnnnnntnttnnnntntntnccnnnnnttggttntnnnnngaanattaannntnttttnaananaanccaaanggnaananancaaggngttaaattnccnnaaggngttnccnngtntnnnaanaanccnaaanngcnntttnnnggngannnnaaaaaggnnntaaannntnttnttnttnaannnggngnaanttntnnnnanntntanacantaaannttnaaaannnaaannaaannnnntntnnnnnnnntnnnnannnnnnnttnnggnaannnntnnccnnnnnnnnnngnnnaanaaaannnntnaanannnnnnnnnnnnnccntngnnnnntnnnnnnnnnnnttaanaanggggnnnnnncngnnnntngnnnntttnnannngnaaaancnntnnnaaaanaangnnannncnntnngggnnnantnaaananaaaannnnnnnnaanaanaattnttnnaannnaannttnnnnnttnanntttnnnaannnaaanatanaggnccnnannnnnnntttntnncnnttnnnnnggnnaannnnnnnnnggttttnccnnaanntaaangtttnnntaannncnaaaaanaaanaattnttnaaaanatatatnaattnttnttnnnaatttttntcnnnaanagnnnnntgggnnnataggaattnttntcnttnnagaggattntaannnnntgnaanaggnnggnnnnnttntnnnnaattnaattnnccnnatnnttggnnatnnttntgnnccggnaattnnnggnnttaanntttnnaatttggtttntnttccncgggnnannaannaanaaanccaatttntnttnnnnnaanataanaaanagttnaannaaaaaggnttnttnttttttnaattntntnncnntaaanngcgnnnannnttnttggnnttccnngngaannaattnnnngannntntnnggnaaccnnnggngnnnnnatttttnaaannttnnggntntnnnnnnnncnnnngnnttntggngannnttnngnntttaananatnnnntggaanngngnnttnattttccncannaaannggngnntttntnggttntccnttaaaananntgaaannttttntttntcnnnnnggnaanggnnaccnnatntgtggggngnggaaggtttntnnnnnnntggnnnanncaaanngcnctttnttntnttnnaaannnnntnnnaatttttntnaaanncaattnnnnttgggaaaaanatttnnttnnttggnnncaanaanggccnnggnggnnnaanannnttggngtaatttnttggnccggnnnaggnaanacanaanaaanggnncaannnnnnnnnnaaggnntnaaannnnnnggnnaanaanttnaanttaaanntntttctgaagtatccgtagatgacgcagcagcttacgaaaaactagctcttggctgtgctgatatgggngnnnaanaattnnaagaaggngaatttgaaccnttctanacanaattnnaagnnaaattgggnggtaaaaaannancnanntttggnnccnatggttggggnggnncttggttagaanacnggggnncncncnttaaanannnnggtggngaattnnnnnnnnanggngnnnnncttttgggngaaccnnnnnannanggnaaannncaangccaanaattnggnaaaantttnncgaangcttaatttgatctcaacaatatacaaaggctgtaataacgataaattcgttattacagccttttttacatttattatatatancatcaatgtttcaattagaacgaaaaatttctttctaatgaatacaaagaatatttataaagcatatatataaatcccgatatagatatgaagaatangcattacttctatagaattccatattatttatttttgcaagagcttatntnttactnatnaaaaaaaatgataactgnaaaataatgtgatgaaaaanacaatgtttatatatgttcttcgctattgatgaatatgcttgcataattacaaataactttaatgcatattgtcgttgcatttttgtgtacatagaactataatcaagttagggaacctaacaaaaaattaggttgctacaaaattagttagaatgaatctcaacatactaattaattcggaggctgaagctttcagtccacaaaatagtaaccaataccgatgagaggaaggttattttatgagtacactagaacgattacaggtgatagctcatgggttggccgttcaatttgggccttcttgtgaggtattgattcangacttgcagcgtgatatcgatacatcacttgtatatattgaaaatggtaccataactaatcgtcatgttggcgatggaccatctcatgccgttttagatgtactaagttatgacgacggtagcgaaggtcgattcggttaccttacaaaaactaaggatggtcgaatattaaaatcatctactatgtatatccgtgatgatacggggtgcatagcctacttgctagggattaaccaagacataaccgagctagttatgatgcatcgggccttggatagtttagtaaatacaggtcaaggtgatgctggatctgttgaaaaaattactacaagcgtgtcagaactgttagatgatttattactagaagcagaacgtttagtggggaaacctgggccactcatgagtaaggtggaacgtcttaaagcaattacctacttaaatgaaaaaggggcttttcttatctctaaatcttcagagaagatagcagagtattttaatatttctaagtttaccctttatagtgatttaaatactgtaaaggaagaatcctaggaggcaaatatggaacgaattcagtggaaacgtaatacgatggcaccatctagcgacaagtttttgtcggttatggatgttagagaaattaagaaagctaaagcgtttcacgaaagtttcccgcaatatacggtaactccacttgtttcacttaaaaatttagcatctcatatcggtnttgattctctcttcgtaaaagatgagtcctatcgctttggtctaaatgctttcaaagtgttgggcggttcttatgcgatggggaaatangtggctcaacaacttggtaaaacagttgaagatgtaccatatgatgtattaacatctgcaaaattaaaagaagaattcggccaagctacattcttcactgcaactgatggtaaccacggtcgcggcgtagcctgggctgcaaataaattaggtcaaaaatctgtagtattcatgccaaaaggctctacagaataccgcagaaaacaaatcgaaaatgaaggcgctacagtaacaatcgaagaattcaactacgatgaatgtgtacgcctagcaactaaaaaatctaaagaagttccaaatggtgttgtagttcaagatacagcatgggaaggttatgaagaaattccaaactggatcatgcaaggctatggcacaatggctatggaaacagcagctcaattagaagctgaaaactgcaaagttccaactcatgtattcgtacaagctggtgtaggttctcttgctggttccgtagtaggttacttcactaacttatatagcaatgcagctaaaaaacctaaattggttgttgttgaagcagaagcagcagcttgcttatacaaaggcgctgtagctgatgatggggaacctcgcattgtagaaggcgaccttgaaacaatcatggcaggcttagcatgtggcgaaccaaatacagtttcttgggatatcttaagaaaccacgcagacgtattcgtatctgctccagactgggtagcacgtttaggtatgcgcgttggtggtgcaccaattaaaggcgatactccaattacaactggtgagtctggtgcggttccattaggtcttgtaatggcacttatgacaatgcc

SEQ ID NO: 1380 - DNA, 4000 bp, Escherichia coli
  misc_feature (39)..(39): n is a, c, g, or t
  misc_feature (1316)..(1316): n is a, c, g, or t
  misc_feature (1738)..(1738): n is a, c, g, or t
  misc_feature (1929)..(1929): n is a, c, g, or t
  misc_feature (1950)..(1950): n is a, c, g, or t
  misc_feature (2454)..(2454): n is a, c, g, or t
  misc_feature (2844)..(2844): n is a, c, g, or t
  misc_feature (2889)..(2889): n is a, c, g, or t
  misc_feature (3230)..(3230): n is a, c, g, or t
  misc_feature (3775)..(3775): n is a, c, g, or t
  misc_feature (3777)..(3777): n is a, c, g, or t
  misc_feature (3823)..(3823): n is a, c, g, or t
  misc_feature (3876)..(3876): n is a, c, g, or t
tcgccgctctcgtcgaacagcagcgagctgctggcgcgnaccgtgcctacgacctacgacgtgctgatcgccctgttcggcggcctggcgggcatcgtggcgcagacgcggcaggaccgcacgtcgaccgtcattcccggcgtggccatcgccacggccctcatcccgcccctctgtacggcgggcttcggactggccacggggcagttccgctttttcatcggcgccttctacctcttcttcatcaattcggtgttcatcgcgctggcgacctatgccatggtgcgttttctgcaatacgagaagaaggtcttcatcgacaaggtccgcgagcgcacggtcaagcggctgatgatggtcatcacgctggtgaccttcatcccgagcgtcgtcatcgggttccacatggtccgcgtctcgttgttcgaggccgtggccgacaaatacgtgtcgcaggtcttcaactttccgcatacccgcgtgatcgagtgcaacaaacactacgcgcagggcaagaacccctcgcagatcgagctgctgctcgtgggcgagccgctgggcgaggaggtgatcgagaatgcccgtacgcagatgcgcaatttcgggctggaggaggccgaactggtcgtccggcaggccaatacggaggacaaggtcgacgtggtttcgctccagaagagctatcaggagctgctggaggagaagaaccgccggatcggcgagatgtcctcgcagctgaaacgctaccgggtgaccaacgtcgaggtgaacgacatctcgcgcgaagtgggggccatgatggacaacatcggggccatttcgctgaccaagggcatcaccttcgacgtcgagggcacgcccggcgatacgacgctcgtgtgcgtggtgacgccccgggattccgcgcttccggtcgaccgtgaaacgctgatccgctggttgagaatccgcaccaaggtcgagaacgtcaaacttttcgtggaaccctaatccgggcggcaggcatgaaacgaaccgatctgaccattttgcagcgcttctggctggagaccctttggctgggcgcacgcgtgttcgccgtgatgccttactggttcaagtactacgtcgtcgaaaacctgcttttcgtcctgctctactactgcctgcgctaccgcatgaaggtcgtcaagaccaacctgcggaactcgttccccgagaagagcgaacgcgaactggccgtcatccggcggcggttctaccgcacgctgtccgaaatcttcgtcgacacgatcaacatggcctacatgaacgaggagaaggggcggacggtgctnacggtcaaagacgtggagaaacacgtggaagcggtgcacggccgcgactggatcgccatgacggcccatttcggctgctgggagtactgctcctactgggggctttacgagcggtcgcagatgctggtcgccgtctaccatccgctgcgcagcaaggtgatggaggaactctaccggcggctgcgcaattacgaaaattcgatgaccgtctcgatgaaggagagcctgcgtttctacctgcgcaaccggaccggaggcatcgccggcaagaacctcgtgatggggcttatcgccgaccagaatcccccgcggcggcccgacagccgttggttccgcttcctcaatcaggatacgatcttcttcgacggcggcgagaaactggccctgcgctgcaacctcccggtctacttcgtgaagatganccgcctgcggcggggacgctacgaaatgtccttcgaactgatttatgacggcaaagaggaggtcgccgaatacgaaatcacgcagcgttacgttcgtaagttggagcggatgatctgcgagtgtcccgaactgtggatgtggtcgcatcgccgctggaagcacaaacgaactcatgccggtcgctaaaatnatcatactcaactggaacggngcggaccacctgcgtcgtttcctgccgtcggtcgtggccgcggctcccgccggcgtcgaggtcatcgtcgccgacaacggttcgacggacgactctctcgcggcgctcgccgccgggtttccgtcggtcacggtcctgcgcatggaccgcaactacggctttgccggaggctacaaccgcgcattggagtatatcgaggccgactattacctgctgctgaactccgatgtcgagacccccgaggggtggcttgcgccgattctcgactgtctggaccggaatcccgacgtggcggtcgccgcgccgaagctgatctcctgcgccgaccgcacggagttcgagtatgcgggggctgcgggcggtttcatcgactacctgggctatcccttctgccgggggcgcatcctgcgctgcgtggagaaggaccggggccagtacgacgacgagcgcgacgtgttctgggtgagcggcgcggctttctgctgccgggccgacgtgttccgngcgctgggcggcttcgacggcgatttcttcgcccacatggaggagatcgacctctgctggcggatgcagctggcgggttaccgggtgcggatcgtgccccggagcagggtctaccacctgggcggcggcacgctccagaccgattctccggccaaggtcttctacaatcaccggaacaatctcgccatgctttacaagtgcgcctcgcccgcacagcggctttgcgtggccgttgcgcgcccggcgctcgacctgctcgccgcgctgtcctacctcatgcagggccgccgggacaacttccgcgccgtgttccgcgcctggcgcgacttcatccgctggcacggggcgctggcccgcaaacggcgtgagatccgcgcgaaccgcaagggntccgccgcggaaaacatctaccgcggctcggtggtgctgcgctancttttcggccggcggaccttcggcggcatgatgcgctgacgcggagccgatgtcgtcgttttcgcaacgggacttgtgcgatcttcgttttttgcgtatctttctgaaaaataccctcgcttatgatacgtgcggctcttctgttgtcggcagtcgtgtgttttttgcagccttttcgcgcgtcggcgacagggcaggctgccgaacggcttgtcgtcgggcgcgatacgatgcagttgttcgcactgccgctggcgacggcggattccgccgtgctcgcccggctcgaaaaacggctggacgaactcgatgcctccggctctacggcttgctggcgtcgntgtatcggtgtctggcggctggacgacgagggcatcttgtggcttgagtgcgtgaacaccgaggacggcgacgtcgtattttccggagcggagctggttcccgaatttgcagcgggatcacgcgcccgggccggctggttcagcggagagatccgctatggcacggggaatctggtgtattaccaacacgatggatttatgcggaatctcgaacgcgaatgggtggctgcggtgtccgaggggcgcgtgagggagacgaaagcctaccggaaccggctgtatgaaagaggtgcggatgcgacggacaatgcacagcgtgtggccgcggcgttcgacagccttcatgtcggaaagtcgcccgatctgctgtcgctgtatgtggtctttgcagccgattccacagggcgggtggttcggatcgaccgggcgcgactgttgtcggaaaagggaagtcctgttgtcagcgatccggctgacccgctgttgcaggcagctctgcgggcgtttcgctcggtgtcgcgctgggatgcctggtgggtcggagngncctggaaggaacaggcgtattttattccgctgcgcagggccggganggtttggaaaccgcgaagaggataacgatgcttattgctccggcttgcagggnagcgtgaaccagaaggtcgagcctttgcccggtcgggattcgacgccgatgcggccgcccatcgtttcgacgatcgacttcgagatcgccagtccgatgccgatgccctgcctgaacgatcccg

SEQ ID NO: 1381 - DNA, 4000 bp, Escherichia coli
  misc_feature (272)..(272): n is a, c, g, or t
  misc_feature (296)..(296): n is a, c, g, or t
  misc_feature (440)..(440): n is a, c, g, or t
  misc_feature (458)..(458): n is a, c, g, or t
  misc_feature (497)..(497): n is a, c, g, or t
  misc_feature (578)..(578): n is a, c, g, or t
  misc_feature (625)..(626): n is a, c, g, or t
  misc_feature (704)..(704): n is a, c, g, or t
  misc_feature (902)..(902): n is a, c, g, or t
  misc_feature (1992)..(1992): n is a, c, g, or t
  misc_feature (2012)..(2012): n is a, c, g, or t
  misc_feature (2016)..(2016): n is a, c, g, or t
  misc_feature (2140)..(2140): n is a, c, g, or t
  misc_feature (2322)..(2322): n is a, c, g, or t
  misc_feature (2363)..(2363): n is a, c, g, or t
  misc_feature (2435)..(2435): n is a, c, g, or t
  misc_feature (2551)..(2551): n is a, c, g, or t
  misc_feature (2559)..(2559): n is a, c, g, or t
  misc_feature (2597)..(2597): n is a, c, g, or t
  misc_feature (2608)..(2608): n is a, c, g, or t
  misc_feature (2734)..(2734): n is a, c, g, or t
  misc_feature (2747)..(2747): n is a, c, g, or t
  misc_feature (2815)..(2815): n is a, c, g, or t
  misc_feature (2832)..(2832): n is a, c, g, or t
  misc_feature (2839)..(2839): n is a, c, g, or t
  misc_feature (2845)..(2845): n is a, c, g, or t
  misc_feature (2853)..(2853): n is a, c, g, or t
  misc_feature (2872)..(2872): n is a, c, g, or t
  misc_feature (2881)..(2881): n is a, c, g, or t
  misc_feature (2886)..(2886): n is a, c, g, or t
  misc_feature (2919)..(2919): n is a, c, g, or t
  misc_feature (3306)..(3306): n is a, c, g, or t
  misc_feature (3334)..(3334): n is a, c, g, or t
  misc_feature (3897)..(3898): n is a, c, g, or t
  misc_feature (3902)..(3902): n is a, c, g, or t
  misc_feature (3905)..(3905): n is a, c, g, or t
  misc_feature (3909)..(3909): n is a, c, g, or t
  misc_feature (3911)..(3912): n is a, c, g, or t
  misc_feature (3914)..(3914): n is a, c, g, or t
  misc_feature (3916)..(3916): n is a, c, g, or t
  misc_feature (3918)..(3921): n is a, c, g, or t
  misc_feature (3923)..(3923): n is a, c, g, or t
  misc_feature (3925)..(3926): n is a, c, g, or t
  misc_feature (3929)..(3929): n is a, c, g, or t
  misc_feature (3931)..(3931): n is a, c, g, or t
  misc_feature (3938)..(3938): n is a, c, g, or t
  misc_feature (3941)..(3941): n is a, c, g, or t
  misc_feature (3943)..(3943): n is a, c, g, or t
  misc_feature (3945)..(3945): n is a, c, g, or t
  misc_feature (3947)..(3947): n is a, c, g, or t
  misc_feature (3952)..(3952): n is a, c, g, or t
  misc_feature (3955)..(3956): n is a, c, g, or t
  misc_feature (3958)..(3958): n is a, c, g, or t
  misc_feature (3960)..(3960): n is a, c, g, or t
  misc_feature (3962)..(3963): n is a, c, g, or t
  misc_feature (3965)..(3965): n is a, c, g, or t
  misc_feature (3972)..(3972): n is a, c, g, or t
  misc_feature (3974)..(3976): n is a, c, g, or t
  misc_feature (3980)..(3981): n is a, c, g, or t
  misc_feature (3983)..(3983): n is a, c, g, or t
  misc_feature (3989)..(3989): n is a, c, g, or t
  misc_feature (3993)..(3994): n is a, c, g, or t
  misc_feature (3999)..(3999): n is a, c, g, or t
cggatagaacccaagaatctcaaataaagacgagtaaagctccttttctttacggaaaggaagccttactctgtcgataagattactcagcatacttcttgaaaataacacaagcgttatgtcctccaaagccaaatgtgttgcttagtgcagctcgcaccacgcgcttttgtgccttgttgaacgtgaagttgaggttataatcgatgttctcgtccacgtcgtcttcgtcgtggtttattgttggggggatgatgtcgttatgaacggcnagcaccgaggccattgcctcaacngcgccagctgctccgagcaagtgtcccgtcatcgatttggttgaactgatattaagtttataggccgcatcgccaaaaagatctttgatggcttttgcctccgaaacgtcgcctacaggtgtcgacgtgccgtgcacgttaatntagtcgatgtcttcgggnttcaatccggcatcttccaatgcgttttgcatcaccagncgtgcgcccaagccttcggggtgactagccgtgatgtggtgtgcgtcggcacttgcgccctcgcctaccatctcggcatanatcttagcaccgcgagccttggcgtgttccagttcttccagaatcanncagccagctccctcgcccataacgaatccgtcgcggctcttgctaaatggacgcgaagcgcgctcggggtcgtcgttncgggtagaaagggcgtgcatagcgttaaatccacctacgccacagccacagatggcagcctcggcaccaccgctaacaataacgttggccttacccaaacgaatgaggttgaaggcatcggccaaagcattggtcgacgatgcgcaagccgaagtggtggcatagttgggcccgtgcaggccatacataatcgagatntgtccggcagcgatgtcggcaatcatcttagggatgaagaaggggttgaacttaggctcttcaccaaggtgctggccatagtaagtaacttcctcttcaaaggttttgataccgccgatacccacaccgtaaaccacgccaatgcggttacggtcttccttttccatgtccagaccactatctttaataccctgcatagccgagataatggccaattgggtatagcggtccatcttgcgagcctccttacggtcgatatagtcggtcacgttgaggttcttcacctcgcaggcgaacttgcttttgaaattggtggtgtcgaaatgtgtgatgggtgctgcgccactcttaccggccaacaggttagcccacgtctcttcgggcgtgttgccaacgggggtaacggctccaagacccgtcactactactctttttaactccattgaaatgaaaaatattgctttaaggggcgtttcaaacaaacgcgcgggtggaatagaaaaggtcgtaaataagcaaatacacgtgtgtatctttcgctcttccaccgcctgatgcgaaagtcgaaatcggccttgttgttaatttccctaggggtaaaataagggtgatcaagagtttttggttatggctccggcagatgcaggaggccataaccaaaagcttgtcactttactttgcgttttcagcgatataggcgatagcgtcgccaacagtgccaatcttctcagctttgtcgtcggggatggagatgccaaattccttttcgaactccataatcagttctacagtgtcgagcgagtctgcaccaaggtcgttggtgaagcttgcttcgggttttacctctgcttcgtctacaccgagtttgtcaacgatgatagcttttactttcgattcaatttctgacataattgtaaaatttaatagtgtttgtaaataaatttcatccgaaaattcgggtgcaaaggaaatcatttttattcatatccacaaacatttcgcccaaaaaagcactcttcattgcacacatacccccctattgtgcattgattttagggattttaactactttttagaaataaataaggcntcttggcgcaccaacgaganaggnaaaccgagactcattttttacgacttttcacgcttgacagtagccaattccctgattttcattaagagatgtttccgcaaggcgtgtttttgaggtgccatttgggcgacaactcatctataanatacacgcatacgcgcgcgcgtagagccaacactaacgagtggataagccacataaaccaacaacacgaataccattaacggcaagttaacccgaaaaaatagggttgttttggtcaactcatagaccaccactacagcctctcggccccctcacttttaagtcccaaataaggccttattnacctttcgccttggtattgctaagctggaacaggattccanataagttggaatgatgttccatataaactggaatgacgttccatataagctggaacagagttccagcttagngataccaaggcaaaaaatgatccactggttatcagccacacattttctagtctgcaaaagcaatctacctcaacccttttctatctgctcacgcctgattggcaacccgtttctancccctctntttcgacagcacaacaaggcaacatttataaaaatgcntggggataaanacatgccagcttcggaacaaagccacatacgtatcaagtaacaataaaacgtaagaagcgtttatcatgcgtccggggtaaaacaccatgcgttttaagcaagacggaggcataagaaacacgatnacgagttcgaganaagacacggttccttttgagcaagattagataaaaacgaatggccatatcaccaactaccgcattgcngttggtctgttggtagntggcatnttgcangacattanttcctacatcttgctttcnaaccacccnaaatntaatctatatcaagtattgacgccaaaaaatanattttttggaacatttattgtgcgttttgaagcaaattattacttttgcatcgcatttcagagattggaagtcgtatgatttaaaccaaaacgcggctcgagtgattgttaattgcttgcccgcattccgaccatttacacccgcacaacatcaattagacaatcgatctcttcgaaaacaccccgactatcccccgaggacaatgactgaacgcttcgttcaacgttgacttttgggggatagtcattttttagtagataagttcacgagttgataagtgaaccagatgcaagatggggagttaacaaactaacgagtagacaagtgagcctgttgacaagtaaagcagtcaatcagtagacaagaggacaagtcaacttgttcantttccccttgtctactcgcctacttgtnagttcgtcaactgcccaaattattctttctttctcttacaaaaatgtttcatgaacgatttttgcatgcatacgaacgattattgcaagccccttacgcgcgttcgtactaaatttgcctccgcagaagatggggagaaagcgcacccgaattgacataaatcaattttagaaattgcgcaacccgatgagaaaggctacttttccctctctacaaagctacaatcttacatatttataaaacctaattacgcaacaagaaatgaagcagctacgaactcttcttatcatcgcgatggccattttcgtatgcgcccttacccatgcgcaaggcgtaaacgtgagcggtaaggttacttcggccaccgacggcgaacccatcacgggcgcatccgtcgtggaaaaaggaaccacacgcggcaccgtcaccaacatcgacggaaattttaaactcgaagtgaacagcggggcaacactggttatatcttacttggggtttaaaaccattgaagtgaaggccacgccaaccatgaacatcgcattggaagaaaatgctaagagccnnaacnaantggngnngncngnnnntncnnccnancgcaagnccnantnancgggngcnntntngnngnttaacgncnnngacnngnccaaanaaanngaaanc

SEQ ID NO: 1382 - DNA, 4000 bp, Escherichia coli
  misc_feature (2)..(2): n is a, c, g, or t
  misc_feature (4)..(4): n is a, c, g, or t
  misc_feature (6)..(6): n is a, c, g, or t
  misc_feature (8)..(9): n is a, c, g, or t
  misc_feature (11)..(11): n is a, c, g, or t
  misc_feature (14)..(14): n is a, c, g, or t
  misc_feature (16)..(18): n is a, c, g, or t
  misc_feature (23)..(23): n is a, c, g, or t
  misc_feature (30)..(30): n is a, c, g, or t
  misc_feature (33)..(34): n is a, c, g, or t
  misc_feature (38)..(38): n is a, c, g, or t
  misc_feature (43)..(44): n is a, c, g, or t
  misc_feature (47)..(48): n is a, c, g, or t
  misc_feature (50)..(50): n is a, c, g, or t
  misc_feature (52)..(52): n is a, c, g, or t
  misc_feature (56)..(56): n is a, c, g, or t
  misc_feature (62)..(62): n is a, c, g, or t
  misc_feature (64)..(65): n is a, c, g, or t
  misc_feature (71)..(74): n is a, c, g, or t
  misc_feature (77)..(77): n is a, c, g, or t
  misc_feature (79)..(81): n is a, c, g, or t
  misc_feature (83)..(87): n is a, c, g, or t
  misc_feature (91)..(91): n is a, c, g, or t
  misc_feature (93)..(99): n is a, c, g, or t
  misc_feature (103)..(103): n is a, c, g, or t
  misc_feature (107)..(108): n is a, c, g, or t
  misc_feature (110)..(110): n is a, c, g, or t
  misc_feature (113)..(114): n is a, c, g, or t
  misc_feature (117)..(117): n is a, c, g, or t
  misc_feature (119)..(119): n is a, c, g, or t
  misc_feature (128)..(128): n is a, c, g, or t
  misc_feature (131)..(133): n is a, c, g, or t
  misc_feature (135)..(136): n is a, c, g, or t
  misc_feature (138)..(139): n is a, c, g, or t
  misc_feature (143)..(143): n is a, c, g, or t
  misc_feature (145)..(147): n is a, c, g, or t
  misc_feature (149)..(151): n is a, c, g, or t
  misc_feature (153)..(154): n is a, c, g, or t
  misc_feature (156)..(158): n is a, c, g, or t
  misc_feature (161)..(161): n is a, c, g, or t
  misc_feature (163)..(165): n is a, c, g, or t
  misc_feature (167)..(167): n is a, c, g, or t
  misc_feature (170)..(171): n is a, c, g, or t
  misc_feature (173)..(176): n is a, c, g, or t
  misc_feature (178)..(181): n is a, c, g, or t
  misc_feature (186)..(186): n is a, c, g, or t
  misc_feature (189)..(192): n is a, c, g, or t
  misc_feature (195)..(195): n is a, c, g, or t
  misc_feature (197)..(197): n is a, c, g, or t
  misc_feature (200)..(201): n is a, c, g, or t
  misc_feature (205)..(206): n is a, c, g, or t
  misc_feature (208)..(208): n is a, c, g, or t
  misc_feature (211)..(212): n is a, c, g, or t
  misc_feature (214)..(216): n is a, c, g, or t
  misc_feature (220)..(220): n is a, c, g, or t
  misc_feature (222)..(223): n is a, c, g, or t
  misc_feature (226)..(226): n is a, c, g, or t
  misc_feature (231)..(234): n is a, c, g, or t
  misc_feature (236)..(236): n is a, c, g, or t
  misc_feature (241)..(241): n is a, c, g, or t
  misc_feature (243)..(243): n is a, c, g, or t
  misc_feature (247)..(247): n is a, c, g, or t
  misc_feature (251)..(251): n is a, c, g, or t
  misc_feature (260)..(263): n is a, c, g, or t
  misc_feature (266)..(269): n is a, c, g, or t
  misc_feature (273)..(274): n is a, c, g, or t
  misc_feature (276)..(276): n is a, c, g, or t
  misc_feature (278)..(280): n is a, c, g, or t
  misc_feature (285)..(285): n is a, c, g, or t
  misc_feature (287)..(287): n is a, c, g, or t
  misc_feature (290)..(290): n is a, c, g, or t
  misc_feature (292)..(292): n is a, c, g, or t
  misc_feature (294)..(294): n is a, c, g, or t
  misc_feature (296)..(296): n is a, c, g, or t
  misc_feature (299)..(300): n is a, c, g, or t
  misc_feature (303)..(304): n is a, c, g, or t
  misc_feature (306)..(306): n is a, c, g, or t
  misc_feature (309)..(309): n is a, c, g, or t
  misc_feature (312)..(312): n is a, c, g, or t
  misc_feature (314)..(314): n is a, c, g, or t
  misc_feature (321)..(321): n is a, c, g, or t
  misc_feature (325)..(325): n is a, c, g, or t
  misc_feature (328)..(328): n is a, c, g, or t
  misc_feature (330)..(333): n is a, c, g, or t
  misc_feature (336)..(336): n is a, c, g, or t
  misc_feature (345)..(346): n is a, c, g, or t
  misc_feature (348)..(352): n is a, c, g, or t
  misc_feature (354)..(354): n is a, c, g, or t
  misc_feature (356)..(358): n is a, c, g, or t
  misc_feature (360)..(361): n is a, c, g, or t
  misc_feature (364)..(364): n is a, c, g, or t
  misc_feature (366)..(366): n is a, c, g, or t
  misc_feature (370)..(371): n is a, c, g, or t
  misc_feature (374)..(376): n is a, c, g, or t
  misc_feature (378)..(379): n is a, c, g, or t
  misc_feature (384)..(385): n is a, c, g, or t
  misc_feature (387)..(387): n is a, c, g, or t
  misc_feature (389)..(391): n is a, c, g, or t
  misc_feature (395)..(397): n is a, c, g, or t
  misc_feature (401)..(401): n is a, c, g, or t
  misc_feature (403)..(403): n is a, c, g, or t
  misc_feature (405)..(407): n is a, c, g, or t
  misc_feature (409)..(410): n is a, c, g, or t
  misc_feature (417)..(417): n is a, c, g, or t
  misc_feature (420)..(421): n is a, c, g, or t
  misc_feature (424)..(425): n is a, c, g, or t
  misc_feature (427)..(430): n is a, c, g, or t
  misc_feature (434)..(434): n is a, c, g, or t
  misc_feature (437)..(439): n is a, c, g, or t
  misc_feature (447)..(447): n is a, c, g, or t
  misc_feature (450)..(452): n is a, c, g, or t
  misc_feature (458)..(459): n is a, c, g, or t
  misc_feature (464)..(465): n is a, c, g, or t
  misc_feature (468)..(468): n is a, c, g, or t
  misc_feature (470)..(471): n is a, c, g, or t
  misc_feature (473)..(473): n is a, c, g, or t
  misc_feature (475)..(475): n is a, c, g, or t
  misc_feature (479)..(480): n is a, c, g, or t
  misc_feature (485)..(485): n is a, c, g, or t
  misc_feature (488)..(488): n is a, c, g, or t
  misc_feature (490)..(490): n is a, c, g, or t
  misc_feature (492)..(492): n is a, c, g, or t
  misc_feature (494)..(495): n is a, c, g, or t
  misc_feature (497)..(497): n is a, c, g, or t
  misc_feature (504)..(504): n is a, c, g, or t
  misc_feature (507)..(507): n is a, c, g, or t
  misc_feature (509)..(509): n is a, c, g, or t
  misc_feature (511)..(511): n is a, c, g, or t
  misc_feature (513)..(515): n is a, c, g, or t
  misc_feature (517)..(517): n is a, c, g, or t
  misc_feature (520)..(521): n is a, c, g, or t
  misc_feature (523)..(523): n is a, c, g, or t
  misc_feature (526)..(526): n is a, c, g, or t
  misc_feature (532)..(532): n is a, c, g, or t
  misc_feature (534)..(534): n is a, c, g, or t
  misc_feature (537)..(537): n is a, c, g, or t
  misc_feature (540)..(540): n is a, c, g, or t
  misc_feature (544)..(544): n is a, c, g, or t
  misc_feature (548)..(554): n is a, c, g, or t
  misc_feature (578)..(578): n is a, c, g, or t
  misc_feature (584)..(584): n is a, c, g, or t
  misc_feature (586)..(587): n is a, c, g, or t
  misc_feature (590)..(591): n is a, c, g, or t
  misc_feature (597)..(598): n is a, c, g, or t
  misc_feature (602)..(603): n is a, c, g, or t
  misc_feature (605)..(605): n is a, c, g, or t
  misc_feature (607)..(607): n is a, c, g, or t
  misc_feature (609)..(610): n is a, c, g, or t
  misc_feature (613)..(613): n is a, c, g, or t
  misc_feature (615)..(616): n is a, c, g, or t
  misc_feature (620)..(622): n is a, c, g, or t
  misc_feature (624)..(624): n is a, c, g, or t
  misc_feature (629)..(630): n is a, c, g, or t
  misc_feature (632)..(636): n is a, c, g, or t
  misc_feature (638)..(642): n is a, c, g, or t
  misc_feature (645)..(647): n is a, c, g, or t
  misc_feature (658)..(658): n is a, c, g, or t
  misc_feature (661)..(661): n is a, c, g, or t
  misc_feature (663)..(663): n is a, c, g, or t
  misc_feature (666)..(669): n is a, c, g, or t
  misc_feature (673)..(673): n is a, c, g, or t
  misc_feature (675)..(675): n is a, c, g, or t
  misc_feature (677)..(681): n is a, c, g, or t
  misc_feature (683)..(684): n is a, c, g, or t
  misc_feature (686)..(687): n is a, c, g, or t
  misc_feature (689)..(689): n is a, c, g, or t
  misc_feature (693)..(693): n is a, c, g, or t
  misc_feature (695)..(696): n is a, c, g, or t
  misc_feature (699)..(699): n is a, c, g, or t
  misc_feature (701)..(701): n is a, c, g, or t
  misc_feature (703)..(703): n is a, c, g, or t
  misc_feature (709)..(709): n is a, c, g, or t
  misc_feature (715)..(715): n is a, c, g, or t
  misc_feature (721)..(721): n is a, c, g, or t
  misc_feature (724)..(729): n is a, c, g, or t
  misc_feature (751)..(751): n is a, c, g, or t
  misc_feature (762)..(764): n is a, c, g, or t
  misc_feature (766)..(767): n is a, c, g, or t
  misc_feature (770)..(770): n is a, c, g, or t
  misc_feature (772)..(775): n is a, c, g, or t
  misc_feature (792)..(792): n is a, c, g, or t
  misc_feature (795)..(795): n is a, c, g, or t
  misc_feature (801)..(801): n is a, c, g, or t
  misc_feature (815)..(815): n is a, c, g, or t
  misc_feature (818)..(818): n is a, c, g, or t
  misc_feature (820)..(820): n is a, c, g, or t
  misc_feature (915)..(915): n is a, c, g, or t
  misc_feature (1454)..(1454): n is a, c, g, or t
  misc_feature (1517)..(1517): n is a, c, g, or t
  misc_feature (3424)..(3425): n is a, c, g, or t
  misc_feature (3428)..(3428): n is a, c, g, or t
  misc_feature (3436)..(3437): n is a, c, g, or t
  misc_feature (3440)..(3440): n is a, c, g, or t
  misc_feature (3442)..(3452): n is a, c, g, or t
  misc_feature (3454)..(3457): n is a, c, g, or t
  misc_feature (3460)..(3463): n is a, c, g, or t
  misc_feature (3465)..(3467): n is a, c, g, or t
  misc_feature (3469)..(3470): n is a, c, g, or t
  misc_feature (3473)..(3474): n is a, c, g, or t
  misc_feature (3476)..(3479): n is a, c, g, or t
  misc_feature (3481)..(3481): n is a, c, g, or t
  misc_feature (3483)..(3483): n is a, c, g, or t
  misc_feature (3488)..(3488): n is a, c, g, or t
  misc_feature (3490)..(3498): n is a, c, g, or t
  misc_feature (3500)..(3503): n is a, c, g, or t
  misc_feature (3515)..(3515): n is a, c, g, or t
  misc_feature (3538)..(3539): n is a, c, g, or t
  misc_feature (3541)..(3541): n is a, c, g, or t
  misc_feature (3544)..(3545): n is a, c, g, or t
  misc_feature (3549)..(3551): n is a, c, g, or t
  misc_feature (3553)..(3554): n is a, c, g, or t
  misc_feature (3556)..(3557): n is a, c, g, or t
  misc_feature (3559)..(3559): n is a, c, g, or t
  misc_feature (3561)..(3563): n is a, c, g, or t
  misc_feature (3565)..(3566): n is a, c, g, or t
  misc_feature (3569)..(3572): n is a, c, g, or t
  misc_feature (3576)..(3581): n is a, c, g, or t
  misc_feature (3608)..(3608): n is a, c, g, or t
  misc_feature (3613)..(3616): n is a, c, g, or t
  misc_feature (3618)..(3624): n is a, c, g, or t
  misc_feature (3626)..(3626): n is a, c, g, or t
  misc_feature (3629)..(3629): n is a, c, g, or t
  misc_feature (3633)..(3644): n is a, c, g, or t
  misc_feature (3646)..(3647): n is a, c, g, or t
  misc_feature (3649)..(3655): n is a, c, g, or t
  misc_feature (3661)..(3672): n is a, c, g, or t
  misc_feature (3674)..(3682): n is a, c, g, or t
  misc_feature (3684)..(3684): n is a, c, g, or t
  misc_feature (3686)..(3687): n is a, c, g, or t
  misc_feature (3689)..(3693): n is a, c, g, or t
  misc_feature (3698)..(3699): n is a, c, g, or t
  misc_feature (3701)..(3702): n is a, c, g, or t
  misc_feature (3704)..(3704): n is a, c, g, or t
  misc_feature (3707)..(3707): n is a, c, g, or t
  misc_feature (3709)..(3710): n is a, c, g, or t
  misc_feature (3712)..(3712): n is a, c, g, or t
  misc_feature (3714)..(3716): n is a, c, g, or t
  misc_feature (3719)..(3720): n is a, c, g, or t
  misc_feature (3724)..(3726): n is a, c, g, or t
  misc_feature (3728)..(3737): n is a, c, g, or t
  misc_feature (3739)..(3740): n is a, c, g, or t
  misc_feature (3742)..(3742): n is a, c, g, or t
  misc_feature (3746)..(3747): n is a, c, g, or t
  misc_feature (3749)..(3749): n is a, c, g, or t
  misc_feature (3751)..(3751): n is a, c, g, or t
  misc_feature (3754)..(3754): n is a, c, g, or t
  misc_feature (3757)..(3758): n is a, c, g, or t
  misc_feature (3762)..(3763): n is a, c, g, or t
  misc_feature (3769)..(3769): n is a, c, g, or t
  misc_feature (3772)..(3772): n is a, c, g, or t
  misc_feature (3775)..(3775): n is a, c, g, or t
  misc_feature (3779)..(3779): n is a, c, g, or t
  misc_feature (3781)..(3781): n is a, c, g, or t
  misc_feature (3784)..(3784): n is a, c, g, or t
  misc_feature (3787)..(3788): n is a, c, g, or t
  misc_feature (3790)..(3790): n is a, c, g, or t
  misc_feature (3792)..(3792): n is a, c, g, or t
  misc_feature (3797)..(3797): n is a, c, g, or t
  misc_feature (3799)..(3801): n is a, c, g, or t
  misc_feature (3803)..(3803): n is a, c, g, or t
  misc_feature (3807)..(3807): n is a, c, g, or t
  misc_feature (3810)..(3813): n is a, c, g, or t
  misc_feature (3815)..(3815): n is a, c, g, or t
  misc_feature (3819)..(3829): n is a, c, g, or t
  misc_feature (3831)..(3831): n is a, c, g, or t
  misc_feature (3834)..(3834): n is a, c, g, or t
  misc_feature (3837)..(3843): n is a, c, g, or t
  misc_feature (3845)..(3846): n is a, c, g, or t
  misc_feature (3849)..(3857): n is a, c, g, or t
  misc_feature (3859)..(3869): n is a, c, g, or t
  misc_feature (3871)..(3875): n is a, c, g, or t
  misc_feature (3878)..(3882): n is a, c, g, or t
  misc_feature (3884)..(3884): n is a, c, g, or t
  misc_feature (3887)..(3889): n is a, c, g, or t
  misc_feature (3891)..(3891): n is a, c, g, or t
  misc_feature (3893)..(3894): n is a, c, g, or t
  misc_feature (3896)..(3900): n is a, c, g, or t
  misc_feature (3902)..(3903): n is a, c, g, or t
  misc_feature (3905)..(3906): n is a, c, g, or t
  misc_feature (3909)..(3916): n is a, c, g, or t
  misc_feature (3918)..(3923): n is a, c, g, or t
  misc_feature (3925)..(3927): n is a, c, g, or t
  misc_feature (3929)..(3931): n is a, c, g, or t
  misc_feature (3935)..(3939): n is a, c, g, or t
  misc_feature (3941)..(3942): n is a, c, g, or t
  misc_feature (3945)..(3947): n is a, c, g, or t
  misc_feature (3949)..(3951): n is a, c, g, or t
  misc_feature (3953)..(3964): n is a, c, g, or t
  misc_feature (3966)..(3972): n is a, c, g, or t
  misc_feature (3975)..(3976): n is a, c, g, or t
  misc_feature (3978)..(3979): n is a, c, g, or t
  misc_feature (3981)..(3990): n is a, c, g, or t
  misc_feature (3992)..(3994): n is a, c, g, or t
  misc_feature (3996)..(4000): n is a, c, g, or t
gntntngnnanaanannngcagnagcagcngtnnccancaacnncannancntcgntctcgntnnccaagnnnntgnannngnnnnnggtntnnnnnnngctntcgnncncgnncgngnaggacaagnatnnncnngnnagcnannncnnngnncnnncangnnncnagnncnnnntnnnnagaangannnnttnanaannaccnncngcnngnnntttntnnatntgcannnnancgcgntngaancaanacgtcttcnnnnggnnnntgtnnangnnngaaanangantncnantannganngnganaangntaaaaangtanaantnnnnatntatatatannannnnnanannngnncgngntcannccnnncnntcgcnntngnnnaagnnnttgntntnnncnnctcccgntcnntanncnnnnaccnctnnntcttcttnttnnncgaagnngaagnnttntnntnanaatnnaattnaantntntnntnaaaaaanaanancncnnncnccnncncanatacananacncanacanatannnnnnnacacacacacacacgtaaacgtancgcgcncnngannaggagnnggannancntnnacntnnatannnanaaganntnnnnntnnnnntgnnnaagaagaaganaantncannnncaanancnnnnncnncnncngcancnncancngnaacggnaaagangaagangannnnnncgacgacgacgacgacgacggnggatgatcatnnngnncancnnnntcaagaacaacagcagnagnagcagnagcagcagcaacanccncnacaacaacaacaacaacaacaaagagtctctcgtttaggcaaagcggttcaagatgcggcgacgataaaaaagaagcccaagaacaaggggcaanaccaacaccaagctaaaaaaaaatcgactgtaattccgatgatgaatcgaatggattctcgagtggacccgtctcgcatgggaaagaatcggagccgagaagggacgtcggaacggttgacgcctcgaacgcaaagtcagagtcagcagagaatgccggcgccgagaagaccgggggggatcgacgcgtcgatgttgtcttcgccgcaccgggtgacgagtccggaacgcgcggcggcggggagaatgcagtcgccggcggtggccgcgcagagagagaaggagttgcgagcgcagatgcagcagaagcgcgagagagaggagcgggagaaacgggcgatgcagcagcagcaacagcagagggagaaagcagagcaagagaagcaaaagaagttgcaaagagagagagaggcgcagatgcaaaggcaacgcgaacagcaacaacaacgcgaacagcaacagcgacaacaacgcgaacagcaacagcgacaacaacagttgttgttacagcagcagcagcagcaacaacaacaacaacancaacaacaacagcaacagcccgcacagcaacaggaaagacgcgtgccgcgacaaccgctcccncgaacgagagcgccgccggctcctgtacccagcaaagcggtgccacgacaaccagtggggagagttggtgtctcggtaccgccgcccgaacctccgcaacaagcggcacagccgagattggtagataacgtagtttttagcgaacctcaaccgacttcgatacgagatataatggtgaggaaagcgagagatgaacgaaaagcagaaatgcacgcgaggaaagagaaacgaagacgtgatcagttgttgacgctcccgtcgggtttgatgttcggcgacggcgttggatcgttggaggatggtgaaaaccagccccaggcgactggcgggacaccaaccttagtgcactttgcagaagatgcaaacaaagatcaaaacggaaccaaagaaacgccagctgcggagaacggacgaagaacgcgtctgagatcttcttcgctcggagcggcggctggtgagaaaccgagtgcgactgtcgcaccgtcggcaaaagctccgaacgtgaaaacgactggcgccgcggggcttttaaaatccgcgctaaaaaaggtctcccaagttgcaaacgccttagccttggcgaacgcgcccaccgccgccgcgcagcaacaacaagcacaaaatgtgcacacgccgagagtaaagcttgggccaaatggtcaaatcgtagccgaccaagcgacgctcacagtgcaagcctcgcacgaaaatcgaataagtgagagcgagtttacgcgaaaaacaggagacaaaatgatgattaattcgcagacgtatgggaatcggtcaaaaccgacaaagtggacgaggcaagagacggagttgttttacaaagccatggagcaattcggtactgatttcactctcattcaaagattgtttccttctcgaacgagaaggcaagtaaaggcgaaatatttgaaggagcaaaacaacaacgacgatcgcatagagtcttgcatgaacaacatggccagaaataacgagacgtatcaaaacttgatcgacgtgttacaatcggatacgaataatcgagttgaggttgctgcggggaaaggcgtcgataggatcattcctggggcgaacaacgtcgccgctcaagtgttgcacggcgacgcgcccatgcaagagaacgtgcagaatactgttcctcaagcctccatctccgccgctactcctgctgcgcattgattttgagaagcgcaaataaaaaagatttagtgcaaactaaaagtagaaagcaaaatcaaatgtgtatatgaaacaatacacctaggtattttcattactatgataacatcaagtctctctctctctctatcgctttcgcgttcctttcactactattcctcgctgccgctgcgttgccttgttctgatggtttctaacttttttgcgatcgtatttacttattttgcgctcgaatctctgctcgaatttccttcatggaagactcgatttcgagctcaaccgatatcgtctctgccatcgccaacgaaagaggagcgttcttaatcttagcaacctgacctttaatcttctccaaaatggcttcaaatccttccaagtaatttaaaacttgttcttgataagcagccgcgcgcacttcctccatcgtcgtcgtatcttcacttagtccttcttcttgatcttctttttctccatagcgttgcccttctacgctaaacttttgtaacttttctgacgctaaccgcttcagtctttcggcgctctcgtaaacctgcttcggcgtcatcgcgacggattctctatgtggcttcatcaccgtgactgcctctaacggcggcggcatcgaaccgtctcttctctgccttggcgccgccggcgtttccattaaaatatcttcttcttcttcttcttcttcttcttcttcttcttcttcttcnnccncttcttcnnctncnnnnnnnnnnncnnnngannnngnnnannaanngnnnngngngtggngnnnnnnnnntnnnngttgttgttgtngttgttgttgttgttgttgttgnngntgnngggnnntnntnntnannntnncannnncttnnnnnncttcttcttcttcttcttcttcttctncttcnnnntnnnnnnnancancaannnnnnnnnnnntnntnnnnnnntttttnnnnnnnnnnnncnnnnnnnnngncnncnnnnncgccnncnncnccncnncncnnntcnncttnnncnnnnnnnnnncnncnccannancntcntcnncatnntcatcnttnttntcancnccnccnntncncctcncnnncnccancannnncnccannnnnnnnnnnangangannnnnnngnngannnnnnnnntnnnnnnnnnnntnnnnntcnnnnntnttnnntncnncnnnnncnncnnccnnnnnnnnannnnnncnnntnnntttnnnnntnnttnnnannntnnnnnnnnnnnntnnnnnnngtnntnntnnnnnnnnnntnnnannnnn

SEQ ID NO: 1383 - DNA, 4000 bp, Escherichia coli
ttttttagccatttcccgataatattcctcacgtacgggatggtgggggctcactaaattaaagattccttccatttgaggatattttagaaattcttcaattccatttaccacatcaacttgtgagacaaaattgattcgtcctcttgggtttgggattgtttttttttgaagtgagaaaatggggttcctgtcttcacctacaagtcccccaagacgaattattagggatctttggggagcgttcaatatcattttttcacacagaaccaatgcttttgaagcttcagtttctgccgaaataggactattttctttaaagattcctgcttgttttccataaacggaagtactacttaaaaaaatgagtttacacccagggtgtaatttcatgtgttctaatagtgtagcgatcatgtcttcaaattgagatggagcatctctttttgggggtacagaaattaaaagcgtgtccaagttttcaaaaaaattaagatcaccttctatactcaaactgtttagcttaatgcggtatgaatcccatcctttagctttaagctcgcctttacctttggctgacgtccgagacaccttcacgctccatttttctgaatagagtctatttgctagatactcaccaagccatccacatcccaaaatacccaaatgatccatacacttaattttagcaatattacagctatattttaattgaccctacccttttcaatgagtgtaaaaattaaattcaattaaaaacactatatttaaaagacctaaaagctaaagatatgcctataaaaagttttcagggagaaagagccaaaaagaagagggtcactcccagcaaattaactgtatcagatatcatgacacgccaattggttatttttcttccagatcaatctatacatgatgtgatgaaagcgtttattaagaatagaatatccggaggtccagtagttgacaaagatggccgtttggttggagtaatatcagaggcagattgtatgaaagaaatatcggacagtcgttattttaaccttccaatcttggataaatccgtagctcattttatgacaaaaaaagtagatactatcgaagcaaacacaagtgtttttgatgctgcagcactcttttcaaaaagtagtagaagaagatatcctgttatagaaaataatcaacttgtaggacaggttagtagaaaagatattgtcatcgctgctctggaaatgaaaagccaaacttggcaacattaagtgtataatttaacagcttctctgtaggtatttgcgtgggcttcaactataacgttgatgtctttggagtatccccctcccatactgcattgaattggaattccatttttattgcaaaattctaaaaccatttgatcacggagtttacatccttcgatgctcagatccaatcgacccaatttatcagactctaagacgtcaacaccacatagataaaaaataaaacttgggattatttgatccagtaattttggtaggagcgttttgatctgatccaaatagtacgaatccccggtatgatcttcaaaagcaagatctaaatcgctttgctcctttttgaaagggtagtttttagcaccatgtactgagcatgtaaatacggcatcattggttttaaagatttcagctgtaccatttccttgatgtacatctaaatccagaatcaaaacctttttaaccttcgtgtgatctaataaatattgagttgcgatagcttggtcgtttaaaagacaaaacgcctcgccatgggagctgaaagcatggtgtgtgcctcctgctatattcattgctatccctgtgtttaaagcttttttggcacctgcgactgttcctcctgctatggtaaattctctttttaccaaagcttgacttaatgggaatccgatctttcgaacttcgcttttgtcgagttctaaattgcataaacggtttacatagtttgaatcgtggacacgttctactatttctctgtttagaggctgtggctcaaaaaaatcttcttttatacaggtaccttccaacagtaattgctgtgggagcaactcgtatttttccattggaaaacgatggttttctggaaggggaagtttataagtggggtgataagcaataggtatagatgaattaatactcactatctaataggggttgcggattgaacttctgaatcttctggtgaaataaaaacttgctttccattttcatcttcgcccaaaagaatcattccttggctttcaatgccttttagggttctgggtttaagattgactaataaagtcacctttttgccaatcaattcattctcactatagtcttgggctatccccgaaacaacagttcttttctcatcacccaactgaacggtaagttccattaacttctttgttttcttaatttttttagccgcaatgatttcagcaacctttagttcaagagattcaaactgatttgaagcaatttctggttttatgggagatatctttttttgcagttctttattattttcagcagcattttgaagtttagctctttgtgcgtccatttgggcatcttcaattttttgaaataaaagctccgctttgctcaaaaggtgttttgactttagaaggacatcacttttacctactttttcccaaattagtggctctaattcaagattcagcatttgcgctagtttagaggcggtaaaaggcaacaagggttcagaaagtatgctcagaccagcagaaacctgtaatgcagtgaacatgatggttttcactcgttgaggatctgtttttactattttccaaggctctgcatcagcgaggtatttattcccgagacgggctaaactcatgagcatctgacttgcttctctgaatcggtaattttcaatggaatccccaattttttttgggagttcggtcatacttgccaataccttcagatcttcatcatgaagtgttcctggttcaggcacaaaaccttcatagtatttatgggtcaaaaccatgaccctatttataaaattaccgaaaattgcaaccaattcattattgtttcttgcttgaaattcttcccaagtaaaatcgttgtcttttgtctcaggcgcattggcagttagaacatatcggagtacgtcttgttgttcagggaattgttctaaatattcgtgaagccatacggcccaattttttgaggtagaaattttttgcccttcgaggtttaaaaattcgtttgcggggacattttctggtaagataaaacgttctgaagccttgagcattacaggaaaaataatacaatgaaatacgatattgtcttttccgatgaaatgaactagctgtgtttctggatcacaccaatacggttcccaatccttccctttttcttttgcccattctttcgttgaagatatatacccgataggagcatcaaaccaaacatagagaacttttccttctgcattcgggacaggtactgaaattccccaatctaaatctcgggttacggctcttggctgaagaccattgctcacccatgattttacctgaccataaacattaggcttccagtcttctttatgtccttcaagaatccatttcgttataaaatcttcaaattgatttaaggggagataccaatgtttcgtttttttaagttctggtttagcaccgctcaaggtagattggggattaatgagttcggttgcacttaaactacttccacagctttcgcattggtcaccataagcctctggattttgacagataggacaggtacccgttacaaaacgatctgcgagaaactgatttgcttcagcatcatacaattgttctgaatctttctcttcaaaaacacctttttcatcaagaattttaaaaaactcttgagctgtttcgtgatgaattttacgtgaagttctagaataatgatcaaaagcaattccaaaggtctcaaaagattctcgaatcacctga

SEQ ID NO: 1384 - DNA, 4000 bp, Escherichia coli
  misc_feature (1208)..(1208): n is a, c, g, or t
  misc_feature (1311)..(1312): n is a, c, g, or t
  misc_feature (1409)..(1409): n is a, c, g, or t
  misc_feature (1989)..(1989): n is a, c, g, or t
  misc_feature (3850)..(3850): n is a, c, g, or t
  misc_feature (3853)..(3853): n is a, c, g, or t
  misc_feature (3862)..(3862): n is a, c, g, or t
  misc_feature (3916)..(3916): n is a, c, g, or t
cggtgccaccacacccgcggcgtcacccgccagcaccacatcgcggccgttgtcccagcgcggcaagggcttcatgggcaagggcgcgccttcgcgacgcaagacggtagcgttttgcaaaccagcagcgtcacgcaaacgaccgaccgcaccgcgcaatgaaaaacctttgtcggcgctgcccgtgcccacgctcatggtgtcgccatgggggaacacccagccgtaaaagtcgggcgacaaactgcctcggtagtacacatcgcaacgcgaggggtctgcatcggtttgcagcatgttttccggtgttttaacgatctcgtggtaggcgaaaacatacttggttttttcagcgcctggtacggcttgcttggccacctgggaacgtgcgccatcggcaccgatgatgcatttaccgcgcacactggcgggcatgtccaaaccgtcgtcggtacggatggtgaagtgcacccggctgatgccatcgtcgtcgcggctgagtttgtcaaaaatgccgcgctggcgcaccgcgccatggttttcggcgcgcacccgcagccattcgtcaaactcgtcgcggttgaccatgccgacaaaaccgccctcgataggaatgtcgaccttgttgtctttgggcgaaaccatgcgcgcagcacgcgccttggcgaccaacaactcatcgggtatatcgaagtctttgatcaggcgtggcgggatggccccaccacagggcttgatacgcccttgtctgtcgagcagcaaaacatgccgccccagtttggctaaatcatcggctgcggttgcaccggacggcccgccgccgaccactaccacgtcataggttaggttatgcatgaaataactcctgaggggattggataaaagaaacagaaacagaaaaagtggctgcatcagcagcctgtgaatgaacaagatgttggggggcattgcgccaagcaaaagcgctgaccatcatgccggcgaccaacaaaggcacgcccaaggcgctgaggcttaaggcgcggccgaccgggtcgcgcataaagcgcatcattaaaggaatttgtgcataaatcagcagcaacaccgccaccgcgtaaggcaacaaaccccagaccagcaacaaagccaccaccacaaactgcggcagcagcatgacccaacaggccgtgcctgcagcgcctttgatgcccagttgaaccggcaangaaaaaatacccatttgtcggtcaccctctatggctttgaagtcattcaaggtcatgatgccgtgagccgccaagctgtagagcagcgccaaagtgatgatgnnggcgtcgggcatggcgccgcccaacatgacggccgcgccggtgacccaagccaagccttcatagctgagggcgcaagcggcgttgcctatccagccntctttttttaatcgaaaaggcggggcgctgtaggcccaagccagcgccagcgccagtaaggtggcaccaaaagcccaggtgcccaattgccacgcccaccacatggacaacaaggtccaaacaatggcaatgacaatgccccaagccccgggcatgcgccccgagggaatgggccgctggggctcgttgatggcgtcaacatgccggtcaaaccaatcgttcacggcttggctgcaggcgcacaccatggggcctgtcaacacgatgccgctgatgagtaaaccgaccttgtctgacagaggctgccccgaagacaccgcgccgcaggcaaaggcccacatgggaggaaaccaagtcaccggtttgagaagctctaagacagctgagggttggggaagcgccatacccccattttcatttgacaaaataaaatgtcaatctaagttgacgcttttttgtgagaactagggtttactcgggttcgccttcggcaaccatgccatagcggtgcaatttcacatacaggctttggcgcgacaagcccaacatctcggcggccgaggcacggttgttttgggtnagttctatagctgcctgaatgcacatgcgctcgatcatggtgctggtctcgccgacgatttctttcatcggcatgcgccccaccaactgcgacaactgtgccaccgaatcggccataccacccgaggtggctggcatggtgtcgcgactgcgtgcgcccgaaacttcatggaagaagaagccataggtgggatccacgccattcaaagtcacggcggtgatgtctacgggtatcagcacacccactatgctgcgcaaatcggtggcgaaactgcgcagggtgcgcgactggcgcaaattggtcagcaacacgcccaaatcgacaccgccacgggccagccattcttcaaggcttttattcgccagcatggtgtgagacgccacgcccaccatgctgcaaaactcggggttgctggccagcaccgtgcccaagcggtcagccaccacaaaacccaccggcgcttgatctaaagcgtggtggaaccaatcaatcactgacgcattggataggctggtttgctgagagcttaaagcctgcaaacgcaataaaaattgaggcccaccttcttgcacgaacaccgatgcatgcaaattgcaatcgtgatccgatttgagtaagcgcatccgccccgtctccatgcgacccgagttttgcgcttcgcgcagcaagttgtccagcgcctctcttttgctggggtcgaacaactgaagcacatcggttccgggcaatttgcggttgacatctttgaacaagagctgggccgcactgttggcctccatcacgcggcgttgggccacatcggccaccaacatcgggtcggcgacagactcgaacagcaagcggtaacgcgcctccatgtggcgcagtcgcaaaaagtcacgctccatggattgatgggcttcaaccaagcggtgctgcatttgcgacaagctgcttaaatcgcggccaaagagccacacggtttggtctttttcctgagacaccaagctgacttgcaaaggcaagtcttggccggctgagggtgagaaattgacatgtcgccaggttggggcttgggctttgaccaccgagtcccacatgctggaaaatttttgttggctatcaaaactgagaaagtctttgacagagcgccccttgaaaacagagctgtccaaaccttgtaaatctttgccaaaaacagccacttccagcactgtcgactgtttgtccaacaccatcatgatgtcaaccaagcctggcagcaactgctgtaaatgagtagagtttaggtctggagtgatcaagatattaaaaagcttaagttggttaaatcaacaatcatttccttggccaagacttctggcaaaccctaggaaaatagcaccttgggttttcccctattctaagctcagtttgtctaagctgtttgacactttaaaacaactcaaccgaagattttccacgctgcttacgcacctgctcaacactttgtatcgccatcaactgcgcttgatcagcctgcaaacacgaaaaatcagcgcccaaccatgcggctaaatggtcatgtgtggccagcaaggggccgcccaccatcaccaacagaccggggttgagcgatttctttcgcaaagtggcaatgagttttttcaaatagcccaattgcctttcatcactgaccgacagacccaataaatcgatagaaccagactgcactgcaatcaccatatccggctcgcgccaagtggtgtctcccacgacctgccagccatagcgtttgaaatattgggacaggatgagcagacccaaggaatgctgtgattggggcgtattgaccagcaatgctgcatagttggacaagccgccgcattggggcccgctcaanacnaattcagcnctgagtttgtagaccaattcttgcaagcggtaactggcttgggtgaccgccacnaagtcaatttcatcttgcgcccaccactggtgaaagagtctggcggcgctgggaatggtttgcaaaaacacggtttccagcccc

SEQ ID NO: 1385 - DNA, 4000 bp, Escherichia coli
  misc_feature (871)..(871): n is a, c, g, or t
  misc_feature (1626)..(1626): n is a, c, g, or t
  misc_feature (1988)..(1988): n is a, c, g, or t
tggcgtcacccaatcgactgcttaggagcagtaatcgaagttcggcttcaaatacggcttcattgtttgggtattgatccttgatgctggctagtatctcaagtgcttctcgataactgccagtttgctccagcgccacaacctctgagagcagcccgtcatcttttgcccatgaggcaggtatcgcaacaaggcttaatagcgtcacaagcaaaaataggggcgggtagcgaaacatgcgatcgctagatacaaaaatattggttgccaccatttagcaaggtcctccctgagttgctgaaatcatcgtcagtaaaaattaaatgacccagtaccaccattgttgccattttatggtggatcagcaagctgggcttaatcaacttgagggtcaaaaatctgaacctacaggcggcacgtgcctgatctaaagcgcatgcctatggtcttagggacagtgcttaaattctaagaaaacgaacattcccgtcgcgtctcgttatacctttgccatcgaaatactcgagtaactcaatacataaatttcgcccaatgcctgcggcatctctaaattgctgtacgctaaacccattgtcaccagccagttctgtaatcaaactggtaaaggtttgaatcgattccggtaaaaacagtcggtttttaactggttgaacaagcaggccggccttaacagcaggctgtaactgctgcagaagcgattttggtggaacgcccaagcgttctgaaaggtcgtgtatcactgggggttgtaagggggtttctgccagcaaagggcgcaagcggtccaaaagtcgctgagtcgcttcaggtaacttaactatcgcccccggcaatctcgcaattgtaccgncgacaacaatggtgccggtttttttcagctggtcaatgatggcagtcttaaacaagtaatttcttggcagaacacccgataacgcgctgacattcatcccctcagcggccggattgtccttgtgaaatcggcttaggccttggataagcgccgtctgggcctggtcaaacgcctttttggtgaccaaacactgatccagcagaagcgtctgcttattgttttttagccaagcctgaattgtggctggaagccagttcaagttgcgcgcgaaatcggaaacaggaacgcccccaggcatggtatctaaacaaacttgagcgtagtcatcgaagtgggccgcattggcaagcgcattcaacaatttaagtctgcttggcttggctcgcccgcgtccctttgcaatggggtctacgacgataccgctggcaattgttcgggttgcgccttgatcccggaaaataattttgtcgccaacacaggcgcttaagggtgctttgcagactacttgcacaagacctgtttcattaggcaacattttgggggcctctaacgtggcgaggtgacccaaggtgtgttgtgcggagtggtagacatgggcgggcgtccaatgcctcaaaggttttacttcagttgattgcacgtgaagcaaaacatcgatgtgatgatggggtcgaagcgttgggttcgctgtgagccaggcgcctctgacgagttgctttaatcctgcttgagggccagttaaattcagtgcgacnctatcgccagccatagcaatgtcgctggcgctgccatgacgctggatgctacgaaccttgaaaggctgctgagccgagacttcatggatggtgtcagcgatggcgatgctgccgtcgataattgccccagttacaatggttcctgcacccttggccgtaaacacacgatctaccgccatgcgaaaataaccaacgtcggaacgcaatcgggcttcagctgaagcctcgattaaggctttttcaaggtcttgccgaccaatcccagtaacgccagaacaggctacaatctttgcgccggcataagttgtcggtgccaacaggtcttttatggattccgttactgtttggcattgctcggctgngacccgatcgctcttagtcaaaacaactataagctgcggtactgctagcgcgtgcaggatcgcgagatgctcgcgggtttggggcatgatgccatcatcggctgcgaccactagcagtgcaaggtcgacagcacttaccccggccagcatgttattaatgaagcgaatatggccgggaacgtcgacaaacccaaaagaggcgccctgaatggtggtgtgagcaaaacccagatcaatcgtcaggcctcgtgctcgctcttcttcgagctggtcagtctgaaccccggtcagcaagccgacaagagaagttttcccatgatcaacatggccagctgtcgcaatgatcatgaggccagagtatggcgaaggccagcaatgagcggatcggggttgtataaggtcctaaggtccaacaacaactggtcatcatgaatacgtccaacgattgcattggagcaagccctcagttgttctgagagattcataagcgttcgatttggtgatgtcgatcgcgcggcagtaatggcgatggcccagctcggaatgcgctcgattggcaatgcaccgctcccaatttggctctttacagggaccaaagttagatcaaactcgccggtttccgcggtagacaacgcgtgtaacaccgtctcacctaactttttgatctcattctctggcctagccaagtctcggatcgtgggaagggtttggacgagtgtttctggcgtttgatagaggcgaaggacttcgacgagtccagccacggtcatcttatctacccggagcgctcgcttcatcgggttttgtttaatcgccttaataaattgacgactaccgacaatgatgccagcctggggaccgcccagtaatttatcgccgctaaaagttacaatcgtagccccttgggcgagggcctcttggacagtaggttctctgggtaagccatactgggtgaggttaacgagcgtgccacttccaagatcaatcatgaaaggtaaattatgctggttagcaagatctgcaagcgccgattcgctggtggactctgtgaagccttgcacttcatagttactggtgtgaaccttcatcagcatcgcggtagtttcatcaatagcgttttcgaagtctgagattcgggtgcggttagtagcaccaacctctaccagctgacaacctgaacgcatcatgatttcagggattcgaaaggaaccgcctatctcaactaattcacctcgggagacgggtactgatttgccgagcgcgaaggtgtttaacacgagcatcaccgctgcggcattgttgtttacgaccgttgctgcctctgcaccggtaagcgcttttaataaagattctagttgcgcatcacgatctccccgggacccagttgcaagatcaaattctaaattcgaaggctcagatgcgacttgtgcaatcgcttggatagcggtgtctggtaaccgcgctctacccaaattggtgtgtaacactgtgccagtgagattgagtatagttttgagggcaaccgatgactgttttagctcgttttcggacgctgcaagcagatgctgttctgagaccgctggtttgccagacgcaaggatttctttgcgcgcaaggctgatttgtttagctagcacgctcgccacgggcgcccggccgaacgcggctaccaaggtttggccagcgtttgagcgcagcaggcgatcaacgctgggcaattgtccagctggatgagacaaccgttttaatccattggcccgagtggttgtaaggtcttctgaatggatcccacggttctgatccacggttcgataccgttatcgtattccgccatccaggttctttttgcgtcacttgcaacttggatatcgttgaaagtatccaagatcaagatataaagtggtcgtcgcagaggctgcgttttgagtactaaaggatcagtgagcttaatttctgtggcaaaagctcgtattcctgatagcgttttgtctgctttcaactggatagcaaaa

SEQ ID NO: 1386 - DNA, 4000 bp, Escherichia coli
  misc_feature (1)..(2): n is a, c, g, or t
  misc_feature (4)..(9): n is a, c, g, or t
  misc_feature (11)..(13): n is a, c, g, or t
  misc_feature (15)..(19): n is a, c, g, or t
  misc_feature (22)..(25): n is a, c, g, or t
  misc_feature (28)..(30): n is a, c, g, or t
  misc_feature (32)..(34): n is a, c, g, or t
  misc_feature (36)..(36): n is a, c, g, or t
  misc_feature (38)..(38): n is a, c, g, or t
  misc_feature (41)..(41): n is a, c, g, or t
  misc_feature (43)..(44): n is a, c, g, or t
  misc_feature (47)..(47): n is a, c, g, or t
  misc_feature (49)..(54): n is a, c, g, or t
  misc_feature (56)..(56): n is a, c, g, or t
  misc_feature (59)..(61): n is a, c, g, or t
  misc_feature (63)..(65): n is a, c, g, or t
  misc_feature (68)..(71): n is a, c, g, or t
  misc_feature (73)..(76): n is a, c, g, or t
  misc_feature (78)..(81): n is a, c, g, or t
  misc_feature (83)..(83): n is a, c, g, or t
  misc_feature (86)..(89): n is a, c, g, or t
  misc_feature (91)..(95): n is a, c, g, or t
  misc_feature (98)..(101): n is a, c, g, or t
  misc_feature (103)..(111): n is a, c, g, or t
  misc_feature (113)..(120): n is a, c, g, or t
  misc_feature (122)..(122): n is a, c, g, or t
  misc_feature (125)..(129): n is a, c, g, or t
  misc_feature (131)..(131): n is a, c, g, or t
  misc_feature (133)..(137): n is a, c, g, or t
  misc_feature (139)..(140): n is a, c, g, or t
  misc_feature (142)..(147): n is a, c, g, or t
  misc_feature (150)..(155): n is a, c, g, or t
  misc_feature (157)..(158): n is a, c, g, or t
  misc_feature (160)..(164): n is a, c, g, or t
  misc_feature (166)..(166): n is a, c, g, or t
  misc_feature (168)..(169): n is a, c, g, or t
  misc_feature (172)..(173): n is a, c, g, or t
  misc_feature (175)..(175): n is a, c, g, or t
  misc_feature (177)..(178): n is a, c, g, or t
  misc_feature (181)..(183): n is a, c, g, or t
  misc_feature (186)..(189): n is a, c, g, or t
  misc_feature (191)..(195): n is a, c, g, or t
  misc_feature (198)..(203): n is a, c, g, or t
  misc_feature (207)..(216): n is a, c, g, or t
  misc_feature (218)..(220): n is a, c, g, or t
  misc_feature (222)..(222): n is a, c, g, or t
  misc_feature (224)..(226): n is a, c, g, or t
  misc_feature (228)..(231): n is a, c, g, or t
  misc_feature (234)..(236): n is a, c, g, or t
  misc_feature (238)..(247): n is a, c, g, or t
  misc_feature (249)..(259): n is a, c, g, or t
  misc_feature (261)..(263): n is a, c, g, or t
  misc_feature (265)..(267): n is a, c, g, or t
  misc_feature (270)..(277): n is a, c, g, or t
  misc_feature (279)..(284): n is a, c, g, or t
  misc_feature (286)..(292): n is a, c, g, or t
  misc_feature (294)..(294): n is a, c, g, or t
  misc_feature (296)..(297): n is a, c, g, or t
  misc_feature (300)..(301): n is a, c, g, or t
  misc_feature (303)..(305): n is a, c, g, or t
  misc_feature (307)..(316): n is a, c, g, or t
  misc_feature (319)..(320): n is a, c, g, or t
  misc_feature (323)..(325): n is a, c, g, or t
  misc_feature (327)..(335): n is a, c, g, or t
  misc_feature (337)..(337): n is a, c, g, or t
  misc_feature (339)..(350): n is a, c, g, or t
  misc_feature (352)..(354): n is a, c, g, or t
  misc_feature (356)..(382): n is a, c, g, or t
  misc_feature (384)..(387): n is a, c, g, or t
  misc_feature (389)..(389): n is a, c, g, or t
  misc_feature (391)..(393): n is a, c, g, or t
  misc_feature (395)..(397): n is a, c, g, or t
  misc_feature (399)..(400): n is a, c, g, or t
  misc_feature (402)..(404): n is a, c, g, or t
  misc_feature (407)..(413): n is a, c, g, or t
  misc_feature (415)..(417): n is a, c, g, or t
  misc_feature (421)..(421): n is a, c, g, or t
  misc_feature (423)..(424): n is a, c, g, or t
  misc_feature (426)..(426): n is a, c, g, or t
  misc_feature (428)..(428): n is a, c, g, or t
  misc_feature (430)..(431): n is a, c, g, or t
  misc_feature (433)..(433): n is a, c, g, or t
  misc_feature (436)..(454): n is a, c, g, or t
  misc_feature (456)..(456): n is a, c, g, or t
  misc_feature (459)..(460): n is a, c, g, or t
  misc_feature (462)..(464): n is a, c, g, or t
  misc_feature (467)..(477): n is a, c, g, or t
  misc_feature (479)..(479): n is a, c, g, or t
  misc_feature (481)..(482): n is a, c, g, or t
  misc_feature (484)..(485): n is a, c, g, or t
  misc_feature (488)..(490): n is a, c, g, or t
  misc_feature (492)..(495): n is a, c, g, or t
  misc_feature (498)..(499): n is a, c, g, or t
  misc_feature (501)..(504): n is a, c, g, or t
  misc_feature (506)..(509): n is a, c, g, or t
  misc_feature (512)..(515): n is a, c, g, or t
  misc_feature (519)..(520): n is a, c, g, or t
  misc_feature (523)..(526): n is a, c, g, or t
  misc_feature (528)..(529): n is a, c, g, or t
  misc_feature (531)..(531): n is a, c, g, or t
  misc_feature (536)..(537): n is a, c, g, or t
  misc_feature (539)..(541): n is a, c, g, or t
  misc_feature (543)..(543): n is a, c, g, or t
  misc_feature (545)..(546): n is a, c, g, or t
  misc_feature (548)..(554): n is a, c, g, or t
  misc_feature (556)..(557): n is a, c, g, or t
  misc_feature (559)..(564): n is a, c, g, or t
  misc_feature (568)..(569): n is a, c, g, or t
  misc_feature (571)..(584): n is a, c, g, or t
  misc_feature (586)..(586): n is a, c, g, or t
  misc_feature (588)..(590): n is a, c, g, or t
  misc_feature (592)..(592): n is a, c, g, or t
  misc_feature (594)..(601): n is a, c, g, or t
  misc_feature (604)..(605): n is a, c, g, or t
  misc_feature (607)..(608): n is a, c, g, or t
  misc_feature (610)..(610): n is a, c, g, or t
  misc_feature (613)..(615): n is a, c, g, or t
  misc_feature (617)..(617): n is a, c, g, or t
  misc_feature (619)..(620): n is a, c, g, or t
  misc_feature (622)..(622): n is a, c, g, or t
  misc_feature (624)..(625): n is a, c, g, or t
  misc_feature (627)..(629): n is a, c, g, or t
  misc_feature (632)..(636): n is a, c, g, or t
  misc_feature (638)..(639): n is a, c, g, or t
  misc_feature (641)..(653): n is a, c, g, or t
  misc_feature (655)..(669): n is a, c, g, or t
  misc_feature (671)..(673): n is a, c, g, or t
  misc_feature (675)..(676): n is a, c, g, or t
  misc_feature (678)..(679): n is a, c, g, or t
  misc_feature (681)..(682): n is a, c, g, or t
  misc_feature (684)..(686): n is a, c, g, or t
  misc_feature (688)..(688): n is a, c, g, or t
  misc_feature (691)..(694): n is a, c, g, or t
  misc_feature (696)..(696): n is a, c, g, or t
  misc_feature (699)..(699): n is a, c, g, or t
  misc_feature (702)..(706): n is a, c, g, or t
  misc_feature (708)..(713): n is a, c, g, or t
  misc_feature (715)..(721): n is a, c, g, or t
  misc_feature (723)..(726): n is a, c, g, or t
  misc_feature (730)..(736): n is a, c, g, or t
  misc_feature (738)..(744): n is a, c, g, or t
  misc_feature (746)..(748): n is a, c, g, or t
  misc_feature (751)..(751): n is a, c, g, or t
  misc_feature (753)..(759): n is a, c, g, or t
  misc_feature (761)..(762): n is a, c, g, or t
  misc_feature (764)..(770): n is a, c, g, or t
  misc_feature (772)..(772): n is a, c, g, or t
  misc_feature (774)..(777): n is a, c, g, or t
  misc_feature (779)..(779): n is a, c, g, or t
  misc_feature (781)..(785): n is a, c, g, or t
  misc_feature (788)..(789): n is a, c, g, or t
  misc_feature (791)..(794): n is a, c, g, or t
  misc_feature (796)..(798): n is a, c, g, or t
  misc_feature (800)..(803): n is a, c, g, or t
  misc_feature (806)..(809): n is a, c, g, or t
  misc_feature (813)..(814): n is a, c, g, or t
  misc_feature (816)..(816): n is a, c, g, or t
  misc_feature (818)..(820): n is a, c, g, or t
  misc_feature (822)..(822): n is a, c, g, or t
  misc_feature (824)..(827): n is a, c, g, or t
  misc_feature (829)..(833): n is a, c, g, or t
  misc_feature (835)..(836): n is a, c, g, or t
  misc_feature (838)..(842): n is a, c, g, or t
  misc_feature (844)..(853): n is a, c, g, or t
  misc_feature (855)..(858): n is a, c, g, or t
  misc_feature (860)..(868): n is a, c, g, or t
  misc_feature (870)..(870): n is a, c, g, or t
  misc_feature (872)..(873): n is a, c, g, or t
  misc_feature (875)..(875): n is a, c, g, or t
  misc_feature (877)..(891): n is a, c, g, or t
  misc_feature (893)..(894): n is a, c, g, or t
  misc_feature (896)..(896): n is a, c, g, or t
  misc_feature (898)..(905): n is a, c, g, or t
  misc_feature (907)..(908): n is a, c, g, or t
  misc_feature (910)..(911): n is a, c, g, or t
  misc_feature (913)..(913): n is a, c, g, or t
  misc_feature (915)..(919): n is a, c, g, or t
  misc_feature (921)..(926): n is a, c, g, or t
  misc_feature (928)..(929): n is a, c, g, or t
  misc_feature (931)..(938): n is a, c, g, or t
  misc_feature (941)..(942): n is a, c, g, or t
  misc_feature (944)..(944): n is a, c, g, or t
  misc_feature (947)..(947): n is a, c, g, or t
  misc_feature (988)..(988): n is a, c, g, or t
  misc_feature (1128)..(1129): n is a, c, g, or t
  misc_feature (1133)..(1133): n is a, c, g, or t
  misc_feature (1139)..(1140): n is a, c, g, or t
  misc_feature (1142)..(1142): n is a, c, g, or t
  misc_feature (1185)..(1185): n is a, c, g, or t
  misc_feature (1246)..(1246): n is a, c, g, or t
  misc_feature (1250)..(1250): n is a, c, g, or t
  misc_feature (1280)..(1280): n is a, c, g, or t
  misc_feature (1282)..(1282): n is a, c, g, or t
  misc_feature (1290)..(1290): n is a, c, g, or t
  misc_feature (1292)..(1294): n is a, c, g, or t
  misc_feature (1298)..(1298): n is a, c, g, or t
  misc_feature (1304)..(1304): n is a, c, g, or t
  misc_feature (1415)..(1415): n is a, c, g, or t
  misc_feature (1454)..(1454): n is a, c, g, or t
  misc_feature (1466)..(1466): n is a, c, g, or t
  misc_feature (1511)..(1511): n is a, c, g, or t
  misc_feature (1532)..(1532): n is a, c, g, or t
  misc_feature (1534)..(1534): n is a, c, g, or t
  misc_feature (1592)..(1592): n is a, c, g, or t
  misc_feature (1669)..(1669): n is a, c, g, or t
  misc_feature (1676)..(1676): n is a, c, g, or t
  misc_feature (1921)..(1921): n is a, c, g, or t
  misc_feature (1925)..(1925): n is a, c, g, or t
  misc_feature (1987)..(1987): n is a, c, g, or t
  misc_feature (2001)..(2001): n is a, c, g, or t
  misc_feature (2012)..(2013): n is a, c, g, or t
  misc_feature (2381)..(2381): n is a, c, g, or t
  misc_feature (2432)..(2432): n is a, c, g, or t
  misc_feature (2441)..(2441): n is a, c, g, or t
  misc_feature (2456)..(2456): n is a, c, g, or t
  misc_feature (2486)..(2486): n is a, c, g, or t
  misc_feature (2948)..(2948): n is a, c, g, or t
  misc_feature (3658)..(3658): n is a, c, g, or t
nnannnnnnannnannnnnttnnnntcnnncnnncntnctncnnccngnnnnnnanccnnncnnncgnnnntnnnntnnnntncgnnnnannnnnatnnnncnnnnnnnnntnnnnnnnntntgnnnnnantnnnnncnnannnnnnccnnnnnngnntnnnnngnannaannancnntcnnncannnngnnnnnagnnnnnngttnnnnnnnnnncnnncntnnntnnnntcnnncnnnnnnnnnntnnnnnnnnnnntnnntnnnttnnnnnnnntnnnnnngnnnnnnntngnnggnngnnngnnnnnnnnnntcnntcnnncnnnnnnnnncngnnnnnnnnnnnntnnntnnnnnnnnnnnnnnnnnnnnnnnnnnnannnngncnnncnnncnncnnncgnnnnnnntnnnttgntnngncngnngnttnnnnnnnnnnnnnnnnnnntngtnngnnngannnnnnnnnnngncnncnnccnnncnnnnttnntnnnngnnnntannnnccgnncgnnnnanntngctgnntnnntngnngnnnnnnncnncnnnnnnatcnntnnnnnnnnnnnnnncngnnngnannnnnnnncgnncnncntcnnncntnncnanngnnngcnnnnnannannnnnnnnnnnnnannnnnnnnnnnnnnngnnngnncnnanngnnngnagnnnncngcncgnnnnntnnnnnncnnnnnnntnnnngccnnnnnnntnnnnnnncnnnccntnnnnnnngnngnnnnnnncngnnnntngnnnnnganngnnnngnnngnnnncgnnnngttnntntnnntngnnnntnnnnntnncnnnnngnnnnnnnnnngnnnngnnnnnnnnngncnngntnnnnnnnnnnnnnnnannangnnnnnnnntnngnngngnnnnntnnnnnngnngnnnnnnnngannanaanatagagtgaagacggggcggaaaaagttataacccccaatnggggtcggaaatatcaggaacgttgatcgtcagattcaatacgaaattcagggcgctgtcataatagggagtttccgcataatcgaaccgataatattcgatacgtgttacgttgagagcagtcgatgcattcatgagtnnctcntattcnntnggatttgttgggataagtccgttgaacataagacataccgtancaccgttttcgtcgatcagataaccatcttcgtaggttatgcccggaatatggctgtaaanatcntcgatcgtccgggcatcgggggcaatctgntngggaaggnannnttcnacgggntgtacggtagcgagatccttctggctgcggatgacagggaaatgaaagtagcgccgtccttctatgccgggcacataagctatctcgatttgccgggtctgcggctggatncccggacccgatatttcgagccggtaggtccggttggtngcaatggcgtcnaactcgtaataaccgttgacagatgtaagcgtcccgtattcgggntctccggtcgccggatcgtananccacaatgaagcgaaaggtattgcctccgtcggatcggtggcatagatgaatcccgcnatacgttgttcctgacccgtcgcatgtagcgaataaccgagcaaagcgaaaaataataaaacgaatcttttcatagncgttgantgtttcttaattaaaaataagcattttaccgggaatcagacaaataattttcggataaaatagttgcgaaatcgaagaatggtaattttatttgtgtgatattgaactttttctatatcttatttgaatatatatttacgatggacggagttgcggagcaataaaaatatcgaggtatgacgcgaaattgcattttgaccgttgttttgaacaaaatgcagactttgtaaaaatgaattaaaatngganaaagaaaaatgcctgattttttcggctgcagatttcgataggatagggtaaagacaaaggcngccgataatcgatngattatcggcnncctttccgtgatcccgctggggctcgaacccaggaccccaacattaaaagtgttgtgctctaccagctgagctacggaatcatccgcgccaatccggagttatccgttttggtggtgcaaatgtatagaaaatttttgttttgccaaaataaaacgatatttttgtacggaatattgattatcgtaaatcttaaaacaagataaattttatgtgtaaagctctgattatcggcgcaggaggcgtaggtaccgtcgtggcgcagaaaattgctgccaatccgattttttcggacgtgatgctggccagccgaacaaaagcgaagtgtgatgccattgctgcggcaatcggcggggaccgggtgaagacngcgcaggtcgatgccgacaatgtagccgatttgtgcgagttgtttcgggcnttcaagccngatatcgtggtgaangtggcgctgccgtaccaggatctgaccatnatggacgcctgcctggagtgcggggtgaactacctcgatacagccaattacgaacccaaggacgaggcgcatttcgagtattcgtggcagtgggcctatcaggagcgcttcaaggagaaggggctgacggccatcctgggctgcggcttcgatccgggagtgacagctattttcaccgcctatgccgccaaacaccatttcgacgagattcactacctcgatatcgtggattgcaacgccggtaatcacggcatggctttcgccacgaatttcaatccggaaatcaatatccgcgaagtgactcaaaaaggccgttactacgagaacggcaagtgggtggtgaccgaaccgcacgagatacacaagccgcttcattatcctgaaatcggcgagcgcgaatcttatgtgatctaccacgaggagctggagtcgctggtaaagaactatccgacgatcaagcgngcccgcttctggatgactttcggacaggagtacctgacccacctgcgcgtgattcagaatatcggcatggcccgtatcgatccgatcatttacaacggtgtggagatcgtgccgattcagttcctgaaggccgtgctgcccgatcccaagtcgctgggtgcgaactatcacggccagacttcgatcggctgccgcatccggggtatcaaggacggcaaggagcgtacgtattatatttacaacaactgcgatcacgagaaggcgttccaggagaccggtacgcaggccgtgagctttactacgggcgttccggcggcgctgggcgcttcgatgtgggccaaggggctttggcgcggtgcgggcgtgttcaacgtcgaggagttcgatcctgatccgttcctggccgaactgggaccgcagggattgccctgggtcgagaaattcgacgtcgatctggaagtctgatcgggtttcgataattggtttgaaagtccggatggtatgtaccgtccggacttttttatcggtctgtattggtgtgaaaagaggtaggtataaatacttatttattccaaatagccgggatttttgaatcccggttgggaggttttttctatttttgcgtgaatttgaaacagcatcggaaatccatgatcgattttcaaaaattaccttctccctgctttgtgctggatgagcagttgctcgancggaatttggcggtcatcgaccgcgttcgccgggagagcggtgccgaagtgatcgtcgctttgaaggcctgtgccatgtggagtattttcccggagcttgcgcaacattccgacggagccaccgcttcgtcgctggccgaggcgaggctggttttcgaggagttcggccgtccggcgcatacgtacgctccggtatataccgaccggaatatcgaagagattctcgattgcagcgatcacatcaccttcaattccgttgcgcagttcgaacggttcggacagatggccctgctgcgcggtatttcgtgcggcctgcggatcaaccccggctattcgccggta

SEQ ID NO: 1387 - DNA, 4000 bp, Escherichia coli
  misc_feature (162)..(162): n is a, c, g, or t
  misc_feature (224)..(224): n is a, c, g, or t
  misc_feature (1492)..(1492): n is a, c, g, or t
  misc_feature (2868)..(2868): n is a, c, g, or t
  misc_feature (3209)..(3209): n is a, c, g, or t
  misc_feature (3229)..(3229): n is a, c, g, or t
  misc_feature (3533)..(3533): n is a, c, g, or t
  misc_feature (3617)..(3617): n is a, c, g, or t
gtagcttcatccagaataatgaccggcgcatccttcaaaatcgcacgggcgatggaaattcgctggcgttcgccaccggaaagggtacagccgttttctccgattctgctttgatacccctccggcaagcgggagacaaattcctcacaccttgctgctttngcagcttttatcacttcctcatccgtggcgttttgccgaccaagccggatattttccattanggtattgtcaaacagggtaacatcttgaaaaacaatggagtagtttcgatacaacacctccggctctatggtcgttacatccacgccgccgagcagaacctttcccttatctgcatcccaaaagcgggctgccaatcgggatacggttgattttccactgccggaatgtcctacaagcgcagtaatttccccctgctttgctacaaaggaaacgcctttcaacacaggggtatccttataggaaaattccacattggaaaattcaatatcaaagccttgattattgcagacattcgcaccggtctgttccggagtagcctccatttcttttgtccggcggatactgaccagtgcggagaacatttcagccatcagcatgaagcaggagccaaacggctcataaatcctgcctgctatcagcagataaagcaggaacatattaacagagaggcttccctgtgtcattaaaaccccgcctacaagcaacaccgtcaccaggccgaagcgaaggacaaactgtgcaagcgtaactactgtaccgggaacaagctcattgcgaaatgcacacgcaattacattgtccagtttttttcttactccggctaaatattcctgctccgttccagaagaacgaagttcagaaactacatcaagatactcctgcacaccgtcataagcggcacgataggcatcgtaattcttttcctccgcattctgctgcatccttcttccggcaaatacaatcacaccggcaacaggaacgggaaggacaatgcaaagtcccatacgccaatcgacacagagcaggcaggcggaaaccacaaggaacatcacgattgttccaaacagccccggaactgcatttgagaatatccgttccagttttgagcagtcacccatcatcgtggacgtcaggtcggaaaggtcacgctgcccaaagaaagagagcggaagccgccgcagcttttctgccagagtaattcgccggtttgcgctttcccgataggcaaccgtataggtaagatggtactgcacccattgtgttaaaaagataattccacaaagccctattgccatcagcaaaatgacatctgaccggagggtaaaaccttcgccgccacatattttatctaaaagcgccatcgttaccatcattaaaagcgaaacgggagccataatcgctaaattggaaatcgctgtggcagcgataccccttttcagttcacgcactccgtcatcgctcaatccgagtaaattcttcagcatgntgcagcctcctgttcctgcccgcttttcagggcatcatggtgcacccctgcggtgtttcctgcgttatccatctgccagcgaattgacttctgatattctgtccacatacgggcatattcgccctgtcttgcagctaattcctcatgtctgccgtactccgctatctgtccgcccttcatcacgatgatttggtctgcatcggtaatggtagagagacggtgcgcaatcataattaccgttttgttttttgtcagttctttcaatgcctgttgaatctgtgcttcattttccgggtctgcaaaagcggtggcctcgtccaaaacgatgataggggcatccttcaatattgctctcgcaatagcgagccgctgtatttcgccaccggaaagatatacaccttttcctccaatcatcgtatggattccatcggggagtttttcgagaatatcatcacatccagctaaatgcagagcgttcaaaatatcctctgcggctgcgttctttttcccgccccggacattttcttcaatgcttgctttcagcagctttggattttgaaatacaaaggcaactctttccatcaacgccttcctgttcatggaagaaagtgctacgcctccgatggaaatgcacccctcctgaatatcataaaaccgtggaattaaagagcctatggtacttttgcctgagccggaatgtcccaccaaagcagtcacggttccgcctttcgcaaggaagctgacatcggaaatggcagggccctcgcctgtaggataagtaaaggtcacatggtcgaatcttacatcattaccctgcggcagtttgaactctcttggctctgcctgctcccttgtcagcaggatttcatcaatgcgccgcatggattccacagcctgcatcttgtagttggtcatatacatcaatttgttcagcatagctgcacaggcaggtgcaaaaatcaaatagaataaaaagttttgtgcaaatgtttccaaatctgccgcggctgccataccaatcaaggctgccgggatcaaggcaagaaacgaggagtttaccacagtattaaacgccacataccccggcttgcaggccatcgtataggctaaggcgtcatcccggtaggcatggatggcttctttgaaacggcgcagcgaatgaacggactgaccaaagattttaatgacggaaattcctctgacgtactccaccgcttcatggctcatgtcctcttgcgcatcctgatagcgtttcataaaattcatggtttcttcacccatcatagacatttgaaacgcaaaaccgatcatcataagcaccagcacaggaagtccaatccgccagtcaaccgcaagcatgagaagcgccgcagcanccatagacacctgtgcccctacgaggtcaggaagctgatgtgccagatagctttctgtctgtttactgttttcatctatgattttccgcagttttccgctgctgttttcttcaaaatatcccagaggcagccttgacagatgttccaatactgccattttcaaattctgttccgtatgaaaagcagctttgtgagacaaaagcagggcaataaaattgacaatcaagcctgccagttcaaacccaagcgcccaaagcccccaatacgccaacgcagacgcatctatgctgccgccaagcaggaaatccaaaagctcccttgcggcaaaataaacacaaagnaacggcgctaacagcaatantgcactcgctccggcaagaagctgggagagaaagagcatgggaccaaatggagccgtaaattccaacaatcttggaataccggttttttgcggttttcttatctgtgcatcttctctaaatactttccacatatagatgttccccctttcatctaatggcaggagcttttttacttctcctgcatgaatatgtaaaatatgtgtggcacagcgggcaatcagctccgggtcatgggatacgataagagagcatacggcattctcgttcgcttttcgtatgatttctacggtgcgaagcagattntccccatcctgtccgctggttggctcatcatacagcatgaccggacgtcggttacagatcgctgttgcaagagaaagccgctgntgctgtccgccggaaagagaaccggggtgtctgttttccaatcccgccaaccctaactcacggagtaccgcctgtgcctgttcctctgttaaagaaggattgtttagcgtaagctcacccattacactgtcgctaaaaagctggtgtcctgcctcctgcatgacaaggaaagctgtttccggcagtcttttgttcggaactgtttttccttctatcataatcgttccgttatgcctgagaagccccgcaaggcataaactcagcgtggacttacctgcaccgttctcgccaatgaccgcaacaatcgctccttttggaattgccaggtggcgaatatccaatacctggcgctgcccacggttaaaggtcagaccgtggatttc

SEQ ID NO: 1388 - DNA, 4000 bp, Escherichia coli
  misc_feature (422)..(422): n is a, c, g, or t
  misc_feature (1933)..(1933): n is a, c, g, or t
  misc_feature (2079)..(2079): n is a, c, g, or t
  misc_feature (2687)..(2687): n is a, c, g, or t
ttgaatggcattaaagtctcaaccaaattaaaaattcgatcgatggatccacctcgcgtcggtggaattatttcaaaactgaaaagagttttgttcgctttttctaaaaattctataactttcatagcctttaatttaccttgtcttttaactgaattaaaaatgggttttcttttaattcaaattttaatgttgtatccgagccatgtcctgaatgaactattctatcatgattaaccgaattgaatagatgaacaagtgatgattctaatgtgccccaatcaccgcctggtaaatctgtccttcccacacttccccggaataaagtatcgccaacaaataaatggttgtcaatctcaaggcatgttcctcccggtgtatgccccggcgtttgaattaactgaattttaaatgtattgatnttcagaaatggcgcattattaaaccatacatcaactttgggtgtttctcgcgggccgattccaaacattttacatgcatcttcatatgcatttaaaataagttgttccttcgagtggagataaaatggaatatcatatttgtcctttaaaggctggacagctccaatatgatctaagtgggcatgtgtatttacaattgcaatggggataatttggtgttcttcaagagattggattatcagatgcgcatcatcaccagggtctacaataaccgcatctgttgattcggcataccatgcaataaaactgttttcctgaaacgggcctgtaactaccgtttcaacatttaagttcaaatttcctcgaagaataattcattaagacactgagtcttgtcttcataagaatgaggatataaaaatcgttctgctgctgaaatactacttaaaattgaatttccatcctgaggtgtaaaacaaaacccataaatctcatgttcatttcgaacatgaagcgtttgttcaacgacaacagtttggtttaatattcggccaaaatgaccatgatcacgaccaaaggaataaacggtactggtcaaatccttcgtggtcattgctacatgatgattggcgatcaaccgatctttcacttcattcagggttgtgggttcttttgttctcaaagtgaaccagagtacatgcatatattggctattcaccttcatggccgaagaaaacatatttaaatcatatcctaaggttgtaaaaagttcatatgcatccttggcatggtgggatccaaacttttcatccccatggctacctacaacaggtgcgggtataaaactacctgactgacttgtatcgtttgcccggcgaacacatacataccgcccttcgacgagattctccggtccgaattcatttaatgccaacgtatttgtaatacatgaaatattatgcgtattgcaggaaacgatttggacaaattgattatcaccattttttaatactgaatcgttgatcccacttgcatattttacaccaaaaccatcttcactaccttgggccaaaaatccttttaccttatctgaaaatttatggtaatacttttccttatttttatgaccaataccagatggtgtgcaatcaatgacaacagaggctcgacgaatagcatcttctgtttccaattctggatccatacctaattctttaaactcattcaatcggtcgtcacttacagccaaccgggcaccgcgttttaataaggaaattacctttgatcggtcaccgcgcaggggggtatttttattgaatgttacctcatcaattccaagtttttctcgataatcacataataaaccaatgagaggttcaccaatggttcctgttcccacaacgtggacaattttgcgttccatttaaactaactccttaattcgatttttcatttttatttaacattcgcttttctgaacgaaattgaattataaaccacccaaggattgnaccaaaaacgatcaaataaactgccaaaaaatattcaaagaaattatacattactacccacattgtttttgatacgaatcacatgaattttatacgtaagcatgagtgtataaagcagagtaaaaatacccaacgataataaaaanggtgtcaatatccctgatggttgttgagccatttctacttggggatgtgactggatttccggcgtccaaaacttaacagatacgaagataataggtacatctacaaatgcaattattcccaaagcggctgcatatcgctttacccgttcaacatggcctccaaaagatcgcatcatgaaataccctatatatataagaaacaaaataagtgttgtggtcaatctgggctcccagatccagggtttcccccaaataggtgtggcccatatcggccccgtaattaacaccaacgccataaatactgtacccaattctgcggctgcaagtcccacatcatcccaatggtcgtccttttttataaaaaacataattcctgccaccatgacaacaaaataggataaaaatccaacccaggctgatggtacatgtacataaaatattttttgtgcccagtgctgttccggaaccatgggtgtgttcacaataacgttccatacattaaaaagcatcatagcaatgattagcacaaaccaagttcgattcgtcttattatttaaaaatattttcattattcttcagcaataaaatcaaataaggtgtatccaacnagcccgaaaattacaataactgtgagtacgattaataaccatatttgccaaaacgaaaatggatccccagccattatactgccggatatttttgtagctgcaatgattacaggcgaaaccaatggaaacaacaatactggcaataaaacttcacttaatctcgctcgcattgcaataccggaaaccaaacttgcaatggccattatcgcacaattaattaacatggttgtaccaatagctatccacggttgagatggaaaatcaatcatcaaaaatttaaagaatggtatgattattaatgcttccatgattgtcaaaaatataaatccacttatccatttagacagaaaaataaatcctctatcaatgggtgcactgattaacatagaaaatgcatcaaattctttttcataagaaaaagaacgatgcacgccaatgaccgcgacaaataataccattatccaaaacataccaggcgcataatttgcgatgatcgtgggagaaacattggatgagaatgcaaatgtaagtataatagataagccaaaaacgagcatagatagcgtgacttctctcgatcgaaattcgacaaataattcttttttcagtaatatgaaaaacataattattattcaattgatccattttgaatgtaaaggattcgatcaccaaattctttagctcgagactgattatgtaaaacaagaattaaagattttcctatttctttccaacgatgtaatgctgtctcaaccaacccgacaccatctgtgtccaatccggaaaatggttcatctattaataataaattccaattaaccaattcagcataagctaattttaaacgctggagcatgccctgagaatatattgatattggatcattggactgggttccgatcccaaaataatttaactgattttgaatttcagataaaccaacagtcatccctctaagtgttaatgccaattttatattttctttggcggaaagggtggtgtacatcgctggtgcatgtccaaggtataacaatttatgacgatcgcatggactcccttttaataaatctttattttggaaagagatctgtccaccatcacaggccataattcgtgccaatattcgcaatagtgttgatttcccaacaccatttttccccattagaacaatagtttcaccctggtggagagtgaatgatatatcttttagtattggacgacgatcaaaggattttgatatatttgaaacagtcaggactgcgggcattttaaagcgaattcaattttgtaatgatttcagaaacgtcctgttt

SEQ ID NO: 1389 - DNA, 4000 bp, Escherichia coli
  misc_feature (1985)..(1986): n is a, c, g, or t
  misc_feature (3532)..(3532): n is a, c, g, or t
  misc_feature (3879)..(3879): n is a, c, g, or t
  misc_feature (3996)..(3996): n is a, c, g, or t
agagatgattcaccatatttttacaaaaataccaattcaaactaagttcaaaaaaaagaaacaacatatgaaaaaatagtcccaatcatacaatccaaaaataataaaatcaggtgtaaaaaaactacttagaaagatgaataataaacaagtcaaagactaataaggtaatgtaccgtactatacagtataatgaaagcaagactaacatacgttccactagaagtggcagatcaatttgaagactttatcatagaaagagaagagcaagttttagatgcagtaaaagcaagaaccagagatttcagcacgttatctttgttaaaattattatatcaactcaaaggaaatccaatgacattttcatgtctatattcaaaatcaaaaattagaatgaaaagatcatttttgaattacctgcatctatgtgtaaattataattttattgaaaaagaaccagtaggcccaaatgtaatttatacaattacagacaaaggaagattgatgttaaatctattcatgcaaaaaggtaattagatagaatacatcgaggcaaactgtgaaaaaagaatttccagaagctgaagtgttttcaatcaaagaaataaaattaaacaatccaatagtttttgcaggatttgttggtgcaggtttagtaggtccactggcaatcaatcatatgattacagaattaaaaatgacagagatagcagtaatgagatcaaagtatcttccaccatcaacggttttcatgagaggaagattacgtcatccttttagattttacacaaacccagaaggaacaatttgtgcaataatttgtgaaataacattacgaatgaaaggattgtattcattagtagactcaattttagattgggcagaagataacggatctaaagaaattgtaattttagatggagttgcaagtactgaacatgacgataaagcatattgtgcagcagaagaagacttggttagaataatggcagataaagacatcagtttaattcctcaaggatttatcacaggaattccaggggggatattaaatgaatgtctagtaagaccaattcagggattaacattattggtaaaagcagacaaaacaaagccagattcagtagcaacaataaccctaattgaagcattaaacaggttttacgaaatggaaattgatacatcagagttagaaaaggaaaaagatagaattcattcagaatttagtgaattatctcaaaaatatgtaaaacatagagaagagatatctggaatgtacatgtgatcgaagcaataggcaaattcttttattcagaataaatgcgcaacaaattatggctttaacatacaaaaaagcaggagtagatatttcaaaaattaaacaaagccaaaaagcaattgggaaattaattgcatcaacccataaacttcaaaaaaaggcaaagatagctcacggatttgggcattatgcaggaattgtagaaattccaggtgggaaaatgttagcaacacacacagatggtgtaggaactaaagtagtaattgcaaacatgatgaaaaaatacaacaccattggaattgattgtattgcaatgaatgtaaatgacataatttgtattggtgcaacaccaatatcatttgtagattatattgcagcaaacaaaaatgacgtaccaatatttaaaaaaattgtagaaggattagttacaggtgcaaaaaaatctgcaatgccaattgtaggtggagaaactgcaatcatgccagatgtaatagaaggtaaaggatttgcatttgatttagcaggaatggtagtaggattagtagagaaaaaagaaatagttttaggaaataaaattaaaacaggagatgtaattattggtgtgaatagttcaggaattcattcaaacggatattcacttgcaagaaaagctttgttaacaaaatattcaattaaagacaaagtcaaaggagttggaaagataggnnatgcattactaacgcctacagaaatttatacaaatccagtacttgaggttaaccaaaaatgtaaagtgaatggtttagcccacataactggaggctcatttacaaaattattacgtctcaaaaacataggttatgagatagattcacttccaaaaataccaccaattatgggattaatacaagagcaaggagtaaaagcagaagaaatgtacaaaactttcaacatgggagtaggattttgtgtagttgcaccaaaatcacaggcaacaaaaataatatcaattttcaaaaaacacaagatcaaaagtcaacaaataggacagatagtttcaaaaaaaggagttacagtaaactctgtaaaaattgcttagattagtaatagcaaaataattctcaactcaatatcatcttatattacagaattttatgactttatcagagagtaatgagtgaagcacattttattgaaacaattatcggagtaggaatacttctttttgcagctaaattaatggcagaacttttccttagattaaaacttccaattgtgttaggtgaattaattgcaggaatgattgtagggccatttgcattaggaggattacaaatagttgatggaaaacaattgttgcaaattaatgatgaaatcagaatactaggagagatgggagcaattgtaattttattcatggcaggacttgaaatgacaccaaaagaatttctcaaaggagggaaagcagcatttgtagttggtacgttaggagtagtcatcccgttctttgtaggactcacagttttccaattatttggatttgatgcattacaatcaatgctcattgcaacggcactgacagcaacaagtattgcaatttcaattcaagttctaagtgaatttgggaaaattaaaactccagaagcaagactgatcataggtgcagcgattgtagatgacatactagcaattgcagttttatcagtagtaacatccattgcaggatcagatggaggagtagataacatagacattacagaaatcacaattacaattttgaaagtattagggttctttgcaataatgttagtagttgcagttgtagtaataccaaaaataatcacaccaagattatggaaagcaaaaggaagtgtagaaggaatagctactgcggcgttctttggtgcagcagcccttgcaggctccatagggttatcaccaatcgtaggagcatttgcagtcggaatggcattatcaacaactaaggtatttgataaaatagaaagttatattggaaaaattggattaatttttgcaccgctattttttgcaataattggtgcacaagtagacctaagggcagttgatttgaatattttgatattaagtggagtaatcgttgtagttgcagttgcaacaaaattatttggatgtggtcttcctgcaatgtattttttgaaaagcaagcaaaaaggaatgcgtgtaggaattggaatgatttcaagaggagaagtaggattaattgtagcaggagttggagtaacagctggagtncttacatctgaagtatactctacaatcataattatggtagtagtaacaactatcatcactccaatttggttaaaaattgaatatagaaaagagcaaaaaagtggcggcggaacatcagaaataaaatctgaacaaaaatcagaataaattttaacagtgtcagatgaataatgattatgaataagttagatcctgcattatctaaagcatgtagggagatcactcaaaatcttctaacaataaatcaaccaagtaaaaaacaagttaaagaagaaataataaaaatttgtacaaaatatgcactagaaagaattcccaaaaattatgaaattctatcaatggtaagngattcagattttgataaattaaaaaaagtattgataagaaaaccagctaaaacagcatcaggtgtatcagtagtagcattaatgccaaaaccatatgcatgtccacatgggagatgnacat

SEQ ID NO: 1390 - DNA, 4000 bp, Escherichia coli
  misc_feature (1)..(1): n is a, c, g, or t
  misc_feature (4)..(6): n is a, c, g, or t
  misc_feature (9)..(15): n is a, c, g, or t
  misc_feature (17)..(17): n is a, c, g, or t
  misc_feature (19)..(33): n is a, c, g, or t
  misc_feature (35)..(35): n is a, c, g, or t
  misc_feature (37)..(37): n is a, c, g, or t
  misc_feature (39)..(46): n is a, c, g, or t
  misc_feature (48)..(51): n is a, c, g, or t
  misc_feature (53)..(53): n is a, c, g, or t
  misc_feature (56)..(56): n is a, c, g, or t
  misc_feature (58)..(58): n is a, c, g, or t
  misc_feature (60)..(60): n is a, c, g, or t
  misc_feature (63)..(67): n is a, c, g, or t
  misc_feature (69)..(71): n is a, c, g, or t
  misc_feature (73)..(75): n is a, c, g, or t
  misc_feature (79)..(81): n is a, c, g, or t
  misc_feature (83)..(83): n is a, c, g, or t
  misc_feature (85)..(86): n is a, c, g, or t
  misc_feature (88)..(88): n is a, c, g, or t
  misc_feature (91)..(92): n is a, c, g, or t
  misc_feature (97)..(103): n is a, c, g, or t
  misc_feature (105)..(105): n is a, c, g, or t
  misc_feature (107)..(107): n is a, c, g, or t
  misc_feature (109)..(109): n is a, c, g, or t
  misc_feature (115)..(117): n is a, c, g, or t
  misc_feature (121)..(121): n is a, c, g, or t
  misc_feature (123)..(128): n is a, c, g, or t
  misc_feature (130)..(131): n is a, c, g, or t
  misc_feature (133)..(135): n is a, c, g, or t
  misc_feature (137)..(139): n is a, c, g, or t
  misc_feature (141)..(142): n is a, c, g, or t
  misc_feature (144)..(147): n is a, c, g, or t
  misc_feature (149)..(150): n is a, c, g, or t
  misc_feature (152)..(154): n is a, c, g, or t
  misc_feature (156)..(162): n is a, c, g, or t
  misc_feature (164)..(164): n is a, c, g, or t
  misc_feature (166)..(166): n is a, c, g, or t
  misc_feature (168)..(169): n is a, c, g, or t
  misc_feature (171)..(171): n is a, c, g, or t
  misc_feature (173)..(174): n is a, c, g, or t
  misc_feature (176)..(176): n is a, c, g, or t
  misc_feature (178)..(178): n is a, c, g, or t
  misc_feature (180)..(181): n is a, c, g, or t
  misc_feature (187)..(188): n is a, c, g, or t
  misc_feature (190)..(193): n is a, c, g, or t
  misc_feature (196)..(197): n is a, c, g, or t
  misc_feature (199)..(199): n is a, c, g, or t
  misc_feature (201)..(201): n is a, c, g, or t
  misc_feature (203)..(203): n is a, c, g, or t
  misc_feature (205)..(205): n is a, c, g, or t
  misc_feature (207)..(207): n is a, c, g, or t
  misc_feature (209)..(212): n is a, c, g, or t
  misc_feature (214)..(216): n is a, c, g, or t
  misc_feature (218)..(221): n is a, c, g, or t
  misc_feature (223)..(227): n is a, c, g, or t
  misc_feature (229)..(233): n is a, c, g, or t
  misc_feature (236)..(236): n is a, c, g, or t
  misc_feature (240)..(241): n is a, c, g, or t
  misc_feature (243)..(243): n is a, c, g, or t
  misc_feature (245)..(247): n is a, c, g, or t
  misc_feature (249)..(249): n is a, c, g, or t
  misc_feature (251)..(252): n is a, c, g, or t
  misc_feature (254)..(254): n is a, c, g, or t
  misc_feature (262)..(262): n is a, c, g, or t
  misc_feature (265)..(271): n is a, c, g, or t
  misc_feature (273)..(274): n is a, c, g, or t
  misc_feature (276)..(276): n is a, c, g, or t
  misc_feature (278)..(282): n is a, c, g, or t
  misc_feature (285)..(286): n is a, c, g, or t
  misc_feature (288)..(292): n is a, c, g, or t
  misc_feature (294)..(295): n is a, c, g, or t
  misc_feature (297)..(299): n is a, c, g, or t
  misc_feature (301)..(302): n is a, c, g, or t
  misc_feature (304)..(304): n is a, c, g, or t
  misc_feature (306)..(308): n is a, c, g, or t
  misc_feature (313)..(313): n is a, c, g, or t
  misc_feature (316)..(317): n is a, c, g, or t
  misc_feature (319)..(321): n is a, c, g, or t
  misc_feature (323)..(324): n is a, c, g, or t
  misc_feature (327)..(328): n is a, c, g, or t
  misc_feature (333)..(334): n is a, c, g, or t
  misc_feature (336)..(336): n is a, c, g, or t
  misc_feature (338)..(338): n is a, c, g, or t
  misc_feature (340)..(340): n is a, c, g, or t
  misc_feature (342)..(343): n is a, c, g, or t
  misc_feature (345)..(345): n is a, c, g, or t
  misc_feature (347)..(348): n is a, c, g, or t
  misc_feature (350)..(350): n is a, c, g, or t
  misc_feature (355)..(357): n is a, c, g, or t
  misc_feature (359)..(363): n is a, c, g, or t
  misc_feature (365)..(370): n is a, c, g, or t
  misc_feature (372)..(373): n is a, c, g, or t
  misc_feature (375)..(375): n is a, c, g, or t
  misc_feature (377)..(378): n is a, c, g, or t
  misc_feature (380)..(384): n is a, c, g, or t
  misc_feature (386)..(389): n is a, c, g, or t
  misc_feature (391)..(393): n is a, c, g, or t
  misc_feature (395)..(395): n is a, c, g, or t
  misc_feature (397)..(397): n is a, c, g, or t
  misc_feature (399)..(404): n is a, c, g, or t
  misc_feature (407)..(408): n is a, c, g, or t
  misc_feature (410)..(411): n is a, c, g, or t
  misc_feature (415)..(415): n is a, c, g, or t
  misc_feature (417)..(419): n is a, c, g, or t
  misc_feature (421)..(423): n is a, c, g, or t
  misc_feature (425)..(426): n is a, c, g, or t
  misc_feature (429)..(430): n is a, c, g, or t
  misc_feature (432)..(434): n is a, c, g, or t
  misc_feature (437)..(438): n is a, c, g, or t
  misc_feature (442)..(443): n is a, c, g, or t
  misc_feature (445)..(446): n is a, c, g, or t
  misc_feature (448)..(450): n is a, c, g, or t
  misc_feature (452)..(455): n is a, c, g, or t
  misc_feature (457)..(461): n is a, c, g, or t
  misc_feature (463)..(464): n is a, c, g, or t
  misc_feature (467)..(468): n is a, c, g, or t
  misc_feature (470)..(474): n is a, c, g, or t
  misc_feature (477)..(478): n is a, c, g, or t
  misc_feature (483)..(483): n is a, c, g, or t
  misc_feature (490)..(491): n is a, c, g, or t
  misc_feature (493)..(494): n is a, c, g, or t
  misc_feature (496)..(497): n is a, c, g, or t
  misc_feature (500)..(501): n is a, c, g, or t
  misc_feature (504)..(504): n is a, c, g, or t
  misc_feature (506)..(507): n is a, c, g, or t
  misc_feature (509)..(511): n is a, c, g, or t
  misc_feature (514)..(515): n is a, c, g, or t
  misc_feature (517)..(518): n is a, c, g, or t
  misc_feature (520)..(521): n is a, c, g, or t
  misc_feature (523)..(524): n is a, c, g, or t
  misc_feature (526)..(526): n is a, c, g, or t
  misc_feature (529)..(530): n is a, c, g, or t
  misc_feature (532)..(533): n is a, c, g, or t
  misc_feature (535)..(535): n is a, c, g, or t
  misc_feature (540)..(541): n is a, c, g, or t
  misc_feature (543)..(544): n is a, c, g, or t
  misc_feature (546)..(550): n is a, c, g, or t
  misc_feature (553)..(556): n is a, c, g, or t
  misc_feature (558)..(562): n is a, c, g, or t
  misc_feature (564)..(569): n is a, c, g, or t
  misc_feature (571)..(574): n is a, c, g, or t
  misc_feature (576)..(576): n is a, c, g, or t
  misc_feature (579)..(580): n is a, c, g, or t
  misc_feature (583)..(584): n is a, c, g, or t
  misc_feature (586)..(586): n is a, c, g, or t
  misc_feature (588)..(589): n is a, c, g, or t
  misc_feature (591)..(594): n is a, c, g, or t
  misc_feature (596)..(600): n is a, c, g, or t
  misc_feature (602)..(603): n is a, c, g, or t
  misc_feature (605)..(606): n is a, c, g, or t
  misc_feature (608)..(609): n is a, c, g, or t
  misc_feature (611)..(611): n is a, c, g, or t
  misc_feature (613)..(613): n is a, c, g, or t
  misc_feature (615)..(621): n is a, c, g, or t
  misc_feature (623)..(624): n is a, c, g, or t
  misc_feature (629)..(630): n is a, c, g, or t
  misc_feature (632)..(634): n is a, c, g, or t
  misc_feature (636)..(636): n is a, c, g, or t
  misc_feature (640)..(643): n is a, c, g, or t
  misc_feature (645)..(646): n is a, c, g, or t
  misc_feature (648)..(651): n is a, c, g, or t
  misc_feature (655)..(656): n is a, c, g, or t
  misc_feature (658)..(658): n is a, c, g, or t
  misc_feature (660)..(661): n is a, c, g, or t
  misc_feature (663)..(663): n is a, c, g, or t
  misc_feature (665)..(666): n is a, c, g, or t
  misc_feature (668)..(668): n is a, c, g, or t
  misc_feature (670)..(672): n is a, c, g, or t
  misc_feature (674)..(674): n is a, c, g, or t
  misc_feature (676)..(680): n is a, c, g, or t
  misc_feature (682)..(682): n is a, c, g, or t
  misc_feature (684)..(686): n is a, c, g, or t
  misc_feature (688)..(689): n is a, c, g, or t
  misc_feature (691)..(693): n is a, c, g, or t
  misc_feature (698)..(699): n is a, c, g, or t
  misc_feature (701)..(702): n is a, c, g, or t
  misc_feature (704)..(704): n is a, c, g, or t
  misc_feature (706)..(706): n is a, c, g, or t
  misc_feature (708)..(709): n is a, c, g, or t
  misc_feature (716)..(717): n is a, c, g, or t
  misc_feature (720)..(720): n is a, c, g, or t
  misc_feature (723)..(726): n is a, c, g, or t
  misc_feature (728)..(730): n is a, c, g, or t
  misc_feature (735)..(737): n is a, c, g, or t
  misc_feature (739)..(743): n is a, c, g, or t
  misc_feature (745)..(745): n is a, c, g, or t
  misc_feature (747)..(747): n is a, c, g, or t
  misc_feature (750)..(751): n is a, c, g, or t
  misc_feature (753)..(755): n is a, c, g, or t
  misc_feature (757)..(758): n is a, c, g, or t
  misc_feature (760)..(761): n is a, c, g, or t
  misc_feature (763)..(763): n is a, c, g, or t
  misc_feature (765)..(765): n is a, c, g, or t
  misc_feature (767)..(767): n is a, c, g, or t
  misc_feature (769)..(771): n is a, c, g, or t
  misc_feature (773)..(773): n is a, c, g, or t
  misc_feature (775)..(775): n is a, c, g, or t
  misc_feature (780)..(783): n is a, c, g, or t
  misc_feature (785)..(786): n is a, c, g, or t
  misc_feature (788)..(789): n is a, c, g, or t
  misc_feature (791)..(791): n is a, c, g, or t
  misc_feature (793)..(793): n is a, c, g, or t
  misc_feature (795)..(797): n is a, c, g, or t
  misc_feature (799)..(799): n is a, c, g, or t
  misc_feature (801)..(801): n is a, c, g, or t
  misc_feature (803)..(803): n is a, c, g, or t
  misc_feature (809)..(810): n is a, c, g, or t
  misc_feature (812)..(812): n is a, c, g, or t
  misc_feature (815)..(816): n is a, c, g, or t
  misc_feature (818)..(818): n is a, c, g, or t
  misc_feature (820)..(821): n is a, c, g, or t
  misc_feature (823)..(824): n is a, c, g, or t
  misc_feature (828)..(829): n is a, c, g, or t
  misc_feature (834)..(837): n is a, c, g, or t
  misc_feature (839)..(839): n is a, c, g, or t
  misc_feature (844)..(845): n is a, c, g, or t
  misc_feature (847)..(848): n is a, c, g, or t
  misc_feature (850)..(851): n is a, c, g, or t
  misc_feature (853)..(854): n is a, c, g, or t
  misc_feature (857)..(858): n is a, c, g, or t
  misc_feature (860)..(860): n is a, c, g, or t
  misc_feature (862)..(863): n is a, c, g, or t
  misc_feature (865)..(866): n is a, c, g, or t
  misc_feature (869)..(870): n is a, c, g, or t
  misc_feature (873)..(876): n is a, c, g, or t
  misc_feature (878)..(879): n is a, c, g, or t
  misc_feature (883)..(884): n is a, c, g, or t
  misc_feature (886)..(888): n is a, c, g, or t
  misc_feature (890)..(890): n is a, c, g, or t
  misc_feature (892)..(892): n is a, c, g, or t
  misc_feature (894)..(894): n is a, c, g, or t
  misc_feature (897)..(898): n is a, c, g, or t
  misc_feature (900)..(900): n is a, c, g, or t
  misc_feature (902)..(902): n is a, c, g, or t
  misc_feature (904)..(905): n is a, c, g, or t
  misc_feature (908)..(911): n is a, c, g, or t
  misc_feature (913)..(913): n is a, c, g, or t
  misc_feature (917)..(917): n is a, c, g, or t
  misc_feature (919)..(920): n is a, c, g, or t
  misc_feature (922)..(923): n is a, c, g, or t
  misc_feature (925)..(925): n is a, c, g, or t
  misc_feature (929)..(930): n is a, c, g, or t
  misc_feature (932)..(932): n is a, c, g, or t
  misc_feature (934)..(935): n is a, c, g, or t
  misc_feature (937)..(940): n is a, c, g, or t
  misc_feature (943)..(945): n is a, c, g, or t
  misc_feature (947)..(947): n is a, c, g, or t
  misc_feature (949)..(951): n is a, c, g, or t
  misc_feature (953)..(953): n is a, c, g, or t
  misc_feature (955)..(958): n is a, c, g, or t
  misc_feature (960)..(960): n is a, c, g, or t
  misc_feature (963)..(967): n is a, c, g, or t
  misc_feature (969)..(970): n is a, c, g, or t
  misc_feature (972)..(983): n is a, c, g, or t
  misc_feature (985)..(985): n is a, c, g, or t
  misc_feature (987)..(987): n is a, c, g, or t
  misc_feature (989)..(990): n is a, c, g, or t
  misc_feature (992)..(993): n is a, c, g, or t
  misc_feature (996)..(1001): n is a, c, g, or t
  misc_feature (1003)..(1003): n is a, c, g, or t
  misc_feature (1005)..(1005): n is a, c, g, or t
  misc_feature (1007)..(1007): n is a, c, g, or t
  misc_feature (1009)..(1012): n is a, c, g, or t
  misc_feature (1014)..(1015): n is a, c, g, or t
  misc_feature (1017)..(1017): n is a, c, g, or t
  misc_feature (1020)..(1022): n is a, c, g, or t
  misc_feature (1024)..(1024): n is a, c, g, or t
  misc_feature (1027)..(1033): n is a, c, g, or t
  misc_feature (1037)..(1038): n is a, c, g, or t
  misc_feature (1040)..(1041): n is a, c, g, or t
  misc_feature (1043)..(1045): n is a, c, g, or t
  misc_feature (1047)..(1048): n is a, c, g, or t
  misc_feature (1050)..(1054): n is a, c, g, or t
  misc_feature (1056)..(1056): n is a, c, g, or t
  misc_feature (1060)..(1062): n is a, c, g, or t
  misc_feature (1066)..(1068): n is a, c, g, or t
  misc_feature (1070)..(1070): n is a, c, g, or t
  misc_feature (1073)..(1075): n is a, c, g, or t
  misc_feature (1079)..(1079): n is a, c, g, or t
  misc_feature (1081)..(1082): n is a, c, g, or t
  misc_feature (1084)..(1085): n is a, c, g, or t
  misc_feature (1087)..(1089): n is a, c, g, or t
  misc_feature (1091)..(1092): n is a, c, g, or t
  misc_feature (1094)..(1094): n is a, c, g, or t
  misc_feature (1099)..(1101): n is a, c, g, or t
  misc_feature (1103)..(1105): n is a, c, g, or t
  misc_feature (1107)..(1107): n is a, c, g, or t
  misc_feature (1113)..(1113): n is a, c, g, or t
  misc_feature (1118)..(1121): n is a, c, g, or t
  misc_feature (1123)..(1126): n is a, c, g, or t
  misc_feature (1128)..(1128): n is a, c, g, or t
  misc_feature (1130)..(1130): n is a, c, g, or t
  misc_feature (1132)..(1132): n is a, c, g, or t
  misc_feature (1137)..(1137): n is a, c, g, or t
  misc_feature (1139)..(1139): n is a, c, g, or t
  misc_feature (1144)..(1146): n is a, c, g, or t
  misc_feature (1149)..(1150): n is a, c, g, or t
  misc_feature (1152)..(1152): n is a, c, g, or t
  misc_feature (1154)..(1155): n is a, c, g, or t
  misc_feature (1157)..(1158): n is a, c, g, or t
  misc_feature (1161)..(1165): n is a, c, g, or t
  misc_feature (1167)..(1167): n is a, c, g, or t
  misc_feature (1171)..(1172): n is a, c, g, or t
  misc_feature (1174)..(1175): n is a, c, g, or t
  misc_feature (1177)..(1181): n is a, c, g, or t
  misc_feature (1183)..(1183): n is a, c, g, or t
  misc_feature (1186)..(1188): n is a, c, g, or t
  misc_feature (1190)..(1194): n is a, c, g, or t
  misc_feature (1196)..(1196): n is a, c, g, or t
  misc_feature (1198)..(1202): n is a, c, g, or t
  misc_feature (1204)..(1204): n is a, c, g, or t
  misc_feature (1206)..(1207): n is a, c, g, or t
  misc_feature (1209)..(1209): n is a, c, g, or t
  misc_feature (1217)..(1217): n is a, c, g, or t
  misc_feature (1219)..(1219): n is a, c, g, or t
  misc_feature (1221)..(1222): n is a, c, g, or t
  misc_feature (1228)..(1228): n is a, c, g, or t
  misc_feature (1232)..(1233): n is a, c, g, or t
  misc_feature (1235)..(1235): n is a, c, g, or t
  misc_feature (1237)..(1237): n is a, c, g, or t
  misc_feature (1241)..(1241): n is a, c, g, or t
  misc_feature (1243)..(1244): n is a, c, g, or t
  misc_feature (1246)..(1246): n is a, c, g, or t
  misc_feature (1248)..(1248): n is a, c, g, or t
  misc_feature (1250)..(1250): n is a, c, g, or t
  misc_feature (1253)..(1254): n is a, c, g, or t
  misc_feature (1256)..(1256): n is a, c, g, or t
  misc_feature (1260)..(1262): n is a, c, g, or t
  misc_feature (1266)..(1266): n is a, c, g, or t
  misc_feature (1268)..(1268): n is a, c, g, or t
  misc_feature (1270)..(1270): n is a, c, g, or t
  misc_feature (1274)..(1274): n is a, c, g, or t
  misc_feature (1276)..(1277): n is a, c, g, or t
  misc_feature (1279)..(1279): n is a, c, g, or t
  misc_feature (1281)..(1282): n is a, c, g, or t
  misc_feature (1284)..(1285): n is a, c, g, or t
  misc_feature (1287)..(1288): n is a, c, g, or t
  misc_feature (1290)..(1290): n is a, c, g, or t
  misc_feature (1292)..(1294): n is a, c, g, or t
  misc_feature (1296)..(1297): n is a, c, g, or t
  misc_feature (1299)..(1301): n is a, c, g, or t
  misc_feature (1303)..(1307): n is a, c, g, or t
  misc_feature (1309)..(1309): n is a, c, g, or t
  misc_feature (1312)..(1314): n is a, c, g, or t
  misc_feature (1316)..(1320): n is a, c, g, or t
  misc_feature (1323)..(1324): n is a, c, g, or t
  misc_feature (1326)..(1326): n is a, c, g, or t
  misc_feature (1328)..(1328): n is a, c, g, or t
  misc_feature (1330)..(1331): n is a, c, g, or t
  misc_feature (1333)..(1333): n is a, c, g, or t
  misc_feature (1336)..(1339): n is a, c, g, or t
  misc_feature (1341)..(1343): n is a, c, g, or t
  misc_feature (1345)..(1345): n is a, c, g, or t
  misc_feature (1347)..(1348): n is a, c, g, or t
  misc_feature (1353)..(1353): n is a, c, g, or t
  misc_feature (1355)..(1361): n is a, c, g, or t
  misc_feature (1366)..(1366): n is a, c, g, or t
  misc_feature (1368)..(1368): n is a, c, g, or t
  misc_feature (1370)..(1371): n is a, c, g, or t
  misc_feature (1373)..(1373): n is a, c, g, or t
  misc_feature (1375)..(1378): n is a, c, g, or t
  misc_feature (1380)..(1381): n is a, c, g, or t
  misc_feature (1383)..(1383): n is a, c, g, or t
  misc_feature (1385)..(1386): n is a, c, g, or t
  misc_feature (1388)..(1389): n is a, c, g, or t
  misc_feature (1391)..(1395): n is a, c, g, or t
  misc_feature (1397)..(1398): n is a, c, g, or t
  misc_feature (1400)..(1401): n is a, c, g, or t
  misc_feature (1403)..(1405): n is a, c, g, or t
  misc_feature (1409)..(1412): n is a, c, g, or t
  misc_feature (1414)..(1415): n is a, c, g, or t
  misc_feature (1417)..(1419): n is a, c, g, or t
  misc_feature (1421)..(1421): n is a, c, g, or t
  misc_feature (1428)..(1429): n is a, c, g, or t
  misc_feature (1431)..(1434): n is a, c, g, or t
  misc_feature (1436)..(1438): n is a, c, g, or t
  misc_feature (1440)..(1440): n is a, c, g, or t
  misc_feature (1442)..(1442): n is a, c, g, or t
  misc_feature (1448)..(1450): n is a, c, g, or t
  misc_feature (1453)..(1455): n is a, c, g, or t
  misc_feature (1457)..(1458): n is a, c, g, or t
  misc_feature (1460)..(1461): n is a, c, g, or t
  misc_feature (1463)..(1463): n is a, c, g, or t
  misc_feature (1466)..(1467): n is a, c, g, or t
  misc_feature (1469)..(1472): n is a, c, g, or t
  misc_feature (1475)..(1475): n is a, c, g, or t
  misc_feature (1477)..(1482): n is a, c, g, or t
  misc_feature (1484)..(1487): n is a, c, g, or t
  misc_feature (1489)..(1490): n is a, c, g, or t
  misc_feature (1492)..(1495): n is a, c, g, or t
  misc_feature (1497)..(1497): n is a, c, g, or t
  misc_feature (1499)..(1499): n is a, c, g, or t
  misc_feature (1501)..(1503): n is a, c, g, or t
  misc_feature (1505)..(1506): n is a, c, g, or t
  misc_feature (1508)..(1508): n is a, c, g, or t
  misc_feature (1511)..(1512): n is a, c, g, or t
  misc_feature (1514)..(1514): n is a, c, g, or t
  misc_feature (1517)..(1518): n is a, c, g, or t
  misc_feature (1521)..(1523): n is a, c, g, or t
  misc_feature (1525)..(1526): n is a, c, g, or t
  misc_feature (1528)..(1529): n is a, c, g, or t
  misc_feature (1531)..(1531): n is a, c, g, or t
  misc_feature (1534)..(1536): n is a, c, g, or t
  misc_feature (1538)..(1538): n is a, c, g, or t
  misc_feature (1542)..(1544): n is a, c, g, or t
  misc_feature (1546)..(1549): n is a, c, g, or t
  misc_feature (1552)..(1553): n is a, c, g, or t
  misc_feature (1555)..(1557): n is a, c, g, or t
  misc_feature (1559)..(1559): n is a, c, g, or t
  misc_feature (1561)..(1561): n is a, c, g, or t
  misc_feature (1564)..(1564): n is a, c, g, or t
  misc_feature (1566)..(1568): n is a, c, g, or t
  misc_feature (1570)..(1571): n is a, c, g, or t
  misc_feature (1574)..(1576): n is a, c, g, or t
  misc_feature (1578)..(1579): n is a, c, g, or t
  misc_feature (1581)..(1581): n is a, c, g, or t
  misc_feature (1585)..(1586): n is a, c, g, or t
  misc_feature (1588)..(1591): n is a, c, g, or t
  misc_feature (1594)..(1595): n is a, c, g, or t
  misc_feature (1598)..(1600): n is a, c, g, or t
  misc_feature (1602)..(1602): n is a, c, g, or t
  misc_feature (1604)..(1607): n is a, c, g, or t
  misc_feature (1609)..(1611): n is a, c, g, or t
  misc_feature (1613)..(1614): n is a, c, g, or t
  misc_feature (1616)..(1620): n is a, c, g, or t
  misc_feature (1622)..(1623): n is a, c, g, or t
  misc_feature (1626)..(1627): n is a, c, g, or t
  misc_feature (1630)..(1631): n is a, c, g, or t
  misc_feature (1633)..(1633): n is a, c, g, or t
  misc_feature (1638)..(1639): n is a, c, g, or t
  misc_feature (1643)..(1644): n is a, c, g, or t
  misc_feature (1649)..(1650): n is a, c, g, or t
  misc_feature (1652)..(1652): n is a, c, g, or t
  misc_feature (1654)..(1657): n is a, c, g, or t
  misc_feature (1659)..(1662): n is a, c, g, or t
  misc_feature (1665)..(1666): n is a, c, g, or t
  misc_feature (1668)..(1670): n is a, c, g, or t
  misc_feature (1674)..(1680): n is a, c, g, or t
  misc_feature (1682)..(1686): n is a, c, g, or t
  misc_feature (1688)..(1688): n is a, c, g, or t
  misc_feature (1690)..(1693): n is a, c, g, or t
  misc_feature (1695)..(1697): n is a, c, g, or t
  misc_feature (1699)..(1699): n is a, c, g, or t
  misc_feature (1701)..(1706): n is a, c, g, or t
  misc_feature (1708)..(1713): n is a, c, g, or t
  misc_feature (1715)..(1731): n is a, c, g, or t
  misc_feature (1733)..(1734): n is a, c, g, or t
  misc_feature (1737)..(1744): n is a, c, g, or t
  misc_feature (1749)..(1753): n is a, c, g, or t
  misc_feature (1755)..(1755): n is a, c, g, or t
  misc_feature (1757)..(1757): n is a, c, g, or t
  misc_feature (1760)..(1765): n is a, c, g, or t
  misc_feature (1767)..(1767): n is a, c, g, or t
  misc_feature (1769)..(1773): n is a, c, g, or t
  misc_feature (1775)..(1781): n is a, c, g, or t
  misc_feature (1783)..(1788): n is a, c, g, or t
  misc_feature (1790)..(1793): n is a, c, g, or t
  misc_feature (1795)..(1799): n is a, c, g, or t
  misc_feature (1803)..(1803): n is a, c, g, or t
  misc_feature (1806)..(1807): n is a, c, g, or t
  misc_feature (1986)..(1986): n is a, c, g, or t
  misc_feature (1989)..(1989): n is a, c, g, or t
  misc_feature (1992)..(1992): n is a, c, g, or t
  misc_feature (2024)..(2025): n is a, c, g, or t
  misc_feature (2028)..(2028): n is a, c, g, or t
  misc_feature (2031)..(2031): n is a, c, g, or t
  misc_feature (2379)..(2379): n is a, c, g, or t
  misc_feature (2383)..(2383): n is a, c, g, or t
  misc_feature (2421)..(2421): n is a, c, g, or t
  misc_feature (2533)..(2533): n is a, c, g, or t
  misc_feature (2556)..(2556): n is a, c, g, or t
  misc_feature (2574)..(2574): n is a, c, g, or t
  misc_feature (2586)..(2586): n is a, c, g, or t
  misc_feature (3557)..(3557): n is a, c, g, or t
  misc_feature (3941)..(3941): n is a, c, g, or t
nggnnnttnnnnnnngnannnnnnnnnnnnnnntngncnnnnnnnngnnnncnggntngnttnnnnnannnannntttnnncngnngngcnnttttnnnnnnnantntntttgcnnngggnannnnnncnnannntnnngnntnnnntnntnnncnnnnnnngngngnngntnntncncnntttganncnnnncannangnangncnannnngnnnannnnannnnncnnnnnacncccnntntnnnantnntngtttgggnttnnnnnnntnntncnnnnntgnngnnnnngnngnnnanngncnnnttttncgnngnnncnncgnncccgnngntncngnncncnncnttttnnncnnnnncnnnnnngnngncnncnnnnncnnnngnnncngncnnnnnntgnngnngggngnnntnnncnncgnncnnngtnngggnnanngnnngnnnntnnnnntnntcnncnnnnntgnngcccntttcccnnannanntgnngtncnntnnnggnngnnanngnngnttnngnnantttgnngnngnnnnngcnnnngnnnnngnnnnnncnnnngncgnngtnntngnngnnnnannnnncnngnntnntncngnnnnnnncnncaagnntnnngngggnnnncnncnnnngggnngntnntncnncnannntncnnnnnanannnanntnnngggtnntnntncngnnattttcnnctnctnnnntnnngcccnnncnnnnntngnganncnnntnngnnancngngnnncngntgggnnnngnngnntngncnnnancntngccccnncnacnncntnnanntttnngtatnnnncnttttnntnntnntnntcnncntnntnnacnncgnnnncnntttnnannncnangnagnngncnannatnnnnanaaanannanngntttnntncnngnnnncgnnncngnnnancnnnngngcnnnnncnnannnnnnnnnnnnancngnncnncannnnnngntntntnnnncnngntgnnntngcnnnnnnncccnncnntnnngnngnnnnnangggnnngggnnncnctnnncccntnngnngnnncnncnttttnnntnnngngggtgngggtnnnnannnngntnangaaantnactcnnnacnncnannannacnnnnngngggnntnntnnnnngngtnnncnnnnngntnnnnntngnncncccggggncngnnagggcncccnngncncccntnntngngngcnncnaaannncccngntntttncnncngnnanntnntncnnnannannntnnnnnangcnnngnnnnnggnnangncnncnagnnnnannntnannagggngnnnnnnnccccnangnngncnnnnanngncnngnncnnnnncnncnncnnngggnnnncnncnnngngggtttnntnnnngnnngntncccgcnnnctnnngnncnngntgnngnnnntgngnnnnnncnnnncnncnnnngncngnnncnngntgnngncgnngannncnncnncnacnnngnagannntnnnnagnntnnncntnagngnnncnncgnnnannancgcnncnnnnacnncgnnncngnnnntnnncnncnnnnngnngtnnacnncncccanncccnnccccnngntnnnntnnnncgnnannngggnnnnnnngnnnnngntnnnngnnntngnnnnnntnnnnnngnnnnnnnnnnnnnnnnngnngcnnnnnnnnaaaannnnngncnccnnnnnngnannnnncnnnnnnncnnnnnngnnnngnnnnngggnggnngggggggttttttgtgctcatatggccccagccgctgctgtctagagtagaaaagaggcgcgcgcatgtttggccgcgacaagattcaaattaaaactcccgcccagattcgtcatatgcgtcaagctggcctggttgtggctgacattcatgacgccctcaaagccgctattgccccnggngtnaccactgcgcagctagacgaggtcagcgcccnngcnatngaaaagggcaaagctaagtcaaacttcctgggctactacggctacccggccacggtgtgcacctcggtgaacgaggagattgtgcatggcatccccggccagcgggtgctgcaagacggtgacctgcttagctgcgactgtggtgcctatgtggaggccgacggcgtgcagtggcatggggacgcggcctttaccgccgtcgtcggcaactacgctagcgaaacggacaagtacctggaccgcaccaccgagcgggcgctgtgggccgccattgccgccctggctgaggcgggggctagcggctggaaggatgcgcgtatcaacctgatcggtgacgccgttgagtcngtanttttcgacgccgcccaagaaaccggtcacgagctgggnatcgtggaggagtatgtgggccacgggatcggcaccaagatgcacatggcccccgacgtactgaactactcggtcagctctaaaggcgtgaagctacaaccgggcatggtgntggcgattgaacccatgatcacngccgggcgcgctagcaangagaccctggangatgagtggactgtggtcacccgtgacggctcacgcgcagctcactgggagcacactgtggcgcttacccctaagggagtgtgggtgctgaccgcacgtgatgggggagcggctgggctggagcctttcggctttgctcccaccccactgtctgcgtgagcactaccaccagtttttcgctggcgcaaggctagctttgtatcacttttgaacggtaaactaaccctctggattcacctatttatgcccttttcggggcgctaccaacagtaagggtggtcccggcgtcgtcaaatcgcggcgctgcgtaacatctagccgacggaggaacatggctaagaaggatggagtcatcgaggtcgagggttcggtcgtcgaggcccttccaaatgcgatgttccgggtggaattggataacggtcacgtcgtgcttgctcacatctcgggcaagatgcgccagcactacatccgtatcctccccgaagaccgcgtggttgtagagctgagcccctatgaccttacccgcggacgcatcgtctaccggtacaagtgacaacccgctcctagttttaggagcggcggaggaagatcatgaaggtcaagccgagcgtcaagaagatctgtgacaactgcaaggtgattcgtcgccacggccgtgtcatggttatctgcgagaaccctcgacacaagcagcgtcagggctgaacctgcgctcagaccgctaagcggtccgtacagcacctatcccacgcgtaatagcgcacccccggttctcggaggccggggcacccgcaaaggggtggaggaataggtgacgacctccgggaaaacacaggagaaccacaaaagtggcacgcatttccggtgttgacctcccgcgcgagaagcgcgtagaggttgcacttacctacatttttgggatcggccgtacccgcgccgatgagactctcaaggccaccggtgtcaacccngacacccgcgtcaaggacctaactgaggaagacctcgtcaagctgcgctctcacatcgacgccaactaccaggttgagggtgacctgcgtcgtgagatccaggctgacattcgccgcaaggtcgagatcggctgctaccagggtctgcgtcaccgccgtcacctgcccgtgcacggccagcgcaccaagaccaacgcgcgcacccgcaagggccccaagcgcaccgttgctggtaagaagaagtaatcagcccccagttaaacctcacgcgaagaaggaattatgcctcccaagagccgcactgctgtgcgtaagccgcgtcgcaaggaccggaagaacattacccacggtcacgcttacattaagtcgaccttcaacaacacnattgtttccctaactgacaccaccggtgcagttattgcctgggcctcctctggccaggt

SEQ ID NO: 1391 - DNA, 4000 bp, Escherichia coli
  misc_feature (1)..(1): n is a, c, g, or t
  misc_feature (3)..(3): n is a, c, g, or t
  misc_feature (8)..(10): n is a, c, g, or t
  misc_feature (13)..(14): n is a, c, g, or t
  misc_feature (20)..(21): n is a, c, g, or t
  misc_feature (27)..(32): n is a, c, g, or t
  misc_feature (41)..(41): n is a, c, g, or t
  misc_feature (43)..(43): n is a, c, g, or t
  misc_feature (46)..(47): n is a, c, g, or t
  misc_feature (49)..(50): n is a, c, g, or t
  misc_feature (56)..(56): n is a, c, g, or t
  misc_feature (70)..(70): n is a, c, g, or t
  misc_feature (92)..(92): n is a, c, g, or t
  misc_feature (106)..(106): n is a, c, g, or t
  misc_feature (115)..(115): n is a, c, g, or t
  misc_feature (205)..(205): n is a, c, g, or t
  misc_feature (211)..(211): n is a, c, g, or t
  misc_feature (268)..(268): n is a, c, g, or t
  misc_feature (331)..(331): n is a, c, g, or t
  misc_feature (385)..(385): n is a, c, g, or t
  misc_feature (400)..(400): n is a, c, g, or t
  misc_feature (415)..(415): n is a, c, g, or t
  misc_feature (424)..(424): n is a, c, g, or t
  misc_feature (445)..(445): n is a, c, g, or t
  misc_feature (451)..(451): n is a, c, g, or t
  misc_feature (509)..(509): n is a, c, g, or t
  misc_feature (511)..(511): n is a, c, g, or t
  misc_feature (514)..(514): n is a, c, g, or t
  misc_feature (613)..(613): n is a, c, g, or t
  misc_feature (622)..(622): n is a, c, g, or t
  misc_feature (631)..(631): n is a, c, g, or t
  misc_feature (703)..(703): n is a, c, g, or t
  misc_feature (730)..(730): n is a, c, g, or t
  misc_feature (775)..(775): n is a, c, g, or t
  misc_feature (808)..(808): n is a, c, g, or t
  misc_feature (811)..(811): n is a, c, g, or t
  misc_feature (877)..(877): n is a, c, g, or t
  misc_feature (940)..(940): n is a, c, g, or t
  misc_feature (952)..(952): n is a, c, g, or t
  misc_feature (958)..(958): n is a, c, g, or t
  misc_feature (967)..(967): n is a, c, g, or t
  misc_feature (994)..(994): n is a, c, g, or t
  misc_feature (1063)..(1063): n is a, c, g, or t
  misc_feature (1068)..(1068): n is a, c, g, or t
  misc_feature (1096)..(1096): n is a, c, g, or t
  misc_feature (1135)..(1135): n is a, c, g, or t
  misc_feature (1140)..(1140): n is a, c, g, or t
  misc_feature (1183)..(1183): n is a, c, g, or t
  misc_feature (1240)..(1240): n is a, c, g, or t
  misc_feature (1988)..(1988): n is a, c, g, or t
  misc_feature (2004)..(2004): n is a, c, g, or t
  misc_feature (2464)..(2464): n is a, c, g, or t
  misc_feature (2613)..(2613): n is a, c, g, or t
  misc_feature (2967)..(2967): n is a, c, g, or t
  misc_feature (2973)..(2973): n is a, c, g, or t
  misc_feature (3000)..(3000): n is a, c, g, or t
  misc_feature (3035)..(3035): n is a, c, g, or t
  misc_feature (3043)..(3043): n is a, c, g, or t
  misc_feature (3085)..(3085): n is a, c, g, or t
  misc_feature (3094)..(3094): n is a, c, g, or t
  misc_feature (3130)..(3130): n is a, c, g, or t
  misc_feature (3142)..(3142): n is a, c, g, or t
  misc_feature (3147)..(3147): n is a, c, g, or t
  misc_feature (3178)..(3178): n is a, c, g, or t
  misc_feature (3202)..(3202): n is a, c, g, or t
  misc_feature (3231)..(3231): n is a, c, g, or t
  misc_feature (3265)..(3265): n is a, c, g, or t
  misc_feature (3277)..(3277): n is a, c, g, or t
  misc_feature (3286)..(3286): n is a, c, g, or t
  misc_feature (3342)..(3342): n is a, c, g, or t
  misc_feature (3347)..(3348): n is a, c, g, or t
  misc_feature (3373)..(3373): n is a, c, g, or t
  misc_feature (3393)..(3393): n is a, c, g, or t
  misc_feature (3395)..(3396): n is a, c, g, or t
  misc_feature (3415)..(3415): n is a, c, g, or t
  misc_feature (3422)..(3423): n is a, c, g, or t
  misc_feature (3425)..(3429): n is a, c, g, or t
  misc_feature (3431)..(3435): n is a, c, g, or t
  misc_feature (3437)..(3438): n is a, c, g, or t
  misc_feature (3440)..(3440): n is a, c, g, or t
  misc_feature (3443)..(3447): n is a, c, g, or t
  misc_feature (3454)..(3459): n is a, c, g, or t
  misc_feature (3462)..(3466): n is a, c, g, or t
  misc_feature (3477)..(3477): n is a, c, g, or t
  misc_feature (3523)..(3523): n is a, c, g, or t
  misc_feature (3541)..(3541): n is a, c, g, or t
  misc_feature (3550)..(3550): n is a, c, g, or t
  misc_feature (3552)..(3552): n is a, c, g, or t
  misc_feature (3872)..(3872): n is a, c, g, or t
  misc_feature (3881)..(3881): n is a, c, g, or t
  misc_feature (3911)..(3911): n is a, c, g, or t
  misc_feature (3944)..(3944): n is a, c, g, or t
  misc_feature (3953)..(3953): n is a, c, g, or t
  misc_feature (3957)..(3957): n is a, c, g, or t
  misc_feature (3980)..(3980): n is a, c, g, or t
ntnaaaannntannaattannaaatannnnnnataataaantngannannaaaaangggcgtatagcccnttctttacaacatccaaaaaantctagaacggaacncgtttatantcacgatattctggtttccagaagttctgttcaatactttctagcaattgctcatcactgatcatcggtgctacaccatcttgaatagcngctttngcaactttaaacgcgataattttagatacttgctgcaattcatttaaatcaggcaanaaatctgcgtggatatcttgcaacttcggtgaacaatcggccaaagctgaacttgaagccatnaacatattgtctgtaacacgggttgcttgaactgctaccacacccaaaccaatnccagggaagatatangagttattgcactgngaaatctgntaggtttcaccatgataattnacaggngtaaatgggctgcctgtcgcaatcaatgctttaccatctgtccattgaataatatcancnggnacggcttcaactcgtgaagttgggttggataaaggcaatacaatcggatattcacagttttcagccagcgttttaatgatttcttctgtaaataaaccnggttgaccngataccccnatcaatacggttggtttggcatttttcacaacatcaagcagtgaaatgatttcctcagcattgccccaatgngcaacatcttcaggtttctgcgcaagnttacgttggaaatctaataagtttggctgattttcagtgattaanccaaaacgatccaccataaatactttggcacgngcntcagcatccgtcagcccttcagcaaccatctgtgcaataatttgttctgcaataccacaacctgcngaaccagcccctaagaaggtaattttctggtctttgagctgtttacctgcggctctactcgcngcaattaaagtnccgacncaaactgcngctgttccttgaatatcgtcattaaancaacaaatcttatcacggtatttttcaagtaaaggcatggcatttttttgcgcaaaatcttcgaattgnatcantgcttttggccaacgacgtttaaccgcngcaatcacttcatcgacaaattcatagtattcatccccnctganacgaggttgcgaccatcccatataaatcgggtcattcaataantgttgattattggttcccacatcaatggtaatcggcaatgtataggctggactaatnccaccacatgcggtgtaaagagacagttttccaattggaatgcccataccgccaataccttggtcgcctaaaccaagaatacgctcaccatctgtgatcacaatcactttgacatttttacggtttacgttgtgaatgatttcatcaatgtatttacggtcaggataggaaagaaatactccacgatgacggcgataaatatcggagaaacgctgacatgcttcacccactgtcggtgtatagataatcggcatcatctcacttaagtggttttcaatcaggtggtaaaacagcgtttcattggtgtcttgaatatttcgtaaataaatatgcttattgatcgcttcactgaaagaacagaactgttggtatgaacgttgactttgttcctcgatactttcgatcacatgaggaattaaaccgtgtaagttaaattgagttcgttcttcttctgtgaaggctgaacctttatttaataaaggcagctctaataaggcattacctgcataatgaatatatagaggatattttttcagggtttccgttggcatttccattctcattgaagcagactgcctgcttctatcttttgctaagctacgactttggtctgatacaagcttaagcctatttttgactaaatgggtatttagatacgtgataatgatattcaaagtattttacagaatgataaattattctcagttttactgatcaaattctcgtttttatgcaatttaatattttnccataaaataatgagncatgatcccgccattaaaactgcatatttgtacgcaattttgaccaatcattgattttttttctgtttagatttattttgtttaaaatacgatgaagctaaaccaataacaatgaacacaaagatctctctactccttcttagcacagtcattgcatgtactggctgccaaactgcaaaaaaagtctcttctggtgtttctaaaaccactgaaaaagtcaaaagtatggtgggcttaggcgaagccaaagttccagaagttgatcaacaaggtgtggttgatgtcagtaaagccaccctcgaaaaactagaacaaatgaagatcaatatgcccactggacaatgggtctatattgaaaatgatcttcaaggtatttacaccttacaaaacaaatccagtgatggaaacgtcctatatttgcgtttgaattgtaagattccttcgcagaagtctggttttncgattgaagataaagatggtaaagagctgcttaaagcacatgatgcgcaaaccggtcaggttcaattcttaatcgacaataaaaactatggcaatccatttgacttagtcaatgcgaaaaaaatgccgacatttaaaacggcactgagnaaagccaaagtgattaaaatctttaacaattccaaactttatacctttacaaatggccatgctgaattgcttagcaagcctgtcacatgtaaagagtagatccattatttaggcatatccacaaatacggcggttaaacgtcgtactaagggtaaaacaatcagaaccacaggatatgccacagcccatgataccatccatgcagcaagccatttgacccaaaatccgttaatcaaacccacattgatcaacatattaatcaatgacaccatgccactcattaaacaagataagaacaacggcataatccatgctgcaaattttgcagggagttttgggatattgccaataatngtgggnggagtatttgacatatatcgctctaantttaccaacaggacacattttattcttttaatggncctgaaanaattaatccttccacataacatcggccacattttgccatttnatttgattngacaaatttaaaggctgatcatagagctcagatatnacattgattgcntcatngagtgaaataattgaatttaaagggagccangtgtcatcaccaacatcaaataangctaagttcagatcttcattgcaagacanccacgactcaccttgttggacagtagggatattnttatcgtaacgnaaaatcaantgagtcgtatctacccaccaaaacaataaaatgatctgaccttgttttggcatatntagcnnaagataacctgaatttgaatattcnaagtctgtggcctgaatctncnnaaacaactgtataacttgntcttttnnannnnntnnnnntnnanttnnnnnaaaaaannnnnnaannnnnttttttatccngtgattaaagcagtgtaatccgtcaagtccatttgaaatctaaacnccaatacacagtgaaatngagcatacngncatttttcttatcgaataagttttattctatacaaatgcattcacctaaaaggcgcaaaatttgctatatttagcgtttttctgcgacatttatttctctatagattatgaatacggccatacaagcagctcttgatcatgcagtgcaatccctacaagctgaagggactcttccatctgactggaaaaacacgagtgttttaacgcgaactaaagaccgaagccacggtgatttcgcatcaaacattgccatgatgggcgctaaagttgctggtatgaaaccacgtgatcttgcagagaaaattttggcaaatttaccngaagtggtngatattgccaaagctgaaattgcgggtccnggttttatcaacttctttttaaatgccgatcancgctttacngtgntggatcagatccaagcacaaaangaacaatttggtaaaaccca

SEQ ID NO: 1392 - DNA, 4000 bp, Escherichia coli
  misc_feature (1)..(3): n is a, c, g, or t
  misc_feature (5)..(10): n is a, c, g, or t
  misc_feature (12)..(13): n is a, c, g, or t
  misc_feature (15)..(16): n is a, c, g, or t
  misc_feature (18)..(18): n is a, c, g, or t
  misc_feature (21)..(22): n is a, c, g, or t
  misc_feature (24)..(25): n is a, c, g, or t
  misc_feature (27)..(30): n is a, c, g, or t
  misc_feature (33)..(35): n is a, c, g, or t
  misc_feature (37)..(42): n is a, c, g, or t
  misc_feature (44)..(47): n is a, c, g, or t
  misc_feature (49)..(54): n is a, c, g, or t
  misc_feature (58)..(61): n is a, c, g, or t
  misc_feature (63)..(70): n is a, c, g, or t
  misc_feature (72)..(78): n is a, c, g, or t
  misc_feature (80)..(81): n is a, c, g, or t
  misc_feature (83)..(94): n is a, c, g, or t
  misc_feature (96)..(107): n is a, c, g, or t
  misc_feature (109)..(111): n is a, c, g, or t
  misc_feature (113)..(113): n is a, c, g, or t
  misc_feature (115)..(117): n is a, c, g, or t
  misc_feature (120)..(123): n is a, c, g, or t
  misc_feature (125)..(135): n is a, c, g, or t
  misc_feature (137)..(137): n is a, c, g, or t
  misc_feature (139)..(141): n is a, c, g, or t
  misc_feature (143)..(144): n is a, c, g, or t
  misc_feature (146)..(147): n is a, c, g, or t
  misc_feature (149)..(154): n is a, c, g, or t
  misc_feature (156)..(165): n is a, c, g, or t
  misc_feature (167)..(169): n is a, c, g, or t
  misc_feature (171)..(174): n is a, c, g, or t
  misc_feature (176)..(177): n is a, c, g, or t
  misc_feature (179)..(179): n is a, c, g, or t
  misc_feature (181)..(187): n is a, c, g, or t
  misc_feature (189)..(192): n is a, c, g, or t
  misc_feature (196)..(196): n is a, c, g, or t
  misc_feature (198)..(198): n is a, c, g, or t
  misc_feature (200)..(202): n is a, c, g, or t
  misc_feature (204)..(204): n is a, c, g, or t
  misc_feature (207)..(209): n is a, c, g, or t
  misc_feature (213)..(215): n is a, c, g, or t
  misc_feature (217)..(217): n is a, c, g, or t
  misc_feature (219)..(219): n is a, c, g, or t
  misc_feature (226)..(230): n is a, c, g, or t
  misc_feature (232)..(232): n is a, c, g, or t
  misc_feature (234)..(234): n is a, c, g, or t
  misc_feature (237)..(237): n is a, c, g, or t
  misc_feature (242)..(243): n is a, c, g, or t
  misc_feature (246)..(248): n is a, c, g, or t
  misc_feature (252)..(253): n is a, c, g, or t
  misc_feature (255)..(258): n is a, c, g, or t
  misc_feature (261)..(262): n is a, c, g, or t
  misc_feature (264)..(267): n is a, c, g, or t
  misc_feature (269)..(269): n is a, c, g, or t
  misc_feature (271)..(271): n is a, c, g, or t
  misc_feature (273)..(275): n is a, c, g, or t
  misc_feature (277)..(279): n is a, c, g, or t
  misc_feature (281)..(281): n is a, c, g, or t
  misc_feature (284)..(284): n is a, c, g, or t
  misc_feature (286)..(287): n is a, c, g, or t
  misc_feature (289)..(291): n is a, c, g, or t
  misc_feature (294)..(294): n is a, c, g, or t
  misc_feature (299)..(303): n is a, c, g, or t
  misc_feature (307)..(310): n is a, c, g, or t
  misc_feature (313)..(320): n is a, c, g, or t
  misc_feature (322)..(322): n is a, c, g, or t
  misc_feature (325)..(325): n is a, c, g, or t
  misc_feature (327)..(329): n is a, c, g, or t
  misc_feature (336)..(337): n is a, c, g, or t
  misc_feature (339)..(339): n is a, c, g, or t
  misc_feature (344)..(356): n is a, c, g, or t
  misc_feature (359)..(362): n is a, c, g, or t
  misc_feature (364)..(365): n is a, c, g, or t
  misc_feature (367)..(368): n is a, c, g, or t
  misc_feature (370)..(371): n is a, c, g, or t
  misc_feature (373)..(376): n is a, c, g, or t
  misc_feature (378)..(378): n is a, c, g, or t
  misc_feature (381)..(386): n is a, c, g, or t
  misc_feature (388)..(394): n is a, c, g, or t
  misc_feature (396)..(397): n is a, c, g, or t
  misc_feature (400)..(406): n is a, c, g, or t
  misc_feature (408)..(409): n is a, c, g, or t
  misc_feature (411)..(412): n is a, c, g, or t
  misc_feature (415)..(419): n is a, c, g, or t
  misc_feature (422)..(427): n is a, c, g, or t
  misc_feature (430)..(432): n is a, c, g, or t
  misc_feature (435)..(435): n is a, c, g, or t
  misc_feature (438)..(439): n is a, c, g, or t
  misc_feature (442)..(442): n is a, c, g, or t
  misc_feature (444)..(447): n is a, c, g, or t
  misc_feature (449)..(449): n is a, c, g, or t
  misc_feature (451)..(451): n is a, c, g, or t
  misc_feature (454)..(457): n is a, c, g, or t
  misc_feature (461)..(470): n is a, c, g, or t
  misc_feature (472)..(476): n is a, c, g, or t
  misc_feature (478)..(486): n is a, c, g, or t
  misc_feature (488)..(490): n is a, c, g, or t
  misc_feature (492)..(494): n is a, c, g, or t
  misc_feature (496)..(497): n is a, c, g, or t
  misc_feature (500)..(500): n is a, c, g, or t
  misc_feature (502)..(504): n is a, c, g, or t
  misc_feature (506)..(511): n is a, c, g, or t
  misc_feature (514)..(514): n is a, c, g, or t
  misc_feature (517)..(517): n is a, c, g, or t
  misc_feature (520)..(525): n is a, c, g, or t
  misc_feature (527)..(539): n is a, c, g, or t
  misc_feature (542)..(542): n is a, c, g, or t
  misc_feature (546)..(547): n is a, c, g, or t
  misc_feature (552)..(552): n is a, c, g, or t
  misc_feature (555)..(559): n is a, c, g, or t
  misc_feature (561)..(562): n is a, c, g, or t
  misc_feature (564)..(575): n is a, c, g, or t
  misc_feature (577)..(577): n is a, c, g, or t
  misc_feature (579)..(579): n is a, c, g, or t
  misc_feature (583)..(583): n is a, c, g, or t
  misc_feature (585)..(586): n is a, c, g, or t
  misc_feature (588)..(591): n is a, c, g, or t
  misc_feature (593)..(595): n is a, c, g, or t
  misc_feature (597)..(597): n is a, c, g, or t
  misc_feature (599)..(602): n is a, c, g, or t
  misc_feature (606)..(608): n is a, c, g, or t
  misc_feature (610)..(611): n is a, c, g, or t
  misc_feature (613)..(620): n is a, c, g, or t
  misc_feature (622)..(626): n is a, c, g, or t
  misc_feature (632)..(634): n is a, c, g, or t
  misc_feature (636)..(636): n is a, c, g, or t
  misc_feature (638)..(638): n is a, c, g, or t
  misc_feature (640)..(641): n is a, c, g, or t
  misc_feature (643)..(644): n is a, c, g, or t
  misc_feature (646)..(651): n is a, c, g, or t
  misc_feature (653)..(655): n is a, c, g, or t
  misc_feature (658)..(661): n is a, c, g, or t
  misc_feature (665)..(666): n is a, c, g, or t
  misc_feature (669)..(671): n is a, c, g, or t
  misc_feature (674)..(674): n is a, c, g, or t
  misc_feature (679)..(680): n is a, c, g, or t
  misc_feature (682)..(683): n is a, c, g, or t
  misc_feature (687)..(693): n is a, c, g, or t
  misc_feature (695)..(704): n is a, c, g, or t
  misc_feature (706)..(709): n is a, c, g, or t
  misc_feature (711)..(711): n is a, c, g, or t
  misc_feature (714)..(714): n is a, c, g, or t
  misc_feature (716)..(721): n is a, c, g, or t
  misc_feature (723)..(723): n is a, c, g, or t
  misc_feature (725)..(725): n is a, c, g, or t
  misc_feature (727)..(727): n is a, c, g, or t
  misc_feature (729)..(737): n is a, c, g, or t
  misc_feature (739)..(739): n is a, c, g, or t
  misc_feature (741)..(746): n is a, c, g, or t
  misc_feature (749)..(764): n is a, c, g, or t
  misc_feature (767)..(767): n is a, c, g, or t
  misc_feature (769)..(769): n is a, c, g, or t
  misc_feature (771)..(772): n is a, c, g, or t
  misc_feature (774)..(775): n is a, c, g, or t
  misc_feature (777)..(777): n is a, c, g, or t
  misc_feature (779)..(779): n is a, c, g, or t
  misc_feature (781)..(781): n is a, c, g, or t
  misc_feature (783)..(783): n is a, c, g, or t
  misc_feature (785)..(785): n is a, c, g, or t
  misc_feature (787)..(788): n is a, c, g, or t
  misc_feature (790)..(790): n is a, c, g, or t
  misc_feature (792)..(793): n is a, c, g, or t
  misc_feature (796)..(796): n is a, c, g, or t
  misc_feature (798)..(801): n is a, c, g, or t
  misc_feature (808)..(813): n is a, c, g, or t
  misc_feature (817)..(818): n is a, c, g, or t
  misc_feature (820)..(820): n is a, c, g, or t
  misc_feature (822)..(823): n is a, c, g, or t
  misc_feature (829)..(829): n is a, c, g, or t
  misc_feature (835)..(837): n is a, c, g, or t
  misc_feature (839)..(839): n is a, c, g, or t
  misc_feature (841)..(843): n is a, c, g, or t
  misc_feature (845)..(845): n is a, c, g, or t
  misc_feature (847)..(847): n is a, c, g, or t
  misc_feature (849)..(851): n is a, c, g, or t
  misc_feature (855)..(856): n is a, c, g, or t
  misc_feature (858)..(859): n is a, c, g, or t
  misc_feature (861)..(863): n is a, c, g, or t
  misc_feature (865)..(865): n is a, c, g, or t
  misc_feature (869)..(869): n is a, c, g, or t
  misc_feature (872)..(872): n is a, c, g, or t
  misc_feature (875)..(875): n is a, c, g, or t
  misc_feature (878)..(878): n is a, c, g, or t
  misc_feature (880)..(882): n is a, c, g, or t
  misc_feature (884)..(890): n is a, c, g, or t
  misc_feature (892)..(895): n is a, c, g, or t
  misc_feature (897)..(897): n is a, c, g, or t
  misc_feature (899)..(902): n is a, c, g, or t
  misc_feature (1019)..(1019): n is a, c, g, or t
  misc_feature (1028)..(1028): n is a, c, g, or t
  misc_feature (1052)..(1052): n is a, c, g, or t
  misc_feature (1397)..(1397): n is a, c, g, or t
  misc_feature (1409)..(1409): n is a, c, g, or t
  misc_feature (1803)..(1803): n is a, c, g, or t
  misc_feature (1865)..(1865): n is a, c, g, or t
nnntnnnnnncnncnncnccnncnncnnnnccnnnannnnnncnnnngnnnnnncaannnntnnnnnnnncnnnnnnncnncnnnnnnnnnnnncnnnnnnnnnnnncnnngnannnccnnnngnnnnnnnnnnnanannncnncnnannnnnntnnnnnnnnnnannncnnnnannangnnnnnnngnnnnaaanantnnnanaannntttnnnananatttttnnnnnantnttnttttnnttnnntttnntnnnnttnntnnnntntntnnntnnntnttntnnannnccnttttnnnnntctnnnnttnnnnnnnntnttntnnnttttttnnanttttnnnnnnnnnnnnncannnntnntnntnntnnnntnatnnnnnncnnnnnnncnncannnnnnncnnannaannnnngannnnnnatnnnatnatnntantnnnnanangannnnccannnnnnnnnncnnnnntnnnnnnnnncnnnannntnncgncnnnannnnnnttnttnttnnnnnngnnnnnnnnnnnnngangacnnctccnccnnnnntnntnnnnnnnnnnnncnantagnannannnnannntntnnnntatnnnanntnnnnnnnntnnnnnaataannnantnannanntnnnnnncnnngtnnnnacannacnnnttnttatnntnntggnnnnnnngnnnnnnnnnnannnntnctncnnnnnntngntnannnnnnnnncntnnnnnnagnnnnnnnnnnnnnnnnttntnannannantntnananannanannaangnnnntcttgtnnnnnncagnncnanntgttcnaattgnnnanannncntnannnccannanntnnnanaaanatnaanaangnnnannnnnnncnnnntntnnnnccggtcaacccggtcaacaacgacggcaacgacggcgacggtgtacaagtccccatccatcacgcacaagctgtgcagggtgctgatggcggcatcagcctcaaagtcgaacaaacnaaactaccngagttttggggacagaaggaaaangactccattaccgccaatgcgtttatccaaagagtcgacaacatgatggccgccaacaattggtccgaccatgtcacattccgcaacttcgccttggttctaagaggctccgccgacatctggctgaagtcccaagaaattctggaggacatcacgggtgatcgccggctctggactattgtcagacccctttttaaggcagaatttgctattgaatcagacgacaaacgcatcttggacggtttggctcacctggcgatgaaaccttctgaaaatgtcagggactactttgggcgcctcagcatcgttaatcaaatcatcatggaggcctacgactcctacacngtgttgcccgangaacctgtgctaaccggcaacgtccagaacgacaccgtgtctatgagggcccatgtcagagccagcaacctaaacttggctaaattctttctcctcaaccatttccgggcaggtcttccaacagagctacggagagtcctcaatctccagaacgaggacgaactaaagctaaacgccgccgtcaagctggccaccatcgaggccagatcacgtgaagagtccaaatgccaaaccaaaatttacgccacggaggtttcggagaaccacgaaccacagatcgaggccgttcgtcaaaaccagaattggaggtcgtccaaccaaaaccaataccggcctcagaatcgcaatcaaaatcaacaacaaaaatcgaataaccaatcctggaggcaaggtncaggcaacaattctaacaagaacgggcagacgtgcattttctgcaagagacaaggtcaccgncaagaagagtgccgcaagcgtcaaaaagccaacaagccttgtctggactccaacggtcgtgcgttctggcccaaggtcaacaccacggaggccaacccgactaacaacgtggacgtcccctctttctcgttccaggattttcagtgaagagcttgatggaacccctacgtcaagctcctcaagtcattcctcagctgattttgagtttgtgtgccatctctgtcgtgacattcaataaactttcagaagtaatgacgcctttttatgggggaaacaaaaatcgacctagaattaacgtaaccacgggtgagaaaacttttaactggctatttgatactggggctgcagtcacttgcatgaatgcaaacagttttaaagaagctttttcgggaaaacgacctaagctattacataaaggaacaagctgtgttgccgctaacggatcaaaaatgaactctttgggtgtgtttgagctaccaatgacaataaggggcagaagttttttgcatccagtgactgttgttgaaaacatcaatgacaacatcattggcattgacttcatgcatgcaaacagaatgaattacgatgctgcttccaagcaaatcacatttgctcacatgcttaccaatgccctttactcactcaaagagaccacaattccggccctatcaaccatgattattcaagctaaatttaagggtaacatctgcaacactgctagccctatagccacaatccatgcacccacaaatcctacaatctcagggatgcccgctttggttacactagataagtatcggaactgcaaattggtcatcgacaattgtgctccttatgaagttactcttgccagaaatgaggtactaggagtattggagttcgaaccagacaaatgcattcccttaaacgaaaaaacaatctctgcgttggtttcagacattgctggtcaattacctaaagtgccaaaaagaaagtttacccgtcaagaaatcgaacaaaaagctaatctcaaagtgcctgaacaatttaaagcaaaatacttggacattctctataaacaccaagacgccattagcatcaacaagttcgatctgggtagagctaaaaatttcacacacaaaatttttctcaaggatgataatccggtctacagaaaacagtttaaaataccggaagctcaccaaactttcatagaagcaacactcgatgaatggttgaaacttggagtggtaaaacgaaccaactcactttacaactctccagttttctgtgtacctaaaaaacaaggtcaaggactcagaattgttcaagattttagagagcttaacaaccattctcacattgacaaatacagcatgaaagagatcacggagtgtatcggagacattggcagagcaaattcgaccattttttcaaccctggacttaacttctggtttttggcaaatgaagttagaagaaaaatcgcagccactcactgcttttacaattccgggtaaaggtcaatttgcatgggtcacttcgccaatgggcttactaggatgtccagcaagctttcaacgacttatggaagcggtgctgagaaacattaaaaatgtccttgtttacattgacgatctcctgatacatacagccacgcatgaggagcatttaaaagttttggaacaagtgtttgaaagattacatcaaaaccatttgaaaatcaatctcgacaaatgtgtatttggcaacaaagaagtctcctatttaggttttaccttgacacctgaaggtatcaaacctggtcgcaacaagcttcaagcgatcaaggacgccaaaccaccgacaacaatcaaaatggttagatcttttgttggactctgcaatttttttagaacacacataaaagattttgcaattattgctgctccacttttccaagtcactagaaaggattctgggtacaagtctggccctttaccaccagcagccttacaatctttcaaaatcctacaacagcagcttacctctgatcctgtcatggctttcccacgaatggaccggcaatatgctctcatcacagatgctgccacagggacggctgacactcctggaggcatgggagcaattctcacccaaattgacaaggatggtaat

SEQ ID NO: 1393 - DNA, 4000 bp, Escherichia coli
  misc_feature (3)..(3): n is a, c, g, or t
  misc_feature (6)..(6): n is a, c, g, or t
  misc_feature (9)..(10): n is a, c, g, or t
  misc_feature (12)..(12): n is a, c, g, or t
  misc_feature (14)..(14): n is a, c, g, or t
  misc_feature (16)..(17): n is a, c, g, or t
  misc_feature (19)..(20): n is a, c, g, or t
  misc_feature (22)..(27): n is a, c, g, or t
  misc_feature (29)..(31): n is a, c, g, or t
  misc_feature (35)..(35): n is a, c, g, or t
  misc_feature (39)..(39): n is a, c, g, or t
  misc_feature (41)..(42): n is a, c, g, or t
  misc_feature (45)..(45): n is a, c, g, or t
  misc_feature (49)..(49): n is a, c, g, or t
  misc_feature (57)..(58): n is a, c, g, or t
  misc_feature (63)..(64): n is a, c, g, or t
  misc_feature (66)..(66): n is a, c, g, or t
  misc_feature (69)..(71): n is a, c, g, or t
  misc_feature (73)..(73): n is a, c, g, or t
  misc_feature (75)..(75): n is a, c, g, or t
  misc_feature (77)..(77): n is a, c, g, or t
  misc_feature (79)..(80): n is a, c, g, or t
  misc_feature (83)..(83): n is a, c, g, or t
  misc_feature (85)..(85): n is a, c, g, or t
  misc_feature (88)..(88): n is a, c, g, or t
  misc_feature (90)..(90): n is a, c, g, or t
  misc_feature (92)..(92): n is a, c, g, or t
  misc_feature (95)..(98): n is a, c, g, or t
  misc_feature (100)..(106): n is a, c, g, or t
  misc_feature (108)..(110): n is a, c, g, or t
  misc_feature (116)..(116): n is a, c, g, or t
  misc_feature (118)..(121): n is a, c, g, or t
  misc_feature (124)..(126): n is a, c, g, or t
  misc_feature (128)..(128): n is a, c, g, or t
  misc_feature (130)..(132): n is a, c, g, or t
  misc_feature (135)..(135): n is a, c, g, or t
  misc_feature (143)..(143): n is a, c, g, or t
  misc_feature (145)..(146): n is a, c, g, or t
  misc_feature (151)..(151): n is a, c, g, or t
  misc_feature (153)..(156): n is a, c, g, or t
  misc_feature (158)..(158): n is a, c, g, or t
  misc_feature (163)..(163): n is a, c, g, or t
  misc_feature (167)..(167): n is a, c, g, or t
  misc_feature (173)..(174): n is a, c, g, or t
  misc_feature (176)..(176): n is a, c, g, or t
  misc_feature (183)..(183): n is a, c, g, or t
  misc_feature (186)..(186): n is a, c, g, or t
  misc_feature (188)..(189): n is a, c, g, or t
  misc_feature (191)..(191): n is a, c, g, or t
  misc_feature (194)..(194): n is a, c, g, or t
  misc_feature (199)..(199): n is a, c, g, or t
  misc_feature (201)..(202): n is a, c, g, or t
  misc_feature (204)..(204): n is a, c, g, or t
  misc_feature (208)..(208): n is a, c, g, or t
  misc_feature (210)..(211): n is a, c, g, or t
  misc_feature (214)..(214): n is a, c, g, or t
  misc_feature (216)..(216): n is a, c, g, or t
  misc_feature (218)..(218): n is a, c, g, or t
  misc_feature (220)..(224): n is a, c, g, or t
  misc_feature (226)..(227): n is a, c, g, or t
  misc_feature (230)..(230): n is a, c, g, or t
  misc_feature (232)..(233): n is a, c, g, or t
  misc_feature (236)..(237): n is a, c, g, or t
  misc_feature (239)..(239): n is a, c, g, or t
  misc_feature (241)..(241): n is a, c, g, or t
  misc_feature (245)..(245): n is a, c, g, or t
  misc_feature (247)..(255): n is a, c, g, or t
  misc_feature (257)..(257): n is a, c, g, or t
  misc_feature (260)..(261): n is a, c, g, or t
  misc_feature (263)..(264): n is a, c, g, or t
  misc_feature (268)..(271): n is a, c, g, or t
  misc_feature (275)..(275): n is a, c, g, or t
  misc_feature (278)..(278): n is a, c, g, or t
  misc_feature (281)..(281): n is a, c, g, or t
  misc_feature (283)..(286): n is a, c, g, or t
  misc_feature (290)..(290): n is a, c, g, or t
  misc_feature (292)..(294): n is a, c, g, or t
  misc_feature (296)..(298): n is a, c, g, or t
  misc_feature (301)..(310): n is a, c, g, or t
  misc_feature (315)..(316): n is a, c, g, or t
  misc_feature (318)..(319): n is a, c, g, or t
  misc_feature (321)..(321): n is a, c, g, or t
  misc_feature (325)..(325): n is a, c, g, or t
  misc_feature (327)..(327): n is a, c, g, or t
  misc_feature (329)..(331): n is a, c, g, or t
  misc_feature (333)..(336): n is a, c, g, or t
  misc_feature (338)..(338): n is a, c, g, or t
  misc_feature (342)..(343): n is a, c, g, or t
  misc_feature (345)..(345): n is a, c, g, or t
  misc_feature (347)..(347): n is a, c, g, or t
  misc_feature (350)..(352): n is a, c, g, or t
  misc_feature (355)..(355): n is a, c, g, or t
  misc_feature (357)..(357): n is a, c, g, or t
  misc_feature (359)..(360): n is a, c, g, or t
  misc_feature (363)..(365): n is a, c, g, or t
  misc_feature (367)..(367): n is a, c, g, or t
  misc_feature (370)..(370): n is a, c, g, or t
  misc_feature (375)..(376): n is a, c, g, or t
  misc_feature (379)..(379): n is a, c, g, or t
  misc_feature (384)..(385): n is a, c, g, or t
  misc_feature (389)..(390): n is a, c, g, or t
  misc_feature (392)..(393): n is a, c, g, or t
  misc_feature (395)..(395): n is a, c, g, or t
  misc_feature (397)..(397): n is a, c, g, or t
  misc_feature (399)..(405): n is a, c, g, or t
  misc_feature (407)..(409): n is a, c, g, or t
  misc_feature (411)..(412): n is a, c, g, or t
  misc_feature (414)..(416): n is a, c, g, or t
  misc_feature (418)..(418): n is a, c, g, or t
  misc_feature (421)..(422): n is a, c, g, or t
  misc_feature (425)..(427): n is a, c, g, or t
  misc_feature (430)..(431): n is a, c, g, or t
  misc_feature (437)..(437): n is a, c, g, or t
  misc_feature (439)..(439): n is a, c, g, or t
  misc_feature (441)..(441): n is a, c, g, or t
  misc_feature (443)..(443): n is a, c, g, or t
  misc_feature (445)..(447): n is a, c, g, or t
  misc_feature (449)..(450): n is a, c, g, or t
  misc_feature (454)..(455): n is a, c, g, or t
  misc_feature (458)..(463): n is a, c, g, or t
  misc_feature (465)..(467): n is a, c, g, or t
  misc_feature (469)..(469): n is a, c, g, or t
  misc_feature (472)..(476): n is a, c, g, or t
  misc_feature (481)..(482): n is a, c, g, or t
  misc_feature (484)..(487): n is a, c, g, or t
  misc_feature (491)..(494): n is a, c, g, or t
  misc_feature (496)..(498): n is a, c, g, or t
  misc_feature (504)..(505): n is a, c, g, or t
  misc_feature (509)..(509): n is a, c, g, or t
  misc_feature (511)..(511): n is a, c, g, or t
  misc_feature (515)..(520): n is a, c, g, or t
  misc_feature (527)..(530): n is a, c, g, or t
  misc_feature (532)..(532): n is a, c, g, or t
  misc_feature (536)..(536): n is a, c, g, or t
  misc_feature (538)..(538): n is a, c, g, or t
  misc_feature (541)..(542): n is a, c, g, or t
  misc_feature (544)..(544): n is a, c, g, or t
  misc_feature (546)..(547): n is a, c, g, or t
  misc_feature (550)..(552): n is a, c, g, or t
  misc_feature (554)..(554): n is a, c, g, or t
  misc_feature (556)..(558): n is a, c, g, or t
  misc_feature (561)..(562): n is a, c, g, or t
  misc_feature (564)..(568): n is a, c, g, or t
  misc_feature (570)..(572): n is a, c, g, or t
  misc_feature (574)..(578): n is a, c, g, or t
  misc_feature (581)..(582): n is a, c, g, or t
  misc_feature (584)..(584): n is a, c, g, or t
  misc_feature (588)..(596): n is a, c, g, or t
  misc_feature (599)..(601): n is a, c, g, or t
  misc_feature (604)..(605): n is a, c, g, or t
  misc_feature (608)..(611): n is a, c, g, or t
  misc_feature (614)..(617): n is a, c, g, or t
  misc_feature (619)..(620): n is a, c, g, or t
  misc_feature (622)..(629): n is a, c, g, or t
  misc_feature (632)..(632): n is a, c, g, or t
  misc_feature (636)..(636): n is a, c, g, or t
  misc_feature (639)..(640): n is a, c, g, or t
  misc_feature (644)..(644): n is a, c, g, or t
  misc_feature (649)..(649): n is a, c, g, or t
  misc_feature (651)..(651): n is a, c, g, or t
  misc_feature (653)..(653): n is a, c, g, or t
  misc_feature (657)..(663): n is a, c, g, or t
  misc_feature (666)..(666): n is a, c, g, or t
  misc_feature (669)..(672): n is a, c, g, or t
  misc_feature (674)..(679): n is a, c, g, or t
  misc_feature (681)..(682): n is a, c, g, or t
  misc_feature (685)..(688): n is a, c, g, or t
  misc_feature (690)..(693): n is a, c, g, or t
  misc_feature (696)..(697): n is a, c, g, or t
  misc_feature (700)..(701): n is a, c, g, or t
  misc_feature (705)..(705): n is a, c, g, or t
  misc_feature (709)..(713): n is a, c, g, or t
  misc_feature (716)..(716): n is a, c, g, or t
  misc_feature (719)..(719): n is a, c, g, or t
  misc_feature (722)..(723): n is a, c, g, or t
  misc_feature (725)..(729): n is a, c, g, or t
  misc_feature (731)..(731): n is a, c, g, or t
  misc_feature (733)..(739): n is a, c, g, or t
  misc_feature (742)..(747): n is a, c, g, or t
  misc_feature (750)..(750): n is a, c, g, or t
  misc_feature (752)..(752): n is a, c, g, or t
  misc_feature (754)..(755): n is a, c, g, or t
  misc_feature (758)..(760): n is a, c, g, or t
  misc_feature (762)..(762): n is a, c, g, or t
  misc_feature (764)..(766): n is a, c, g, or t
  misc_feature (768)..(768): n is a, c, g, or t
  misc_feature (771)..(775): n is a, c, g, or t
  misc_feature (777)..(780): n is a, c, g, or t
  misc_feature (782)..(786): n is a, c, g, or t
  misc_feature (789)..(789): n is a, c, g, or t
  misc_feature (792)..(793): n is a, c, g, or t
  misc_feature (795)..(797): n is a, c, g, or t
  misc_feature (802)..(803): n is a, c, g, or t
  misc_feature (807)..(810): n is a, c, g, or t
  misc_feature (812)..(813): n is a, c, g, or t
  misc_feature (815)..(817): n is a, c, g, or t
  misc_feature (820)..(822): n is a, c, g, or t
  misc_feature (825)..(828): n is a, c, g, or t
  misc_feature (830)..(832): n is a, c, g, or t
  misc_feature (834)..(834): n is a, c, g, or t
  misc_feature (837)..(838): n is a, c, g, or t
  misc_feature (841)..(841): n is a, c, g, or t
  misc_feature (843)..(843): n is a, c, g, or t
  misc_feature (845)..(845): n is a, c, g, or t
  misc_feature (849)..(850): n is a, c, g, or t
  misc_feature (852)..(852): n is a, c, g, or t
  misc_feature (856)..(856): n is a, c, g, or t
  misc_feature (858)..(858): n is a, c, g, or t
  misc_feature (860)..(860): n is a, c, g, or t
  misc_feature (862)..(862): n is a, c, g, or t
  misc_feature (864)..(864): n is a, c, g, or t
  misc_feature (867)..(867): n is a, c, g, or t
  misc_feature (869)..(871): n is a, c, g, or t
  misc_feature (876)..(877): n is a, c, g, or t
  misc_feature (879)..(879): n is a, c, g, or t
  misc_feature (882)..(884): n is a, c, g, or t
  misc_feature (891)..(891): n is a, c, g, or t
  misc_feature (893)..(894): n is a, c, g, or t
  misc_feature (897)..(899): n is a, c, g, or t
  misc_feature (901)..(909): n is a, c, g, or t
  misc_feature (912)..(912): n is a, c, g, or t
  misc_feature (914)..(916): n is a, c, g, or t
  misc_feature (918)..(924): n is a, c, g, or t
  misc_feature (930)..(931): n is a, c, g, or t
  misc_feature (933)..(934): n is a, c, g, or t
  misc_feature (936)..(938): n is a, c, g, or t
  misc_feature (940)..(940): n is a, c, g, or t
  misc_feature (942)..(942): n is a, c, g, or t
  misc_feature (946)..(951): n is a, c, g, or t
  misc_feature (953)..(955): n is a, c, g, or t
  misc_feature (957)..(959): n is a, c, g, or t
  misc_feature (961)..(962): n is a, c, g, or t
  misc_feature (964)..(964): n is a, c, g, or t
  misc_feature (968)..(969): n is a, c, g, or t
  misc_feature (972)..(972): n is a, c, g, or t
  misc_feature (977)..(978): n is a, c, g, or t
  misc_feature (980)..(981): n is a, c, g, or t
  misc_feature (983)..(984): n is a, c, g, or t
  misc_feature (989)..(989): n is a, c, g, or t
  misc_feature (992)..(993): n is a, c, g, or t
  misc_feature (997)..(997): n is a, c, g, or t
  misc_feature (999)..(999): n is a, c, g, or t
  misc_feature (1001)..(1003): n is a, c, g, or t
  misc_feature (1005)..(1006): n is a, c, g, or t
  misc_feature (1009)..(1011): n is a, c, g, or t
  misc_feature (1014)..(1015): n is a, c, g, or t
  misc_feature (1017)..(1018): n is a, c, g, or t
  misc_feature (1023)..(1023): n is a, c, g, or t
  misc_feature (1025)..(1025): n is a, c, g, or t
  misc_feature (1028)..(1034): n is a, c, g, or t
  misc_feature (1038)..(1041): n is a, c, g, or t
  misc_feature (1043)..(1044): n is a, c, g, or t
  misc_feature (1047)..(1048): n is a, c, g, or t
  misc_feature (1050)..(1050): n is a, c, g, or t
  misc_feature (1054)..(1055): n is a, c, g, or t
  misc_feature (1058)..(1058): n is a, c, g, or t
  misc_feature (1062)..(1064): n is a, c, g, or t
  misc_feature (1066)..(1067): n is a, c, g, or t
  misc_feature (1071)..(1073): n is a, c, g, or t
  misc_feature (1075)..(1076): n is a, c, g, or t
  misc_feature (1079)..(1079): n is a, c, g, or t
  misc_feature (1085)..(1088): n is a, c, g, or t
  misc_feature (1090)..(1091): n is a, c, g, or t
  misc_feature (1093)..(1093): n is a, c, g, or t
  misc_feature (1095)..(1096): n is a, c, g, or t
  misc_feature (1098)..(1098): n is a, c, g, or t
  misc_feature (1100)..(1100): n is a, c, g, or t
  misc_feature (1103)..(1104): n is a, c, g, or t
  misc_feature (1106)..(1107): n is a, c, g, or t
  misc_feature (1109)..(1111): n is a, c, g, or t
  misc_feature (1114)..(1115): n is a, c, g, or t
  misc_feature (1117)..(1117): n is a, c, g, or t
  misc_feature (1119)..(1122): n is a, c, g, or t
  misc_feature (1124)..(1124): n is a, c, g, or t
  misc_feature (1126)..(1127): n is a, c, g, or t
  misc_feature (1129)..(1129): n is a, c, g, or t
  misc_feature (1131)..(1131): n is a, c, g, or t
  misc_feature (1135)..(1135): n is a, c, g, or t
  misc_feature (1137)..(1137): n is a, c, g, or t
  misc_feature (1139)..(1139): n is a, c, g, or t
  misc_feature (1142)..(1144): n is a, c, g, or t
  misc_feature (1147)..(1147): n is a, c, g, or t
  misc_feature (1150)..(1154): n is a, c, g, or t
  misc_feature (1156)..(1158): n is a, c, g, or t
  misc_feature (1160)..(1160): n is a, c, g, or t
  misc_feature (1162)..(1167): n is a, c, g, or t
  misc_feature (1169)..(1171): n is a, c, g, or t
  misc_feature (1173)..(1173): n is a, c, g, or t
  misc_feature (1176)..(1177): n is a, c, g, or t
  misc_feature (1179)..(1179): n is a, c, g, or t
  misc_feature (1184)..(1186): n is a, c, g, or t
  misc_feature (1188)..(1188): n is a, c, g, or t
  misc_feature (1191)..(1192): n is a, c, g, or t
  misc_feature (1194)..(1194): n is a, c, g, or t
  misc_feature (1200)..(1200): n is a, c, g, or t
  misc_feature (1203)..(1205): n is a, c, g, or t
  misc_feature (1208)..(1210): n is a, c, g, or t
  misc_feature (1212)..(1213): n is a, c, g, or t
  misc_feature (1216)..(1217): n is a, c, g, or t
  misc_feature (1219)..(1220): n is a, c, g, or t
  misc_feature (1222)..(1222): n is a, c, g, or t
  misc_feature (1225)..(1225): n is a, c, g, or t
  misc_feature (1230)..(1230): n is a, c, g, or t
  misc_feature (1233)..(1237): n is a, c, g, or t
  misc_feature (1239)..(1241): n is a, c, g, or t
  misc_feature (1244)..(1246): n is a, c, g, or t
  misc_feature (1248)..(1250): n is a, c, g, or t
  misc_feature (1252)..(1252): n is a, c, g, or t
  misc_feature (1255)..(1257): n is a, c, g, or t
  misc_feature (1259)..(1260): n is a, c, g, or t
  misc_feature (1262)..(1264): n is a, c, g, or t
  misc_feature (1266)..(1266): n is a, c, g, or t
  misc_feature (1268)..(1268): n is a, c, g, or t
  misc_feature (1270)..(1270): n is a, c, g, or t
  misc_feature (1272)..(1272): n is a, c, g, or t
  misc_feature (1275)..(1279): n is a, c, g, or t
  misc_feature (1281)..(1283): n is a, c, g, or t
  misc_feature (1285)..(1286): n is a, c, g, or t
  misc_feature (1290)..(1294): n is a, c, g, or t
  misc_feature (1297)..(1300): n is a, c, g, or t
  misc_feature (1302)..(1302): n is a, c, g, or t
  misc_feature (1304)..(1304): n is a, c, g, or t
  misc_feature (1306)..(1309): n is a, c, g, or t
  misc_feature (1311)..(1316): n is a, c, g, or t
  misc_feature (1318)..(1318): n is a, c, g, or t
  misc_feature (1321)..(1323): n is a, c, g, or t
  misc_feature (1327)..(1327): n is a, c, g, or t
  misc_feature (1332)..(1336): n is a, c, g, or t
  misc_feature (1340)..(1341): n is a, c, g, or t
  misc_feature (1343)..(1345): n is a, c, g, or t
  misc_feature (1347)..(1349): n is a, c, g, or t
  misc_feature (1351)..(1366): n is a, c, g, or t
  misc_feature (1369)..(1369): n is a, c, g, or t
  misc_feature (1372)..(1377): n is a, c, g, or t
  misc_feature (1380)..(1381): n is a, c, g, or t
  misc_feature (1383)..(1383): n is a, c, g, or t
  misc_feature (1385)..(1387): n is a, c, g, or t
  misc_feature (1389)..(1391): n is a, c, g, or t
  misc_feature (1393)..(1396): n is a, c, g, or t
  misc_feature (1399)..(1399): n is a, c, g, or t
  misc_feature (1403)..(1403): n is a, c, g, or t
  misc_feature (1405)..(1405): n is a, c, g, or t
  misc_feature (1407)..(1410): n is a, c, g, or t
  misc_feature (1413)..(1415): n is a, c, g, or t
  misc_feature (1419)..(1419): n is a, c, g, or t
  misc_feature (1421)..(1422): n is a, c, g, or t
  misc_feature (1424)..(1424): n is a, c, g, or t
  misc_feature (1426)..(1428): n is a, c, g, or t
  misc_feature (1431)..(1431): n is a, c, g, or t
  misc_feature (1434)..(1436): n is a, c, g, or t
  misc_feature (1438)..(1438): n is a, c, g, or t
  misc_feature (1440)..(1440): n is a, c, g, or t
  misc_feature (1443)..(1443): n is a, c, g, or t
  misc_feature (1446)..(1448): n is a, c, g, or t
  misc_feature (1450)..(1452): n is a, c, g, or t
  misc_feature (1454)..(1455): n is a, c, g, or t
  misc_feature (1457)..(1458): n is a, c, g, or t
  misc_feature (1460)..(1460): n is a, c, g, or t
  misc_feature (1463)..(1469): n is a, c, g, or t
  misc_feature (1472)..(1472): n is a, c, g, or t
  misc_feature (1474)..(1477): n is a, c, g, or t
  misc_feature (1480)..(1480): n is a, c, g, or t
  misc_feature (1483)..(1484): n is a, c, g, or t
  misc_feature (1487)..(1488): n is a, c, g, or t
  misc_feature (1490)..(1491): n is a, c, g, or t
  misc_feature (1495)..(1496): n is a, c, g, or t
  misc_feature (1498)..(1498): n is a, c, g, or t
  misc_feature (1500)..(1506): n is a, c, g, or t
  misc_feature (1508)..(1510): n is a, c, g, or t
  misc_feature (1512)..(1515): n is a, c, g, or t
  misc_feature (1518)..(1520): n is a, c, g, or t
  misc_feature (1523)..(1529): n is a, c, g, or t
  misc_feature (1531)..(1543): n is a, c, g, or t
  misc_feature (1545)..(1545): n is a, c, g, or t
  misc_feature (1547)..(1548): n is a, c, g, or t
  misc_feature (1551)..(1551): n is a, c, g, or t
  misc_feature (1556)..(1557): n is a, c, g, or t
  misc_feature (1563)..(1570): n is a, c, g, or t
  misc_feature (1572)..(1572): n is a, c, g, or t
  misc_feature (1574)..(1575): n is a, c, g, or t
  misc_feature (1578)..(1578): n is a, c, g, or t
  misc_feature (1580)..(1582): n is a, c, g, or t
  misc_feature (1584)..(1586): n is a, c, g, or t
  misc_feature (1589)..(1591): n is a, c, g, or t
  misc_feature (1593)..(1594): n is a, c, g, or t
  misc_feature (1596)..(1596): n is a, c, g, or t
  misc_feature (1600)..(1601): n is a, c, g, or t
  misc_feature (1603)..(1603): n is a, c, g, or t
  misc_feature (1611)..(1613): n is a, c, g, or t
  misc_feature (1615)..(1616): n is a, c, g, or t
  misc_feature (1619)..(1622): n is a, c, g, or t
  misc_feature (1624)..(1628): n is a, c, g, or t
  misc_feature (1630)..(1631): n is a, c, g, or t
  misc_feature (1633)..(1633): n is a, c, g, or t
  misc_feature (1637)..(1638): n is a, c, g, or t
  misc_feature (1640)..(1640): n is a, c, g, or t
  misc_feature (1644)..(1645): n is a, c, g, or t
  misc_feature (1648)..(1650): n is a, c, g, or t
  misc_feature (1652)..(1655): n is a, c, g, or t
  misc_feature (1672)..(1672): n is a, c, g, or t
  misc_feature (1711)..(1711): n is a, c, g, or t
  misc_feature (2019)..(2019): n is a, c, g, or t
  misc_feature (2988)..(2988): n is a, c, g, or t
  misc_feature (3184)..(3184): n is a, c, g, or t
  misc_feature (3340)..(3340): n is a, c, g, or t
  misc_feature (3586)..(3586): n is a, c, g, or t
  misc_feature (3707)..(3707): n is a, c, g, or t
  misc_feature (3758)..(3758): n is a, c, g, or t
  misc_feature (3792)..(3792): n is a, c, g, or t
  misc_feature (3957)..(3957): n is a, c, g, or t
aanaanatnntntntnncnncnnnnnnannnaagnctangnnagnaagnaatgtagnntgganntnatnnntnangngnnagnanctnancnaannnnannnnnnnannnaaaacnannnngannngncnnnccnaaacaaananngaggncnnnncngcccnggcncgggcnngncaggaantcnanncngcngcccnanngnaacncnnccnancnannnnncnngcngnngannananaaancnnnnnnnnnanganngnnagcnnnncaangcncancnnnngcancnnnannnaannnnnnnnnnggaanngnngnggcngngnnngnnnngnttgnntncnggnnnggngntnnggnnntnggntgcgnnccnggccnnggcnncnntncntnnnnnnntnnngnntnnngnggnngtnnnggnncgtgangnananannnanncccnngcnnnnnngnnngncgnnnnngtggnngnnnnggcnnnncnnnccggcnngggngnggannnnnnggcccgnnnnangggnanggnnangnnacnnncnannnatnngnnnnngnnngnnnnncanncngatnnnnnnnnncgnnngcnngcnnnncgnnnngnngnnnnnnnngcngatnggnngagnccagncnancggnnnnnnncgnacnnnncnnnnnntnnggnnnngnnnnaannaannaaanaagnnnnngcncgnctnntnnnnntntnnnnnnnacnnnnnntcncntnnctnnncngnnncnaannnnntnnnntnnnnnganagnnannnttttnntttnnnntnntnnnttnnnttnnnntnnntntcnnccngncnggannanatananantntnttntnnnttcanntnaannnaattatntnnatnnntnnnnnnnnngantnnntnnnnnnngaatgnnannannncnanacannnnnnannnannnannanacannaancaacnnanncnnctcanatnngatncncnnnanncannnaannannaaacnanacnnnnnnnatannnngnnatnncntgtnntgnattnnntnnattnnntnnttntctatnnnnanngnanngnantgnngnntnnnttnntntnnnngntnncnanttcntntntcnnnccnacnnnnnannnangnnnnnnannnantanntntagtnnngnatnnantaattnatnnntannngnnagnngnntngcntggcncgnnnnnannnaannnannnanatnnngnntnnnangncnanccnnnnnannnannagannnnnatnnnntncngnnnngnnnnnncngannnagcnatgtnnnnnatgnntnnnannngnnnnnnnnnnnnnnnngcnatnnnnnngtnnantnnntnnntnnnnccngccngnannnnatnnntgcncnncncnnnccnaannnanantanaannnannngnngnncnggnnnnnnnccnannnnganganntgnngnngcgnngngnnnnnnncnnncnnnnaannnaannnnnnntnnnnnnnnnnnnnanannaantaatnnatcgannnnnnnntnanntanannnannnaannnanntnattnntnaagtaaannnanncannnntnnnnngnncnggcnngnttgnntgnnngnnnncttgatgtcctggtgcnttggtgccggtgggtcctgtgatgcgcccttgcccgcancgccttacagtacgccctgtttccgggctgccgccaccgccgatgtccgcgaccgcacccctaatttgtcgtaaatgtgcaccaggtggcttttcaccgtggcctccgataataataaggtccgaccaatctctcggttggacgaccccgacgccaccagctttaaaacctccaactcccggggagtgagcgaagtccggggagtacgcacccgggtcatgagccggttggccaccgtgggcgacagggtggagtctccctcggcggcggaacgcaccgctgctaagagctcctccggtggggcgtcnttgagtagatagccgagtgccccggcctcgatggcgcccagaatatcggcgtcggtgtcatagttggtgacgaccaacacatgcggcggtttctccatggtgcgtttgatttccgcggtggcgtcggcgccggtggcaagccgggtgccttcaaccccggggccaaatcgcaggtccatgaggatgacatctatgccaccggcctgggcggcggcgatagccgcttccgcggtggcgacctcaccgatcacttcgatgtcgtcggcgctttctagtactgcccgtagtcccagacgcacgatctcatggtcgtcggcaagcaaaacgcgaatcataacagggtccttactattggatacatcaaagccaaactaacatagctcatgcttactcggtactctcaaccggcaatgccaccgtcaccgcagtaccctcacctggttgcgactctacctccagtgtgccacctaattccgccgctcgctgccgcatagcgttaattccgatatgtcccaggccagccggccgatccgcaacatcctgtggcacaaaaccgtcgccgtcatccaccacgtccaggcggatttcgtcggcggaataggtgagcgtgacggcacaccgggtagcattcgcatgctttgcgacgtttcccatcgccccctgcccaatccgcaacaaggcggcctcagtcttcatgggcaactggcgttcatcgccatccacctgaatgctccagtccacccccacgaagctttccgccacccggtgcagcgccccctccagggaggttttactgagcgccgccggctgcagcgccgcaatcatggcgcgggcctcggagagattatccgccgcggtgttccgcgccaactccatgtatttgagcaccttggttttctccgccgcggcgagggcggactgttctatctcctgctcccccacccgcagcagcatttggatggaggacangccctgggctagggtgtcgtggatttcgtgggcgatccgctggcgttcggcaacaatgccggcggcccgttcggttgccgccaattgggatcgggtttcgatcagctcatcaatgagttcttcccgctccctggcccctttccacagggcttggaatgccaggtgaataccaatgaccaccagggccgatgcggtnggccccatcaccgccccataggtgaggtgggctctaaagttgaggattgccacgcaggtcgccccgacgacggcgatcatgccccgatagtccgggaggacccgcaggtagaggaagaagagcgggaaaacgcagtacacgctgacgggaatgatnggcagcataatcacccagacggcggtcagcccggccagccacatgattttcagcatgagccggtcccggatgcgggtcaccgccatggtgtagaagaaggcgaagagaatacagagaatgaccgccacaatggcggcctgcacatcttgagtgcgcaccgccgcccccagcgccccaatgagaagcgccacggttaatatgttcatggcacgccggtagttggcggcccccggctgtgaatcgtangttgacacatctcccgcagcaatattgcttttcgatgcttctagctggttcgatttcatacccgaactatactcactctaggctatagaccatgaatcgcactgcacgttccggcatggtnctcctcgcctgcctcacctgttttgttggtcttaccggactcaccggttgnagcagctcaggtgatataggtaatggtactgtgnccgcctcggcttccgcggcccctacggccccggtgttggacagtaatctcccggttgatgccctcccggtgatacctgccggtaagtccgaaatggttccctgcccctacctggatacccaatgggtggcgaacaccaatgggcagcgcatgatcggccagggtntcgacgcccggtttaacaccccggcctgcgtgttttggtcctt

SEQ ID NO: 1394 - DNA, 4000 bp, Escherichia coli
actgggcgacgttctccgggctgagcatctcgatcggtgacgtcgcgacgcccgacaacaaggcggagatcctcgaggagtacgagggccgtgcggcgaagatccaggctcagtacgacaagggcctgatcaccgacgacgagcggcgtcaggagctcatcgaggtctggacgcaggcgaccgacgtcgtcgccaagtccatgcaggaggcgttcgacccgaggaacccgctgttccgcatggtcagctccggtgctcgaggcaactggatgcaggtccggcagatcgccggcatgcgtggcctggtggcgaaccccaagggcgagatcatcccgcggccgatcaagtccaactaccgcgagggtctgtccgtcctggagtacttcatcgccagccacggtgcccgcaagggtcttgccgacaccgccctgcggaccgccgactcgggttacctgacccggcgtctggtggacgtgtcgcaggacgtgatcgtgcgtgaggacgactgcggcaccgaccgtgggctcgtcatgccggtggcgcagacgggttccgacggcaaggtgcgccggcacgaccgggtcgagaccagcgtctacgcaaggacgctggccagcgacgtggtcgccgccgacggcacggtcgtcggccacgccggcgaggacgtcggggacctgatcatcgaccgggtgatcgcggccgggatcaccgagctgaagatccggtccgtgctcacctgcgagtcgcgggtcggcacgtgcgcccggtgctacggccgttcccttgccaccggcaagctggtggacatcggcgaggccgtcggcatcatcgcggcgcagtccatcggtgagccgggcacgcagctgacgatgcggaccttccacaccggtggtgtggcatccgcggacgacatcacgcagggtctgccgcgcgtccaggagctgttcgaggctcgcacccccaagggcgaggcgccgatcgcggagtactcgggtcgggtcaccatcgacgactccgagcggctgcggcggatcgtgctcgcaccggacgacggcgcggaggagatcgcctacccgatcagcaagcggtcgcgtctactgatctccgacggccagcacgtcgaggtcggcacccagctggtgcagggcaaggtggaccccaagaaggtcctccggatcctcgggccgcgtgcggcgcagaagcacctggtggacgaggtccaggaggcctactcctcgcagggcgtcgacatccacgacaagcacatcgaggtcatcgtccggcagatgctgcgccgggtgacggtgctcgactccggcgacaccgacctgctgcccggcgagctcgccgagcggggtcgcttcgaggacgccaaccgacgcgcgatcgccgagggcgtccagccggcgtcgggccgtccggagctgatgggcatcaccaaggcctcgctcgcgacggactcgtggttgtccgcggcctccttccaggagaccacaagggtgctcaccgaggccgccatgagcggacgcagcgacccgctgctcggcctcaaggagaacgtcatcatcggcaagctcatcccggcgggtaccggtctgccccggtacggcaacgtcacggtcgagccgaccgaagaggcgaaggccgagctgtaccccagcttcgggtacgacgagatcgacttcccgccgttgggcatgggctccggagaggccatcccgctcgacgagatcgacttcggcgacctgcgctgacccgcgcgcgccacgtcccttgcccggactggtcgggacgccgtgcgcgccggcaacgacgaggggcccactgcaccggtgggcccctcgcccatgtccgtcggctgcccgggggaccggaacaacggcgtgcccggtcgtgttggcatgagcaggccacggtggcgggatgctgcgcgccgtacggggaggatccgctttgacggtgtgtcgccaggccaggtaacgtaagcccttgtgcccgcgccgtcgggccctcgcgcgtgctccgcgtcctggcgatcgtcctgatggacggcgtcggcgctggcgccgggtggtgaaccacctaccgcgcggtcccaccgaccagatgttcttggcggtcggcgccgcgttcgagtaggccgacacacccgggtgcgggggtcggcgcgacatgaaagacccaggtccggcgacgggcctcatgaccgggcatggcccggttcgaccatacgaccagcagaagacggagacgcagtgcccacgatccagcagctcgtgcgcaagggacggacgtcgaaggtgacgaactccaagacgccagccctcaagggcagccctcagcggcgcggtgtgtgcacccgcgtctacacgacgacgcccaagaagccgaactcggcgctccgcaaggtcgctcgcgtgaagctctccagccagatggaagtcaccgcgtacatccccggtgtcggccacaacctgcaggagcactcgatcgtgctcgtccgcggcggtcgtgtgaaggacctgccaggtgtgcgctacaagatcgtgcgcggcgccctcgacacccagggggtcaagggccgcaagcaggctcgcagccgctacggtgccaagaaggagaagcgctgatgcctcgcaagggaccggccccgaagcggccgctgatcatcgacccggtctacgggtcacccctggtcacccagctgatcaacaaggtgctcctcgacggcaagcgctcggttgcggaagccatcgtctacggcgccctcgagggtgcccgggagaagaccggcaacgacccggtcgtcatcctcaagcgcgcactggagaacgtgcggccggccctcgaggtgcggtcccgtcgagtcggtggcgccacctaccaggtgccggtcgaggtgcgccccgtccgggccaccacgctggcgctgcgctggctggtcgacttctcgcgcgctcgtcgcgagaagaccatgaccgagcgcctgatgaacgagctcctcgacgcaagcaacggccttggtgccgcggtgaagcgtcgcgaggacatgcacaagatggccgagtcgaacagggcgttcgcgcactaccgctggtgagaccagccgcctgacggctccccccgatcgcagtagaagggcttcacacgtggcactggacgtgctcaccgacctcaagagggtccgcaacatcggcatcatggcgcacatcgatgccggcaagaccactgtgaccgagcgggtcctcttctacaccggggtcaactacaagatgggcgagacgcacgacggcgcctcgaccatggactggatggagcaggagcaggagcgcgggatcacgatcacgtccgccgcgacgacctgctactggcagggccaccagatcaacatcatcgacaccccgggtcacgtcgacttcaccgtcgaggtggagcgctcgcttcgcgtgctcgacggtgccgttgccgttttcgacggcaaggagggtgtcgagccccagtccgagacggtgtggcgccaggcggacaagtacaacgtcccgcgcatctgcttcgtcaacaagatggacaagctcggcgcggacttctacttcaccatcgacacgatcatcaaccggctcaaggccaagccgctgccgctgcagctgccgatcgggtccgagcacagcttcgtcggcgtcgttgacctgatctaccgtcgtgcgctcacctggcgcgacaacgtgggcaagggcgaggactacgcgatcgaggacgtaccggccgagatggtcgagcaggtcgagctgtaccgcagccggctcgtcgaggccgtggccgagagggacgacaagctgctcgagaagtacctcggcggcgaggagctgaccccggaggagatcaagagcggcatccgtgccctcaccatctccggtcaggcctatcccgtgctgtgcgggtcggcggtcaagaacaagggcgtgcagcccgtgctcgacgccgtcatcgactacctgccctc

SEQ ID NO: 1395 - DNA, 4000 bp, Escherichia coli
  misc_feature (1)..(469): n is a, c, g, or t
  misc_feature (476)..(476): n is a, c, g, or t
  misc_feature (1985)..(1986): n is a, c, g, or t
  misc_feature (2457)..(2457): n is a, c, g, or t
nnnnnnnnnnnnnnnnnnnnnnnnnnnnnnnnnnnnnnnnnnnnnnnnnnnnnnnnnnnnnnnnnnnnnnnnnnnnnnnnnnnnnnnnnnnnnnnnnnnnnnnnnnnnnnnnnnnnnnnnnnnnnnnnnnnnnnnnnnnnnnnnnnnnnnnnnnnnnnnnnnnnnnnnnnnnnnnnnnnnnnnnnnnnnnnnnnnnnnnnnnnnnnnnnnnnnnnnnnnnnnnnnnnnnnnnnnnnnnnnnnnnnnnnnnnnnnnnnnnnnnnnnnnnnnnnnnnnnnnnnnnnnnnnnnnnnnnnnnnnnnnnnnnnnnnnnnnnnnnnnnnnnnnnnnnnnnnnnnnnnnnnnnnnnnnnnnnnnnnnnnnnnnnnnnnnnnnnnnnnnnnnnnnnnnnnnnnnnnnnnnnnnnnnnnnnnnnnnnnnnnnnnnnnnnnnnnnnnnnnnnnnnnnnnnnnnnnnnnnnnnnnnnnnntaacaangcgatagtcgccggcaaccgtaatgcagccgaagcagcacttaaggttgctataaagaacctggacagagccgccgagaaaggcatcatccacaagaacaacgccgccaacaaaaagtcacgcttgacgaaaaagctcaacaaagtcggcgtttaggcgcattaataagctagagtatagcaggctctcacgccgttcgagcctgcatttaaaaaccaaccgagtccaagtggttggttttggctttcttattggttcagactattgttagaggtacttaaggaagctcttggatcttatagttatcaaactgaacgtccatgaaatctgtgcgaataccggcatattgcttgtctagaaatggtttgccgccgtacttcttcccatcatccgtcgcttcacagataagcttccagttgcctttccagttttcatccatgaaaagctttatactgacggttttatctttgttcgtggtcacaatgcttctcaaaccgatccattttttctttggtagcagattcgggttactcttccggtcatactcagttccaggaaatatctgcttcaaagccatggtgtaatacacacctttgattttcttctttacgaccgcataaccatcgacccgtattcccgtatagtaaagattgtagccatcttgatacctattaaagaggagtaacccatttgacgcttggcgatgctcatcaccgctgagattatcggcagtgattttaaagtaggcatcttgctgaagattccgccacttacttcttgtcacaagcctgaatatgttttgtgggtgatatccattatctgtttccgcagggttgcttgaaccgtatttctgacgccataaggccgattctgcaagccttccttggatggtctggccgactccattctttacgacgaaaagtccccccgaattcaaccaccaattagtgctcaggcttttatacattttgcccgcttcttgtaacacataggtcttgccgaaagtatctttaaatgagggcaattttggggtcgcaacttttttactctgcgccataacttgagggctcttatcgcgattcgtaattatcgcgaaagaaatccctaggcttgctattaatattacgataacgaaaatgagcacttttttcatgtttcctcttattgggcacagcaatctcgcgaaaatttatctaatgtttttattacatatagtttagcgcatagttctaagatgacaaagggcttaaaaccttcgaagctatcggccgaactttattatggaaagcactatagcaaggataaaggctttaactttatcaagtaaccccagaaagccctttctcttaacgtctattgtagcagttagctgcgcaggtttatatttagtaatcttaagtttgagctccggcacatggttcagacgatcaagctcactaaaggtgaccacttttatcttttgatcggcgatgtctttgacaaccgcctcgaatttgccaagatcgtagnntatatacgtcttctgtttggttgtgtaagttcccgaccatattctatgaaaaacaagaattaacgtcagcttgtgcagttttgcgtcagctacggcgttatgaacctcgctgagttttgttgtgtcaaagacttcaaatatctttactgcataagggtcgccgaatggataaacctcgggctgcttgctgactgaacgagcaaatctatagtacttgctcacaatctgcttaacggatggattggtcgcaccatttgggtaaacgtaccagttaggcgcagagttgatcccattctcctcaagatattctgcaccatcaacaatatcttgttcaaaccctgccagatcgcctttttcataataatacgtaagcgcgtttctgtggtgcgcagagtgactaacaatatcccaaccgttaatgttctgcattctcttaagctgggtaagcgttaagtaccctctaatttggcnatcaggacgttctgcggtaactgccacgttccctttgatgccatatctattcatcaccggtaatgcatccagaacagactccgaaccatcgtcaaagcagataaccgtccgcccttcatcttgccctggcactgttgcaagcgagtcgagattaagcgttacttttttacctttgactgctgaaaggctaaagcctatcctatcgatcttggaccaatcaaagcctgaaccgaaaaatcgccactgcccttgaatatttcttaatgatcctttccctagagatattgtcatccaattgttatcgtcagcaactgcataagcctctcgcagatcgcacgaagcgtaaccctgccaattatgcgacgataggtctatggtgagattgtcacactggcttatgttcgaagctttcatcctaaccagaagattcttattagaaaggtcaaggttggtgcgcttggttatggaaagtcttgaaccgtcttcagatgaaactagacgtaagttctttttgccttgataaccttgataacaatcgatctctatcgaaccaccacgactatcgcgccgcttccaatctttttcattctcgaacttttcaattgcggtccacttaggtagcgattcttgctgtttttgtttgactatggttatattggtatctttgcccggcaactcgctagtcgcaatagagtactttacatcactcgtagaaatcgtcagggttttatctttctttgtgctggctaatacttttgctgaaagagttttatcctgcttgccaatttcaagcagtgttataaagtctgcttctttcccgcgcttttcgtatgatatcgaatagtttggaatagctttttcgtattcaaacgaacaaaaaccatcatatggttttgtttgcccttttacggctttaacggaaaggccatctgtgtttagctggcgtatggtaaccgcttgttctgggctcgccccgataccgcttaaagtcattccacttttcttgagcttagcctccgggaacaagtgaaacatttgttcatacttgtgctccttctttgaggttagctcatctatgatgacaacgaattttttacctaaaagtataacggccctcttgtgctttacgcccgtgtataaatcagattcagctgattggagagcatatccatcgccttccacaagggggtttgcgctaggtgcccctttatcctggtccttgccatcgacgactactgtattatgtgcgcgtgtgccatgaaaatagtctttcagcggcaagtgttcgtaggtataaagacccgaatcaggcatgagcggaattcccgccccaaaaagattgaaactaagcgcgtccatatcgctgtgctgtgtcctaaagggccctacgtcaagtattagttgcgtttgattcttatagtccttcccttgttcccaacctgaacgcatgattgtttgccccgcagtcggaaagtaaacgttaagcttcggaggcatatcgccttccttgccggcagtcagcgtataacgtaaataaggatcg

SEQ ID NO: 1396 - DNA, 4000 bp, Escherichia coli
  misc_feature (39)..(39): n is a, c, g, or t
  misc_feature (55)..(56): n is a, c, g, or t
  misc_feature (1990)..(1990): n is a, c, g, or t
  misc_feature (2435)..(2435): n is a, c, g, or t
  misc_feature (2494)..(2494): n is a, c, g, or t
  misc_feature (3323)..(3323): n is a, c, g, or t
aggttgatctggcccggggtgtcctgccagtcgggcagnccccgctcccagctgnncagccagtcggcccccagggcctccagccgagcctgctccaggcgcccctggatcggcggcaacagggccccggcctccggcagcagcgccacggcctgcatgtgccggtccaggtcctccgctcgggcagctcccacgctgatggtgtgcacccctggagccgtgaggcagaacaggtcgttgaacagaatcgggtgcaggggcgtgcacagctccagcaggcgggccgaggggctgtgcagatggccgcccttgtcggtggggctgatcacgaacacccccatgtcgtgggccgtggccgcctcgacggccggccggttgtcctggcggatgtaataccaatgcagattcacataatcgaaggcgtcgctctcgatcgcttcgaggatcaggggcaggggcccatgggtggagaaacccaccgaccccacccggccctccgcctgccaacggcgcaccacctccaggcagccgccggggcgcagggtgtgctccaggtgctccggcaggttgaggccgtggatcgccagcaggtcgacccgatccacccccaggcgctccaggctggtggccagctccgcctcgaacgccgccgcatccgcctgggggggcaccttggtctgcaggatgcgctggggatcgcgcacctgctgcagcagggccccgagctgccgttcggagctgccgtagtggcgggccgtttccacgtggtggaaccccagcgccacggcgtgctcaaggatgcggcgcaggttggcctggctctcggcgctgatgcgatccgccggcagatcactccagctctgctggaaacgcatgccccccagggagagcacgggcatgggcagttcggtgcggccgaagcgccgcacgggcacgggcgccatcagggggtggcggcgccgccggcgctgcggggcagggtgcggcgcggccgggccgggctcggcagccccaggggcagcaactcctgctcacggctctgctgctccagctccggcagctgctcgtagctcacccaatggatgcaatccacggggcaggtgtcgatcgcctcctggatccgttcggtgctgtcgccgtcctggcggatggcccgggagcggccccagtcgggctccaccacaaaggtgttggcggccacgttggcgcaatagcgacaaccgatgcacaccgcctcatccacccacaccgcctgttggcgcagggcaccccccagtaccggttcacggccactgggctcagggccggtggcggccggagcccggaaggcgaccgacggatccatcaccatggccgcagccgggggatcagccgtcccagcggctcaccaccagttcgatcgagccgtcggtggcctggcgctgctcggtcacctggaagccctcctccaaggaggccgccaggatgctgcgcagggcgtactgctgggtgagcttggccaggaaacgctccacggggatgggctgcttccagaggtcgaggtcggtcaccagctcatagctgccgctcgtggggttccagcggaagccgagctcgctgccctccggggaggccaccgccaggtcggcgagtaccgtctgaccgcggtagccgcgcaccggttgctcgccatcgctggggttgtggcccaggtcgcgcagggccgccacgagggcttcgcgatcacgcaattccgtcttgacggtgctgaagtgcgacatcaggtgaccggggtggagagggtctgctcggggttcaccgtggcggcctggccctggtaggcctcggcggtgggctggcgctgttgaacgttgccgagccgggcttcgatccgctcggtgagctgctcacagccagcgccgctgatgccgctcaccagctcctccacgcggccatccggacggatccgaaagctgatggtgtgctggggcatcccggcagtggacgggtngctggatgctaaccgcgccgcgcggaggttggcggttcaggccagcaggccctcgtccaccagggtctgcaggcgctccagcaccaggggatcctccagttgttccagggccaggcgcgcctcatcccgcaccgccaggtcgccgtcctgcagcatcgccgccagcagcgcctccaccacctcccgctggcggggctccaccaggtcgccgtagaggcgcccgagcgaccaggcgctgttgctgcgcaccgccgcctcgctgtcgatgcgcagggcgagcagcagctgcccggccgcctggtccgccttagccaggcccgtggagccggcatccgccagggcgctggcggcccagaggcgcacggcggcgatgtcggtttccagggcgcggatcagggggttcatcaccggcgcgtccgggtagctgctcaggctccaggccacngccttgcgcacgtagccgttgctgtcgttctggagcagggccaacagtggggtgatggnctgcagatcggggttgcgccccagggcatacacggcgctcatgcgcaggatcgggcagctggcctccagcaggggcagcagcagggccggagcgcgggggtcgcggtgctcacagaagatgcgcagcccctgcatgcactcctcatggttgccctgcagcagctgcaaaccgagatcgcattccgccgccacatccgcggcggccgcctccgccccctccagctcgtcgagggggtcccccagcagctcctgggccagctcccgggcgagcatctccggatcgagcgccaactcggccgggctctgggaaaactctgggtacgggccagtcatcggccgatcgtaaaagccggcagcggattcaaccccgaatcagcgggctgggtctgaatcaggagatcggtgccggggccgccatgtcccccggcagccagatgcgggcgctcacggcgaacagggccaggccgaacagcagcacgatggcggccggcaacagggtggagcggaaaaactgcacgggcctcagcggcggaatccccagtttgacgcgcctagcctgcggccgttcctgaatcgcccccgcggcgccgcgcccatggctccaccgcagcgccccgccgggcaccaggcccggaaccgttggcggcgcctgggggccatcagcgccgagggtttcgccagcggcgcccccaacagcggcctgggggaggtgctgccgatctggctggccacccatggggtgccggtggagctgatcggactgctgcccctggcggggttgccctatgccatcaaggtgctgtgggcgccgctgctggaccgctggccnatcccctggcccgaccggcggcggggctggatcgccctgctgcagctgctgctggggctgagcatcgccagcctggccctgctgcgccccagcaccgacccccacaccctgacggccatcggcctggtggccctgctggtggcggtgctcagcgccacccaggacatcgtgatcgacgcctaccgcaccgacctgctgccccagggggaacggggggccggggcagccgccaactccctgggattccggggcggcaccctgatcctgggctccggtgccctgctgatcgccggcagcgccggctatcccctggccttcgccttcgccggggggctgatgctgctgatgattccctgcaccctggcggcgccgcgcctgccgcccctggcccagcccgtgggcaacctgcgccaggcggtggtggggcccatccgcgaatttctggcccgcaccggcggccgccggggcctgcagatcctggccctggtgctgctgtatcgcctgcccgatggcctgctggcccccatgggggggccattcctggtggccgccgggctgagcgaagggcagatcggcctgctgaaatccgccctaggggtgctggccaccatggccggtgtggtgctggggggtgtgctgttcggccggctgggcatgaaccgcagcctgtggctgtt

SEQ ID NO: 1397 - DNA, 4000 bp, Escherichia coli
  misc_feature (1985)..(1985): n is a, c, g, or t
  misc_feature (1991)..(1991): n is a, c, g, or t
  misc_feature (2045)..(2045): n is a, c, g, or t
acttcttcaactcagagcaaagctctttagccaacaacctcaaactaatagacagccatcccagatagtacgccaaatagatgctatgctttctcgcatagaccttgcccagctcaaaactctacaatcttcagagagtgaatctgcaacaaaaagtgctcagcgcgagtgggttatcgagattccatttatggtagatgataaaccacacaatattgaactctacctccaacgccaatcgatacaagatgatgcgcaagaagatagttggcacattaagttaactctctctcctcccaatatgggagagatacatataagtgcaaaaatggggagcaaggagcttgacataaactttctaactgaggaccggcagagctctgccactatatctaataatttagataagctagaggcgacactctcatcctctggaattgagacaggcactctctttagtagacaactcactcctaatgatatagtgcagacagatatcctaaaaccaacaggtagtggtggcatcagtgccagagcgtaatctaagagttaaaaatgaagagtaaattagatatagctgttgcgctccgttatgaagagggagtaggagcaccaaaagtaactgcaaagggaaaaggcattattgctgaacaaatcatggagattgcacgggagaatgatatcccactatatgaggagcctgaactagtagagttactctctgccgttgaactagatcaggagattccagagacactatatatagcagttgcagagattattgcttttgtctatagaatagcagatgagaagagtagataagactactatttgtaactgttcatattgcctctaaaattcatcagatcaaggtacaaaatttgagcatatatttatatatgataattttgcaacgcagagatggtgaattttaggggtgagctgaatagttacgactattttttatgagtaaataacgacataaagaaaagtgtaactgcgctaaccacaatcgaagggcctgttggagtgtttaaccacatagatagattcaatccagcaaccacagatactcctcccaccataactgcaactgcagccatccgctctggagtattactaaattgacgcgcggttactgcagggattatcaatagagcagtcactagcaacattccaatcatcttcattgctaaagccactaccacagctatcaacaccataaatatcagctccacccttactactggcactccttcagcctgcgctaactctctatccacagttagagcaagtagaggacgccatattataaagagaattgaaagtactatagcaccgccgccatatatccagagtagatcttctactcctatagcgagtagatcaccaaatagataactcataagatcaatctgcaaccaacttatcatacttataactaatactccaagcgctaaggaggcgtgagagagggttcccaatacagcgtcactagtcaactctctacgcttctggagtagaaacaggaggagtgcgatagatattgccaccatcaatactcctaaagtaatattgactcctagtagaaaacctagcgccactccgagcagagctgagtgtgacattgtgtccccaagatatgacatcctcttccagaccacgaaacagccgagaggtccgctgactataattaagcctaccccacctaaaattgcccgccagaagaaatcatctaacatttgccatcaccgcattgctggattgtgccagatagatcatggcgatgatcatggttatgctgatagagagcaagctcatctccctgcccaaagaggcgcatatactctgggtctgcactcactgttgatgggtgcccttgacaacagatgtgttgatctatacatatcactctatccgtagatgccatcaccacatgtagatcatgtgataccataagtattgcgcagttatgtctatccctnattttnctaatcaacttatacatctcactctcaccaagatagtcgaccccttggacaggntcatccaacaccagaagctctggactacagagcagagttcgcgccaacattactcgctgaaattccccaccagagagattagagactgcagcatctataagataggcaactccactctcagccagtgcggagatcaccttcttctcactgtaatttgcagttagactcattatgcgccgcacggtaagtggtaaaactggatctatatcgaacttctgaggcagatacccaatccgtaacttttttctcctcttaacttgaccagaggttggggagattaaaccaagcaataggcggagcagtgtgctcttgccagccccatttggccctataatggtaactatctctccttgctggagcgtcaaagagacatcactaagcagaattttattattaaaactaagcgatatcccaacagcctctaaaagtggatcctcattaatattcataaaagttcaaatctattataatttgtaagatatatataagcataaagcatctattataacaaaaaaatatggggtaccgcttcgaaaggtacacccatatttaggaatgctcaatatctatacttctaagagtagagccatttaatcataaacgataacgattgtcaacactatttacaccctccctcttaaactcagcagcgcaaggataatcacgcttacgagctgtagatcatataccgctccctcttaatcatgtatcatgcatattatggatagattaaaattaatattaattacacttaactcacttgctttatgggtcatctcactctctgtaagttatgctctaccgccatctgtagtggtatcaagcaaaccattccactctctagttgctggggttatgagtgggatagcagaaccaaagctaattgttgatggactctactctccccacaactacactcttaaacctaaaaatgcagtagagatacagagtgcagatttgatcttttggggaggaagagagattgagccattcttgataagatcccttcaaaacttatccaagacaactactatatctataagtgagcttgataacctagagaagctaccactacgcaacataaaacaacatcagcatcataccgaaagcggtattgatccgcacctctggcttgaccctattaatgctattcacattattaaggggacagtaacagagttaagcagtatagatcccgataacagttcactctatcaacgcaatggcaaagatataatagttaaactagagctcctccatacacagttaacaggtatgagtgaagagattagagacatcccatttatggtgtaccatgatagctaccaatattttgaacaccgctatcaattaaagtctcttggagtaatggtgcaaaatataaaccatgcatcaagtgctggtagattagctttgatacgcaaacaactcgtaaagaataaagttcgttgtctctttagcgaaccacaattttcagaccgcctcgtaaaagttgcaactgatggaattacaacacaaataggctcattagatcctattggtgctagacttattcctggaccagaactatactttaacttaatggataatcttattaataacttgagcagctgcctaaaaaagtagacaaagagttgacgctttaatctggcacgaggattgcatctacgccttacatagatacactttgcatagatatagtgtgcatggatataattcgtatagatatagattttgcatagatgcaaatatttaatctcaatagaggataaagatatggctgatgaagataagaaggaagatgaggcaggagaagagaaagagtctggtggcagtatgctgcctctcatcataggtggagtatctctactactgaatattgctattttagtctatcttattctatttccatctggcggtggcaatggtgaggtgatcgccaaaatggcaactga

SEQ ID NO: 1398 - DNA, 4000 bp, Escherichia coli
  misc_feature (376)..(376): n is a, c, g, or t
  misc_feature (2332)..(2332): n is a, c, g, or t
  misc_feature (2394)..(2394): n is a, c, g, or t
  misc_feature (2576)..(2576): n is a, c, g, or t
  misc_feature (2988)..(2988): n is a, c, g, or t
  misc_feature (2994)..(2994): n is a, c, g, or t
  misc_feature (3718)..(3718): n is a, c, g, or t
  misc_feature (3721)..(3721): n is a, c, g, or t
ctgttcctgataaaccttcacccccaaaaggttgtgatccaaccacagctccaatttgattccgattgatatatatattgccagcattcactctcgatgaaacctccctgaccttcttatcaattcttgaatgaattccaaaagttagcccaaatccctttgaattgagtcggtcaatggttttctccaggccaccattcttatatgaaactacatgcaggattgggccaaaaaactcctcattaatgtcctcaattgaattcagttggatcaagataggtgaaacaaagtggccattttttggtacaaaatcgagctcttcaatgacttgatctttttgtcttgctttctcgatatactgttgcagtttaatttnagcagctgaattgatgaccggaccgcagtcaacatcaaggtgttttggatttcccaaacttagctctctcatcgcccccctaatcatactgatagcttcatcataacaatcatcctgaagcaatagtattctcagtgctgagcagcgttgaccagcgctcttaaatgcaccatcaataacgtcccttgtgacttgttcgcataatgcagtagagtcaaccaccatggcatttaaacctccagtttcagcaataactcttgcttctgagtttccacagtccattaaactttgttttatttttttagctacggctgttgaaccagtgaaagcaaccccagcaactagagcgctgctcgatagataagaacctatctgagaccccttacccaaacacaactgaaatagtccgataggaatgccggcctcgattaataactcactagccctataggcgataagtgaagtgctctctgctggcttagcaatgacggaatttcctgcggcaagagccgcagctatttgaccagtaaaaattgccaacgggaagttccatggactgatgcaaacaaaaacccccttagcttttctttggccaggcatcactattcttgataaatttgcataatacctcaagaaatcaactgcttctcgcacttcatccgttgcatcctggtaggttttcccagcctctcgcattgctagagtcattaactcgtattgatttttctcataaaggtctgccgccttctctagaccttgaagaatcatttcgtgttcgatcacattggagtcgaatgcaatttttgcagatacaagggttttctctaattgagactcattggcataaagaacatgtccaacgatgtcattcttttcagctggattggtgacctcttgatccagctcaccctcgacattgattccagcaatgattgattttgcttcccacttattactaagccatgagctttgattttcatagagttgatcgatagcatcctgttcagtcagaatgacgctgcgtgaattgtgacgattatttttaaagatgtcctttggtagttgaatcttggaatgagacctttctgaatcctgctctaccattgtaaagatatcacttgctaaactttcaggactgatactttcatcaaacaaatgattgataaaagaactgtttgcgccgttttccagtaagcgcctcattaaatatgctaacaactctttatggcttccgattggggcgtagacccttgagtgaaccctgtatttatttgaaatgacatggtgcaaagactcccccattccgtgaagcctctgaacttcatagccttcgttatcgcctgccatttcgcagacactgacgagtgagtgggcattgtgactggcaaattgagggaaaatgttgcccctcatcgctaatagtttttgagagcagactaaaaaagaataatcagtatttatttttttggtaaagaccggaaaatcaacatccccaagaatttgagacttcttaatttcgctatcccagtaggcccctttaactagcctcaccattattttcaaattgttctttttacaattgcgatacagccaatctatcacaaaggacgctcgcttttggtatgcctgaacaacaacgccgaagccctcccaagaagaattcctaattgtgttcatcactttgtcaataacatctaacgatatgtctagacgatcagcctcttcagcatcaatgttgattcctatgttatatttttgagcaatttgaactaactcaaggaccctaggtaataattctgacatcactctctctcgatgcataaagtcatactttgggtggagtgcagagagtttcactgaaatgccatttgccccagcgactgttttagatttgttgcgtttaccaatttcaatcaatgcatgtttataggcttgaaaatacttatcagcatcctncatagtccaagcggcctcaccaagcatatcaaacgaatagagaccattttttacatcgcgantcttaatagcactgttaatggattctgcaaaaacaaactgtttagcaaaaaattgcatgacgttgttagcgctaaaacgtatccctggcctagagagaatctctaaagcttttttaattctgctctttatttctttgttacttccatgcgcaatcattttgtcagcgatattaagcgctagngttgcaatgttaaccatagaagatttgctggtaccgatatgctgagaccaccccttctttgcaactttatcaataaataatttatccctagtcttattatcaggaacccttaaaaatgcttccactagggtcatgagagagagaccttcatcactcgtcagattgtattcagagacgaacaatgacagcagatcaggctgactagaggatctcagttgttgaattaagatagaagtgtttgtttgaaagtcaatccgttgatctgagctagtaagttcaaataattggagatgctttattgcatcgacctcactcatgacccttgcatctctcacattgcatcttacggaagagtaatcaactttaaatttgaggtgtgcttgactttccataaccaaaaaaattgctttanatattnatattttattttataagtgatagtgataatgactattaaattcaatattaaaagttttttgttatattatttttataatataattaacttaataactaatatattataaataataggaattatgactactatcgataactttgatcatagaatacttgagcttttgcagagcgacggacgaatgactatcaccgatctatctgatcagattgggttgtctaaaacgccctgcttgaagcgtgttcaaaagctagaggctgcaggatatattaaggggtatcaagcaatcattaatcatgatttaatcgaaaataatcacattgcctttgttcagataaagctcaacgatacaaaaacaaaagctctcaatgctttcaataaagccattaaagaagttcctgaggttgagcagtgccatatgattgcttcaaattttgattatttattgaaggtgagaactgaaaatatggagagctatagaaaagttctaggggaaaaaatttcggcactaccacatgttcaaaatagctccacttttgtcgtcatggaggaagtagttactagtcgatatgcctaattaagagagtttcgatttaatgagctgtgagacttgacccatatcagctttaccatccagctgactttttagaatacccatgagttttcccatatctttcatagagtccgctcctgtatcagaaatcgccttaacgacagctgcttnganctcatcttcaccaagctgcttaggcatgtaattattaataattaacaactctgcctcttcaacctcaactaggtcggttcggcctgcgtctgagaattgagagatagagtctttgcgctgcttaaccattttttgaatcacagccatgacttgattgtcatctaaatcaatacgttcatctatctctttttgtttgattgccccgaggatcatacgaatcgctttgagggcaggtttgtcttgggccttcatagccaacttcatgtcatcagtaatgag

SEQ ID NO: 1399 - DNA, 4000 bp, Escherichia coli
  misc_feature (596)..(596): n is a, c, g, or t
  misc_feature (720)..(720): n is a, c, g, or t
  misc_feature (1428)..(1428): n is a, c, g, or t
  misc_feature (1431)..(1431): n is a, c, g, or t
  misc_feature (1739)..(1739): n is a, c, g, or t
  misc_feature (1742)..(1742): n is a, c, g, or t
  misc_feature (2195)..(2195): n is a, c, g, or t
  misc_feature (2597)..(2597): n is a, c, g, or t
  misc_feature (2599)..(2599): n is a, c, g, or t
  misc_feature (2705)..(2705): n is a, c, g, or t
  misc_feature (3576)..(3576): n is a, c, g, or t
ggtgttccttttcgtggggctcttagtggttactttgtggtctcttatttataaactatatggaggactcttatgtctggaaattataaaggtaagtttgatgttgttgttaatacggtaaataaagtggtacttaaagagaatgcttcaggactctggtctaatgaaggtgaacttgttgatggtaaattaaagtatgatgttaaggcttgttatcaatggatgcttgatgtggctaaatcacagaaggctgagtttaaaccattcacaccgaatgcttcagcctctgacttagagccaacggttaagagtggtcgtggtgataaaccatacatggctatgttgagtgcatcagataactttggtgcttcaaacaaacgtactgttactgtatttgcaccacagtaatatcacagtaatatcatgggtggtctacacgacaccctttttatttgttttataactattaaaggagttaaatatgaaggttaaagatattattactggattagaagaagagtttaatcttgatgatgagttaattattgtatttgtatcccataaagagatgcaagaactaacagatggttggtggntaaaggtggttaatgcctatgataatgagccttatccgatagatgttaagactagtaacaaacatacactgcataggtcagtgattaaccacgttataacaactgcgaatactattaggggggntaactgatgactttaagagagtattactttgagactattggtcagtacagcgacaacatcgaccataactggatacactatcttgacagggggtatgatataacgacaggtgaactgttgtcgttgtatgaacttatgtacagccttaagcatccagaggactgcggtgcagtagagtcttcagcgactcgtatgatggttcttagggtaggtaaagcactcggtatatatagactatatatgcggtgggtagactaccttgaaaggagggctaactgatggctgaggatatcaagggttacaccatacacaagacatctaacagagatgcaaacattcacactaccaagagagagtcgtttgatggtagcaataccttcgggagatggagacatagggacttgtgggatacgagtgatgagttgtatatagtgtatagttatggtgagcatgagcctatgtatatttatagtacactgcttggtgagtggtttgagaatggtgacaagtatgactcgaactcaaccaagaggcactacacacaacttaagcctaggaacactgctactaccatcaagagccacttgtatatgaagaaggtggaacggcatggggtggttggggctaccagagagagggtagcacctaagggtacaaccagtacaagggctgagtcatgggttaatgggacatggaggtagtatgaancanttaaagttattctgcctcagatggggcaaaggtggacagatggtgtgtgatgtagagggtaatcccacatacttcggtgataagacggtggctaaacagcaccgagatgagagcatggtggtgtcatatggcattgaccataagaaatataactacgttaaaggagatgtaagatgagagcaacattgatgaaagaaacagtgaaggcgttattcccacagcagaggacgctgtgtatagagggtagtccaggtggtggcaagacgaccatagtgcatgaggttgctgatgaccttggggttgagtgnagngagttgcatatgccgactatgttggtggaggacttcgggatactataccccgacaaagaggacagtgacaacttaacataccgcttaccagagtggttcccgcaagagggtaaagcaccagataaagggatactgttgttcgatgacaggaaccaagcaggtgctgacttgcagaaggtactggctaacatctgtcaagcgaggactctacatggacacaagttaccagatggttggcaggttatctcaacgggtaacaggcagaaggatagagcaggggctaaccgtgtcctatcacaccttaggaatagggagacagtcgttgaccttgatacacaccttgatgactggagtgcttgggcaatagagcatggggttaagactgaggtggtgtcgttcatacggtttagacctaacttactgcatgacttcgacccacagagagagcagaangctacgccgaggagttgggtagatggtgtgagtgatgtgcttgggactgtgccaccagaggcagagtatgagtgctttaaaggggcagttggtgagggtgcagcagcagagttcgtagggttcataaggatatatcggaaactacctaacccagatgcaatcttgcttaacccaactactgctagtgtgccatcagaccctgcaacgctgtatgcattgagtggtgcgatagcagagagggcaacagaggacaacttcaacagggtgtgtacttatgcagagcgtatgccaccagagttcagtgtgttaagcatcagttatgcagcgaggaagaagccagagttggcaagtaccaaggcgtttacagactgggcagttaaacaccaagacatcttattttangnggaatgtatgaaacttacagataaagcactgctagtgcaacttaacatcagccagtggtcagcgaggaagtatgaccgcaaggttactaaagacatactgacacancatggtgcatcgatgggtgcagggaggttcaacaagagcctactgcctatgagtggacaccttgacagtgtgcataagaaagcgactgcgattaggcagaagtattacaccaacaccctaccatggggcattgagggaactcagatgttacctagtgcgaactacttggagtttatgacagcgtttcgcaaggagaaaggggaatgggagtcgcttgttgcagagttcataagtaattatagtagactaaaggaggacgccaagaggttactacctaatggactgtacaatgaaagcgactacccatgtgacgacagtatacacgagaaatttcgtatggatatggcagtattccctgtacctagtgatgactttagggttgagataggtgatgatgaactcaacagcatacagcaagatgttgagaggcgtgttgctgaggcgagtgaaattgctatggcagacatctggaaaagactgtatgatagagtgaaacatatgagtgagaagttagcagacccgaaggcagtctttagagatactatggtggagaacacacgagagttgtgtgctttgttgccacgccttaactttgctgatgaccctaaccttgaggacttacgacaacaagttgagggttctctgctgttacaccctgatgcactgaggaacaacccagtagtgcgacaggataaggcacgagaggctaaggatatcatggataagatgagtgcatttatggggtaactccataacacagtgagtgtatcactgccacactgcctgccccataattcatacgaggtggtgtgggttatagaacggtatggttgcaaccgtatacacagcaaccccctatttatcaattatngaggagattatgatggcactaccaccacgaataagagcatatacaccaagaccttgggagtacgaggactaccttggtgcaacaaggcgtaagagcaacgcagtcagtcagaaaagatggcttgaagttgttgcattactgaacactgagtacaaagatgagatggacgacgctgtgtactcaattattaaagagatagacaaggaggttggtgatgactgatgcaccacgaatgagatactttgttattgattcgacaacaggtctaacattccacaacttctttgatgaaggtgctgcaatggaggcatgtatgcgaatgaagggtgattatcatataggtagagagttagttgatgagaagaacgcatctctaccatttaaagaggaggaatatcatggttgataaagttggataccatac

SEQ ID NO: 1400 - DNA, 4000 bp, Escherichia coli
  misc_feature (847)..(847): n is a, c, g, or t
  misc_feature (1276)..(1276): n is a, c, g, or t
  misc_feature (1429)..(1429): n is a, c, g, or t
  misc_feature (1979)..(1979): n is a, c, g, or t
  misc_feature (2120)..(2120): n is a, c, g, or t
  misc_feature (2216)..(2216): n is a, c, g, or t
  misc_feature (2219)..(2219): n is a, c, g, or t
  misc_feature (2222)..(2222): n is a, c, g, or t
  misc_feature (2252)..(2252): n is a, c, g, or t
  misc_feature (2267)..(2267): n is a, c, g, or t
  misc_feature (2276)..(2276): n is a, c, g, or t
  misc_feature (2279)..(2279): n is a, c, g, or t
  misc_feature (2286)..(2286): n is a, c, g, or t
  misc_feature (2288)..(2291): n is a, c, g, or t
  misc_feature (2313)..(2313): n is a, c, g, or t
  misc_feature (2315)..(2315): n is a, c, g, or t
  misc_feature (2318)..(2318): n is a, c, g, or t
  misc_feature (2320)..(2320): n is a, c, g, or t
  misc_feature (2322)..(2323): n is a, c, g, or t
  misc_feature (2330)..(2330): n is a, c, g, or t
  misc_feature (2334)..(2336): n is a, c, g, or t
  misc_feature (2384)..(2384): n is a, c, g, or t
  misc_feature (2390)..(2390): n is a, c, g, or t
  misc_feature (2396)..(2396): n is a, c, g, or t
  misc_feature (2399)..(2399): n is a, c, g, or t
  misc_feature (2506)..(2506): n is a, c, g, or t
  misc_feature (2564)..(2564): n is a, c, g, or t
  misc_feature (2606)..(2606): n is a, c, g, or t
  misc_feature (2612)..(2612): n is a, c, g, or t
  misc_feature (2687)..(2687): n is a, c, g, or t
  misc_feature (2725)..(2725): n is a, c, g, or t
  misc_feature (2779)..(2779): n is a, c, g, or t
  misc_feature (2784)..(2785): n is a, c, g, or t
  misc_feature (2787)..(2790): n is a, c, g, or t
  misc_feature (2792)..(2792): n is a, c, g, or t
  misc_feature (2795)..(2797): n is a, c, g, or t
  misc_feature (2799)..(2799): n is a, c, g, or t
  misc_feature (2801)..(2805): n is a, c, g, or t
  misc_feature (2807)..(2807): n is a, c, g, or t
  misc_feature (2812)..(2814): n is a, c, g, or t
  misc_feature (2816)..(2817): n is a, c, g, or t
  misc_feature (2819)..(2819): n is a, c, g, or t
  misc_feature (2821)..(2822): n is a, c, g, or t
  misc_feature (2824)..(2835): n is a, c, g, or t
  misc_feature (2837)..(2841): n is a, c, g, or t
  misc_feature (2843)..(2843): n is a, c, g, or t
  misc_feature (2846)..(2846): n is a, c, g, or t
  misc_feature (2848)..(2851): n is a, c, g, or t
  misc_feature (2853)..(2856): n is a, c, g, or t
  misc_feature (2858)..(2859): n is a, c, g, or t
  misc_feature (2861)..(2861): n is a, c, g, or t
  misc_feature (2863)..(2863): n is a, c, g, or t
  misc_feature (2866)..(2870): n is a, c, g, or t
  misc_feature (2873)..(2873): n is a, c, g, or t
  misc_feature (2875)..(2882): n is a, c, g, or t
  misc_feature (2885)..(2886): n is a, c, g, or t
  misc_feature (2888)..(2888): n is a, c, g, or t
  misc_feature (2890)..(2890): n is a, c, g, or t
  misc_feature (2892)..(2892): n is a, c, g, or t
  misc_feature (2894)..(2897): n is a, c, g, or t
  misc_feature (2899)..(2899): n is a, c, g, or t
  misc_feature (2902)..(2902): n is a, c, g, or t
  misc_feature (2905)..(2910): n is a, c, g, or t
  misc_feature (2914)..(2914): n is a, c, g, or t
  misc_feature (2918)..(2919): n is a, c, g, or t
  misc_feature (2921)..(2922): n is a, c, g, or t
  misc_feature (2925)..(2927): n is a, c, g, or t
  misc_feature (2929)..(2929): n is a, c, g, or t
  misc_feature (2931)..(2931): n is a, c, g, or t
  misc_feature (2933)..(2933): n is a, c, g, or t
  misc_feature (2935)..(2939): n is a, c, g, or t
  misc_feature (2942)..(2943): n is a, c, g, or t
  misc_feature (2945)..(2954): n is a, c, g, or t
  misc_feature (2957)..(2958): n is a, c, g, or t
  misc_feature (2960)..(2963): n is a, c, g, or t
  misc_feature (2966)..(2966): n is a, c, g, or t
  misc_feature (2968)..(2968): n is a, c, g, or t
  misc_feature (2970)..(2979): n is a, c, g, or t
  misc_feature (2981)..(2981): n is a, c, g, or t
  misc_feature (2983)..(2984): n is a, c, g, or t
  misc_feature (2986)..(2986): n is a, c, g, or t
  misc_feature (2988)..(2989): n is a, c, g, or t
  misc_feature (2991)..(2992): n is a, c, g, or t
  misc_feature (2995)..(2997): n is a, c, g, or t
  misc_feature (2999)..(2999): n is a, c, g, or t
  misc_feature (3001)..(3001): n is a, c, g, or t
  misc_feature (3003)..(3003): n is a, c, g, or t
  misc_feature (3005)..(3006): n is a, c, g, or t
  misc_feature (3008)..(3010): n is a, c, g, or t
  misc_feature (3012)..(3016): n is a, c, g, or t
  misc_feature (3018)..(3021): n is a, c, g, or t
  misc_feature (3025)..(3026): n is a, c, g, or t
  misc_feature (3030)..(3034): n is a, c, g, or t
  misc_feature (3036)..(3037): n is a, c, g, or t
  misc_feature (3039)..(3041): n is a, c, g, or t
  misc_feature (3043)..(3043): n is a, c, g, or t
  misc_feature (3045)..(3046): n is a, c, g, or t
  misc_feature (3048)..(3050): n is a, c, g, or t
  misc_feature (3052)..(3053): n is a, c, g, or t
  misc_feature (3056)..(3056): n is a, c, g, or t
  misc_feature (3058)..(3058): n is a, c, g, or t
  misc_feature (3060)..(3064): n is a, c, g, or t
  misc_feature (3066)..(3066): n is a, c, g, or t
  misc_feature (3068)..(3069): n is a, c, g, or t
  misc_feature (3071)..(3072): n is a, c, g, or t
  misc_feature (3074)..(3074): n is a, c, g, or t
  misc_feature (3076)..(3077): n is a, c, g, or t
  misc_feature (3080)..(3084): n is a, c, g, or t
  misc_feature (3086)..(3087): n is a, c, g, or t
  misc_feature (3090)..(3092): n is a, c, g, or t
  misc_feature (3094)..(3099): n is a, c, g, or t
  misc_feature (3101)..(3101): n is a, c, g, or t
  misc_feature (3103)..(3105): n is a, c, g, or t
  misc_feature (3109)..(3110): n is a, c, g, or t
  misc_feature (3112)..(3112): n is a, c, g, or t
  misc_feature (3114)..(3116): n is a, c, g, or t
  misc_feature (3119)..(3119): n is a, c, g, or t
  misc_feature (3121)..(3121): n is a, c, g, or t
  misc_feature (3123)..(3123): n is a, c, g, or t
  misc_feature (3125)..(3126): n is a, c, g, or t
  misc_feature (3128)..(3128): n is a, c, g, or t
  misc_feature (3130)..(3131): n is a, c, g, or t
  misc_feature (3133)..(3133): n is a, c, g, or t
  misc_feature (3136)..(3137): n is a, c, g, or t
  misc_feature (3139)..(3139): n is a, c, g, or t
  misc_feature (3141)..(3143): n is a, c, g, or t
  misc_feature (3146)..(3146): n is a, c, g, or t
  misc_feature (3148)..(3149): n is a, c, g, or t
  misc_feature (3151)..(3155): n is a, c, g, or t
  misc_feature (3157)..(3157): n is a, c, g, or t
  misc_feature (3159)..(3159): n is a, c, g, or t
  misc_feature (3161)..(3164): n is a, c, g, or t
  misc_feature (3166)..(3167): n is a, c, g, or t
  misc_feature (3169)..(3171): n is a, c, g, or t
  misc_feature (3173)..(3174): n is a, c, g, or t
  misc_feature (3177)..(3177): n is a, c, g, or t
  misc_feature (3179)..(3179): n is a, c, g, or t
  misc_feature (3181)..(3181): n is a, c, g, or t
  misc_feature (3184)..(3185): n is a, c, g, or t
  misc_feature (3187)..(3192): n is a, c, g, or t
  misc_feature (3194)..(3194): n is a, c, g, or t
  misc_feature (3196)..(3198): n is a, c, g, or t
  misc_feature (3201)..(3201): n is a, c, g, or t
  misc_feature (3203)..(3204): n is a, c, g, or t
  misc_feature (3206)..(3206): n is a, c, g, or t
  misc_feature (3208)..(3211): n is a, c, g, or t
  misc_feature (3213)..(3213): n is a, c, g, or t
  misc_feature (3215)..(3218): n is a, c, g, or t
  misc_feature (3220)..(3220): n is a, c, g, or t
  misc_feature (3222)..(3230): n is a, c, g, or t
  misc_feature (3232)..(3234): n is a, c, g, or t
  misc_feature (3237)..(3237): n is a, c, g, or t
  misc_feature (3239)..(3240): n is a, c, g, or t
  misc_feature (3242)..(3242): n is a, c, g, or t
  misc_feature (3246)..(3246): n is a, c, g, or t
  misc_feature (3250)..(3251): n is a, c, g, or t
  misc_feature (3253)..(3254): n is a, c, g, or t
  misc_feature (3256)..(3257): n is a, c, g, or t
  misc_feature (3260)..(3260): n is a, c, g, or t
  misc_feature (3262)..(3262): n is a, c, g, or t
  misc_feature (3265)..(3267): n is a, c, g, or t
  misc_feature (3270)..(3272): n is a, c, g, or t
  misc_feature (3274)..(3275): n is a, c, g, or t
  misc_feature (3277)..(3281): n is a, c, g, or t
  misc_feature (3284)..(3287): n is a, c, g, or t
  misc_feature (3289)..(3290): n is a, c, g, or t
  misc_feature (3292)..(3294): n is a, c, g, or t
  misc_feature (3296)..(3297): n is a, c, g, or t
  misc_feature (3299)..(3300): n is a, c, g, or t
  misc_feature (3302)..(3302): n is a, c, g, or t
  misc_feature (3305)..(3308): n is a, c, g, or t
  misc_feature (3311)..(3311): n is a, c, g, or t
  misc_feature (3313)..(3316): n is a, c, g, or t
  misc_feature (3319)..(3321): n is a, c, g, or t
  misc_feature (3323)..(3323): n is a, c, g, or t
  misc_feature (3325)..(3326): n is a, c, g, or t
  misc_feature (3332)..(3333): n is a, c, g, or t
  misc_feature (3335)..(3338): n is a, c, g, or t
  misc_feature (3340)..(3343): n is a, c, g, or t
  misc_feature (3346)..(3347): n is a, c, g, or t
  misc_feature (3349)..(3352): n is a, c, g, or t
  misc_feature (3355)..(3356): n is a, c, g, or t
  misc_feature (3358)..(3363): n is a, c, g, or t
  misc_feature (3366)..(3367): n is a, c, g, or t
  misc_feature (3369)..(3369): n is a, c, g, or t
  misc_feature (3372)..(3372): n is a, c, g, or t
  misc_feature (3374)..(3374): n is a, c, g, or t
  misc_feature (3376)..(3377): n is a, c, g, or t
  misc_feature (3379)..(3380): n is a, c, g, or t
  misc_feature (3382)..(3383): n is a, c, g, or t
  misc_feature (3386)..(3386): n is a, c, g, or t
  misc_feature (3388)..(3390): n is a, c, g, or t
  misc_feature (3392)..(3392): n is a, c, g, or t
  misc_feature (3394)..(3395): n is a, c, g, or t
  misc_feature (3398)..(3399): n is a, c, g, or t
  misc_feature (3401)..(3404): n is a, c, g, or t
  misc_feature (3406)..(3416): n is a, c, g, or t
  misc_feature (3421)..(3422): n is a, c, g, or t
  misc_feature (3424)..(3426): n is a, c, g, or t
  misc_feature (3428)..(3429): n is a, c, g, or t
  misc_feature (3431)..(3437): n is a, c, g, or t
  misc_feature (3439)..(3441): n is a, c, g, or t
  misc_feature (3443)..(3447): n is a, c, g, or t
  misc_feature (3449)..(3449): n is a, c, g, or t
  misc_feature (3451)..(3452): n is a, c, g, or t
  misc_feature (3455)..(3456): n is a, c, g, or t
  misc_feature (3458)..(3458): n is a, c, g, or t
  misc_feature (3460)..(3460): n is a, c, g, or t
  misc_feature (3462)..(3472): n is a, c, g, or t
  misc_feature (3474)..(3474): n is a, c, g, or t
  misc_feature (3477)..(3477): n is a, c, g, or t
  misc_feature (3480)..(3480): n is a, c, g, or t
  misc_feature (3482)..(3482): n is a, c, g, or t
  misc_feature (3485)..(3487): n is a, c, g, or t
  misc_feature (3490)..(3495): n is a, c, g, or t
  misc_feature (3497)..(3497): n is a, c, g, or t
  misc_feature (3499)..(3502): n is a, c, g, or t
  misc_feature (3505)..(3512): n is a, c, g, or t
  misc_feature (3514)..(3514): n is a, c, g, or t
  misc_feature (3516)..(3517): n is a, c, g, or t
  misc_feature (3519)..(3522): n is a, c, g, or t
  misc_feature (3524)..(3524): n is a, c, g, or t
  misc_feature (3528)..(3528): n is a, c, g, or t
  misc_feature (3530)..(3534): n is a, c, g, or t
  misc_feature (3536)..(3538): n is a, c, g, or t
  misc_feature (3540)..(3540): n is a, c, g, or t
  misc_feature (3542)..(3545): n is a, c, g, or t
  misc_feature (3547)..(3547): n is a, c, g, or t
  misc_feature (3551)..(3551): n is a, c, g, or t
  misc_feature (3553)..(3554): n is a, c, g, or t
  misc_feature (3558)..(3558): n is a, c, g, or t
  misc_feature (3560)..(3560): n is a, c, g, or t
  misc_feature (3562)..(3562): n is a, c, g, or t
  misc_feature (3564)..(3566): n is a, c, g, or t
  misc_feature (3569)..(3569): n is a, c, g, or t
  misc_feature (3571)..(3571): n is a, c, g, or t
  misc_feature (3573)..(3575): n is a, c, g, or t
  misc_feature (3577)..(3579): n is a, c, g, or t
  misc_feature (3581)..(3581): n is a, c, g, or t
  misc_feature (3583)..(3586): n is a, c, g, or t
  misc_feature (3588)..(3595): n is a, c, g, or t
  misc_feature (3597)..(3602): n is a, c, g, or t
  misc_feature (3604)..(3606): n is a, c, g, or t
  misc_feature (3609)..(3609): n is a, c, g, or t
  misc_feature (3613)..(3616): n is a, c, g, or t
  misc_feature (3618)..(3618): n is a, c, g, or t
  misc_feature (3620)..(3623): n is a, c, g, or t
  misc_feature (3625)..(3631): n is a, c, g, or t
  misc_feature (3634)..(3644): n is a, c, g, or t
  misc_feature (3646)..(3646): n is a, c, g, or t
  misc_feature (3648)..(3648): n is a, c, g, or t
  misc_feature (3650)..(3652): n is a, c, g, or t
  misc_feature (3654)..(3654): n is a, c, g, or t
  misc_feature (3657)..(3657): n is a, c, g, or t
  misc_feature (3659)..(3659): n is a, c, g, or t
  misc_feature (3661)..(3665): n is a, c, g, or t
  misc_feature (3668)..(3672): n is a, c, g, or t
  misc_feature (3674)..(3675): n is a, c, g, or t
  misc_feature (3677)..(3681): n is a, c, g, or t
  misc_feature (3683)..(3686): n is a, c, g, or t
  misc_feature (3688)..(3690): n is a, c, g, or t
  misc_feature (3692)..(3696): n is a, c, g, or t
  misc_feature (3698)..(3699): n is a, c, g, or t
  misc_feature (3701)..(3704): n is a, c, g, or t
  misc_feature (3706)..(3708): n is a, c, g, or t
  misc_feature (3710)..(3711): n is a, c, g, or t
  misc_feature (3715)..(3716): n is a, c, g, or t
  misc_feature (3718)..(3719): n is a, c, g, or t
  misc_feature (3721)..(3722): n is a, c, g, or t
  misc_feature (3725)..(3727): n is a, c, g, or t
  misc_feature (3730)..(3732): n is a, c, g, or t
  misc_feature (3734)..(3736): n is a, c, g, or t
  misc_feature (3738)..(3747): n is a, c, g, or t
  misc_feature (3749)..(3750): n is a, c, g, or t
  misc_feature (3753)..(3754): n is a, c, g, or t
  misc_feature (3756)..(3760): n is a, c, g, or t
  misc_feature (3762)..(3762): n is a, c, g, or t
  misc_feature (3767)..(3767): n is a, c, g, or t
  misc_feature (3770)..(3772): n is a, c, g, or t
  misc_feature (3777)..(3777): n is a, c, g, or t
  misc_feature (3779)..(3786): n is a, c, g, or t
  misc_feature (3791)..(3792): n is a, c, g, or t
  misc_feature (3800)..(3800): n is a, c, g, or t
  misc_feature (3802)..(3803): n is a, c, g, or t
  misc_feature (3806)..(3807): n is a, c, g, or t
  misc_feature (3810)..(3811): n is a, c, g, or t
  misc_feature (3814)..(3817): n is a, c, g, or t
  misc_feature (3820)..(3829): n is a, c, g, or t
  misc_feature (3834)..(3835): n is a, c, g, or t
  misc_feature (3838)..(3838): n is a, c, g, or t
  misc_feature (3844)..(3849): n is a, c, g, or t
  misc_feature (3851)..(3854): n is a, c, g, or t
  misc_feature (3857)..(3859): n is a, c, g, or t
  misc_feature (3861)..(3861): n is a, c, g, or t
  misc_feature (3865)..(3865): n is a, c, g, or t
  misc_feature (3867)..(3869): n is a, c, g, or t
  misc_feature (3871)..(3871): n is a, c, g, or t
  misc_feature (3873)..(3874): n is a, c, g, or t
  misc_feature (3876)..(3878): n is a, c, g, or t
  misc_feature (3883)..(3898): n is a, c, g, or t
  misc_feature (3900)..(3901): n is a, c, g, or t
  misc_feature (3904)..(3904): n is a, c, g, or t
  misc_feature (3907)..(3908): n is a, c, g, or t
  misc_feature (3911)..(3911): n is a, c, g, or t
  misc_feature (3914)..(3916): n is a, c, g, or t
  misc_feature (3918)..(3918): n is a, c, g, or t
  misc_feature (3920)..(3920): n is a, c, g, or t
  misc_feature (3923)..(3925): n is a, c, g, or t
  misc_feature (3927)..(3927): n is a, c, g, or t
  misc_feature (3929)..(3929): n is a, c, g, or t
  misc_feature (3931)..(3933): n is a, c, g, or t
  misc_feature (3935)..(3935): n is a, c, g, or t
  misc_feature (3940)..(3940): n is a, c, g, or t
  misc_feature (3942)..(3944): n is a, c, g, or t
  misc_feature (3948)..(3948): n is a, c, g, or t
  misc_feature (3951)..(3953): n is a, c, g, or t
  misc_feature (3956)..(3957): n is a, c, g, or t
  misc_feature (3959)..(3959): n is a, c, g, or t
  misc_feature (3963)..(3964): n is a, c, g, or t
  misc_feature (3968)..(3968): n is a, c, g, or t
  misc_feature (3970)..(3977): n is a, c, g, or t
  misc_feature (3980)..(3980): n is a, c, g, or t
  misc_feature (3982)..(3983): n is a, c, g, or t
  misc_feature (3985)..(3985): n is a, c, g, or t
  misc_feature (3987)..(3987): n is a, c, g, or t
  misc_feature (3989)..(3990): n is a, c, g, or t
  misc_feature (3995)..(3999): n is a, c, g, or t
cttaacattcgtgatagggtcgtataagcggtctgcttttggcaagaaatcgaaaccccaaccgttttctttggtggctttatcaccatagaacgttttcatcatactcacgaagaatttcgaggtattacgataatagtttacttggtttggtacgatatctttcggtgtaatcgcattgatatactgctcataagaggtatctttgtcgtttggtaaacgcatataacccggtaaagacatcggcaataagcccatatccgttgtaccttgtacgttggagtgtccacgtaatgcattaataccaccacccggcatacccatattacctaggagcaattggatcatcgccatagaacgaatattttgcgtaccgattgtgtgctcggtaaagcctaacgcatataagtgcgtcatggttttattcggtgcagaggttttaccaatttcttcacagatttgtaagaaggttttttgtttcacaccggtaatacgttcaaccatttccggcgtatagcgagaaacgtgatctttcaagatattaatcacacagcgtggatcttgtaaggtcatatcacgtttagcatggccattttcgtcgaattggtagttccatttagatttatcgtaagcgtgtttttcttcatcgaagcccacaaataaaccatcttcaaatttgaaaccttcatccactaagaaggacgcattggtgtagtgtttaacgtattcgtgttgaatttgattggtttccaataagtaacggatcacacccattaagaatgcaatatcagaaccggaacgaattggtgcatgaaagtcagcaacagaagccgtacggttaaagcgngggtcaactacgatgattttcgcaccgtttttcttcgcttcaattgcccaacggaagccaacagggtgggcttcagcagggttacccccttgaacaagaataagattggcgtttttgatgtcaacccagttatttgtcatggcaccgcgaccaaatgatggagcaagacttgctaccgttggtccgtgtcaagtattcgcttggttacacatcggcaccatgcccaacatccgcacccatttatgagtcagtagtgcggcctcgttgctcatggcggaggcggtcataatccctgtggttgtccaacggttaaccgttttgccactcgcatctttttcaacgaagttggcatcacggtcatctttcattagacgggcaatgcgtttaattgcatcttgccaagaaatgcgttcccatttatcggaaccnggtgcacgatattcagggtataacgcacggctttcactattgatatagtctaatgcaccggcacccttcggacataatgccccacggctgaccggatgatcagggtcaccttcgatatggaacaatttagagcgggtattggttgaggtatgnccgcttaatgtattagatggaatacctgtactatacatcaacataccgcagcttacggcacaatatgtacaggtttgacgcgattctttcgcacgcaatagtttgtattcgcgtggtgcagctaaggctgtggacggtgcaaaacctaacatcgcaacggatgttccggccataccgccagcacagaccttgaagaattttcttcttgagatctgcataaatactccccacaatcaacaaaacttgttgttgatctttgtttaatgtttaatagttataaatcacatttgagtagataacttagtcatcgattttgttaaaatagtattacaattaaacgccaccgagactaaacctaacgtaacaagagatacgacctatctattcgttagcgtgcgctagaatacctatttttcaaacataaatctataatcactaataattaaaaggacaaaaaaaattgagttggatcacaaaaagaacaattaattttatcaaaaatttaacaaatccggcgacatcggacagtgacatcatcgtcaccgaaagncaggataccttggcgaaagaagtgcctgttgccctcgtgtataacgacatcgcccataccgtcatgatgtgttcaccacgagatttagaggattttgccatgggcttttccctcacagaaggcattatcgacaagccggcngatatttatggcattgatatcgaggaagtgtgtaacggtatggaagccagaattgaactggcgacccgttgctttgtggcattgaaagatcaccgncgnacnttaaccggacgcaccggttgtggcatttgnggtgcagaacaaatncaacaggtntanaaaaacntnnnnaaattagaccgcactttaacgntnaangncnnccaattngatnnntgcttgcaacaattatatgaggcacaagaacttggcaagcaaaccggntccacncatgcngcngcatttttttctgcagaagggaaactactcgccattcgtgaagatgtcggtcgccatgtggcattagataaattattgggatggcacgctaaagctgacaagccacngggttttatcgttgtcaccagtcgcgccagttatgaaatggtgcaaaaaaccgtttcntgtggtattgaaatgcttgttgcgatttctgccgcaacgganctcgcngtacaaatggcggaacaatataatctaacccttgttggtttcgcccgagaaggtcgagcaacgatctatagtggnaaagaaagattgctgacgccccttccctcctctgttcncgcataaaatttatcaaaaaaatcccccgcacttttcagcttgggggatgtttnttttnnannnnantannnantnnnnnanttttnnncnnantnnannnnnnnnnnnnannnnngnaanannnncnnnnanncntnttnnnnnaangnnnnnnnnttnncnantngnnnnanttnttnnnnnncttntttnncnnaannnancngntnnnnnaannannnnnnnnnnttnncnnnnccntncnnnnnnnnnnantnnancnncnnttnnncntntnanncnnngnnnnncnnnnttgnnaaannnnncnncnnntngnncnnngnnaangntnnnnnancnncnncngnnttnnnnntnnccnnntnnnnnncngnnntttnnanannnttngntnanngntnnanttnntncnnnttncnntnnnnntntngnnnntnngnnnannaangnanaanngnnnnnncngnnngtncnncnannnncngnnnngntnnnnnnnnnannnttnanncntttnattnngnnannaangnttnnnaannnannannnnnaannnngnnannncnnannanttnnnnttntnnnnaannncngnntttttnnannnntnnnncgnnannnncanngnnnnnnttnncnggntngnnannannccnannnangnnttnngnnnngnnnnnnnnnnnttttnnannnanntnnnnnnnannncnnnnntnannttnnananannnnnnnnnnncnttnccngnttnnnggnnnnnncngnnnnaannnnnnnnananncnnnncntttnannnnngnnntngnnnntncccngnnaaancntncnnnttnancnnngnnngnannnngnnnnnnnncnnnnnnannnccngggnnnncngnnnnannnnnnnaannnnnnnnnnngnancnnncngcnantnnnnnttnnnnnannannnnnannnntnnncnnnnncnncnnnngnnncnnaaanngnnannttnnnttnnntnnncnnnnnnnnnnannaanngnnnnntnaaaanttnnnaaaantnnnnnnnnccctnnttttaaantnnaannggnnaannnnaannnnnnnnnnaattnnaantttttnnnnnnannnnaannngnaaancnnntnannannnttttnnnnnnnnnnnnnnnncnnttnccnnaancannncnanttnnncntnannntnatttncnnncctnttnnngtnngnaaannaaantnnnnnnnnttnanntntngnnggaannnnnt

SEQ ID NO: 1401 - DNA, 4000 bp, Escherichia coli
  misc_feature (4)..(4): n is a, c, g, or t
  misc_feature (462)..(462): n is a, c, g, or t
  misc_feature (1336)..(1336): n is a, c, g, or t
  misc_feature (1983)..(1984): n is a, c, g, or t
  misc_feature (1986)..(1987): n is a, c, g, or t
  misc_feature (1989)..(1990): n is a, c, g, or t
  misc_feature (1994)..(1995): n is a, c, g, or t
  misc_feature (1998)..(2008): n is a, c, g, or t
  misc_feature (2010)..(2011): n is a, c, g, or t
  misc_feature (2048)..(2050): n is a, c, g, or t
  misc_feature (2052)..(2058): n is a, c, g, or t
  misc_feature (2060)..(2067): n is a, c, g, or t
  misc_feature (2070)..(2072): n is a, c, g, or t
  misc_feature (2074)..(2077): n is a, c, g, or t
  misc_feature (2115)..(2117): n is a, c, g, or t
  misc_feature (2119)..(2125): n is a, c, g, or t
  misc_feature (2127)..(2127): n is a, c, g, or t
  misc_feature (2129)..(2130): n is a, c, g, or t
  misc_feature (2132)..(2132): n is a, c, g, or t
  misc_feature (2134)..(2136): n is a, c, g, or t
  misc_feature (2138)..(2140): n is a, c, g, or t
  misc_feature (2142)..(2142): n is a, c, g, or t
  misc_feature (2181)..(2188): n is a, c, g, or t
  misc_feature (2190)..(2190): n is a, c, g, or t
  misc_feature (2192)..(2193): n is a, c, g, or t
  misc_feature (2195)..(2195): n is a, c, g, or t
  misc_feature (2197)..(2209): n is a, c, g, or t
  misc_feature (2246)..(2246): n is a, c, g, or t
  misc_feature (2248)..(2254): n is a, c, g, or t
  misc_feature (2256)..(2275): n is a, c, g, or t
  misc_feature (2312)..(2314): n is a, c, g, or t
  misc_feature (2316)..(2320): n is a, c, g, or t
  misc_feature (2322)..(2330): n is a, c, g, or t
  misc_feature (2332)..(2333): n is a, c, g, or t
  misc_feature (2335)..(2341): n is a, c, g, or t
  misc_feature (2380)..(2381): n is a, c, g, or t
  misc_feature (2383)..(2383): n is a, c, g, or t
  misc_feature (2385)..(2391): n is a, c, g, or t
  misc_feature (2394)..(2394): n is a, c, g, or t
  misc_feature (2399)..(2401): n is a, c, g, or t
  misc_feature (2403)..(2403): n is a, c, g, or t
  misc_feature (2405)..(2407): n is a, c, g, or t
  misc_feature (2444)..(2445): n is a, c, g, or t
  misc_feature (2448)..(2454): n is a, c, g, or t
  misc_feature (2456)..(2463): n is a, c, g, or t
  misc_feature (2465)..(2465): n is a, c, g, or t
  misc_feature (2467)..(2473): n is a, c, g, or t
  misc_feature (2510)..(2511): n is a, c, g, or t
  misc_feature (2514)..(2521): n is a, c, g, or t
  misc_feature (2523)..(2532): n is a, c, g, or t
  misc_feature (2534)..(2537): n is a, c, g, or t
  misc_feature (2539)..(2539): n is a, c, g, or t
  misc_feature (2576)..(2588): n is a, c, g, or t
  misc_feature (2590)..(2590): n is a, c, g, or t
  misc_feature (2592)..(2600): n is a, c, g, or t
  misc_feature (2602)..(2605): n is a, c, g, or t
  misc_feature (2642)..(2671): n is a, c, g, or t
  misc_feature (2708)..(2712): n is a, c, g, or t
  misc_feature (2715)..(2715): n is a, c, g, or t
  misc_feature (2717)..(2719): n is a, c, g, or t
  misc_feature (2721)..(2725): n is a, c, g, or t
  misc_feature (2727)..(2727): n is a, c, g, or t
  misc_feature (2729)..(2732): n is a, c, g, or t
  misc_feature (2735)..(2737): n is a, c, g, or t
  misc_feature (2774)..(2786): n is a, c, g, or t
  misc_feature (2788)..(2798): n is a, c, g, or t
  misc_feature (2800)..(2803): n is a, c, g, or t
  misc_feature (2840)..(2842): n is a, c, g, or t
  misc_feature (2844)..(2853): n is a, c, g, or t
  misc_feature (2855)..(2858): n is a, c, g, or t
  misc_feature (2861)..(2862): n is a, c, g, or t
  misc_feature (2864)..(2869): n is a, c, g, or t
  misc_feature (2907)..(2927): n is a, c, g, or t
  misc_feature (2930)..(2930): n is a, c, g, or t
  misc_feature (2932)..(2935): n is a, c, g, or t
  misc_feature (2972)..(2978): n is a, c, g, or t
  misc_feature (2980)..(2988): n is a, c, g, or t
  misc_feature (2990)..(3000): n is a, c, g, or t
  misc_feature (3040)..(3059): n is a, c, g, or t
  misc_feature (3062)..(3063): n is a, c, g, or t
  misc_feature (3065)..(3067): n is a, c, g, or t
  misc_feature (3075)..(3075): n is a, c, g, or t
  misc_feature (3077)..(3077): n is a, c, g, or t
  misc_feature (3088)..(3088): n is a, c, g, or t
  misc_feature (3104)..(3106): n is a, c, g, or t
  misc_feature (3109)..(3110): n is a, c, g, or t
  misc_feature (3112)..(3112): n is a, c, g, or t
  misc_feature (3114)..(3114): n is a, c, g, or t
  misc_feature (3116)..(3119): n is a, c, g, or t
  misc_feature (3121)..(3121): n is a, c, g, or t
  misc_feature (3123)..(3125): n is a, c, g, or t
  misc_feature (3129)..(3131): n is a, c, g, or t
  misc_feature (3133)..(3133): n is a, c, g, or t
  misc_feature (3141)..(3141): n is a, c, g, or t
  misc_feature (3143)..(3143): n is a, c, g, or t
  misc_feature (3170)..(3171): n is a, c, g, or t
  misc_feature (3174)..(3176): n is a, c, g, or t
  misc_feature (3178)..(3179): n is a, c, g, or t
  misc_feature (3182)..(3184): n is a, c, g, or t
  misc_feature (3186)..(3189): n is a, c, g, or t
  misc_feature (3191)..(3195): n is a, c, g, or t
  misc_feature (3197)..(3199): n is a, c, g, or t
  misc_feature (3207)..(3207): n is a, c, g, or t
  misc_feature (3209)..(3209): n is a, c, g, or t
  misc_feature (3220)..(3220): n is a, c, g, or t
  misc_feature (3236)..(3238): n is a, c, g, or t
  misc_feature (3240)..(3243): n is a, c, g, or t
  misc_feature (3245)..(3250): n is a, c, g, or t
  misc_feature (3252)..(3258): n is a, c, g, or t
  misc_feature (3261)..(3265): n is a, c, g, or t
  misc_feature (3273)..(3273): n is a, c, g, or t
  misc_feature (3275)..(3275): n is a, c, g, or t
  misc_feature (3286)..(3286): n is a, c, g, or t
  misc_feature (3302)..(3303): n is a, c, g, or t
  misc_feature (3306)..(3306): n is a, c, g, or t
  misc_feature (3308)..(3316): n is a, c, g, or t
  misc_feature (3318)..(3318): n is a, c, g, or t
  misc_feature (3320)..(3331): n is a, c, g, or t
  misc_feature (3341)..(3341): n is a, c, g, or t
  misc_feature (3352)..(3352): n is a, c, g, or t
  misc_feature (3368)..(3379): n is a, c, g, or t
  misc_feature (3381)..(3383): n is a, c, g, or t
  misc_feature (3387)..(3389): n is a, c, g, or t
  misc_feature (3391)..(3395): n is a, c, g, or t
  misc_feature (3397)..(3397): n is a, c, g, or t
  misc_feature (3405)..(3405): n is a, c, g, or t
  misc_feature (3407)..(3407): n is a, c, g, or t
  misc_feature (3418)..(3418): n is a, c, g, or t
  misc_feature (3435)..(3441): n is a, c, g, or t
  misc_feature (3445)..(3449): n is a, c, g, or t
  misc_feature (3452)..(3455): n is a, c, g, or t
  misc_feature (3457)..(3457): n is a, c, g, or t
  misc_feature (3459)..(3460): n is a, c, g, or t
  misc_feature (3462)..(3463): n is a, c, g, or t
  misc_feature (3471)..(3471): n is a, c, g, or t
  misc_feature (3473)..(3473): n is a, c, g, or t
  misc_feature (3500)..(3505): n is a, c, g, or t
  misc_feature (3507)..(3509): n is a, c, g, or t
  misc_feature (3513)..(3514): n is a, c, g, or t
  misc_feature (3516)..(3516): n is a, c, g, or t
  misc_feature (3518)..(3521): n is a, c, g, or t
  misc_feature (3523)..(3525): n is a, c, g, or t
  misc_feature (3527)..(3527): n is a, c, g, or t
  misc_feature (3529)..(3530): n is a, c, g, or t
  misc_feature (3534)..(3535): n is a, c, g, or t
  misc_feature (3541)..(3544): n is a, c, g, or t
  misc_feature (3548)..(3548): n is a, c, g, or t
  misc_feature (3555)..(3555): n is a, c, g, or t
  misc_feature (3557)..(3560): n is a, c, g, or t
  misc_feature (3564)..(3565): n is a, c, g, or t
  misc_feature (3567)..(3570): n is a, c, g, or t
  misc_feature (3573)..(3576): n is a, c, g, or t
  misc_feature (3578)..(3578): n is a, c, g, or t
  misc_feature (3580)..(3581): n is a, c, g, or t
  misc_feature (3584)..(3587): n is a, c, g, or t
  misc_feature (3589)..(3591): n is a, c, g, or t
  misc_feature (3593)..(3596): n is a, c, g, or t
  misc_feature (3599)..(3603): n is a, c, g, or t
  misc_feature (3607)..(3608): n is a, c, g, or t
  misc_feature (3611)..(3611): n is a, c, g, or t
  misc_feature (3614)..(3615): n is a, c, g, or t
  misc_feature (3619)..(3619): n is a, c, g, or t
  misc_feature (3624)..(3627): n is a, c, g, or t
  misc_feature (3630)..(3632): n is a, c, g, or t
  misc_feature (3637)..(3638): n is a, c, g, or t
  misc_feature (3640)..(3651): n is a, c, g, or t
  misc_feature (3653)..(3654): n is a, c, g, or t
  misc_feature (3656)..(3663): n is a, c, g, or t
  misc_feature (3665)..(3666): n is a, c, g, or t
  misc_feature (3668)..(3670): n is a, c, g, or t
  misc_feature (3673)..(3673): n is a, c, g, or t
  misc_feature (3681)..(3681): n is a, c, g, or t
  misc_feature (3685)..(3685): n is a, c, g, or t
  misc_feature (3689)..(3691): n is a, c, g, or t
  misc_feature (3696)..(3704): n is a, c, g, or t
  misc_feature (3707)..(3707): n is a, c, g, or t
  misc_feature (3709)..(3715): n is a, c, g, or t
  misc_feature (3717)..(3718): n is a, c, g, or t
  misc_feature (3720)..(3721): n is a, c, g, or t
  misc_feature (3723)..(3725): n is a, c, g, or t
  misc_feature (3727)..(3728): n is a, c, g, or t
  misc_feature (3731)..(3736): n is a, c, g, or t
  misc_feature (3739)..(3740): n is a, c, g, or t
  misc_feature (3742)..(3743): n is a, c, g, or t
  misc_feature (3746)..(3747): n is a, c, g, or t
  misc_feature (3751)..(3751): n is a, c, g, or t
  misc_feature (3755)..(3759): n is a, c, g, or t
  misc_feature (3762)..(3763): n is a, c, g, or t
  misc_feature (3766)..(3767): n is a, c, g, or t
  misc_feature (3769)..(3769): n is a, c, g, or t
  misc_feature (3772)..(3774): n is a, c, g, or t
  misc_feature (3777)..(3779): n is a, c, g, or t
  misc_feature (3781)..(3782): n is a, c, g, or t
  misc_feature (3786)..(3786): n is a, c, g, or t
  misc_feature (3791)..(3791): n is a, c, g, or t
  misc_feature (3813)..(3813): n is a, c, g, or t
  misc_feature (3830)..(3831): n is a, c, g, or t
  misc_feature (3833)..(3833): n is a, c, g, or t
  misc_feature (3835)..(3835): n is a, c, g, or t
  misc_feature (3839)..(3839): n is a, c, g, or t
  misc_feature (3845)..(3846): n is a, c, g, or t
  misc_feature (3848)..(3848): n is a, c, g, or t
  misc_feature (3850)..(3851): n is a, c, g, or t
  misc_feature (3854)..(3854): n is a, c, g, or t
  misc_feature (3856)..(3857): n is a, c, g, or t
  misc_feature (3866)..(3866): n is a, c, g, or t
  misc_feature (3879)..(3879): n is a, c, g, or t
  misc_feature (3896)..(3896): n is a, c, g, or t
  misc_feature (3898)..(3898): n is a, c, g, or t
  misc_feature (3901)..(3901): n is a, c, g, or t
  misc_feature (3904)..(3906): n is a, c, g, or t
  misc_feature (3908)..(3908): n is a, c, g, or t
  misc_feature (3911)..(3911): n is a, c, g, or t
  misc_feature (3920)..(3920): n is a, c, g, or t
  misc_feature (3922)..(3922): n is a, c, g, or t
  misc_feature (3932)..(3932): n is a, c, g, or t
  misc_feature (3945)..(3945): n is a, c, g, or t
  misc_feature (3963)..(3964): n is a, c, g, or t
  misc_feature (3966)..(3966): n is a, c, g, or t
  misc_feature (3968)..(3969): n is a, c, g, or t
  misc_feature (3972)..(3972): n is a, c, g, or t
  misc_feature (3976)..(3976): n is a, c, g, or t
  misc_feature (3978)..(3978): n is a, c, g, or t
  misc_feature (3985)..(3985): n is a, c, g, or t
  misc_feature (3988)..(3988): n is a, c, g, or t
  misc_feature (3998)..(3998): n is a, c, g, or t
aatnattaaagagcaaattaactgaaagatagaaactaagcgagaattatgagcaaaaattgttaaacaaaaaattgaaagtcaactagaaattttagaagagaacaataaaagtgcaattaaagtagaaatgttaagaggatatattaaagaggttcaaccaggtgatgttagtaaccgggaaggacatgcggcaaaagtgtatttcaacgaactatttggtaacgaatttgctcgcagtcaagacaatattattaatgcagctctaaactttggttatacagtgattcgttcagcatttagtcgaacaattgtatctaaaggtttacacccatcaattagtctatttcactccaatcagtacgatgcttttgccttggctgatgatttaatggaacctttccgtccggtgattgatgattttgtttataagaattaccaagaatgagagtactttggtanggaacaaaaacaagcgttagtgaatttattaaatgtgcaaattaactttgatggtaaggatgtatttctgacatcggcaattaatcgatatgttgataatgtgattaattatatggaatctggtgaaatggattatttagtttttccttacttagaacatattcagtattatgagttatagatatatgcgtttattagtaatgtatgatttgccaatgacttcgaagcattatgtgaaagaatataccaagttcagaaagtatttattaaaagaaggttatgtgatggtgcaacaatcaatttatagtaagttgtgcctgaatcaagatgtggttgataacaccattagaaggttagagaaaaatttaccagcacttggtaatgtacgtgcattacaagtgacagaaaaacagtatgccaaaatcaaaattatggttgggcataagagtttacaagaacaagatcaaaacgatagaaggatggtgattttgtagtgattattaaaaactataaacgcttaaattatgttaagtttaacttaacaaaaactaagatcattctcaataaagattatttagaacgtaaagatttattagaagtattaaacttaacctttaataataaaaaaatacctgaggatgctgtggtcaagtgagaagaaaatgatttgatttacaaccttaaaaatttgaaagtaattaatattcccaacttaattgattttgaaaaagacttctttgatggttcaaaatcaattgtaaaaactttaattcaagaagttttacaagccttggaatatcaaaacaaaaacttaattgaactagaaagtcttctattctcttttaaattagaaaatgaattagaatcattaaanaacctttttaaagaaattaaaagtgattaccacttgtctttaaaaactaatttaattggttcaattgcacaagtattgagtgattatttagaattggaaatgctaaaccaaaatgatgaaagactaaccgaagataacattacttttgaacttttaaataacctctatttcaaattattaaacttcatcattgcttgcatggataaccaagctttagtgatttttgacaatccttttactggaattaaatatcaagatttaccaaagataatgagcttgattaataaaattgattataagattttagtacttagtgaaatgccgttaattgatgataaaaacttaagtgatgtttttatctttggtgagcaatttctgcttgatttttcagaattctataataatttagaagatattcaaaaattcattgatcaagatgttgaaccaattttaaacaaagtttctcaaaatattgttcaacaatttaacgtttatgactaccaatacgaaaagatgcttttatttaacgataaaagcgaagaaattttatttactgcaattaaaaactatcaaatagtttaaaaaattacctaaaatacttgatttgacgtttcggccccctgtaaaatttttgtgtagtaaaactnnannannttgnnttnnnnnnnnnnntnngtttcggccccctgtaaaatttttgtgtagtaaaacnnntnnnnnnnannnnnnnntannnannnngtttcggccccctgtaaaatttttgtgtagtaaaacannncnnnnnnnantnnanannntnnnanagtttcggccccctgtaaaatttttgtgtagtaaaactnnnnnnnnananngnannnnnnnnnnnnngtttcggccccctgtaaaatttttgtgtagtaaaacntnnnnnnnannnnnnnnnnnnnnnnnnnngtttcggccccctgtaaaatttttgtgtagtaaaacnnnannnnnannnnnnnnntnntnnnnnnngtttcggccccctgtaaaatttttgtgtagtaaaacaanngnannnnnnnaanaaatnnncnannngtttcggccccctgtaaaatttttgtgtagtaaaacnntannnnnnntnnnnnnnnantnnnnnnngtttcggccccctgtaaaatttttgtgtagtaaaacnnaannnnnnnnannnnnnnnnncnnnntngtttcggccccctgtaaaatttttgtgtagtaaaacnnnnnnnnnnnnntnannnnnnnnntnnnngtttcggccccctgtaaaatttttgtgtagtaaaacnnnnnnnnnnnnnnnnnnnnnnnnnnnnnngtttcggccccctgtaaaatttttgtgtagtaaaacnnnnnaantnnnannnnnantnnnnttnnngtttcggccccctgtaaaatttttgtgtagtaaaacnnnnnnnnnnnnnannnnnnnnnnnannnngtttcggccccctgtaaaatttttgtgtagtaaaacnnnannnnnnnnnntnnnntannannnnnngtttcggccccctgtaaaatttttgtgtagtaaaacannnnnnnnnnnnnnnnnnnnnaantnnnngtttcggccccctgtaaaatttttgtgtagtaaaacnnnnnnntnnnnnnnnncnnnnnnnnnnnagtttcggccccctgtaaaatttttgtgtagtaaaactgnnnnnnnnnnnnnnnnnnnngannannngtttcggncncctgtaaaatntttgtgtagtaaaacnnnttnnantnannnnantnnngtannngngtttcggncncctgtaaaatttttgtgtagtaaaacnnaannngnnggnnntnnnntnnnnntnnngtttcggncncctgtaaaatntttgtgtagtaaaacnnnannnncnnnnnntnnnnnnnaannnnngtttcggncncctgtaaaatntttgtgtagtaaaacnnaanannnnnnnnnanannnnnnnnnnnngtttcggccncctgtaaaatntttgtgtagtaaaacnnnnnnnnnnnntnnnggannnannnnntngtttcggncncctgtaaaatntttgtgtagtaaaactnnnnnnnattnnnnngannnntnanntnngtttcggncncctgtaaaatttttgtgtagtaaaacnnnnnntnnnattnnanannnnannntnanntttnngccccnnnnaaanttttttntnnnnaaannannnnatnnnntnannttnnnnannnannnnttnnnnncccnntanaanntttntgtannnnaannnttaanngnnnnnnnnnnnntnnannnnnnnntnngnnnccngtaaaatntttntgtnnnaaaannnnnnnnnagntnnnnnnntnnannannntnnttnnnnnnccnntnnaanntttntgtnnnnnaannctnntncannnatnnntnntaanattcntgtttcggccccctgtaaaatntttgtgtagtaaaacanntncntttnttaaannananncangnnagtttcggncccctgtaaaatntttgtgtagtaaaacantnagntcnnnanccncttatgttnantagtttcggncccctgtaaaatntttgtgtagtaaaacacnnantnntgntttncntaaatcnganacgtttcggncc

SEQ ID NO: 1402 - DNA, 4000 bp, Escherichia coli
  misc_feature (307)..(307): n is a, c, g, or t
atcagcttttgcttcttcagtttcagcaagttcttctgcaggactttcaacctcagcagcagtttcactttctgcttcgtcattattttcagtcagctcagcagaagcttcaaggctgttttcaataatatctttagtttttgctaattctttttccaactgttcatcaatggaaagttcctccacctcgttgccaacgatgttgattttgtagccgattaatttagaagcaagccgaacgttctgtcctttgtgaccaattgccagagaaagttgattctgagcgacaatcacatctatttgattngcttcctcgtcaatttcaaggctctctatttccgcaggtgcaagagcattggcggtatattgatcaaggtcttcactccagcgtacaatatcaattttttcaccatttaaatcattgacaattgtctgcacacgactacctcgcatgccaacacatgaaccaactggatctacatcttcatctgtggaataaactgatatttttgctctgcgaccaggttctctggctgcattcacgattttgacaatgccgtcaaaaatttcaggaacttccatttcaaacatcttgatcagtaaacctggatgtgttcttgaaatcgttagttgagaatctttatgtggattgtcatttacgtccagtaaaagtacgcggacatgatctccgaatgtaaaattttcaccgtaaatctgctcacgtctgaataaatatgcttctactttattttgaaaactgaaagctatccggccgtttggttccacacgtattacgtttccggttaaaacttcgccaatcttgtcagtaaatgtggaaacgaccatttgccgctctgcttcttttaaactgccaaaaatgattggacgcgtagaatgtgcaattcgtaaaaattcacgatcacttatttcatactcaacttcatcaccaagacctgcttccggatcaatttgttctacatcttctaccgaaatttcgttgttcgaatcttctactatttcaacaacttccttaaaatgtgataagtttattttaccggttttttcatcaatctgaccttcaatttcgttatacggaagtttgcgttgagctgcctgtatcagtgactcttcaaccaacttaattactacttcgtggtccaaacctttctctttagaaaagtccttgatgatttcaaataagttctctttcaaaatttaccttttttgttgtacgttttcgttcaaaaattctatcagacagtcaaaaatccaagattggttctaggttcgcttttgtaatttgcgaaagcggaattactaattctgagccgtctgtttccagaattaagcatatttcctcttcagaacactcttcaagcataccgactgcgttcttgactccctgtatcttttgctgcagtcgcaccttaatacgctgccccttgaaagccttaaagtgttcaggtgtttttaatttgcggaaaattccgggtgatgaaacttccagtgcatttgtttcaaaaataggatcatcactacccaaaacctccatagccacctgattaacagtgacacagtcatccatcccgattccatgcggaccgtcaataaataactgtattgtctgctctgaaccatgccggttaaattcgacatctatcagctcataacctttagttttaatcggtacagccagtaaattaaacaaattttcttcagttctggccatgtgatccgcattgttttgagcaagctgtaaaatttacagattaaaagctaactcccatttttatcagttttatgttgataagtcgattctttttttagtcttgcttaagcttttcggtctattgtcaaatagtcaacaagttctccaagcaatgctttggcgggatgttcgggaagttttctcaaagctgatgaagcgagccctgcctgtttttgacagtaaaccgccgctgcatccaaagcacctgtactttcagcgctggctatacaccagtctatatcagcctctgagacttgttctcgttctgctaataaaatattgcgtacacgttccgcatctgtttcagcaagacgttccagcagttcgatagtgattaaggtacgctttccttcggctatgtctccaccgcgctcttttccataaccaccggcaccagcacttggagcttcattttcacttttttctgttaagttcaacaaatcatcacgaacctgaaaaccgataccaatcgcttctccaaaactaccgactgcttccagttctgactccgcagcaccagcaatcaatgctccgcactgacagggacctcttccggaataccaacctgttttcctgccaatcatttcacggtattctgcacggtcaggaaaagttctttttgcgacccagccgatatcgagagcctgtccttcaaaagtagcccgcatgaccttgttcaaatgccggtgaatctgcaaagaaagtgcgcttgacaatcttgtgtggttattcagtagagtctcatgtaccagacccagcaaagcatctccggaattaagcgcaagtgcaattccgtgttggagatgtaaagtcggttttccacggcgtagcaaagattcgtcctcgatgtcatcatgcaccagtgcaaaattatgaaataactcaagggcaactgcagaagtcagagcgtcttccggatcaccgccgaataattcgcaacagagcaagagcaatgcaggtcggaagcgttttcctccacgttgtggatagtcacgcattagatcatagagatactcttttggttctccgtccggaaagcagcgtagagtttcttcaccaatccactgactggcggctttcagataagtatttaactgcttatgatcacgggcaagaattttcattgtattttaatttctgaactaaagagcaaatattaaagaagaatgatttttattgcttagtatgattgaagtttcggaatacggaaattgttttttatccgttgatttgactgcttgagacctgcaacaggtaaaataacactcagacgatcggaacccggcagaaaatcaatgcggtgaaattctgtttcaggattcaaaaaagcttcgccaacatccttcagccgtcgtatctcctgtccgttaatccgcaggacaatggcatttgaaagtttttggtaaccaatgttaatctcatcagggataacctgcgttaccagaacgacacgtggagcagactcagtatttttggatgcggacttagcttttacgtttttataattatcatccatcaacacagtcttattttgttctaaaaataaacgtaaacgtactggcgcacgtgatctccagtttgctccccacatggagaggtaatttaaactcaattcctgaaataaaaatccgccctgaatcgcataacgtggaggatgtcctactcttttcaaaggtactgtacgtccatcttcttcataggcagaaactctcgtttgtaaaactatagcttttccattacgtatcagttcaagttccaaagaatctccgaccttaagctgatccaaaaaaagcagatcaaaaagcgaaagtccccattccggatgttttattttaccttcatgtgaaagttgccatttgcctatttttgtcaaataatccccgcgctgtaaaacatcggaacctgtaccgtaaggcaatattcgactgatccatatgcccggaagttccggtggaatttgaaaataatctgctgtgctgcgttgcggaagtctacgccagctaaaaccacgatgtgctaaactcttgtaggaaccactgcctgcatgtgctaaaaactcaagcagcatttgcgagggaattgctttcgcttctcctttaccggcctcaagaatcatccctacagtttcgttatcctgtaacagcggaaatccctgtccgctttttgaaacaccactcagtttcagcagcgctaaccacgcatcgctgactccgcggtgtcctacagccatgc

SEQ ID NO: 1403 - DNA, 4000 bp, Escherichia coli
  misc_feature (2)..(2): n is a, c, g, or t
  misc_feature (4)..(5): n is a, c, g, or t
  misc_feature (9)..(10): n is a, c, g, or t
  misc_feature (13)..(16): n is a, c, g, or t
  misc_feature (18)..(22): n is a, c, g, or t
  misc_feature (24)..(24): n is a, c, g, or t
  misc_feature (42)..(43): n is a, c, g, or t
  misc_feature (47)..(47): n is a, c, g, or t
  misc_feature (49)..(49): n is a, c, g, or t
  misc_feature (64)..(64): n is a, c, g, or t
  misc_feature (72)..(74): n is a, c, g, or t
  misc_feature (78)..(78): n is a, c, g, or t
  misc_feature (84)..(84): n is a, c, g, or t
  misc_feature (103)..(103): n is a, c, g, or t
  misc_feature (108)..(108): n is a, c, g, or t
  misc_feature (111)..(111): n is a, c, g, or t
  misc_feature (114)..(114): n is a, c, g, or t
  misc_feature (119)..(119): n is a, c, g, or t
  misc_feature (123)..(123): n is a, c, g, or t
  misc_feature (174)..(174): n is a, c, g, or t
  misc_feature (180)..(180): n is a, c, g, or t
  misc_feature (186)..(186): n is a, c, g, or t
  misc_feature (191)..(191): n is a, c, g, or t
  misc_feature (215)..(215): n is a, c, g, or t
  misc_feature (301)..(301): n is a, c, g, or t
  misc_feature (354)..(354): n is a, c, g, or t
  misc_feature (395)..(395): n is a, c, g, or t
  misc_feature (462)..(462): n is a, c, g, or t
  misc_feature (582)..(582): n is a, c, g, or t
  misc_feature (615)..(615): n is a, c, g, or t
  misc_feature (625)..(625): n is a, c, g, or t
  misc_feature (757)..(757): n is a, c, g, or t
  misc_feature (962)..(962): n is a, c, g, or t
  misc_feature (965)..(965): n is a, c, g, or t
  misc_feature (992)..(992): n is a, c, g, or t
  misc_feature (1023)..(1023): n is a, c, g, or t
  misc_feature (1036)..(1036): n is a, c, g, or t
  misc_feature (1044)..(1044): n is a, c, g, or t
  misc_feature (1050)..(1051): n is a, c, g, or t
antnnaagnnacnnnnannnnnanttcttaagtgactttcannaaanantatatgaattttggnaggaatannnaganggaaancatgcattaatgaatgganaatanccnttnaagcnaaanataatacgaaaattaaattggagtgttgctaaaagggaatgggaaaatgtnaaattnaagaancctanggaaccagctattttgtataaaantgtattttgggaaaacaggttatgggaatggaaagtctttcttggaaatttaaagaaatggttttgtgcttttatttatattgcantttttgttacggtaatgaaaaaagaggcagaatttgagaaaatttttaatggnaatgaaattgttttgaaactatacacgataataggaaaacnatgtggaaattggattgttggaataattactgtagttatcgcaggaattatatcgtctttgctcctnaaaaatttaaaaataccggatatacttgaaagtatacagacaattgcacaggtgattatggatttctttagtaaattacgattccgaataataaagagatttttatgatatgcgtattgnatttgcagaacggaaaataagaaaggtagggtnaatatttgcnaaaataggaactgattaaaaagaagtgatgatgtatatgaaaaacaatacaccatcacttttttaaataattgattccgttaacaatttgataagaactgtaacgatgagattatttcgggtgtttgggatncaagaaactgcttgatggagaaaaataaataggttatcataaagacaggaaaagattgcagagggaaaaacgaaaaggaaagagggatgcgaatatgtgtgatgcgttaagagaactgatgaaggatgatctggaagatgccagaaaaatgggagaggctaaaggaaaagccgaaggaaagatcatgggagaagcaaaaatcatnctnaaaatgaatcacagcggaatgtccccngaaaacattgcatccatcacaggtaaggatntggatgaaattcntgcaatantggaannaaaagtaccggtggcactataaaaagcggttaaaaaataaaaaattaaaattgggactaaagtatttcagtcctcgtccgatatatataacaagtaagcaaggaaatcccgttgcttactccacgagacagacctttgaccggagcgtacggccgcaaaaaggaaaatcttacaatcaaatatcatatcaattgcagcatggacgctgcaacttaattcaaggaggaaattattatggcaatggtagtacagcataatatgcaggcgatgaatgcaaatcgtcagttaggtgtcacatcaggagcacaggctaaatcagcagagaagttatcatcaggttacagaatcaatcgcgcaggcgatgatgctgcaggattaaaaatttctgaaaagatgagaagccagatccgtggtcttaacaaagcttcagataacgcttcagatggcgtatctcttattcagacagcagaaggtgcgttaaatgagacacacagcatcttacagcgtatgaatgaacttgcagttcagggcgcaaatgataccaaccagtctatcgaccgcgatgctatcaatcaggaactttctgcattgactgatgaaattgatcgtatttctgaaactactcagttcaacaaacagaatctgttagatggatcctttacaggaaagaaccttcaggttggtgcaaatacagatcagaagatcaccattaacattgcacagatgaatgcagaagctattggatttaaaaaggttactgccgctggtcaggacagctactatacaacaaatgaagtagttgataagacaaaggctaaaacttctgcaacaatgagacagagtgttggtaagagagctgcatgcaatgcaacaattacaaaaaatacagcatctacaggctttaaagcaaatggaaaggcatatgctacttcagcagatgctcgtaatgccgtaagcaaagctgctatgtgcgctgcacagatctttaaggttgctggctataattctgcagccgtaagtaaaccgaatgttgataattaccagcaggcacagggaacaattacaatgattcagaacgcaatcaataatgtttccagccagagatctgctcttggtgctttacagaacagactggagcacacaattgcaaacttggataatgtatcagaaaatacacagtccgcagagtctcgtattcgtgataccgatatggctgaagaaatggttagctacagcaagaataatattcttgcacaggcaggacagtcaatgcttgcacaggctaatcagtctactcagggtgtattatcattattacagtaatcaagtgattttgaagagagagttggctatagccagctcttttttcaaatataaaaattcccttaaattaaaagcagaataggaaaagatatggtagaactcacggacaaattatgtcaggaaaaagtgaagataggtgtcattgtacagaaaatagaaataggggaagactatatgtcctatgtgaggacaatacttcctaagttgaatcagattatgacagaaatttttcgattaatgcagagatcggagctacagatagagctgaatatagattttgtagtacaagtattgcaagatattgtatatggaattgaacaggaagataaagtattcctacttgatgtgttgaaatacgggttagaagaaatctttgattatttaatagagatgctggcgggagaaaaaaatgaataaagaaatctacaagcaaaatataaccgcattgcggaataaatatcctgcatgggcaaatattataaaaaacagacataaaaagaaaaacatagatgtaatagttgaaaaaagcgttaccggagatactatattaaaggtaaagaaaaatggtaaaattctatatttaaatgggaaatatgcaccagacgaagtgggaaaacaatggattaaaaaacaggggaagattgatgcgtatgcgacaattgttattttaggtatttcaaatggtgtacatattaaacaaattatggaatctgcacccaaaacatgcaatatattaatctatgaaccttcttttgagttgtttcggagggaaatggaagaagttgatctatcgtttctgtttgcaatggatattccggtaggcattgttatagaaggattgaatgaaaatgaattgtccgcatatatcaatataatgattacatatgataatatgacgctgatgaagttttatttatcaggaaattatgatgttttatttccagaacaggtaaaaaaattggttaaagagttaaaagatcacatagaagaggaatcgattcgatggaataccttggttcgttatacagatgtgaaagcaaaaaatacgttttataatttgccatatctgtatgagggatatagtatagaagagctggaaggaattttgccgtctgaggtgcctacgattgtcgtgtcggcgggaccttctttaaataaaaatataatggatttaaaaaaagcagtggggaaagcctgtattattgcgacagacacagcaatgaaaccgttgttaaatgctggaattatcccgaatttgtttgtaattatagatggattaaagccgggacttctgtttgaacataaagatttgtcaaaagtaccaatggtgacaatgacaggagtatcagtagaaccgatgcaatatcataaggggaaaaaatttttctactatagttgtgctccattggaacatcaaatattgacagatttgggagaaaaagagcatcggagcagaaccttgccagatttagtaacaggaggttcagttgcaacttctgcatattctctgggggtatatatgggatctaagacggtcattttgataggacaggatcttgctatgacgggaaatcatacacatgcagatggaacatttaaagataagatggacgaaatagatatcaa

SEQ ID NO: 1404 - DNA, 4000 bp, Escherichia coli
  misc_feature (3344)..(3344): n is a, c, g, or t
  misc_feature (3351)..(3351): n is a, c, g, or t
  misc_feature (3527)..(3527): n is a, c, g, or t
  misc_feature (3698)..(3698): n is a, c, g, or t
  misc_feature (3754)..(3754): n is a, c, g, or t
gtattgatacaagcttcatcatccaagatagaccactccacacctcttttattaagggcgctacagatagatttggtaaaggtgttatccccagcatcaattaaaaagtttgtcatcttcgtcctccaccgcagtgatgcacgtctcatgccaaataaaatataatattaaaaaacaattaattaaataaattttttgtaggaaaatataatgacgcagtgcaacattcataattttgacacttagctaacataaaataaaatacgtcgttaaggtttatgaaggagaaaatatcatgaatgcaaaagccgctataaacaaatatactgcgataaaaacacaaacactttctagtcaagacatcgggtacaatgtagttagcaccgctctaattaagcttgagacaagtttgcaatcgctcttgacgtcgacgaatccagaaaaatctgcaaaagccttcgaagcagctttactcacaatctactttttacaaaaaagcttagattttaaagaccaggggaatttagcaataaatttatatcgcttatatgaattctgtcgggtcaagctaatcgaaataggtattcaagacagctttggtaatcacgaaatacgaaaatgtcattcctttgtgaatgaaatccggttaagctgggatagcgtaaaaaataaataaccggttaggcagcgcaatgtatgcaccagaatttgtattcggaatagcttcagcagagctggcttcccgttacataacctcaagtctggaaattgaaacaatcgcatacaaaatatcgatgcttctacaatctaactatagcggtgaaaattcagaaaatattaaaagtacagctgagtcgtttatgcatagtatgcttgaagcaggcatcgaaaattccgatgctattctattgaattatcaatacgaaaagtttctgtataagggcaacggcaaaattagaaattggtcaccgatgtttggggaccctatgcagggcatcaaaaaaaagctctatacaccaacaatagtaaatcgagatttcaaagcctttgtttacagaacgaagcaaagtggagcttacaattgcccaccaggatggtctctaagcagccaaacaacaaatgcttttctcaacaaattaggaaacttagaggtaagtgcttttgatataattaagtcaagcgattaaattggtgtgtaagtgtggcctaagtttaggtgtggtagatatattgaagtacttggtggccgctatattctgttggtaggcaggcgatacagcaccctgcgctaactgtctattctctgtaaggatagcagacggagtaagataaggactaaataatcgagacgtataatctgcagtaccttgggatctatccgtgcgatgtacaggtgttatagtttgccctgcagggccaaaagaacttgagttaagaacaccagaaactatcggttgatctggaaatttaacagccggaaggttaggagttttcaagtctacagctagcataactaaaccatagacacatttacgaagctacttcaagattttgctaaaaaggaaacataatgaagcgaaaatgcgctttttgcgaaaagtctcgtttagcgtttatctgggttattgcttcggtgattataataaatgccgtttttaatcttgtgtactctaatgatgccctcactacattccaaatattaaagcttccactggggctttgcatagtggcgtttttaattaagctgttacttaaaagagattaatcaccttaatctcaaaatcagtctacgccgcggatgtgacaactgaactcagcagagatggctcaatagactgttctttatttaaattaacaactaaatccgccttgtgtgtacattcatctttgccattataataggaacaagaaattacaaatttcatgtctcggtgcgagcggttatttttttcatttagcgtcataaatggtcctccttacaggcaaagccgcaattttcgtgccaaaaattagattatgttgtaatttattatatagacataatgaatgtctggattgtagccgtttttaactaagtaatcgtttagtccatccattattctgtcagtaattactttgcgcccctcaatggttgttaactctgcgctggtagtatccacagcgagggtagaaatttcagaaacgaggtcggcttcaatttcatagattgcttttataaaaaaatcagctgtgacgttagtctgaaatgtggctaccgcaacctcgaaactgaacagttctttggtatcgagcagacgtccctggaaaacgttttcaatttttaaatagttgtatttgtcaacaagtacagggttaccgtcgcctggcacaccctctgaactcaattccgtatctgttgacccctgcaaactttcggatcctatcaaagcatcaacctgctctgtgtagtacacacccgaataatcagttttcactaataaatgcccgaagctaaatagcaacagaactagtccagccggtaaaaatatctgcaaataaaacatattgctcccccggtgttgcgcccagcaaaaaacatgccatgaactttatgttagctaagttaattgattgtgaggtctttccctcacttcaacgctcacacccaagcggtcctcaccctcacgaagcaactgagaacttgagagttccgtcaaaccatcgagatcagttattgtaaacgacacctcagcctttgaactagaaattggtgttatgatctcatttttgacgtacttatgacgtagctgctcataacttttgaaaaattcaatccattcctcaaattcaccattcgaaatatttacggttgcaatcacgtccatttggtagtgagccctcttggataatcagttacatcattgatctctaatctatcttattccaagctagattttatgcaaaacatttctccaaaaattaaatagttttggcataaaaattgcgctctctacctgctcggctaacttggagaacccatttaatgcttttctatcaaagtcaaaaccgtcttgtaacattgattgttgtagccatgcctataattgctgaagccaagtcggcatgcattaacactccagaaaatatacaggtttgcgaggatgcagttaatgaccaacggtcattaaaaccaaaaaatagctcaaatttagataccatacagctctattactctggaagcatatcatacaatggtccatttctggacgaaaatagcaaaattaaattttcaccgaattcagaaattcctgaagatccccaaaatgtgccgtcaacaaacaaaaacgaacctgccaccgaaaaangtttagnagacttatatgctgcaactagttcgaaatttcgaagtttgtccaaagatgaaagaaaaaatgtacaaagatgtttgcggcacggttcttattccggaaaaattgatggcctgtggggaaagcaaaccttcgaagcagttctaaacattcaaaagaataggcattataacagtgatnatactgacgaggttaatataattgcaaagattaaaaatgcattttcaaaaaaagacgcctgttatgagttgattagtgaaactttctcaatgtaacttttcctcaatgtaacttttcgctttaaaatatatttcaaggaatataacctgttaaggtgaacctgtattcccncgctcaaccgcagctaggaggtcaaagtgtctgatcagaaacaaacagacgaggcnaagataactgttgacgttctacgagtcaaagaggacgaaaatacatatatcaatagttcaaaagagcgaatgtttgacgtagtaagtttattcgtaactaatgcagagggttccgtttcgttaagtgatttctcacaaatctttaagactgtaaccgtttggattaaattcagaccccgcaaactgggaacttatgttgaagttatgaaagaacggaatacggatacaacaatcagcgtccgttat

SEQ ID NO: 1405 - DNA, 4000 bp, Escherichia coli
  misc_feature (35)..(35): n is a, c, g, or t
  misc_feature (50)..(50): n is a, c, g, or t
  misc_feature (68)..(68): n is a, c, g, or t
  misc_feature (322)..(322): n is a, c, g, or t
  misc_feature (803)..(803): n is a, c, g, or t
  misc_feature (917)..(917): n is a, c, g, or t
  misc_feature (983)..(983): n is a, c, g, or t
  misc_feature (1173)..(1173): n is a, c, g, or t
  misc_feature (1355)..(1355): n is a, c, g, or t
  misc_feature (1367)..(1367): n is a, c, g, or t
  misc_feature (1604)..(1604): n is a, c, g, or t
  misc_feature (1619)..(1619): n is a, c, g, or t
  misc_feature (1649)..(1649): n is a, c, g, or t
  misc_feature (1673)..(1673): n is a, c, g, or t
  misc_feature (1688)..(1688): n is a, c, g, or t
  misc_feature (1769)..(1769): n is a, c, g, or t
  misc_feature (1985)..(1985): n is a, c, g, or t
  misc_feature (2006)..(2007): n is a, c, g, or t
  misc_feature (2042)..(2042): n is a, c, g, or t
caccattgctacgctccttaccaagcagcaggctnaaaatcaagcttccntcaccgtgtaaaagtgtnactgaatcagcgtgacgttccttagtccactcttccagtttctcaggcggagacaataagcggaatctttcatgatgatcaggattgttagtcaccagatcacctagacgtatttgtgacagattgagcagtaaatcctgaattggctgtgtgtctgcttcgtaactcaatgactgctcctgccaacctccaccttgtaactgcagcaaggacaaggcaatgccttcaacctgaatattgatcttgttcaaggnttttgtgtcaagcttctctaataatttctgtcctccaactgctgaaattggcgaattcaggtagtttgtctgatctttaagatagtaaagtcctgtgcctgtgatgaatataactaaggtgattaataatagaggtttaaacataattatcttaaatttaagctttgaagacagttaaaataaaaattattgaactagttattatcactcatttctatgaagtcttcaaggtactaggcgtcatttttaatctttcagcatctgttttcagccggcagagcgtctaagctgaaatcataaaaacttgagcttttagcagaagctctgtaaattcgtagatgagtttttacttatattacaaaaagctttcagagttaatgttgattcaatgaggctttttggagttatctttttttgaggaaccatgtcagataatcagtttggatgccgtgtagattttgaaagtggtgaaggtaaatcngcactttatagtttggaaaagttgcagaaagatggaataggaccagtagacagcctccctttttccatccggatcctacttgagcaagcgttgcgtaatgttgatgattttcangtacgtccggaagacgtgactgcacttgccaactggaatgcaaatgaaaaatctaaacaagaaatnccttttaaaccaaccagagtaatcttacaggattttacaggagtacctgcagtggttgatcttgcatctctgcgttctgcgatggtggcgatgaacggagatccaagtgtgattaatccgcgtgttccggttgatctggtgattgaccactcgatacaggttgatttttttggaagttcaggtgcgctcnaaaaaaacatggaaatcgaattcaggcgcaaccgtgaacgttacgaatttctaaaatggggtaagcaggcttttgataattttaatgtctatcctccaggtgtaggaattgtgcatcaggttaatcttgaaactgcagcaagtgtagttcagtcacgggacggtgtttgttttccggacacngttgtcggaacngattcacacaccactatgattaacggacttggtgttatgggctggggagtcggtggtattgaagcagaatcggtcatgctcggccaaccgatttatatgctgattccggaagtaataggattccgcctgcagggtaaacttcaggaaaacgcaaccgcgacggatttggttttacgggttgttgaaatgctgcggcaaaaaggtgtggtagaaaaatttgttgaattttttggcacnggtttgaataatctnactctggctgaccgtgcaactctggctaanatggctccggaatatggagcaacnatgggatttgttccngttgatgatgagacattaaattatttacgcggtacaggacgtccggaagccttggttcagcgcattgaaagatattctaangcacaaggacttttccgcagaaatgacactccagatccaatatttacggatacattggaactcgatctttcaacggttgaaccagcgttggccggacctaaacgtccgcaggatcgggttaatctttcgcaaatgcagccaaaatggcaaaaaactttgcaggcatccaccaaagaacgtggatttgagttgagcggagatgaactggaaacttcngtgccagtaaagggtattgannccggtgaactaaaacacggttcggtggtgattgcngccatcacttcctgcacaaatacaagtaatccatcggtgatgctggcagctggtctgcttgctaaaaaagcagttgaaaaagggctgaaacgtcaaccgtgggtgaagacttctctggggcccggttcacgtgttgtcacggattacctgcaggcaacaggtttgaacgaagcgctagacgccttgggtttccacacagtaggctatggttgtacaacctgtatcggcaactcaggacctttgcctgaaaacattgtcagcgcgatcaacgaaggtgatttggtcgttacatctgttttgtctggtaatcgaaattttgaaggcaggataagttcgcacataaaggcaaattatttagcaagtccaccgttggttgtagcttatgcaattgcgggaacggttaatcaggatttgaacaatgatccgcttggaaacgataaagacggaaagccggtttttctaaaagacatttggccaactaaagcggaaattgcagaggtagaaaaaaagataagcagcgaaatgtatgagaaagaatacaaagacgttggtgaaagctctcctatgtggaatgctgtagagtctcgtaccggtgaggtttatgagtgggacgacagttcgacctacatccaaaatcctccttttttccaaaacatgggtctggataccaaaacattagcggacatcaccggagccagagttttagttaagcttggagactccatcacgacggatcatatttctcccgccggctcttttgctgaggaaactccggcaggtgcatttttgctggcaagtggtacagataaagtcgacttcaattcctatggttcacgacgtggtaatgacagagtcatgacacgcggaacttttgggaatgtgcgtttacgaaatgaattggcacccggaacagaaggtggttttaccaaaatgatgcctgacggggaagtgactactatttatgaagcttcgttaaaatataaagaatcagcaacaccgcttgtcgttttagcaggtgcagaatatggtactggttcatcgcgggattgggctgcaaaaggaacactgttactcggcgttaaggcagttgcggctacaagttttgagcgaattcaccgctccaatctcgtaggaatgggtgttctgccgttgcagttcaaagacggtgaaacacataaatcactcggtttaaacggtgatgaagagtacgcggttttgggtttaagtgatgatttaaaacctggtcaggatttaatcctgcaggcaggagatcgaaagatcacagtaacttgccgtttagatacgcaagttgaaattgaatattacaaaaacggtggtattttacatacagttctacgtaattttatgcgtgaaaatcagtaagaactgtagtgaggccgcaactttattgtgtccacatgaaagatgttctattactaaatcaggacggcaaccccttgacgctgtggcccttgagtactatcacctggcaacaggcgataaaggcgctctatcttgacaaggtgactgttttacgttcctatgatgactggatatgtcattcacaacacttggctttagctgtgccgagtgttgtgatgatggccaattatcattatcaaaaaggtacagtcaattttacccgccgtaacattttcctacgcgaccgttttcactgccaatactgtcaacgtcatttctccgctgatcaccttactatagatcatgttattccgaaaagcagaggtggcggaatgcgctggaaaaatgttgtcacagcctgccaaaaatgtaacctgactaaaggtgcaaatatagttaaaccttctcaaccgccatttgaacctgattattggcaaatggtaaatattgccaaaactctacatattcaaattcctgatcgaagttggcaggaatatctgcagtggcccaaacatctggtgaagatcaatcaggcc

SEQ ID NO: 1406 - DNA, 4000 bp, Escherichia coli
  misc_feature (258)..(258): n is a, c, g, or t
  misc_feature (260)..(260): n is a, c, g, or t
  misc_feature (326)..(326): n is a, c, g, or t
  misc_feature (812)..(812): n is a, c, g, or t
  misc_feature (816)..(816): n is a, c, g, or t
  misc_feature (1329)..(1329): n is a, c, g, or t
  misc_feature (1985)..(1986): n is a, c, g, or t
  misc_feature (2255)..(2255): n is a, c, g, or t
  misc_feature (3843)..(3843): n is a, c, g, or t
atcgaccaaagggtgctaaatctttctctcgcggtagcagtaagagagttgagcgctctgcagttgcccgccctgaaaaaagagataaccgtcgagatgacaaatcagatgctcgtaaaggctttcgcaaacccgttaaatcaaatgatcgagaggtaaaaagggaggaccgtagacccgatcgtcctgaaaaaagatttgatcgaagaggatctacgcaagatgctgttgctggtaagaactctgttgtagaagctntncgagcgaaggttccagccaaagagctagtagttgcaataaaggttgagctagatgaaaaaatctcngaggcaattagattagctaaaaatgccgatcttccaataaaagaagtaccacgccgagcacttgatgatttaaccggtttttcaaaccaccaaggtattgccttagttataaagccctttaattacacagatttttcaaagttaatagcaaatgctaaaaaaccaatgatgttaattggtttagattcaattactgatccgcataatttaggggcggtggttagatcagctgcagcctttggtgcagatggtgtggttattcctgagcggcgaaatgctgcaatgactggatctgcttggaaggcctcagcaggggcagcagctcggatgccaatctctcaggttacaaatctagttagatcaattgaggatgccaaaaaagcaggttgttttgtaattggcttagatgcagatggtgataccacgctagccaaaatgaacttggcaactgaatcaatctttatcgttgttggcagtgaaggaaanggantatctagattagttagagaaaaatgtgatcttgtggtttcaatcccaatgcaatcttccgttgaatccttaaatgccagtgtggcaacagcaattgtgatgtatcaggttgcggcagaaagaagtaagtaatttgatttataaccgctttatcgccctaggtgactctatgactgaggggatgagtgatgaggtagtaaatggtaattaccgaggttgggctgatcgagttgccgatgttttagcaaagagtaatcctgattttacttatatgaatttagcaattagaggtaaattattaaagcaggttgtcgatgatcaaataccggctgcagttaaatatattgagggaaagcaaactctagtctcatttcatgctggtgctaatgatgtactaaggccaaattacaaaccagaggtttctcttcctgagtatgaaaaaggagtaaagcagctaacagatgcaggggcgacagtaatagttttcacagttgtggataaggtggagggaaanggaaagacagcaactctttggcaccagcgctttagtgcctttaatgagaatgtaagaatggttgcggctaagtatccaacaattttatttgaagcaagaaatgctgaatttttaaatgatcgtagatttttagcatttgatcgattgcatatgaactcagagggacatagaagattagcaaatgctgttttagaaggattaggttatgagtttgatagaaattggaaagcgccactgccggaggcaaaagagaaaaataagattgtaaaaatttttataaacatcgcgtgggttggcatctttttgatcccttgggcttggcgacgaattaggggtaaatcatccggtgatggccgaattgctaagtattccaagccagtgaaatggttatcacgctgagttagccttctgattaccacccgttcacctttataaagcaaaatacccatgtgactcaacatttgatatcggttaacccacgtgagcgattaattgatagagagttaagttggttagcatttaatgagcgggtgcttgagttagctgagaatcaaagtaatcccctacttgagcgatgccgctttctggcaatattttcttcaaacttagatgatttttacatgatccgagttgcctcagttaagcgaaaattaganngcggcgtgacaaagaaaaacagcgccggctactcaccctttgaactattagctgagatatctaagaagacgcaggagttgatctcccgtcaaactaagttatttcatcaagagttaatgccacaattaaagcaaaatggaattgaaattgttgattgggacaagcttactcaaactgagattgagtacatcaacaggatatttactaagcgaatctttccagtcttaaccccacttgcagtagatccgtcacacccatttccatatatntcagggttgtcacttaacctggcggttttagttaaacaaccagatactaatgaggagttgtttgcccgagttaaggtgccggcctcgcttcctagatttattgaaacagctgagtttgtcggttcaagattcatccctcttgagaatgtaattatcgccaacctacatcaattgtttccaggtatgcagatcgaggattactacacatttcgaatcactcgaaatgctgatctggaattagaggaggaggaatctgaaaacctccttgaatcgatggagcaggagttgttaagaagaaagtttggtccaccggtaagacttgaggtagctagggagatcgactctgatctgttaaatagattaaagatcgagctatcaattcgagatgaggatatttcccactacaaggagccacttgatttgactggcctaaataaaattgctgacttagacagaccagatttaaagtttgcaccatttagaaatcaaatagtgcaggagttgcgcgaagttgacttggattcaaatgaagagtacttcgcagcgattaggcgcaatgagatacttcttcaccatccatatgattcatttaattcctccgtcgttagatttttagaggcagcagcaacagatccacaagtattggcaataaaacagaccctctatcgaacttcaggtgattcaccaatcgtaaatgccttgattgaggcggcagaggctggaaagcaggtactggcggtaattgaaattagagcccgttttgatgagcaggcaaatgttaaatgggctagaaagctagaagatgtgggcgttcatgtggtttatggcttagtaggttttaaaactcatgcaaagttatctttaattgtcaggcaggaggcagatacagtccggcgctatagccatgttggaactggtaattacaatccaaagactgcaaggatgtatgaagatctaggcgtgcttagtgctgatgatgcattaggtgaggatctcaacaaattgtttaatcaactatcaggctttgcgccgcaatactcatataaccgattattggttgcgccaagaagtatcaggcccggcttacttgagaagattgatcgggagattaaaaataaacaatctggcaagcatgcattcattagattgaaactaaactctttgctagatgaggagtttgttgaagccctttataaagcatcatgtgctggcgtggagattgatctagtaattagaggaatttgcgcattggtgcctggaatttctgggctctcggaaaatatcagagtgcgctcagttttgggcagatttttggagcactctcggatattccactttgccaacggcggacaggatgagatctatatcggtagtgctgatttaatggatagaaatttaaatcgaagagttgaatcactagtgaaaataactaaagatgaacataagaagtcattgatgcagatctttaatcaatacaccgcatcaacaacggctgcctggcatctacttccaactggaaaatggttactggtagataaggattcaaatggtgagcagttatctgacttacaggccatgattatccagncttatcgagctaaggtatgagtcaggtaattttggcagccggtgcaattgtttggcgcaaacataaagataaattcacagaggtagcagtaattcatcggcctaaatatgatgattggagttttccaaaaggaaagtgtgagattggtgaagagttg

SEQ ID NO: 1407 - DNA, 4000 bp, Escherichia coli
  misc_feature (1)..(490): n is a, c, g, or t
  misc_feature (775)..(779): n is a, c, g, or t
  misc_feature (781)..(782): n is a, c, g, or t
  misc_feature (784)..(789): n is a, c, g, or t
  misc_feature (791)..(797): n is a, c, g, or t
  misc_feature (800)..(800): n is a, c, g, or t
  misc_feature (802)..(809): n is a, c, g, or t
  misc_feature (811)..(813): n is a, c, g, or t
  misc_feature (815)..(815): n is a, c, g, or t
  misc_feature (817)..(819): n is a, c, g, or t
  misc_feature (822)..(822): n is a, c, g, or t
  misc_feature (824)..(829): n is a, c, g, or t
  misc_feature (831)..(837): n is a, c, g, or t
  misc_feature (839)..(840): n is a, c, g, or t
  misc_feature (842)..(842): n is a, c, g, or t
  misc_feature (844)..(846): n is a, c, g, or t
  misc_feature (848)..(848): n is a, c, g, or t
  misc_feature (851)..(851): n is a, c, g, or t
  misc_feature (853)..(853): n is a, c, g, or t
  misc_feature (855)..(856): n is a, c, g, or t
  misc_feature (858)..(860): n is a, c, g, or t
  misc_feature (862)..(865): n is a, c, g, or t
  misc_feature (867)..(867): n is a, c, g, or t
  misc_feature (869)..(870): n is a, c, g, or t
  misc_feature (872)..(874): n is a, c, g, or t
  misc_feature (876)..(876): n is a, c, g, or t
  misc_feature (880)..(885): n is a, c, g, or t
  misc_feature (887)..(887): n is a, c, g, or t
  misc_feature (890)..(890): n is a, c, g, or t
  misc_feature (892)..(893): n is a, c, g, or t
  misc_feature (895)..(898): n is a, c, g, or t
  misc_feature (900)..(901): n is a, c, g, or t
  misc_feature (904)..(904): n is a, c, g, or t
  misc_feature (906)..(914): n is a, c, g, or t
  misc_feature (916)..(918): n is a, c, g, or t
  misc_feature (920)..(921): n is a, c, g, or t
  misc_feature (924)..(930): n is a, c, g, or t
  misc_feature (932)..(938): n is a, c, g, or t
  misc_feature (940)..(942): n is a, c, g, or t
  misc_feature (945)..(947): n is a, c, g, or t
  misc_feature (949)..(949): n is a, c, g, or t
  misc_feature (951)..(952): n is a, c, g, or t
  misc_feature (954)..(958): n is a, c, g, or t
  misc_feature (960)..(960): n is a, c, g, or t
  misc_feature (962)..(965): n is a, c, g, or t
  misc_feature (970)..(971): n is a, c, g, or t
  misc_feature (975)..(977): n is a, c, g, or t
  misc_feature (982)..(985): n is a, c, g, or t
  misc_feature (987)..(989): n is a, c, g, or t
  misc_feature (991)..(991): n is a, c, g, or t
  misc_feature (996)..(997): n is a, c, g, or t
  misc_feature (999)..(999): n is a, c, g, or t
  misc_feature (1001)..(1002): n is a, c, g, or t
  misc_feature (1006)..(1006): n is a, c, g, or t
  misc_feature (1008)..(1011): n is a, c, g, or t
  misc_feature (1017)..(1020): n is a, c, g, or t
  misc_feature (1022)..(1025): n is a, c, g, or t
  misc_feature (1029)..(1033): n is a, c, g, or t
  misc_feature (1037)..(1038): n is a, c, g, or t
  misc_feature (1041)..(1041): n is a, c, g, or t
  misc_feature (1044)..(1044): n is a, c, g, or t
  misc_feature (1046)..(1046): n is a, c, g, or t
  misc_feature (1049)..(1049): n is a, c, g, or t
  misc_feature (1051)..(1051): n is a, c, g, or t
  misc_feature (1053)..(1054): n is a, c, g, or t
  misc_feature (1056)..(1056): n is a, c, g, or t
  misc_feature (1061)..(1062): n is a, c, g, or t
  misc_feature (1064)..(1064): n is a, c, g, or t
  misc_feature (1067)..(1067): n is a, c, g, or t
  misc_feature (1071)..(1072): n is a, c, g, or t
  misc_feature (1079)..(1080): n is a, c, g, or t
  misc_feature (1084)..(1084): n is a, c, g, or t
  misc_feature (1092)..(1092): n is a, c, g, or t
  misc_feature (1094)..(1094): n is a, c, g, or t
  misc_feature (1096)..(1096): n is a, c, g, or t
  misc_feature (1099)..(1099): n is a, c, g, or t
  misc_feature (1102)..(1102): n is a, c, g, or t
  misc_feature (1105)..(1105): n is a, c, g, or t
  misc_feature (1130)..(1130): n is a, c, g, or t
  misc_feature (1137)..(1137): n is a, c, g, or t
  misc_feature (1291)..(1291): n is a, c, g, or t
  misc_feature (1311)..(1311): n is a, c, g, or t
  misc_feature (1314)..(1314): n is a, c, g, or t
  misc_feature (1319)..(1322): n is a, c, g, or t
  misc_feature (1325)..(1326): n is a, c, g, or t
  misc_feature (1331)..(1333): n is a, c, g, or t
  misc_feature (1336)..(1338): n is a, c, g, or t
  misc_feature (1341)..(1341): n is a, c, g, or t
  misc_feature (1343)..(1343): n is a, c, g, or t
  misc_feature (1345)..(1345): n is a, c, g, or t
  misc_feature (1347)..(1347): n is a, c, g, or t
  misc_feature (1350)..(1350): n is a, c, g, or t
  misc_feature (1352)..(1355): n is a, c, g, or t
  misc_feature (1357)..(1360): n is a, c, g, or t
  misc_feature (1362)..(1362): n is a, c, g, or t
  misc_feature (1364)..(1364): n is a, c, g, or t
  misc_feature (1366)..(1366): n is a, c, g, or t
  misc_feature (1369)..(1369): n is a, c, g, or t
  misc_feature (1373)..(1374): n is a, c, g, or t
  misc_feature (1376)..(1379): n is a, c, g, or t
  misc_feature (1381)..(1381): n is a, c, g, or t
  misc_feature (1383)..(1383): n is a, c, g, or t
  misc_feature (1385)..(1385): n is a, c, g, or t
  misc_feature (1388)..(1388): n is a, c, g, or t
  misc_feature (1392)..(1393): n is a, c, g, or t
  misc_feature (1395)..(1397): n is a, c, g, or t
  misc_feature (1399)..(1399): n is a, c, g, or t
  misc_feature (1401)..(1401): n is a, c, g, or t
  misc_feature (1404)..(1405): n is a, c, g, or t
  misc_feature (1409)..(1409): n is a, c, g, or t
  misc_feature (1411)..(1411): n is a, c, g, or t
  misc_feature (1415)..(1416): n is a, c, g, or t
  misc_feature (1418)..(1419): n is a, c, g, or t
  misc_feature (1422)..(1422): n is a, c, g, or t
  misc_feature (1425)..(1426): n is a, c, g, or t
  misc_feature (1430)..(1430): n is a, c, g, or t
  misc_feature (1432)..(1432): n is a, c, g, or t
  misc_feature (1434)..(1439): n is a, c, g, or t
  misc_feature (1443)..(1444): n is a, c, g, or t
  misc_feature (1447)..(1449): n is a, c, g, or t
  misc_feature (1453)..(1455): n is a, c, g, or t
  misc_feature (1457)..(1458): n is a, c, g, or t
  misc_feature (1460)..(1462): n is a, c, g, or t
  misc_feature (1464)..(1464): n is a, c, g, or t
  misc_feature (1466)..(1478): n is a, c, g, or t
  misc_feature (1480)..(1482): n is a, c, g, or t
  misc_feature (1485)..(1486): n is a, c, g, or t
  misc_feature (1488)..(1488): n is a, c, g, or t
  misc_feature (1490)..(1496): n is a, c, g, or t
  misc_feature (1498)..(1503): n is a, c, g, or t
  misc_feature (1505)..(1509): n is a, c, g, or t
  misc_feature (1511)..(1511): n is a, c, g, or t
  misc_feature (1513)..(1517): n is a, c, g, or t
  misc_feature (1519)..(1537): n is a, c, g, or t
  misc_feature (1539)..(1540): n is a, c, g, or t
  misc_feature (1542)..(1543): n is a, c, g, or t
  misc_feature (1545)..(1551): n is a, c, g, or t
  misc_feature (1554)..(1558): n is a, c, g, or t
  misc_feature (1560)..(1564): n is a, c, g, or t
  misc_feature (1568)..(1573): n is a, c, g, or t
  misc_feature (1577)..(1579): n is a, c, g, or t
  misc_feature (1581)..(1582): n is a, c, g, or t
  misc_feature (1584)..(1587): n is a, c, g, or t
  misc_feature (1592)..(1600): n is a, c, g, or t
  misc_feature (1603)..(1604): n is a, c, g, or t
  misc_feature (1606)..(1606): n is a, c, g, or t
  misc_feature (1611)..(1611): n is a, c, g, or t
  misc_feature (1618)..(1618): n is a, c, g, or t
  misc_feature (1620)..(1620): n is a, c, g, or t
  misc_feature (1622)..(1622): n is a, c, g, or t
  misc_feature (1624)..(1625): n is a, c, g, or t
  misc_feature (2530)..(2530): n is a, c, g, or t
  misc_feature (3600)..(3600): n is a, c, g, or t
nnnnnnnnnnnnnnnnnnnnnnnnnnnnnnnnnnnnnnnnnnnnnnnnnnnnnnnnnnnnnnnnnnnnnnnnnnnnnnnnnnnnnnnnnnnnnnnnnnnnnnnnnnnnnnnnnnnnnnnnnnnnnnnnnnnnnnnnnnnnnnnnnnnnnnnnnnnnnnnnnnnnnnnnnnnnnnnnnnnnnnnnnnnnnnnnnnnnnnnnnnnnnnnnnnnnnnnnnnnnnnnnnnnnnnnnnnnnnnnnnnnnnnnnnnnnnnnnnnnnnnnnnnnnnnnnnnnnnnnnnnnnnnnnnnnnnnnnnnnnnnnnnnnnnnnnnnnnnnnnnnnnnnnnnnnnnnnnnnnnnnnnnnnnnnnnnnnnnnnnnnnnnnnnnnnnnnnnnnnnnnnnnnnnnnnnnnnnnnnnnnnnnnnnnnnnnnnnnnnnnnnnnnnnnnnnnnnnnnnnnnnnnnnnnnnnnnnnnnnnnnnnnnnnnnnnnnnnnnnnnnnnnnnnnncagttccgccctcaatttgtccgaaggcgggaatgaaaggccggatgcgctccgaccgggcgggggggcttacacccccgactccgcgcgtttcaatccgcgccccggtcacgcgaccggggcgaccgggcggggggggcttacatccccatcgccgcgcgggtctgggccgcgcggtccatcgccgcgcgagcctcgcggatgagcgcctcgatgccgccttccgcgagcacccgctcgtaaaagacggagggcaggtcgtctccgacgaccggcttcacctgnnnnntnngnnnnnngnnnnnnnctncnnnnnnnntnnngngnnngtntnnnnnngnnnnnnnanncncnnntnttngntnncnnncnnnnancnntnnntntttnnnnnnantcncnnannnntnnttncnnnnnnnnnannntnnttnnnnnnngnnnnnnntnnnttnnntncnntnnnnntntnnnncattnntttnnnttttnnnncnnntnttttnntntnntttntnnnntttttnnnncnnnntttnnnnntttnntcncangnttngncnnanaatcnnanagnatgnntaggagnnatanagagaganananagnganaangagagaaaagcgatggaaagcgagngaaagancaccaccttctctcgcaaattctttccaagaactttcatatatatgaaaaatgtttgaatctattttagatataaactctataacgtgcttatcgttatacgcatatatctattctatactattctatactattctattctattctatactatnctattctattctattctatncantcctnnnntannatatnnnttnnnttnantnanatnannnnannnnantnanatnatannannnnantnanatnatannannncnancanntaanancttnngnnaanaannatangnannnnnngagnnggnnnaggnnngnngnnnangnnnnnnnnnnnnngnnnatnnantnnnnnnnannnnnnannnnncncnnnnnannnnnnnnnnnnnnnnnnntnntnntnnnnnnnttnnnnnannnnnattnnnnnntttnnntnngnnnntttannnnnnnnntannanatagnatatagnananannataaataaggaaatgaataagaaagaaagaaaagaacttaggagtgaagcgatgaaagcgatgaaagcggggaggaattctttcttagaagggtttttagtaagcgaggagttaaaaaagttaatgcaacaacaagatttgaatccctttcaaaagttggagatgtgggcaatgccccttacgaaaaatgggggagaacttttgaaggtttgaagaaataagaaataagaaataagaaataagatgagcgacgaatacacagaaagtgcgcaggacgtccttcaggggttaatgggggagactcacgccgcctctattacttttacttccactaattctttgcctttgtctttgcctttgtctttgtctttgcctttgcctttgtcggaatctcaaatagatttaaaccctgagaaaaaagaagaaccccttttcggccaagactcccgtggggcttatgaaaatcaaaaggaaacctacgcccaccgtctcattgctactttactcgcccagggattaacaaataaagaaatcgccgaactcaccggacgcacgcaagccaatataaattatcttgcaaagcaaccttttgtaatgcagcaagcattaaaggttgttcacggaagtagcgacgccgctatggcacttttgcaaaaagaaagtcttgctgccgctgaacgtcttatcgtaattgcaaagaacgctaagaatgaagaagtcaaacgcaaggcaaataacgacattcttgatagaaaatacggcaagcctaatcaaccttattccgttcgccaagcaactgcgaaagaaatgaacgacgatgagcttgctaaaatcgcttttgggaatagttagaaatagaaataaactcctctatcctctatcctctatgcccttatctccacaanaagccgctcaagaacttcttcttcgtcgctccgcacgaaaagactttcgttcttggtgtcttcttcgtggctggcaacctgcgaaacatcacgatttaatcatcgcaaaactccaacaactcgttgacgacttccctgatcctacaaccaagaagtttaaacacaaacgtaaggtgatgcttctcatgcctcctgggtctgcaaaatcaacctatacttcaaaagaattcattccttggtttttgggtcattgcccaggtagttgcatattagcatcatcttactcgaaggatttaatcaactccttcggtcgcgctggccgcaatatcgtagagcaaaactccaacatccttggctatgaactcgaaaaagacacgcgtgcatcggacgagtgggaaacaactaatggagggcgttacttctgcgcaggcactggcgcaggcattgcaggacataggttcgacttcggccttattgacgaccccattggtacggaggaacaggctaattcaaaaactcatcgtgaaaagttggggcagtggtatttaaacgacttcacccctagggcaaaacccgatgctgttatctttatcatagccaaccgcaggcatgaacaagacctttgtgggcaattactaaataaaaccgaggactttcccaatggtctcgcaggggattctgatgaatgggatgtcatttccattccctttcgcgcggagtttgacaacgacccccttggccgtcaaaagggagagactctctggcctgaatactttaatgaagcgttcatccgcgcggttgatggaaagcccgcaaagactcgcgcgggactctaccaacagcgtccttgtcccgagacaggaaatttcttcgactcttccacttttgaaggctatcgagcaaatgaacttcctccccttaacgagttaaaaatatacataacttccgaccacgctatttctaaaaaggaagaagccaataagagttgttttggtgtgtggggagttgactcgaaagacaacctctggcttcttcctgaaattttttggcgtcgggctgacgcctccgancaagttgaagcgatgattaaactcgcgaagaaatattctcctatttgttggtacgcggaaaaggtacatataactcaagcaatcggcccatttttatcgaagcgcaaacgtgaaacgaaagtctattttaacgtcaaagaaattacttccaagaaggacaaacgttcacgtgcgtcttcaattgaaggtcgtatgtccatgcacaaggttttctttccgaaattcgcaagttggtgggacgatgccgaatacgaactgcttaccttcgacggaggtaaggatgatgattttgtagacatgtgtgggttgattggcaaggcgttgaattcactttcttccggggaagaagcggaagttgacgacactcctaaagatatcaatgtcaatcaaactccttgtt

SEQ ID NO: 1408 - DNA, 4000 bp, Escherichia coli
acatggtgataatgttcggccagatcagcagggttgaaagtgccaacagttgcaaacagatgaacggcaagaaaccgcggaagatatctgtcagcgaaatctcgggcggcgcaacagactttagatagaaagccgcggggccaaagggtggtgacaaaaagctgacttgcatgttcatacagaatacaacgccgaaccagatcggaatgtagcgtgcttctatgctgccgaagagcccgatttcctcaactggaagtcgtactacgatgggtaggaataccggcataatcaagagcacgataccgacccaatccatgaacatgcccatgatcaaaaacacaagcatcatcatcaatatgatacccatcgttggcagctctgctccaatgatcatgttagctacataggttggtccaccaacaagcgtgtaggcagcagccaaagctgctgcaccgattgtgacccagataatcgtgcctgtcgacttaagcgtacggatcaagctgtcccaaacgatatcaaacgtcatttcgcggcggatgataccgatggcgaatacggcgatcacacccatgccggcagcttcagtgatacctgtaatgccaccataaatggaccctaagaccacaccaatgacaacaattggggctatgagtcctttacccattttccaaccacgttgggtacgttcgcgtccaacgaccacgaacacaattaaagcaaagatcacaaacgcgccaactatccaagggatgtcagcgaccatacccaacgtgatcgggtcttcattttcgcggattgtattgtcacctgtcacggtaaaaaagaccgcgcgaaggaacaaaacacccgacacccacatcgcaaagcgtgagataaagccgaggaacatcaaacccttttctgagccttcgggctcgcccgggattggatctggcaagggggctaatgatgtgttcgctcgcgtgcggatcaaaatatatagaatgaagaacgatgctagcataaaacctggcaaaaaagatgcggtgaacaacgccttgatagatgtctctgttacaagaccgtaaaaaattaaaactatcgatggtggtatcatggttcccagtgaaccggacgcacagatcgtaccaatagcaagattgcgatcatagccaagtcgtaacatctggggcaaagcgattaagccaagcagcacaacttcaccgccgataataccagacatcgcggccattattaccgccatgatagacgtagctatggcgatgccgccacgcatccggctcatccaaacgttgagcgacgaatacatatcccgcgcaataccagaccgctccagcattgcagccatgaatataaataacggaaccgatatgagcacataattcgtcatttgccgatagaccgcctgccccaggacagacagcgggccacgcccaaaatcaccccataaaagatcaggtgggaactttaaagagagggtgacaacagccaagaacgccgaggcaaacccaagaggcataccaatggccaacagggcgaacatacccagaagaacgataagagatagtgtgccaatatcgaccattagttcttttcctcaagagtacggcggatgttttcgatttctatttcatcgatctcgtcggccggtgtgtgcgactgcggtgccttattccaatcggcgaacaagttagaaacagcttgaatgcagaccaagacaacaatgattagtagtgcgggtttgacaataccagggataggcggatcccaagccgtgccaaaggtctccatccgcatgaagcggttctcggcatcggtatagccaccccaaacaagggcgaaggtgaaggcaacgatcaacaggacggagatacagtcagatgttttttgcatccaccaaggcattgtgtcgtaaatgatgtaaattcggatatggctacgttgttgcatggcgtaaagtcctgcaaacaaaaaaacgaaacatccgatccacagggacagttcattggcccaaagtgttggccgcgagaatacgtagcgcgaaacgacctcgtagaacattactagcacaataaaagctgtcataatcatcgcaaggcgccccaaaaccacggacacaagatcaaaaaaaccgtcaggaggcgtttcaattgcgcctttagtgtcggacaaaaagattgatgcaaagattaatgatattgctaaacaagtgagtgttacctgtaccagcggctttcccgcaggacgtatcatctcaaacataccgtagggttctactgcgaacattcgctgcccaacaagaaacagataaagcaaaagtgtgaggccacaaaagacgatcattcccgtcttgatcggcgctctcatgcgccctaaaaaaagcgattctatctgcattttttgcttcctaatctttctgtgattggacatcaaattcgggtcaaaaaaggcgggcacggactgcacccgccttgatcattaagtgttaggggcggtcatccaatactacttgacgagacccagctggcgaaggtaatccttgtggctttcaactagcgctgctgcctccggactacgtgtggcccaatcgtcccaagcggcctgcgctgcaacgcggaatgcagctttatcttcagttgaccaatcatatagggtgactccctgctcttggagcatagcagccgcctcagtatttgccttctcattcaacattgctatttggaacgataacttttgccaggccgtctccatgatgcggcgctgttgttcggtcaggccttcccacacagcttgattacaagcgaggtggtctgatggcatagaatggaaaccaggatagttcgcgtgcttcacgatgtcgtaaagacctagtcccacgttgttggccaagccagatgcatccgcaccgtcgatgatacccgtttcaagcgcagtaaagatctcagtaaagtccatcacgattggtgacgcacccattttttcgaatatctctgtctccatgcctggaggtgaacggaatttccaacctacaagatctgcagggccagcaattggcttagaagacgcaaacgactcctgaccataaaccgcccacccaatcaactgcatgccctgagcgttgtagagctcctgagccgcttcgtagccgtcgccatagtatagccagctatactgctgccacggggtgtcgtacccgcccatgatgtcgccaacgaattggaacgcggggtttttaccagtttggtaagcgccgcctgttgcatcacaatcaagaatgccattgattgcagcatcgaatgtttcaacagtagcaacaacagacgatgaatagaacatctcaatagagatctcgcctccagacatagtttggacgtcatctacccattgagccaacatcttacctgtcggatgctcagtagcatagtgtgtttggatgcgtaaggttacgtcctgtgcgaatgccgcgctagccaatgtagcaccggcgacggcggtcataagtaatggtttaagcttcatattcgtttctctccctttgaggcactttacgcctaattattctcactaaactttggagttagtgatttaagatggtataccatctcaggagataccctactcatttccaaatcggcacgcaacagatttcactcatttctaaatcgacacgcaacaaatttcggtatacaactttcgaaatttcaacttatcagaaaatatgctgggaataatgcaagggccccaaatgtcggatcaaactttgccagaaaaacttgcaaatcagctgcgccgcgacatcttgcgaggtaatctcactcctggagattctgtaaaagagcgcaccagagctaatgatcttggcgttagccgaacaccaatgcgcgaagcaatccgtatcgtagcgcgcgaaggtctgatcaccttacgaccttcgcgtagtcccataattgcaatcccggatatcaaagccgttaccgacgatgtcgaggttttgata

SEQ ID NO: 1409 - DNA, 4000 bp, Escherichia coli
  misc_feature (1990)..(1991): n is a, c, g, or t
  misc_feature (2312)..(2312): n is a, c, g, or t
gcttcttttggaggtttggatagaacgtgcgtttcgttctccgcttggagtgcgatacgttatttccgaccataaccttttttccggtgagttgacaaatgcggctcatagcttcacttttagagagcgcaaagaaacgaaagaaaagccactcatccaacctttaccgtcaatcgacagcgcttttatattccttcaatttcctcaagagccacgcttgtccttccaaacgcgttttttcgatgttgcgaatccgattttgtccaaaatgcagcaagcgagcctccacgccatttggccctgctatggcaatccaaatcgtcccaaccggaatgtgttcactgcctcctcccggacctgcaattccggatgttgccaaggcaaaatcagctccagtagtacgcaacgctccttccgccatttccttcacgacagactcacttaccgcaccatgcgcttccaacgtatccggagaaactcccaataggttgatttttacctgattgacgtaagacacgaccccacccacaaaacaagcactggaacctggaacggcggtaatacttgccgctatcgcccccccagtacacgattcggcaacagcaaaggtcatcccttcatccgtaaacgtccgaaccacggcttctgcgagtgactctccctccacgtccgtaataatccaatcaccacattgcaatttgaaatctgagagctcctgctcaaccaagcggaccccttcgtctcgattttcagatacggcactcaaccggacccgaacttgtcccggggcgggtaaatacgcgatcgaaacaccgcggttcactaaaccgacctcccatgaggccacatgttgactcaaaaaactctctcctattccctgcgttaaaacggttcgatgataccgggtaggcaatgaaaaccgagcaacaagtcttggaatcacctcatccaccatgattcctttcatttcatacggcaccccgggcatgctcacgaccacttgatccgtaccctccactgtaaaccacattccttgggctgtcccctgtgggttcggcaaaacttcgcacgtatcagggagcagtgcctgatcaacatttgatggcaacatcggaaaacctcgactggaaaaccaatgtgtgatgtccgctagtacctcgtcattttgaaccaaaggcgccttaaagtaggttgaaagaacttgtttcgtcctgtcatcaaccgtggggccaagccctcctgtaatcagcaccaagcctttggattcaagcgccagatccaacgctgcaaccaaagccgcgggctcgtccgacagtgtcgtaatccgttcaaccgcaatgcctgcaagcgccaacttctctcccatccaagccgaattggtatcaatcgtttgacccaataacaattcatctccgaccgtaatgatttcagcaagcatggcacaaaattaatacggagcgcactcctctcaactcgcacaaaaaagaaaacggcccacccaaaaagggcaggccgttattctctatatgaaatcgtacttactgcacagccaaacgcacaactgtgctctggtcgccttgggctacgttcacaaaataaattccaggagcccatgtgctcacatcaagacgctccaaaatggccgcagtctgaaaggcatgaacaacctgccccgtagcactcatcaccgtgatttggtgagaacctggacgatcaatgatcaactccacttggtccgatgctgggttgggatacatcatgatatcctgggcttccattggttcagcaaatccgacccaatcctcaaaatcgatatcaccgcaatctcccaaatcgtcagcaggaacgcgcaggtgaacgatgtcattgatatcgatcggatccaaatctcctcgaacgtgcaatccaggttcgaaatcacgctgatagataatctctaacgtgccattcactacgtccggagcaatgcttccaaatacagcttcgtagnnatcgtagtcgacatcaggtgtcaagtcacaagcctcttcagtattccacgtcataccgccgtccatcgaatgaataacgtattggtgacggtagttctggactcccgtgctgaagttctccatgatggcagaatatgtgatgtacatgtttccagaggcatctgaagccatggaagggaatgcagcacacccaacaaaataagcggcaatctcatcttcgaagtcgagggttccactctcatcaatgtcgtatgaataggctacgatttgcgcactatcaggtcccatcgtctcattccaataagccagtccatttgtgcntgggaaatagctcgttgtgccatcaatggtatcagcatccatgtaatacatcgatccataggatacgtgcacttgaccatacgtgtctacatgcacatcacccgcaccgtccgcattgaagaactcctgaaacaagccatcttcgttgtagtcctctccaatctcaggaaggcccatatcgacttcatagagatcaacagggaagtcaactaacaattgctgctcccacgtatcgccattgtcctgactgatcatcacaaacgaatctgcaaaatcattgaacgcggcgaaggccactgtgttgccacgtgcgtggatggcataggtgtcaccactgaatgagaaaaatgctgaactatcgagctcagaaaaaatcatatctgtaatgtcccacgtgtctcctccgtcctgagaacggtagtacaacaaggctccatcttgaccgttcaaaacagctccaccgttggcttcaggtgtggaaacacaaatcacgtgtaagctgttgccgtcctcacctccagcggccattcgaggccacagtttaccaacttccaaatcactttcaatggaagtctcagaccacgctcccgatccggcatctcgccaagccatgtgcaatggagtgtcgataccggcatggctcatgaccacctcgcggccattcgcggtgtgcacaatagaaggccagccgattcgcgttgattctatccgctcgtatggaatttcattccaaacactaccattatgaaaattgtatcccgtcccgcgatcatcaaatggagtcaattccaaactcatcgtccacgccgctgagacagcgtctgctcctccagccatgcggtcatcaatggcagcattggactgcaagtcgtattgcgtatagccaatcacttgacgctctacaaccaattctcttgacatgtaatgctcaacatccgtggacgactgcccctccatcggttgctgtggtcgatctgaaaaatcggaaatggccatggtgggcataggcgcggcagtccgaagagctggggccatttgcggtacaccgtctaagagttgactccctgtggcaacaggggattgagcaactgctgaaaagcctaggcatatcgccatggctgcaagagtaaaatgcttcatgaaatagggttttgcgatgaaaaagtaccgcaaaacaagcaattaatcacggtcttgtgattagaatttatccactcaatctggcaattgagccaatggggtctcccgtccgacaaccacatcacccaatttcacctgtacagtcgcgtcaagtggaagaaaaacatccacgcgagagccgaatttgatgaaccccatttcctgtcccggtccgacctgatcaccctctttaagataccagcaaattcttcttgccacagcacctgctatttgtcgaaacataaccacaccgtgctttccctcgatcacatgcgtcgttcgttcattctccgtgctgctcttcggatgccacgcgaccaaaaatttgcccggatggtagcgggataacaacaccttacccgcaatgggcgcccattgggcatgcacattcaacgggctcatgaaaatactcacctgaatcctccggttcttgaaccattccgtctcctcaacttcctcaatcaccaccacttttccatcactgggacagaccacttgccggtctgaca

SEQ ID NO: 1410 - DNA, 4000 bp, Escherichia coli
  misc_feature (195)..(195): n is a, c, g, or t
  misc_feature (274)..(274): n is a, c, g, or t
  misc_feature (363)..(363): n is a, c, g, or t
  misc_feature (497)..(497): n is a, c, g, or t
  misc_feature (984)..(984): n is a, c, g, or t
  misc_feature (987)..(987): n is a, c, g, or t
  misc_feature (1437)..(1437): n is a, c, g, or t
  misc_feature (1590)..(1590): n is a, c, g, or t
  misc_feature (2193)..(2193): n is a, c, g, or t
  misc_feature (2235)..(2235): n is a, c, g, or t
  misc_feature (2340)..(2340): n is a, c, g, or t
  misc_feature (2343)..(2343): n is a, c, g, or t
  misc_feature (2376)..(2376): n is a, c, g, or t
  misc_feature (2388)..(2388): n is a, c, g, or t
  misc_feature (2448)..(2448): n is a, c, g, or t
  misc_feature (2498)..(2498): n is a, c, g, or t
  misc_feature (2526)..(2526): n is a, c, g, or t
  misc_feature (2529)..(2529): n is a, c, g, or t
  misc_feature (2571)..(2571): n is a, c, g, or t
  misc_feature (2574)..(2574): n is a, c, g, or t
  misc_feature (2589)..(2589): n is a, c, g, or t
  misc_feature (2622)..(2622): n is a, c, g, or t
  misc_feature (2625)..(2625): n is a, c, g, or t
  misc_feature (2633)..(2634): n is a, c, g, or t
  misc_feature (2636)..(2638): n is a, c, g, or t
  misc_feature (2641)..(2641): n is a, c, g, or t
  misc_feature (2643)..(2643): n is a, c, g, or t
  misc_feature (2645)..(2645): n is a, c, g, or t
  misc_feature (2647)..(2648): n is a, c, g, or t
  misc_feature (2650)..(2650): n is a, c, g, or t
  misc_feature (2653)..(2653): n is a, c, g, or t
  misc_feature (2656)..(2656): n is a, c, g, or t
  misc_feature (2658)..(2662): n is a, c, g, or t
  misc_feature (2664)..(2669): n is a, c, g, or t
  misc_feature (2671)..(2672): n is a, c, g, or t
  misc_feature (2674)..(2675): n is a, c, g, or t
  misc_feature (2677)..(2682): n is a, c, g, or t
  misc_feature (2685)..(2685): n is a, c, g, or t
  misc_feature (2687)..(2690): n is a, c, g, or t
  misc_feature (2692)..(2692): n is a, c, g, or t
  misc_feature (2694)..(2695): n is a, c, g, or t
  misc_feature (2697)..(2703): n is a, c, g, or t
  misc_feature (2705)..(2705): n is a, c, g, or t
  misc_feature (2707)..(2709): n is a, c, g, or t
  misc_feature (2711)..(2712): n is a, c, g, or t
  misc_feature (2714)..(2714): n is a, c, g, or t
  misc_feature (2716)..(2716): n is a, c, g, or t
  misc_feature (2718)..(2718): n is a, c, g, or t
  misc_feature (2720)..(2723): n is a, c, g, or t
  misc_feature (2725)..(2726): n is a, c, g, or t
  misc_feature (2728)..(2730): n is a, c, g, or t
  misc_feature (2732)..(2732): n is a, c, g, or t
  misc_feature (2734)..(2736): n is a, c, g, or t
  misc_feature (2738)..(2739): n is a, c, g, or t
  misc_feature (2741)..(2744): n is a, c, g, or t
  misc_feature (2747)..(2754): n is a, c, g, or t
  misc_feature (2757)..(2758): n is a, c, g, or t
  misc_feature (2760)..(2763): n is a, c, g, or t
  misc_feature (2767)..(2769): n is a, c, g, or t
  misc_feature (2772)..(2772): n is a, c, g, or t
  misc_feature (2774)..(2775): n is a, c, g, or t
  misc_feature (2779)..(2785): n is a, c, g, or t
  misc_feature (2787)..(2793): n is a, c, g, or t
  misc_feature (2795)..(2799): n is a, c, g, or t
  misc_feature (2801)..(2802): n is a, c, g, or t
  misc_feature (2804)..(2806): n is a, c, g, or t
  misc_feature (2808)..(2819): n is a, c, g, or t
  misc_feature (2821)..(2822): n is a, c, g, or t
  misc_feature (2824)..(2824): n is a, c, g, or t
  misc_feature (2826)..(2827): n is a, c, g, or t
  misc_feature (2829)..(2829): n is a, c, g, or t
  misc_feature (2831)..(2831): n is a, c, g, or t
  misc_feature (2833)..(2836): n is a, c, g, or t
  misc_feature (2839)..(2839): n is a, c, g, or t
  misc_feature (2841)..(2844): n is a, c, g, or t
  misc_feature (2846)..(2850): n is a, c, g, or t
  misc_feature (2853)..(2858): n is a, c, g, or t
  misc_feature (2863)..(2871): n is a, c, g, or t
  misc_feature (2873)..(2874): n is a, c, g, or t
  misc_feature (2877)..(2877): n is a, c, g, or t
  misc_feature (2879)..(2881): n is a, c, g, or t
  misc_feature (2883)..(2883): n is a, c, g, or t
  misc_feature (2885)..(2894): n is a, c, g, or t
  misc_feature (2899)..(2899): n is a, c, g, or t
  misc_feature (2901)..(2904): n is a, c, g, or t
  misc_feature (2906)..(2908): n is a, c, g, or t
  misc_feature (2911)..(2915): n is a, c, g, or t
  misc_feature (2919)..(2922): n is a, c, g, or t
  misc_feature (2925)..(2927): n is a, c, g, or t
  misc_feature (2929)..(2934): n is a, c, g, or t
  misc_feature (2939)..(2940): n is a, c, g, or t
  misc_feature (2943)..(2956): n is a, c, g, or t
  misc_feature (2958)..(2959): n is a, c, g, or t
  misc_feature (2961)..(2970): n is a, c, g, or t
  misc_feature (2972)..(2974): n is a, c, g, or t
  misc_feature (2977)..(2985): n is a, c, g, or t
  misc_feature (2989)..(2995): n is a, c, g, or t
  misc_feature (2998)..(3005): n is a, c, g, or t
  misc_feature (3007)..(3009): n is a, c, g, or t
  misc_feature (3011)..(3011): n is a, c, g, or t
  misc_feature (3013)..(3017): n is a, c, g, or t
  misc_feature (3019)..(3025): n is a, c, g, or t
  misc_feature (3027)..(3027): n is a, c, g, or t
  misc_feature (3029)..(3040): n is a, c, g, or t
  misc_feature (3043)..(3048): n is a, c, g, or t
  misc_feature (3051)..(3056): n is a, c, g, or t
  misc_feature (3058)..(3058): n is a, c, g, or t
  misc_feature (3060)..(3061): n is a, c, g, or t
  misc_feature (3063)..(3064): n is a, c, g, or t
  misc_feature (3066)..(3078): n is a, c, g, or t
  misc_feature (3080)..(3080): n is a, c, g, or t
  misc_feature (3082)..(3091): n is a, c, g, or t
  misc_feature (3093)..(3099): n is a, c, g, or t
  misc_feature (3101)..(3111): n is a, c, g, or t
  misc_feature (3113)..(3114): n is a, c, g, or t
  misc_feature (3116)..(3123): n is a, c, g, or t
  misc_feature (3125)..(3133): n is a, c, g, or t
  misc_feature (3139)..(3140): n is a, c, g, or t
  misc_feature (3143)..(3143): n is a, c, g, or t
  misc_feature (3145)..(3145): n is a, c, g, or t
  misc_feature (3149)..(3149): n is a, c, g, or t
  misc_feature (3151)..(3152): n is a, c, g, or t
  misc_feature (3154)..(3159): n is a, c, g, or t
  misc_feature (3161)..(3162): n is a, c, g, or t
  misc_feature (3164)..(3172): n is a, c, g, or t
  misc_feature (3174)..(3177): n is a, c, g, or t
  misc_feature (3179)..(3181): n is a, c, g, or t
  misc_feature (3183)..(3186): n is a, c, g, or t
  misc_feature (3188)..(3189): n is a, c, g, or t
  misc_feature (3192)..(3194): n is a, c, g, or t
  misc_feature (3196)..(3214): n is a, c, g, or t
  misc_feature (3216)..(3216): n is a, c, g, or t
  misc_feature (3218)..(3221): n is a, c, g, or t
  misc_feature (3223)..(3230): n is a, c, g, or t
  misc_feature (3232)..(3242): n is a, c, g, or t
  misc_feature (3245)..(3248): n is a, c, g, or t
  misc_feature (3250)..(3263): n is a, c, g, or t
  misc_feature (3266)..(3276): n is a, c, g, or t
  misc_feature (3279)..(3282): n is a, c, g, or t
  misc_feature (3287)..(3298): n is a, c, g, or t
  misc_feature (3300)..(3304): n is a, c, g, or t
  misc_feature (3306)..(3316): n is a, c, g, or t
  misc_feature (3318)..(3318): n is a, c, g, or t
  misc_feature (3320)..(3323): n is a, c, g, or t
  misc_feature (3326)..(3329): n is a, c, g, or t
  misc_feature (3331)..(3333): n is a, c, g, or t
  misc_feature (3335)..(3339): n is a, c, g, or t
  misc_feature (3341)..(3347): n is a, c, g, or t
  misc_feature (3349)..(3353): n is a, c, g, or t
  misc_feature (3355)..(3372): n is a, c, g, or t
  misc_feature (3375)..(3378): n is a, c, g, or t
  misc_feature (3380)..(3393): n is a, c, g, or t
  misc_feature (3395)..(3395): n is a, c, g, or t
  misc_feature (3397)..(3398): n is a, c, g, or t
  misc_feature (3400)..(3410): n is a, c, g, or t
  misc_feature (3412)..(3422): n is a, c, g, or t
  misc_feature (3425)..(3428): n is a, c, g, or t
  misc_feature (3430)..(3437): n is a, c, g, or t
  misc_feature (3439)..(3441): n is a, c, g, or t
  misc_feature (3443)..(3443): n is a, c, g, or t
  misc_feature (3445)..(3446): n is a, c, g, or t
  misc_feature (3448)..(3451): n is a, c, g, or t
  misc_feature (3453)..(3462): n is a, c, g, or t
  misc_feature (3464)..(3465): n is a, c, g, or t
  misc_feature (3467)..(3467): n is a, c, g, or t
  misc_feature (3469)..(3475): n is a, c, g, or t
  misc_feature (3477)..(3484): n is a, c, g, or t
  misc_feature (3486)..(3486): n is a, c, g, or t
  misc_feature (3488)..(3488): n is a, c, g, or t
  misc_feature (3490)..(3490): n is a, c, g, or t
  misc_feature (3493)..(3518): n is a, c, g, or t
  misc_feature (3521)..(3533): n is a, c, g, or t
  misc_feature (3537)..(3537): n is a, c, g, or t
  misc_feature (3539)..(3544): n is a, c, g, or t
  misc_feature (3546)..(3568): n is a, c, g, or t
  misc_feature (3570)..(3572): n is a, c, g, or t
  misc_feature (3574)..(3587): n is a, c, g, or t
  misc_feature (3589)..(3593): n is a, c, g, or t
  misc_feature (3595)..(3596): n is a, c, g, or t
  misc_feature (3598)..(3603): n is a, c, g, or t
  misc_feature (3605)..(3609): n is a, c, g, or t
  misc_feature (3612)..(3617): n is a, c, g, or t
  misc_feature (3619)..(3622): n is a, c, g, or t
  misc_feature (3624)..(3663): n is a, c, g, or t
  misc_feature (3665)..(3676): n is a, c, g, or t
  misc_feature (3678)..(3679): n is a, c, g, or t
  misc_feature (3681)..(3683): n is a, c, g, or t
  misc_feature (3685)..(3692): n is a, c, g, or t
  misc_feature (3694)..(3716): n is a, c, g, or t
  misc_feature (3718)..(3740): n is a, c, g, or t
  misc_feature (3742)..(3749): n is a, c, g, or t
  misc_feature (3751)..(3751): n is a, c, g, or t
  misc_feature (3753)..(3757): n is a, c, g, or t
  misc_feature (3759)..(3769): n is a, c, g, or t
  misc_feature (3773)..(3782): n is a, c, g, or t
  misc_feature (3784)..(3787): n is a, c, g, or t
  misc_feature (3789)..(3799): n is a, c, g, or t
  misc_feature (3801)..(3807): n is a, c, g, or t
  misc_feature (3809)..(3809): n is a, c, g, or t
  misc_feature (3811)..(3811): n is a, c, g, or t
  misc_feature (3813)..(3815): n is a, c, g, or t
  misc_feature (3817)..(3829): n is a, c, g, or t
  misc_feature (3831)..(3832): n is a, c, g, or t
  misc_feature (3834)..(3834): n is a, c, g, or t
  misc_feature (3836)..(3844): n is a, c, g, or t
  misc_feature (3846)..(3869): n is a, c, g, or t
  misc_feature (3871)..(3874): n is a, c, g, or t
  misc_feature (3877)..(3878): n is a, c, g, or t
  misc_feature (3880)..(3880): n is a, c, g, or t
  misc_feature (3883)..(3906): n is a, c, g, or t
  misc_feature (3908)..(3908): n is a, c, g, or t
  misc_feature (3910)..(3920): n is a, c, g, or t
  misc_feature (3922)..(3924): n is a, c, g, or t
  misc_feature (3926)..(3933): n is a, c, g, or t
  misc_feature (3935)..(3935): n is a, c, g, or t
  misc_feature (3939)..(3939): n is a, c, g, or t
  misc_feature (3941)..(3941): n is a, c, g, or t
  misc_feature (3943)..(3943): n is a, c, g, or t
  misc_feature (3945)..(3951): n is a, c, g, or t
  misc_feature (3953)..(3953): n is a, c, g, or t
  misc_feature (3955)..(3960): n is a, c, g, or t
  misc_feature (3962)..(3962): n is a, c, g, or t
  misc_feature (3965)..(3965): n is a, c, g, or t
  misc_feature (3967)..(3969): n is a, c, g, or t
  misc_feature (3971)..(3975): n is a, c, g, or t
  misc_feature (3977)..(3985): n is a, c, g, or t
  misc_feature (3988)..(3989): n is a, c, g, or t
  misc_feature (3992)..(3993): n is a, c, g, or t
  misc_feature (3995)..(3995): n is a, c, g, or t
  misc_feature (3997)..(3997): n is a, c, g, or t
  misc_feature (3999)..(3999): n is a, c, g, or t
cggataaagttgggtgctttgttgatagattttcaattagttcagatttagtcatcgtcaactctcctttaaatttatacttaaacttgttattaagacttacaggtaatgcattagttcataataaattaccgctaaatccttgttaattatagctggtagtaataaggctgagtcaatgacccagccttattnatgtgaattaattattcacctttagctgctttgaaagcttcagccattgcgtttggaatagcaacatcttcttgtttgntattcacgtttgcaactgcagctgcttcttcagcttgatctttcgcttttacagataagtgaacgatacgtgctttacgatcaacaccngtgtatttcgcttcaactacatcacctgctgcaacttcgtttgttaagtctgctgcacggatataaccttcaacgccacctgctaattcaactttagcacctttagcgtcagcttcaacaacagttgcagaaantactgcaccttttttgttgattgctacgaagttgttgaatggatcatcttcaagttgtttgatacctaaagaaatacgttctttcactgcatctactgctaatactactgcagaaacttcgtcaccttttttgtagttacgaactgcttcttcacctgcaacattccaagaaatgtcagataagtgaactaaaccgtcgataccaccttcaagaccgatgaagataccgaaatcagtgattgatttgattttaccagtaactttgtcgcctttgttgtgagtttcagcgaattgagtccatgggttaggtttgcattgttttaaacctaaagaaatacgacgacgttcttcgtcaacttctaacaccattacttcaactgtatcgccaaggcttacaactttagatgggtggatgtttttgttagtccaatccatttcagaaacgtgaactaaaccttcaacaccatctaagatttcaacgaaacanccntagtcagttaagttagttactttaccagttaatttgctgtttactgggtggttttcagcgatagcaacccaaggatcttgacctaattgttttaagcctaaagatacgcgagtacgatctttgtcaaattttaatactttaacagttacttcgtcgcctacattcacgatttcgcttgggtgtttaacacgtttccaagccatatcagtgatgtgtaataaaccgtcaacgccacctaaatctacgaatgcaccgtagtcagttaagtttttaacgatacctttaacttctgaaccttcagctaggttctcaaggatttgttcacgttcttggctgttttcagattcgatcactgcacgacgagaaacaacaacgttgttacgtttttgatctaatttgattactttgaattctaattctttaccaagtaggtgatcagcttcacgtgcnggacgtgtatcaactaatgaacctggtaagaatgcacgaacaccgtttaactcaactgtgaaaccgcctttcactttaccgttgattaaaccgataacggtcgctttttcttcgtaagctttttctaattcaatccaagattcgtgacgaacngctttctcacgagaaagtttagtttcgccgtaaccatcttcaactgcatctaaagctacgtttactgtgtcgccaactttaacttcaagttcaccttgagcgttttggaattcagcaacaggaattgcagattcagattttaagcctgcatcaacaagtacaaagcctttttgaatagcaacaacagtaccgctaacgattgaaccttgacgggtttcaaggccttttaatgattcttcaaagagttgagcaaaagattctgacatataaataatcttcttaatttaagttaataacatccacattaagatccataaaatgcggggttgaggataaatgtctattcttccttgaataaacagttaaatcgaaattgacgctttttgttgaatataagctaacgcttgagcaatgacttcatcaatactcaatgttgtactatctaacaataaagcatcatcagccggtttcaatggcgcaacctcacgatttctatcgcgaaaatcgcgttcttgtatctcggctaaaatctgtgcaaagttaccattaattcccttattttgcaactgtttatagcgtctttttgcacgttcttccgcactngcatctaaaaacagtttaacttgtgcatttgggaaaaccacngttcccatatctcgcccatccgcaatcaggccatcatttttaccaaaatcctgctgaagttgcagtaaagctgaccgcacttttgggaaaaccgccacttttgangcngcttccgccacttcttgcgtacggattaaatgnctcacatccatnccaccaagaagcacattgacttctccattctttggaatgaactgaatatctaaatgacgngctaactccgctaatccttcttcatcggttaagtctgcatgacgtttcancgcagccaatgccgtcacgcgataaatngcnccactatctaataaggtaaaacctaacttttctgccaatgcntancaaagtgttcctttncctgccccacttgggccatcaacggtgataatnatncccataanntnnntcntntnanntntcnatnannnnnannnnnnanncnnannnnnnttntnnnncnanngnnnnnnntncnnnanntnananannnncnncnnnancnnntnnannnnaannnnnnnnaannannnnaaannntangnnaaannnnnnncnnnnnnncnnnnncnntnnngnnnnnnnnnnnncnncngnnanantnnnnaantnnnntnnnnnttnnnnnnttttnnnnnnnnnannaanannncnannnnnnnnnnaaatnannnnannnttnnnnntttnnnnttnnnannnnnnaattnnatnnnnnnnnnnnnnnanntnnnnnnnnnnannnaannnnnnnnnattnnnnnnnaannnnnnnntnnnanannnnnannnnnnnanannnnnnnnnnnntannnnnnttnnnnnnanannannannnnnnnnnnnnntnannnnnnnnnnannnnnnntnnnnnnnnnnnanntnnnnnnnnannnnnnnnngccaanngtnanaaancnntnnnnnnannannnnnnnnnannnnannnannnnannttnnnannnnnnnnnnnnnnnnnnntnannnntnnnnnnnnannnnnnnnnnnttnnnncnnnnnnnnnnnnnntannnnnnnnnnnttnnnntaaannnnnnnnnnnntnnnnnannnnnnnnnnnancnnnnttnnnntnnntnnnnncnnnnnnntnnnnntnnnnnnnnnnnnnnnnnnaannnngnnnnnnnnnnnnnntngnnannnnnnnnnnncnnnnnnnnnnnatnnnntnnnnnnnnannnanannannnnannnnnnnnnncnntntnnnnnnntnnnnnnnntngngntannnnnnnnnnnnnnnnnnnnnnnnnnatnnnnnnnnnnnnnaaantnnnnnntnnnnnnnnnnnnnnnnnnnnnnnannnannnnnnnnnnnnnntnnnnntnntnnnnnntnnnnngcnnnnnnannnntnnnnnnnnnnnnnnnnnnnnnnnnnnnnnnnnnnnnnnnncnnnnnnnnnnnnannannntnnnnnnnnannnnnnnnnnnnnnnnnnnnnnntnnnnnnnnnnnnnnnnnnnnnnnannnnnnnnantnnnnntnnnnnnnnnnnaaannnnnnnnnntnnnnannnnnnnnnnnannnnnnntnanannnannnnnnnnnnnnntnntncnnnnnnnnntnnnnnnnnnnnnnnnnnnnnnnnnannnnaannanaannnnnnnnnnnnnnnnnnnnnnnnanannnnnnnnnnntnnntnnnnnnnntntttngnanannnnnnntntnnnnnnanttnannnannnnnannnnnnnnncanncannantntna

SEQ ID NO: 1411 - DNA, 4000 bp, Escherichia coli
  misc_feature (1967)..(1967): n is a, c, g, or t
  misc_feature (1992)..(1992): n is a, c, g, or t
  misc_feature (1995)..(1995): n is a, c, g, or t
  misc_feature (2029)..(2029): n is a, c, g, or t
  misc_feature (2063)..(2063): n is a, c, g, or t
  misc_feature (2328)..(2328): n is a, c, g, or t
  misc_feature (2391)..(2391): n is a, c, g, or t
  misc_feature (2413)..(2413): n is a, c, g, or t
  misc_feature (2418)..(2418): n is a, c, g, or t
  misc_feature (2420)..(2420): n is a, c, g, or t
  misc_feature (2427)..(2427): n is a, c, g, or t
  misc_feature (2433)..(2433): n is a, c, g, or t
  misc_feature (2436)..(2436): n is a, c, g, or t
  misc_feature (2487)..(2487): n is a, c, g, or t
tctagtctatctttttttaaatttaattttctttactacttcatcgaattgacttaacggaactattttgactatactcgttgatgcaattcccacatctatacacagtttttctatatcatgtgcatgtattgcatcaataattatgatccattgatgttctaaaactgacatgtaaaattcaacaattttgtttatgttgtattttttcatttccacatctagtttatttttaagttcaagaaatgtttctttacttgattcattgttcattggacaagattctggactatgtgttgcaaaaaccccaaataacataattatctaattttttactaatatttaatttattttttttaaaatatactgttgagttgatgactaattttctaaaatttaatatttacatctagtatgaaaataattgaatacattatgagtgaaaaatcttttgcaacttcattatcttgtatagatggtagagttcaacttcctatgattaactggattaagaaaaaatatcttgtagattatgttgatactattactgcgcctggaattgataaggtgatttctgataatgatgttgaatcaattaaaaaaagtgtaatgatatctgtatttaatcacaagtcatctcatattgtaatttctggtcattttggttgtgctggaaatcctgtttctgatgaaaaacattttattcaaattaaaaaaagtgttgaaattgtaaattcttggaatttgaacgttgatgtagttggtatttggattgatgagaattttgttcctaatttattataattttcttttttatatctaaccgtaaatcatacaatgttcacattcacatgtggtttgttcttttgatttttttaaacattttttgtgttgacctgcttgacattgaacgcatacttcttccatatcttcaacttttgtatactttttagattgatcaaatccaaaacctccatcttgtggtcctaccatgtatttccctaatttatgtagtatttttagttcactaatttagtgcactttttatggtatcttgtaattcaactttattttcttcgataattcctctaatctcaaatgtatctacatatccacctgcagatgcacgtgttgctttaagtaaaaagtgcaatgatccttcttcaatttttccaacataatgcccatacagaaaatctatctcatcattacatttccaaatttttttaatatttggaaaagtttgtttaatttctgtgggtatttctttgattcttctttttatgtactggtctaatgattttctaattgtattgtcttgaagcaattctattacaagttatcagttgttactttttagttctttttttctcatcatctttattgtcccacatgtgcatggttcctctgatcataaatgagcctacaataattgctactagtcctcctattatgaagagaaataatttaccaacatctttgatacttgccaattctatttctatactatcattgtaattataactgtctgaaattattcaattagattcaatagtgagtttgatatttttttaatatgagtaagaaaaagcaagctattgcatggattgtaatggctgcaagtgtagttggatttttcttcttttcaattgaaatggctgaaatcatgcgttaatacttaaaattaattacactcaatttctttgaaatattattgcccctcattacttctgaaattaagaactttttagatactcaaaaattaggttatgttgcaactgtttctccaaatggtaaacctaacatttctccaaaaggcactattattgcatggtcctctaaccttcttgcttttgcagatatacgttcccctgatactatggcaaatttacaaaataacccctttgtagaaattaatgtaattgatcctttatctcgtaaaggatatctattttcaggaactgctnaaataattaaaaatactccattatntgntgaaattctcactcattaccaaaataatggtatnaaaagtccaattaattctattgtgatggtatctntttcatctatttctgcagtaacttctcctctttatgatttaggtaaaactcaagatgaaataaaattaaaatggaaaaaatatttcaatgatttgtaatttaaatttattctgttgatgatttaatttttattaattcttgccttgtttttttatgtgcttctctttcttcttctaataatctttgaattccctctaactctttttgtgttgtattaagttttgattttaatgatcctacaactacgcttgctgcttcaataatncctgcattacttttttcattaatattatctgggattatatcttttttctcttttggagttganacatttgtattttgagtattanttttntnatctaantcttgnttngttttaattaatttagaatttgtttcatctaattctttacctacttctatntgctgttttcttattccttgcaatgttgattgtccttttacaatttgttctttcacctctttgtgttcttttatcattttttctaattcttcttttgtttttttaaaatctttttcagtttgactaagttcgttaattaattttgtatctttaatttgctgtgcatttttgtttttctctcttgtttctctatactctctttgtactatgtctaactccatctttttttgattgaattctttttttattgacattaaattactgactgtagtgtcgtattcttctttgacactttgaattttttctgtaatttttgttatctcttcttgttttactctaaattccttttggagaccttcaacttctgtttctaattcttcttttagaatggattcatcatttttttcaattttcacttctttctttttgccaaaaaatcccattatttctcactatttctctccaaaagatgaacctttctttattggcgttttcccttatttctgataaattttagataaaatccgatacctccaattattatgcctccaatccatacaattacgcttatactttttggaataattgcttcttgcggtcctacaattagcattagtgctcctaaaattatcagtgcgaatcctccactgtttctacttttattatgttctccgtgaaccatgattatagatactctgaaagtgttttagcaacttgctttcttccaatatctgtgatgaatgggcctatttttggtcctcttgaagttccaagaattatttgatataatattttaaagaaatcttttggttgtacatcatttgcttttgcaatttgatatattgtattttgaatatcttcaggttcctcttctgcttgtaatgctttaaccagtttatctagtgcttttttagatatatcatctaactctactgctattttttcttgttcatcaaattcatcagaataatttcctgcaatctcaattaatttttcaacttctgtttctggatttttaatcactccatagtctatcaattttttcatcactcgttcatttctgtcttctttgaaaatttttgttaattcaattaataatctgtaattgatatgaatgcttgattgttttggaggattaagtaaattgacatattcatacagtccttttaatttagttaactttgcttgattgtccactttaatccttccaaaataagtatcttcaatttcgttatactcattcatcaatgatgggatatcatcaaaccctaattctctagctcctgtaattcttttgtacagtaataataaaattgattttgaattaccgtactctaaccatttttgtgctgtaatcacatttcctaatgattttgaaatcttttttcctcctttatccaaaaacatttcatattttacgtgatgaggatgtggtacttttaaaatttcatctgatacccagtcatttactttaactgaatccattatgtcttttccatatgcctcaaatcta

SEQ ID NO: 1412 - DNA, 4000 bp, Escherichia coli
  misc_feature (132)..(132): n is a, c, g, or t
  misc_feature (279)..(279): n is a, c, g, or t
  misc_feature (500)..(500): n is a, c, g, or t
  misc_feature (626)..(626): n is a, c, g, or t
  misc_feature (770)..(770): n is a, c, g, or t
  misc_feature (1233)..(1233): n is a, c, g, or t
  misc_feature (1766)..(1766): n is a, c, g, or t
  misc_feature (1944)..(1944): n is a, c, g, or t
  misc_feature (1992)..(1992): n is a, c, g, or t
  misc_feature (2010)..(2010): n is a, c, g, or t
  misc_feature (2076)..(2076): n is a, c, g, or t
  misc_feature (2301)..(2301): n is a, c, g, or t
  misc_feature (3232)..(3232): n is a, c, g, or t
  misc_feature (3479)..(3479): n is a, c, g, or t
  misc_feature (3725)..(3725): n is a, c, g, or t
  misc_feature (3789)..(3789): n is a, c, g, or t
  misc_feature (3798)..(3798): n is a, c, g, or t
  misc_feature (3808)..(3809): n is a, c, g, or t
  misc_feature (3825)..(3825): n is a, c, g, or t
  misc_feature (3828)..(3834): n is a, c, g, or t
  misc_feature (3837)..(3838): n is a, c, g, or t
  misc_feature (3841)..(3842): n is a, c, g, or t
  misc_feature (3844)..(3848): n is a, c, g, or t
  misc_feature (3852)..(3859): n is a, c, g, or t
  misc_feature (3861)..(3870): n is a, c, g, or t
  misc_feature (3872)..(3887): n is a, c, g, or t
  misc_feature (3890)..(3891): n is a, c, g, or t
  misc_feature (3900)..(3909): n is a, c, g, or t
  misc_feature (3912)..(3912): n is a, c, g, or t
  misc_feature (3915)..(3915): n is a, c, g, or t
  misc_feature (3920)..(3921): n is a, c, g, or t
  misc_feature (3924)..(3929): n is a, c, g, or t
  misc_feature (3932)..(3932): n is a, c, g, or t
  misc_feature (3935)..(3936): n is a, c, g, or t
  misc_feature (3939)..(3953): n is a, c, g, or t
  misc_feature (3957)..(3959): n is a, c, g, or t
  misc_feature (3961)..(3961): n is a, c, g, or t
  misc_feature (3965)..(3968): n is a, c, g, or t
  misc_feature (3971)..(3973): n is a, c, g, or t
  misc_feature (3976)..(3978): n is a, c, g, or t
  misc_feature (3983)..(3989): n is a, c, g, or t
  misc_feature (3991)..(3992): n is a, c, g, or t
  misc_feature (3994)..(4000): n is a, c, g, or t
gagcctaaagcgacaaatccctcaggaatcgtggcacccgccggaaaacatgctaaaagcccgtggtcctcgccaccgcccagaacgcattcacgggccaggctgaccgcagaatcaccatgatcgttatgnggctgatgctcaagaataagacttgccactggtaccagctcacgtgccagctcggtaatcgcagaatcattgaacacgatatcgacgccggatgcttcggcaattcgacgcgcgtctttaacgagtccgtctgaaaggtctagcatngcgttggcaccgtatgctgcagcgcgtcgccctgcgggtatgggcgatacgggccttagctgatgggtaacagcgcgttcgatacgttctttctgcgtggaaggcagctgctctatcgagtcgagagagcctgtggttgtcagtagccgcagcccggcatcagcccacccggtacagcccgccaaagctacggtatctcccggttgcgccccagacctcancacagggttttcgcatcgtccaacagccgttatggtaacgctggcatcacgtgcgctgcctagatcaccgccgcctaccgtacagactgtagcgccgcatgcatgcagcgagtcgaggataccgcnggcaaagtcttcaacccaaccatagggggtttcgggcggcagacttagagatacaaaaaggctaacgggttcagcacccatagccgcaatatcggcaaggttctgggtggtggctttccaccctacctcgtaaccgccgctacncggaccggcaggccagatatcgagaaaatcttgcccatgtaccagagtatctgtggtgataaccgtgcgtcgattatcgcccgtgagcactgcgcagtcgtcaccgggacctacttcaagcaccggttcctgcccatgtgcggaggcaacctggattacggagcggttatgctcatccagcatgggcataaacaattgcaaaacacgggactcccccagctgagccaatgtgctcttccggagtgaactttcccgtgctttatgctttttggtccgagggttcattccccaataatcgcccataccctgttacctggcacggataaagtaccgaatcgccacaatggtaatcgcaagaattagcagggagaagaacgccaacggcacgaaacctgagagtccagggccacgagaatccgttgaacgttcctgaacactcttagggctatcgccgttccgttgngcttgcgaaccagcggacgttgcgggcggacgagcaaccgggttcacagcagatggaacagaataagaaccgtttctagactcctgtgggttcgccattctcaaagttggcgagccattccgggcgttctctccacgggacaaatatccctgtacccagtccgcggcgccggggaacgcattggggaaccctgaatttgttgcaaaacgccccaacgtcgcgatgctattggggaagggttcagcagatgtagacggcgcgggtgctggagagacattgctcgacggcgttgccgaagggctggcatctggagctggcgaatcgtcagaccccgggtttccatgccccgaagggctcgggctaggagttggagctgccgattcggaagcacttgggctcgggaacggaacaggctggctagtaggctgctccgaaggcgcaggggtccacccaggatcctgagacggtgcgggtgcggggtctgcaggagtaggtgttacgggcgacggggtcggagagaccgggaccggtgngggggtcacgggtgttggcttagccggagccggtgttacgggagtgggggtaggatacaccggtgtcgggttggcctgtgtaggcgtagggttcaccgggaccggtgtgggattcaccggagcagggttaaccggagtcagatccggactaggcacaatggtcggtaccggatcaggngcagggttaactggtgttgggttggcctgtgtaggcgtagggttcacngggaccggtgtggggttnaccggagtaggggttaccggtgtgggattcaccggagtctgatctgtaggagccggagtaggcgtnacaggagtagggttggcaggcacaggctccgggttcaccggggtcggattaaccggtgtgggcgtaggggttactggtgcgggattcaccggagtctgatctgtaggagccggagtaggcgtcacaggagtagccgctggttcttctccgagatccggggaagctgcctcagcgtcctcagcaggaaggttctgaacgggagcagcaggagttggagttacagcntctgtttcagaatcctcagtaggaacttcggcatcataaggctgcgcctgtggactctcatattcgggggtaacaggctgaacttccgcttcatcttcatcagttttctgagccggggtagctcgttgcgcaggggtctcggtagcctcaggaatctcgtcgtcctgctggtcatagtcaagcggaggtgcagcggcaaactcggcacctgcaatgggagattccgattgcagggcaacggcgggttgagcagcataggtcacgttgcccgaggccatgccgtacatagtcaaggtagcggttgcagacggcatgggcataggagtcacggcatttttctgacctaaagctgcaaaggtagctggtacggcaggctgcgtgatagcttgaccgggcgcggcagcctcagaggtcgcaggatggtttgcgaccttcccggaagcgccacgtgcctcctgtgtcagcgttgcggcgatcggcacactaccgaatgcaatcaatgcagtcgctaggctagccgacgctactttgcattgtctgtttcccaaaaagtgtccttataccgaatagctaccgaacaatatgcgtgcttgggtgagtctacaccctaaataacaaggatgtgcttctctcaaaagtttatcgaattttaagaatcttttcacgatcaactattaactgttactttcatggtacctggactatgggcaaattgtcgtgactttgagctttaaattggtattcaaatttttgctttcctctgatctgccgcgctatgtttctgcgacacgccagtgaatataccgtacgttagaatgagagagtgacttttacgtcttttaactttttcgtcatgtccccagcgaagcgagcaggcttgggtcttgcgctcaccggggtgctgtcgctcagcgcgtgtggagcgggcaangtcaatcttgatccggctccagatgccgccaaccctgtatgcgcttatgcgatggttgctatgccagaaaaactcgttggcctacagcagcgtgaaactacggcgcaaggaacgaccgcttggggcgaaccagcctccgtgattctcaaatgcggtgttaccgttcaggaacccgtatcggacccatgcgctgaggtcaatgggattgattgggtgctgcgtcccaaggatgcgccagagaactcancaccgccagtctcagcgtcttcctccgccgctgcaggccctgaaaaccgtgcgacgggaacgtggacggcaaccacgtacggacgaacgcccgccattgaagtaaccttcgacgcagataaggtttcatcatcaactcttcttgctgagctcaactcggcggtcaaacaaattccgtctcagaagaaatgcacgaacatcaacgatactctcaacggtgtcaaaaccggaaaatagaggattcaanacctctggatccttaccttcagttcgcttcacgcaaacgcaaattttagagcccccaaaacctnaggtcttgngggctctaannctggaatttccttctnttnnnnnnnccnnaanngnnnnncccnnnnnnnngnnnnnnnnnnannnnnnnnnnnnnnnnaannaattccggnnnnnnnnnnccnggnttttnncannnnnnttnggnnaannnnnnnnnnnnnnntccnnncnttgnnnnccnnncgnnnatccnnnnnnnannannnnnnn

SEQ ID NO: 1413 - DNA, 4000 bp, Escherichia coli
  misc_feature (633)..(633): n is a, c, g, or t
  misc_feature (785)..(785): n is a, c, g, or t
  misc_feature (797)..(797): n is a, c, g, or t
  misc_feature (815)..(815): n is a, c, g, or t
  misc_feature (1136)..(1136): n is a, c, g, or t
tattttttccttctacttttactgtgattggaaagtgtgcaaaaacaactttcattttaattgtataacctgtaatcaaaccttcacaaatatttctaataattgatcttgcagtatgtaaaattgcataatctctttttttgaaatcaattgtttttagtaaaattttattctctacaatttcaatttttactgggattaaacgaaaacttttgtgtgttttacctagtggacctacaaatgttaacatgtgtttttgttgtgtaactgtaattccttctggaatgactacttcgtctttgaatttttcgagttgactagtagacatatcccaccaaaaatcctccaattcctttatcgactgcctcgtgatgagacattacgccttgattagttgtgactatgagcattcctctatcataagatggtagatattgttgttcccaactgttgtattcatcactttttactttgaatcttggtgaaattgcaccacattttgtaatttttgccaataatttaattttgaatttgcctcctcgtttatcgtctatatgctcaaattctccgatatatccatctttttgaagtgtttttagaacttcaaccccaatttttgatgttggtagaatnatacaatcagatttccttcttgtttcgttattgtaaagtgtaacgaacaaatttgctaaaatattagttgctggcatctatatcaccgatttttcctgaaccctaaagatgttgctacttctctaaagcatcgtctacataacattaagtcntatttttgaatnacagcagtataatctccncatcttttacaccatcttgaacctctgccaaaatcatgtttttttcttccagtggcttcgtaggatctatctttaggcattatactattgtgactccatattcttttgcaagataatcctttgcttcttgattagtaataatgtgtgttttgccaacacttgctttgtgtttacttcttttacgaattgaatatcctggtctagttaatgtaactgatattccaagacctaaaattccaatctgtggatcatattttacatctggaatgtctatgtgttcgttaataccaaatgagtaattaccaaaattgtcaaatgctntaccgttgacactgtttcctttagcttctagtaatcttttcaataatgttactgcatcatcacctctaattgttactgcaactcctattggttcgccttttctaactccccactctctttgagtttcttttgcattacgtgttgatggttttttacctgaaatttgttctaatgcttttcttgcaatgtctatgacatctcctgatttaccaatacccatgtttagtactactttctctaaagatatttttttcattggggattctgttacttgagacatattatcactttaattgaattacaggctcctctttacctattggcatgatgatgtctgccggaatttcgatttttttatcacctaaaattagaataactctttttggaaggatgaatgttccttcttctacactttcaactttacctatttgtcctgcattgattcctcttgttactaatccttgacatcctgcttctaatttgatgatgtctaaaattttctgatcaggaatttgcattacacatgtatctcctactttagctttaacttctgcaagtgttgaacgtccatcatgaaatcctgtttgaattattcctttgttaattgatgttttagttacaactcttacaagtttcttagatttttcagattcattaattttaattggtttgagaatttttccttcagttggaactaagcgataaacatctgaaacattttctaattctactacgtccatcaatccaattgcatgatgaagtgattttctaacaactccatcaattttgactttacctgaatagattgatgctttagcttcccttagacttgtaactatctttaatgtgtctcttaggaatactgctgttggtattgcaaaattctttttgtgtggacctggttttgttgtaattacaaatcgtttatcttttctagtaatgccccaaaactgtggtgccatttgtcgtttgagttttttacttcctgcaatacttaccattatttctcattttcctttttttcaacttctttttctacctttggttctgttttgttttctttagtggttgtttcttttggttgttttcttggatctttgccttctaattttgccattctccatttgtcattactgttaagtgaagttattactaaattggatgtatggatatagacgtcaaatttgtctcctttggttttttctttctttacaccgtcaattgcaacacttgatttttgagtggatatatttgaaattttaccgtcaactcctttgaattctcctcttagaattgttacactatcaccttctactactcttgcactttttttaccgtattttttttgcaagtcttttgataatgcacttcccatttgtttacttctagtttgaagagttgcttggaaaagcattcgattacgcattttagttggttttaccattttatcatatcaccgttgatgccaagttagctactcttggccatttttctgaagcttctgctgcaactggacctttgatgtctgttccttttgtttcaccttctggtgtgattaaaactgctgcattatcttcaaaacaaactctgactccatttaatctacgaactgcatatttttgtctaacaataactgcaccatacacttgttttcttaattctgctggtcctttctttactacaacattacaaaagtctccaacaccacctgctgctagtcttgatgctcttgttttgattcttggaacgttaattacttctaaaatttttgcacctgaattatctgcacatactatgttggctcctacaggtattgatcttgttacgtatggtcggaattcttctactccttttcctgcttgttttgccattatgcttttacctcaattactacatatgaaactgattttgaaattggtctacattctgcagttaacacatgatctccagatgttacatcaatacatcctggtacgtgtgcatggattgtacttttacctctggcatatcttttgaatttactaaagtagattggttcgtcttttgtcaatgtaatggtctgttttgctttatcacctgtaactttaccatcaaataattttcctcttattgataaacctccatggaatggacaattcttgtcgtcacattctttttttggttcgtttactttgattcctatatttttagtcatgcttttgctcctattctttcatatggtcttttagtaattgttgtaccttttactatcaagtttttacctttaattgaaaatccccaatcgtttgttagttttggaatcattttcgtacctttttctgtatttaatgtaaacatcgattttgtttcattaatgattgttccatttaatcctattacttgaggattagatgaattaatgatttttgtctctaaacctatgaattcatgtcttgaaattgtatctacagtaatcatttctctttctccatttcatttaatctagttaacattcttgcaatattgtgacgtattggttttagtttaccactctcttttcttaatgttccttttgatgaatctactcgaagttttgccaaatctgttctattgtctaacattttacttctaagatctttttcatttagatttctaattgttttcatactgattttggtcatttcatacttgcctcatcttcttctagtgtttcaattgttttcattttttctgcttcgattgcaatttgttctgattctgattttgctttatttgcatctccttcaactttaacaacttcaactttaacatctccttcaactttaacttcttcaacttttttaactggtgcttctttttctactttcttctttttggtttctttt

SEQ ID NO: 1414 - DNA, 4000 bp, Escherichia coli
  misc_feature (95)..(95): n is a, c, g, or t
  misc_feature (648)..(648): n is a, c, g, or t
  misc_feature (888)..(888): n is a, c, g, or t
  misc_feature (1991)..(1991): n is a, c, g, or t
  misc_feature (2634)..(2634): n is a, c, g, or t
  misc_feature (2655)..(2655): n is a, c, g, or t
  misc_feature (2736)..(2736): n is a, c, g, or t
  misc_feature (2742)..(2742): n is a, c, g, or t
  misc_feature (2932)..(2932): n is a, c, g, or t
  misc_feature (3044)..(3044): n is a, c, g, or t
  misc_feature (3297)..(3297): n is a, c, g, or t
  misc_feature (3327)..(3327): n is a, c, g, or t
  misc_feature (3332)..(3332): n is a, c, g, or t
  misc_feature (3423)..(3423): n is a, c, g, or t
  misc_feature (3897)..(3897): n is a, c, g, or t
ttggggtgaagcaagatgctgttccaggcagaattgcagagctatggttcaatgttgatgagggacaagaaggaatttactttggtcagtgttcngaattgtgcggaaaagaccacgcctacatgcctattactgtcagagcggttaccatggcagaatatgagaaatggcttgacgaggctataatagagtatgcaggtaagccacgtaatttggatatagcttcaaattagcagataagatcaagttgtttagtttgataaaggacaaaatatgacagatgcgtcgataacatcttctagctatagcacttacaatcaaccagagtttgatgattactttgagttgctaaagccaagagttatgtcattggtaatatttacagcatcagttgggttatttgtggcgccaaatggagttcatccaattttggcatttgcatcaatcctattcatcgcgattggagcgggagcctctggtgcattaaatatgtggtgggatgcagacatagattctgtaatgaaacgtacgtctgaaagaccaatacctgggggtagagtgtccccatctgaggcacggaacttagggctctggttgtctgtattctccgttggcatgttggctataacagctaattttttgtcagcngctttattggcttttactatttttttctatgcggttgtttatacgatgtggttgaaaagatggaccccccaaaatatcgtgattggtggggcagctggtgcatttcctccaatgatcgggtgggttgcagcgacaggtggggtatcagttgaaagtgtgttaatgttcgctctcatatttatgtggacaccaccacatttctgggcgcttgcgctgttcatgaatgatgattactcaaangcaggtgttccaatgttgaccgttactcatggtaaaaagtcaactagattacatattttgatctattcagtgttgttagctcccttagccatgagtttagcatttactgaaataggaggacctatttactttttaactgctttaggtctaaatggttggtttttgctaggggcatatcggttgtttaatagtagcgaaataaatgcggcacttcaaaaatatagtcgagagaaaactttctttttcttctctattttctatctttttgctcatttcatggctttactaattgaagccttcgtcgattttaaagttatcaattggccggtgtttttttagttatggctttgagtagattacacccacagcacaaaaaaagattaaggtccaatattataattggaggcttacttctaggatttgttgcacttgtttttggtataaccgtggtgaaaatgagcaatggcgcgatgcttgaagcttttgaccatagttacagaattagtgtaactccagccaaagatgagtaaaaattcaaatagaaaaaccgtgataggagcgatttctcttgtagttttcatgggtactttgtcatttgccgcggtacctttttatgattggttttgtagagtaactggatttggaggtactactcaattagctcaatctgataattctgaaattcttgataaaactattataattaaatttgatgctaatactgaacgtggcatgccgtgggattttaaaccagttgaacatgaattagagttaaagattggtgaaactgggttggcgttttatcaggcttataatccaacgtctaaaccggtggccgggacagcaagttttaatgtgtttccttactctgctggaggttattttacgaaaatagcatgtttttgtttcgaagagcaggtgcttcagcctggagaaaaaattgatatgccagtcagcttttacattgatcctgatatcgtgaaagataaagaagcaaaatttgctaaatcgattactctatcgtacacgttccatcgaaccgaattgccgcaggatcaagcatcgctatttcaatcatcagacaaatagtatagttttggtanatatataaggaaggtcaacatggcacacgaaaaaaatcatgattatcatattcttgacccaagtatattaccatttttaggtgcagttggcgcatttattttactcttcggtgcagtattatggatgcaaagcgtcacaatttttgtattcttgattgggcttgcactggtactttatgttatgtgggcatggtgggcgcaggttgtggtggagagtcatattggtgatcatacaccagttgtgcgtatcggcttaagatatggttttataatgtttataatttctgaagtaatgtttttcgtagcttggttttggacattttttaaacatgctttatatccaatgggaccagacagccctaaaattgacggtgtatggcctcctgcaggaattgaaacatttgatccatggcatttgccattgattaatacattaattctcttgtgttcggggtgtgctgcgacatgggctcaccacgcccttgttcacgaaaataatcggaaagacttagttaacggactgataatcgctgttgcattgggagcattattcacgttttttcaggggtatgaatatggccatgccgcatttgggttctctggaaacatttatggagctacctttttcatggcaactgggttncatgggtttcatgtattaatnggatctatttttctattggtatgtctttttagaacaatgaaaggtcactttaatccttctcaacatgttggatttgaagcngcagcntggtactggcactttgttgatgttgtatggttatttttatttgcggccatttacatttggggtggctgataaaatatcattgcataataattcttctttaaatattttgctttggcgcagatctcaatctgcgccttttgaatatggattactagcatgaagcaatttacagttcctgtgttatttggcntaattggtgcatcaattctaatttatttgggagtttggcaaacacaacgtttacagtggaaagaagccaaattacaaactatagaaagcatgatttcagctaatccaagtgntttgccggatttaccaaatatagaactgcaccaatatttgcccgtaagtttaaagggagaatttgtaaaagatgaggttcatattttaacaagtagacctccaattggtccggggtatcgggtgatctccaagtttaaaacaaataatatagttattcttgttgatagagggttcgttcgggaaattgataaaaacaatgatagaacttccggggttgccaaagtaattggtaatctactatggccaaatgangttgatagctctttcacaccaaatccaganttagntaagaatgtatggtttgcaagggatttatcgatgctctctacgcatctaaatactgaacctatattggttgtagcaaggcagattaaaccnaacttaaacgaggttatgccttggccaattgatacgattggaattccaaataatcatttccaatacgcagtaacatggttttcattaagtattatttggatggggatgacagtgtactggatatggcgtatcagaagccgacaggatatttaggttaatgaggtgtgttagatgaaatatgtttcaacacgaggtgaggctcaagagttagactttgaagatgtgatgctgactggtcttgcacgagatgggggcctttatttaccaaaagaatggcctaaattcactgataaagacttaagtaatatggcaggctcttcttatgaagagattgcgtttacagtaatgaagccatttatcggttctactttcagtgatgaagaatttaaaaaaataattaaaaatgcttaccataattttgagacagaagttcgctgcccacttctgaggctaagtgataatacttttttattngagctttattatgggccaactttggcatttaaagatgtcgcgatgcaacttattggccaaatgtttgaattgtccttaaaaagaaaatcacaaaaaattgtta

SEQ ID NO: 1415 - DNA, 4000 bp, Escherichia coli
  misc_feature (74)..(74): n is a, c, g, or t
  misc_feature (248)..(248): n is a, c, g, or t
  misc_feature (380)..(380): n is a, c, g, or t
  misc_feature (428)..(428): n is a, c, g, or t
  misc_feature (500)..(500): n is a, c, g, or t
  misc_feature (626)..(626): n is a, c, g, or t
  misc_feature (680)..(680): n is a, c, g, or t
  misc_feature (749)..(749): n is a, c, g, or t
  misc_feature (1013)..(1013): n is a, c, g, or t
  misc_feature (1946)..(1946): n is a, c, g, or t
  misc_feature (1954)..(1954): n is a, c, g, or t
  misc_feature (1969)..(1969): n is a, c, g, or t
  misc_feature (2024)..(2024): n is a, c, g, or t
  misc_feature (2027)..(2027): n is a, c, g, or t
  misc_feature (2141)..(2141): n is a, c, g, or t
  misc_feature (2239)..(2239): n is a, c, g, or t
  misc_feature (2258)..(2258): n is a, c, g, or t
  misc_feature (2285)..(2285): n is a, c, g, or t
  misc_feature (2316)..(2316): n is a, c, g, or t
  misc_feature (2327)..(2327): n is a, c, g, or t
  misc_feature (2354)..(2354): n is a, c, g, or t
  misc_feature (2387)..(2387): n is a, c, g, or t
  misc_feature (2405)..(2405): n is a, c, g, or t
  misc_feature (2423)..(2423): n is a, c, g, or t
  misc_feature (2426)..(2426): n is a, c, g, or t
  misc_feature (2450)..(2450): n is a, c, g, or t
  misc_feature (2459)..(2459): n is a, c, g, or t
  misc_feature (2527)..(2527): n is a, c, g, or t
  misc_feature (2531)..(2531): n is a, c, g, or t
  misc_feature (2537)..(2537): n is a, c, g, or t
  misc_feature (2546)..(2546): n is a, c, g, or t
  misc_feature (2561)..(2561): n is a, c, g, or t
  misc_feature (2576)..(2576): n is a, c, g, or t
  misc_feature (2594)..(2594): n is a, c, g, or t
  misc_feature (2600)..(2600): n is a, c, g, or t
  misc_feature (2615)..(2615): n is a, c, g, or t
  misc_feature (2636)..(2636): n is a, c, g, or t
  misc_feature (2648)..(2648): n is a, c, g, or t
  misc_feature (2672)..(2672): n is a, c, g, or t
  misc_feature (2684)..(2684): n is a, c, g, or t
  misc_feature (2686)..(2687): n is a, c, g, or t
  misc_feature (2725)..(2725): n is a, c, g, or t
  misc_feature (2728)..(2728): n is a, c, g, or t
  misc_feature (2743)..(2743): n is a, c, g, or t
  misc_feature (2776)..(2776): n is a, c, g, or t
  misc_feature (2782)..(2782): n is a, c, g, or t
  misc_feature (2833)..(2833): n is a, c, g, or t
  misc_feature (2836)..(2836): n is a, c, g, or t
  misc_feature (2839)..(2839): n is a, c, g, or t
  misc_feature (2845)..(2845): n is a, c, g, or t
  misc_feature (2851)..(2851): n is a, c, g, or t
  misc_feature (2857)..(2857): n is a, c, g, or t
  misc_feature (2875)..(2875): n is a, c, g, or t
  misc_feature (2932)..(2932): n is a, c, g, or t
  misc_feature (2938)..(2938): n is a, c, g, or t
  misc_feature (2944)..(2944): n is a, c, g, or t
  misc_feature (2953)..(2953): n is a, c, g, or t
  misc_feature (2959)..(2959): n is a, c, g, or t
  misc_feature (3007)..(3007): n is a, c, g, or t
  misc_feature (3019)..(3019): n is a, c, g, or t
  misc_feature (3232)..(3232): n is a, c, g, or t
  misc_feature (3325)..(3325): n is a, c, g, or t
  misc_feature (3424)..(3424): n is a, c, g, or t
  misc_feature (3454)..(3454): n is a, c, g, or t
  misc_feature (3460)..(3460): n is a, c, g, or t
  misc_feature (3481)..(3481): n is a, c, g, or t
  misc_feature (3484)..(3484): n is a, c, g, or t
  misc_feature (3514)..(3514): n is a, c, g, or t
  misc_feature (3535)..(3535): n is a, c, g, or t
  misc_feature (3544)..(3544): n is a, c, g, or t
  misc_feature (3727)..(3727): n is a, c, g, or t
  misc_feature (3730)..(3730): n is a, c, g, or t
  misc_feature (3877)..(3877): n is a, c, g, or t
  misc_feature (3946)..(3946): n is a, c, g, or t
  misc_feature (3949)..(3949): n is a, c, g, or t
  misc_feature (3964)..(3964): n is a, c, g, or t
  misc_feature (3979)..(3979): n is a, c, g, or t
ggatatcggtaagaacaacagtcttgccgttctcctggataagacccattgcaacaccagaaacaggacgcttnagaggaacgcctgcatccataagggaaagcgtagaaccgcaggtagaagccatggaagaagaaccattggactccattacctcagagacaacgcggatggtgtaagggaactcttcctcggaaggaatgacaggcagaagtgcgcgctctgcaagagctccgtgaccaatctcncggcgctttggactgcccatacggccagtctcaccggtgcagaatggtgggaagttgtagtggtgaatgtagcgcttgccatccattggctcaatggtgtcaagacgctgccactcgttgagcatgccaagngtacaaatggagagaacctgagtctgaccacgctggaaaagaccaganccgtgaacaagtggcaggtaatcaggcttgaccatgattggacgaatctcgtctgcaacacggccgtcaacncgctcgccggtctcaacaaccatgacgcgcatagcgtgcttctcaagacccttgagctcaacggcaatagcgcggctccaaagctcctgctcctcctcggtgaactgagccttaatctcgtccatnaggtcagcaaccttctgcatacgggactgcttgtcagcgtccttaagagcagcnctcatctggtcatagtaagcaaagatgcggtcatggacctcagcgattggctcgtcaaggatgtactcncgcttgacgatagggccgttaacctcttcccacttagcaataaacttcttctgctcctcgcagaaggctgcaattgcctcctgaccaaatgccatagcggagagcatatcctcttcggaaatctcatctgcaccagcctcaagcatggaaataaaggtggaagaaccgccaagctcaaggtcaaggtcagagtgatcgcgctcttcataggttgggttaaccaggaactcgccggtatcagcgttgcggccaatacggacgcangcaagtggtccctcaaaaggaacgccaccaacggccagggcagcagatgcgcccatgacagagatggtatcaacagcgtttacctgatcagcaacaagagaagttgcaacaatctgaacctcattgcggaagccatctgggaaggatgggcgcagaggacggtcaatcatacgagcagtaagggttgccttctcggatggacgagcctcacgcttgaggtatccaccaggaacacgaccaactgcgtacattttctcaataaaatcaacagtcagtgggaagaagtcgtaatctttacgctccttggaaaccactgcagtgagaagtacggtggaatcgccgcacttaacgatacaggcacctgttgcctgctttgcgagctcaccagcctcaagggtgtagtgcttaccatagaggtcaaattcgtgagttactttagtcatttctttcctcttctatctccgtttgccccattgcaaacgggcctcaaacataaagggcgccagacggcgccctaaaaagccaacttactggatgttgtcgcggatacccagggaagcaataagagtacggtactcttcaatgtcgttcgacttgatgtaagaaagaagacgacgacgcttaccaacgagcatcagaagaccacgacgagtgtggaagtccttctggtgggacttcatgtggtcggtgagctgacgaatacgctcagtaagaagagcaacctgaacctgtgcggaaccggagtccttctcgtccttgccgtactgcttgatgagctcagccttacgatccttagttactgccataataaaccgcctttcgcgttgaatactccttgtactgagaaggtagccggcagtgactagcccctaagaacaaggaaataacctacaagaggataccagttactggtgaactttgctagtaaaaatncacttcanctagatactgagcanaaattcaaatgccttgaggcgcgcttcaaggtgtgtagccgcccaaatatgcgcnctngtgagcaaaaagagcgcagtttctggagcaatctcggcaacaacaagctggtcaaaggtaagttttagaagcgacgacaaccacgagagctcaagtggagttacctcaatggcnccctcaatctcatgcgcacaacttccacacaatgcaccaccagcagctggcgagaagtacgtcagagcttcatctccacaggcaatgcacgattccanctcagggcgccagccttcntgtgccaaaaccttaaacacataagcngcaacaacaagatctaagtgtttctcgtcanctacttcttcncaggctctgagagcgcgagaaagcagnggatagagaaacgcgtcctcaatgccatcaatncacgaaagacgtgcaacntcgcagatagctgacgcngcngctaccttagagagatctccgcgnagtgatgcntgcggctcaagcaaggttgcctcggacaagatgtcaagcgagcgaccttctgccagcagtacgtctanctcncaaaanagttcaacncgagcagcaaagcgnccgcctggctttctngcaccctttgcgacagcncgacgntcttctcccgaatcngagagcatggttaagatgagntcttgctcagcnagttttgttctatcaagcacaatngctttaagacgngnngtctttctaccaggcacaactagtcctcagttgagtanccnaggcgcttaatctcnttggcatcacgcctccagagaggctgaacgcgnacctgnaggtcaaggtaaaccttgcgaccaaacagtttctccaggtcttttctagcntcnacnccaacncgcttnatcatngagccgccctggccaacnacgatgcccttttgtccttctcgctcaaccaaaatggtggcagaaatagagaggtgnccatcngttgcnacctcatangaatcncaaacaacggcaacggaatggggaacttcctgacgaaggttcagcaanagcttctcgcgnacaaactctgctaccaggtcttctggcaatgcgtcagtctccatgtcctctgggaaccacataggaccctcaggaagatgctctgaaacaagcgcaataaatgcctggatattgaagtcttctggagcagaaacaacaagcacgtcatcaaagtgcgcaagagcctgtgcggcctcaagctgctctgttacttgctctggagttgcaatgtcngccttggtaataaccagcagcttaaaggcggcatgcgcctgctcaacatgattggcaacccattcatctccacgaccaacaggcttagtagcntcaatcaaaaaagcaatgacatcagcgtcattaagctctccgagcgctgccttgttgagctcttttccaagagcgtctttgggcttgtggaggcctggngtatctacaatgaccagctgggagttctcnccgttnaccactgccctaaaacgacgncgngttgtctgggcaacagggcttgcaatagcnactttctggcccatgcaagcntttaacagngtggacttaccaacacttggacgaccaactaaagcaacaaaaccgctcctaaagggagtggtctcagatgtagtgttttcagaaactgaattggcggtcatatgtcctccaacttaccaatgaaaaattgcacgcgagaaaatcaaaagtcctataagagctgcggtaatgctaatgcagcangangcagctgccgcaatatctttagctttaccagccatggggtgaaactctggagaaaccagatctaccacggtttctattgctgtattgagaagttctgtggttaaaaccgcaccaatacaagcaagaacaagtgcccagctcacagcntctaaaccaacaaacaatcccaccaccacggttactgcagcagcaacggccatacgacgcaagtttgcntcntgagcaaatgcttgncgagcgccctgtagngcaaagagaaggccgcgctta

SEQ ID NO: 1416 - DNA, 4000 bp, Escherichia coli
  misc_feature (341)..(341): n is a, c, g, or t
  misc_feature (538)..(538): n is a, c, g, or t
  misc_feature (1633)..(1633): n is a, c, g, or t
  misc_feature (1735)..(1735): n is a, c, g, or t
  misc_feature (1851)..(1851): n is a, c, g, or t
  misc_feature (1978)..(1978): n is a, c, g, or t
  misc_feature (1999)..(1999): n is a, c, g, or t
gcgatcgtgctgcaggtcacgtcacaaccgggcacgtcccccacggtgttgctaaccctcccaagtgatgttttgcgcattagtgcataaaaaacattaattttatgtccaaaacgctggatccagagggcaactggcggtactttttcatcgacggcgtcttaggggtgataatttgaaactgcaacaattgagatacatctgggaagttgctcatcatgacctcaatgtgtctgcgacggcacaaagtctgttcacctcccagccaggaatcagtaagcaaatacggctcctagaagatgaattgggcgtggagatttttgcacgcagcggaaaacatntgacgcacattactcctgctggcgaggtcatactggagttagctggggagatgctgcgcaagtcagatgcaataaaacgtgtggcacaggaattttcggacgagacgagtggtactttgtctatagccaccacccatactcaagcgcgctacgtgctgccacctattattaaagactttatgtcgggttaccctaangtgtccttgcaaatgcagcagggcacgccgccgcagattgcagagatggccgcagaaggcagtgttgatttcgcgatcgctacggaggccctccagcaattcaatagtttggttttattgccctgctatcgctggaatcgttgcatagtcgtgcccaaaggacatcctctaactcaagtagaacggttgactttagaggctgtggcggagcatccaatcgtgacttataccttcggatttacaggccgatcgaagcttgatgacgcgttcaaaagtaggggcttagtgcctcacgttgtatttaccgcagttgattccgatgttatcaagacctacgtcagactaggcctagggataggcattattgcgggtttggcccatgatgaagatctcgacgaggatctcgtcaaactaaacgtagatcatctctttgccagtagcgtgaccagccttgccttcagaaagggctcgtttttacgcggctacatgtacgattttattcaggcccttgcgccgcatctgacgcgagatattgtcgttgaagcactctcgagatcgaatcccgcagagcgggaggcgctttatagtcacatcgaattgccaacctactgactgtcgagagcgcgcataaaaccggcgactttgtccatggtttcactgaactcttcctctggcactgaatcccaggtaattcctccgccgccccagcaataaagcacgccattcgaggcctcaagggtccgaattgcaatactcgattcgagccatccgttcgaagacatggcaaaaacactgccgcaataaacccctctagagccggtctctaggcttttgataatttctacagagcgtttcttaggggcccccgtgattgaaccaccgggggaagccgcaataaaggcggctccaggggttacttccggtttcagctcgccttcaattcgactcactaaatgatgcacgttgtcgtagctgtagagggcacataactcggtgacttcgaccgttcccgttttgcagagtttacccaggtcattgcgcaataagtcaacgatcataatgttttctgcgcgatctttcgttgaacttaaaagngcgttagccgagtcattatctcgcttctgatcgcgaaagcgggggcgcgtacctttaattggttgggagcgtataaagccggcatcaatacttaaaaagcgntctggtgattgagaaataacggcatgattagagccaagtttaaggaatgctgcgtaatctcccggggccacatctcttagtgcttcgtaaatgccatactcagatccactgtaggngcactgaaatcgctgggcgatattagcctggtaacaatctcctgcagcgattagcgccctgacttcggccaccatcgacctgtaacttccacttgaaatatcagctgtaaacttatgatctatatgntattttagctcccttttgttntcagccgcggccattctatttcgcacttcagtgctggtttgcgctgagacacacggatcttgtaccagccaagcgcgctcctcagaatgatcctgtaggacataccaagagtatattccagcgattgcgggttgcagcggctcactcggcacattaagcgtgtttgcggcggcggtttcaaaatcaagaaacccaattgccatgcgagacgattcggcaggggatgcgttcaggtctgcttctatcgcgcttatccagcgtgccgcgtctccaccaaaatccgtaacgcagaaatatcgatctggcagcgcagtgataatgtcatagcggccactatcgttatcacgctttcgactgtcgagaacagcaaagccctccaaatcagcgaagcgtcgggcccaaagcgttacatcattcgaatagggtacggggtggcagtgtggactatgaattttcaaagattttgatgaccatttcgcaacaaattgacacaatactgctcttaaccgtaagttacgagcgcgctttgatggcggactaacaagcgcaggttaccgggtcacccaagggtagccgaaccgcgcccacaaacagtaggattaagggtttccatgaccgataaagtcaagccggaaaacgaacaatgcagcggggatacggcgcccccctttgccacgcttagcaatccacttcggcgtcgtgtgccgtcttccgacagtcagtcagggcgctacgagcagacgcttgcgcgtggcatggagcttcagcaacgtccctacgaagccgcagggcagcgtggcatacagcgccagcatctgaagaatcgtatgacggtgtgggaaagagttcagtttttagctgacggcgccccgcaagtgctttaccaaaactggggaccgaatcttgatggggcctcgctcgttactgccatcattcagattgatggacgtgatgtcgccatttacggccacgattttacagtgcgtgccggttcaatggacgccaccaacggtaaaaaattagcccgtctctttgagttagcggcgaagcgaggcattccacttgtaggactcaatgactcggctggtgcttacattcctgccggagtaggtgggctcgatggctacgccgacgcatttactgcgcttaggaaggtgagcggagtggttcccagcataatgtgtatgtttggtttcaatgctgggggaggcagctatctgccgcgtcagggcagttttctgattcaacctaaggatacgttttttggcttgaccgggccgggcgttgtcaaatctgtgctcggcgaggatattacccccgaggaactgggtggaccaaatgttcatagtcaaacaggtgtcacggactttgtcgtagacgatgaggtatcggcactgcaaaaagttcgggagattttgaaatacatacctgactcaagtgctgcagcgcctcaattcaaacccaccactgatccagcagcacgttctactgttgatatcgatattcttctacgtaaggcgtttaactctccaacgggctttaacacaccggtcgacattactattttgatccaacagctttgtgatcacggtgactttcttgaagtgcaggctgagagggctcgaaatacgatcaccgcatttggacggatggcggggaacgtagttggttttgtggccaacaactctgcagtcgcctcgggacaaattgatattgatgccgcctacaaaaatgcgcggtttattcgattttgcaacctctacaacattcccgtgatgtttttagaagatacaacaggctttcttcccggccgtgagcaagagcatcggggcattgttcaggcgggacgagcgatgcttgatgcgattgtagatttgcgcaccccacgattcctggttctggttcgcaatgcctttggtggagcttacgcgtcctacaacaactacccgaccggtgcggattttgtcgttgcattaccaacgacccgcgttgccgttatgg

SEQ ID NO: 1417 - DNA, 4000 bp, Escherichia coli
  misc_feature (1)..(1): n is a, c, g, or t
  misc_feature (7)..(8): n is a, c, g, or t
  misc_feature (10)..(10): n is a, c, g, or t
  misc_feature (17)..(17): n is a, c, g, or t
  misc_feature (21)..(21): n is a, c, g, or t
  misc_feature (173)..(173): n is a, c, g, or t
  misc_feature (630)..(630): n is a, c, g, or t
  misc_feature (731)..(731): n is a, c, g, or t
  misc_feature (1376)..(1376): n is a, c, g, or t
  misc_feature (1478)..(1478): n is a, c, g, or t
  misc_feature (1528)..(1528): n is a, c, g, or t
  misc_feature (1595)..(1595): n is a, c, g, or t
  misc_feature (1604)..(1604): n is a, c, g, or t
  misc_feature (1628)..(1628): n is a, c, g, or t
  misc_feature (1631)..(1631): n is a, c, g, or t
  misc_feature (1874)..(1874): n is a, c, g, or t
  misc_feature (2645)..(2645): n is a, c, g, or t
  misc_feature (2871)..(2871): n is a, c, g, or t
  misc_feature (2997)..(2997): n is a, c, g, or t
  misc_feature (3267)..(3267): n is a, c, g, or t
  misc_feature (3411)..(3411): n is a, c, g, or t
  misc_feature (3511)..(3511): n is a, c, g, or t
nacatcnncncctattnctantcctattactaaaattgctactaaactggctgaaactaggatcatagaataccctacttgtctcaaattttgagattttttcatttacgtggaatcaataacccttgaatttaatcttttcaagtctgaatttgtcttttagatctttaacnctagactcatttttccgataaaaagaaaagaaagtactttgaaatacattcattgagcattcaaattcttcaatatgagtttcttggacctatacctattactgaatggggtcctccaatggaaaaattagtttatttgatcttatctcgaaacaaggataaatttgatataatttatgttggcgattgtcaaaaaactgatgataaatccttctttactaatcatggtaaattcaaatgctggcttgaacaatctggctctgaacaatctttgtatcttgctattttgccgctgtttgaatctagtaatgaaaaaagaatgaatgtaattcaaaagatattatctcaatacaaaccacattgtaattctgatgacatgattgaatctaaacctgattatgttgtaagagtttcagaggaacctgatataaattctgataagataatttgtgcatgntgtggttctgaaatgaatttagaaaaaactcttgaaaaatctaatctttatcgttgtactggttgtggattaagcgacactagacttaattcttaactttnttttgtacatcaaataattgtaatgttaccaaatcgattgcttttttcaaatgttgaaattcattaattgaatgcatttgtccttctactaatgctctcatgattttaactgaatttttttgatgatcatctgatgcaacaatttccatggcgtttaattttgataataaattatccaaatctttgatcatttcatctgatggtttgtgtttatccatgattcttctattgttttttcgtatatgaattattacaacaacattttgattaatacaaaatacataaaactcgtgtaatttgttaaggaatatgggattcaaaaaaggtattaacaaatgtgttgaatgtgagaaaaaactgtctgaggatccaaatgaaacaggcatgtgtagtaaatgtggttccggtgctagagttgattccgaaatacacaaagaattaagcgatttaggaataatctaaaaaaattagtatgctgagaattgttacaataaatcttcatcaatctcttctattggattgataaattggttacatgtacaagttggaattttacattttcctaattttatcataaaatcacttttttcatctggaatgtgaacttcatctgtatgatggcatcttttacaattcattttgttntccttattttacctctaaatctgtggaaccaaaactgcacgtgcctctatttttgaatcttttaatttttgtaatgcctcatttgctttctctagaggaaangtttcataaattacttcaatattattttcattacatatcttgattacttnctccatgtcttttgttgatcctatcaatgtgcctctaattgttttttcttcaaatgcactaaattcnggattttcncccactgttgcaattacgataatnccncctttctttactgattttattgcagtatctgtaacaatatctgctggagcaaatacgattgctgcatctagcaacccatgtctttcttttaatttacttaaaaattcttcttgctctttagaaaatatcattgtgtccattgcacctaatctttttgcaacatctagatgattttgtgttcttgagaatgcaatgactttgcatttttctattttggcaaattgaactgccatgtgacctacncctccaattccaaatattcctatttttttatttatttttggctctgcagctttaactgctttgtatgctgttattcctgcacaaaataatggtgctgcatattctgatttcatattatctggaacctttgtggcaaactcttctgtaactgtaatgtattctgagtatcctcctttcaatgtctctcctgtgatttttgatgattcgcaaagatactcttttccttcatcacaatattggcattttttacatgcttctaataatggagttattcctgctctatctccaattttaaatttagtgacatcttttcctatctcaactatttctccaacaacttcatgccctggaacaattggtaatgatgctggaattcctatatgtttccagtctccttcaattccatgaagttgtgaatgacaaacaccacaggcttctattttcagtaaaatttcatttggtctttcaatttgatgtttatctatattggttgatttcaaagggtttgtttcaattttggcacattctgatagtaccattgcacgcattttttccataattcaaaaaatttttcattgaattttaacatactgttttgattttatccctaaatcgtatagttaagataagatttatttttaaaatgctgtaatcaagagtatggctgatatcacacctgaagatcgtgaacgagttaaattactaactttactttcttcatccaaacatgaatttgataaattatctttagaacaattagccagattacangaattacttgaaaaaaaggattacagtcatgataaaaaggctaataaaacaaaaacaaaatttcttaaaaaaattaatgttagaatttatgaattgactgaaggtaagggaatttggtaattatttttatatctaggtacaaatattttaaaatctatgattagttatggttgaaaataacttaattcatgaaactagtccttacttgcttcaacatgcagaaaancctgttaactggtatggatggaatgatgaagcattacaaaaagctaaagatgaaaataaaccaatttttttgagtgtcggctatagtgcatgtcattggtgtcatgtgatggcacatgaatcattngaaaataatgatgttgctgaatttatgaatgaaaattttgtaaacataaaagttgacagagaagaacgccctgatatcgatgatatttatcaaaaggcttgtcaaattacaacgggccaaggtggttggcctttaagcgtttttcttactcctgatcaaaaacccttctatgttggaacttattttcctgtattggattcctatggtagacctgggtttggaagtatatgtagacaattggcacaagcatggaaagaaaaaccaaaaganattgaaaaatctgcagaaagttttattcacgcattacataaaacagaaaaaattaccgttcctacaaaattagaacaaactttacttgatgaagctgcaatgaatttatttcaattaggtgatcctacatatggtggatttggntccgctcctaaatttccaaacgctgcaaacatttcatttttgtttagatatgccaagatggctaatttaccaaaattcaatgaatttgcattaaaaactntaaacaaaatggcaaaaggtggtatctttgatcaaattggaggtggatttcatagatattcaactgatacaaaatggttagttcctcattttgaaaaaatgctttatgataatgctctcatgcctgtaaactactgtgaagcatatcaaattactaaagatccattctatcttgatgttttacaaaaaacacttgattttgttttacgtgaaatgacttcttctgaaggtggattctattctgcatatgatgcagattctgaaggtgtagagggtaaattttatgtttggactaaacaagaaattaaagaaattcttggaagtgatgctgatatattttgtctttattttgatgtaactgatggtggaaattgggagggaaatagtattctttgcaataatcttaatccttctactgttgcatttaattttggaatttcagaacaaaaagtacatgagattataaattcatgttcaacaaaattattgg

SEQ ID NO: 1418 - DNA, 4000 bp, Escherichia coli
  misc_feature (557)..(557): n is a, c, g, or t
  misc_feature (2015)..(2015): n is a, c, g, or t
  misc_feature (2048)..(2048): n is a, c, g, or t
  misc_feature (2051)..(2051): n is a, c, g, or t
  misc_feature (2054)..(2054): n is a, c, g, or t
  misc_feature (2060)..(2060): n is a, c, g, or t
  misc_feature (2129)..(2129): n is a, c, g, or t
  misc_feature (2165)..(2165): n is a, c, g, or t
  misc_feature (2279)..(2279): n is a, c, g, or t
  misc_feature (2402)..(2402): n is a, c, g, or t
  misc_feature (2417)..(2417): n is a, c, g, or t
  misc_feature (2442)..(2443): n is a, c, g, or t
  misc_feature (2536)..(2536): n is a, c, g, or t
  misc_feature (2541)..(2541): n is a, c, g, or t
  misc_feature (2676)..(2676): n is a, c, g, or t
  misc_feature (2744)..(2744): n is a, c, g, or t
  misc_feature (2750)..(2750): n is a, c, g, or t
  misc_feature (2858)..(2858): n is a, c, g, or t
  misc_feature (2891)..(2891): n is a, c, g, or t
  misc_feature (2912)..(2912): n is a, c, g, or t
  misc_feature (2960)..(2960): n is a, c, g, or t
  misc_feature (3029)..(3029): n is a, c, g, or t
  misc_feature (3118)..(3118): n is a, c, g, or t
  misc_feature (3125)..(3125): n is a, c, g, or t
  misc_feature (3143)..(3143): n is a, c, g, or t
  misc_feature (3179)..(3179): n is a, c, g, or t
  misc_feature (3206)..(3206): n is a, c, g, or t
  misc_feature (3320)..(3320): n is a, c, g, or t
  misc_feature (3338)..(3338): n is a, c, g, or t
  misc_feature (3362)..(3362): n is a, c, g, or t
  misc_feature (3575)..(3575): n is a, c, g, or t
  misc_feature (3590)..(3590): n is a, c, g, or t
  misc_feature (3692)..(3692): n is a, c, g, or t
  misc_feature (3974)..(3974): n is a, c, g, or t
gaataccgataaccatactattatacttctgtatttcacgaataattgtttctttagcacctttaatttgtatcaatttcatctgttgtttcagttgatgtttaatacgtttcttggcttttgatgcaatatgagagaaacaaaccaaacgattattcttagaaactagctttaaagtaatcccaaggaattcactgcttttctttctcagattggtaatttgagatttttcctctgaaatagggaggttaagtcgttcttttaaccacaattttacagccttaaacgttcgctctgcctcattcctatttcgacaaaagattttaaaatcatccgcatatcggacaatataaacttcttttagcgtcgttgaagttcgcagctttctgtaaacatgtgacttgtgtcttgttcccttggaattatattgaggaactaattccttacaatctctttcttcccattgtcgtcctatccaccaatcaaattcattgagattgatattggcaagtagtggagataagatacctccttgtggtgtgcccttagttggatangtcacttttccattcggaagaacaattggtgcttttaacatttttcgaataatcactagaagttgtttgtccctgatacctaatgtccagatttgacgcattaacttagtatgattcacttcatcaaaaaagcctttaatatcaacgtcaacgacataagtcatatgacttttattcatacgatacatacagtccataatagcgttatcagccgaccttaagggtctaaatccataactgtgtttgtaaaatttcgcttcacagattggatccaacacttgtaaaatacactgttgggccactctgtcccacatcgagggaatgccaagtggtcgtttcttcccatttggcttaggaatctctactcttctgacttttctgggtctataatattgaaatcttctttgaactttagagataaagtcttcttgggtcagattttctaaatctttaatggtaacaccatctactccttcggtttgactaccaccattccgctttatggtacgataagcgagcagtatattctcgggagatatgataatgttcattaagttcttaaaactgaatcccttttgacttttggaatataaatcatcaaatatctcggtcatgccatagtattccgcataccttagtttttgatgttttaatagtttgtcatcattttttggtttcgtcatggtctatcactcctctctttggattcgtgaccttttatgtcttacaagaatccatgaaatgataaagttcataacaatacactattgactagtggctgttcctccagtatcattacaacactttcaaaggtcgtgccaccactctcactagagattaaggaaagttatgattttctttccaatgtttctctggttgtgcaacctccacatctctagctttcgacgttcccttatctttatcaatactaaacttaggtgcctagctataccccttcaactttgatatgcctgtaacataacaaggaatttcatatcgtcgattcttactcttcctcaagttgaaacaacttacgttgttatacgcatttctacgtactcgccttcggagcgtacattcgctggttcgtcagtgctcatgcacattctcaccctatttagtttttaatgactcccgacctatcagatacatattccacctctggaacactttcgattcttaagtccttaagaatgacggtatctttcagccgacttcaccgagcttcaaacctttacctttgcacaagataaacgcatgtcggagtattagagaaatcgtttcagggcgttaccccttcattccaattttcaagataagagttctccattctattcaaatttaacctgattatcaggttgatttttcaagaacgtgtctaaccttttcagttagaaacgtctcgcacctacaaaagccacatgaccatagtctgctggtgtgccatgtgtacctccnacaaaagaaacaatagcacctgctcttggtgtnganccngtttcnccaccaagacttgaagctgtcgcaacccagtcctgaccatttcccatggtattaatgattgaaatcttntctccatttctaccttttaattttaagcctaactgnttcatacgagccgcaacaccccatgtacattgtccataggcataggccataccatctccaccaccaggaacagaatgatcatacaagtccccacgaaccccttcaagggattgngggtcactttttgcctgtcctccatttgtttggctaaagcctttttcaatttggtaataccattccgttgctctggtttgtctttccagtagtttgtcaccagaatttccctcccaataggtnaggaagagttgggcnagattggctgcactgcccgtatttnnaaagaaatcctttaaccaactttgatagtaaggactatccccatgaagcataaaatcaagttggaggtctaaatcataccacttcttattttnggtgngtgcataattcaataaagctgtatgacgtgttgaaccatctgcagtatccgtccattgccctaaacccaaacctctatgaagaatattaggataagcaccactataaatggctggacctccaatcgctaaccagntttcatcatcccatgaggaatcggtagcgccaactggaggagataaataatctccttcagctcgtttnggattnatagaagactctaccgaccaatttcctaaaatagccgcaatggcttggggacttgccccttgagatttcaaaaactcataaatatgttttgctcgttcaaactcatcnccaccaaactgaccaatggcaggtaagatagtngtctgaagttgaatgactttnggaaaataaaattgcggattgacatacaccaatttttctttcttgttnttatacttttgataggaaactttcaaacctgtatcgtctggtgtttcaccaataatatcacccgttagnactcttgtcccctcaatcgcacggccattatgaatagaatacaaggtcaatcgactctcattctctccttttccgttagtgagaataanattgtcnccatctagagatacaacnccatccattggtgcgacaatcgtttggtgagccttngcttctagtagaatgtactcctgaagngtaggttttccgtctaaatcatagtatccataacgataagtcatggttagactatcttcgttgcttttcccctcaaatggattgtccaattcctgcatggaagcatacacaccntcttcttttagttccttnatttcctcttgatcgtctttcganagtttatacttaggagtttcatagaggtcttgcatggatttcaaatcttccccatcgtttaaatcatgccacaaagtagacagataatccttgtaagtttctgaactaaataagtgaactggtttgtgtaactcatagtcatggaatttaaagttcatataccccatcacatcatcaacttttgtgtaataggtaattcctttgtcatttgtncgagtatgttctgcntcttcccaagttaggtgggtataagcttttgttaattcaaattcatcttgttgaatcaaactagcagatgaaaatcctaaaaagaagctcatcataagtaanagaagaaagactattcctccaactatccaggttacaggatttccagccgcaaatgtaaagaaggaaaaggctgcttttagtttttgatagatatttcggacacttgtaagaccttgtttctttaattttcgaaaccgatttttaaaggaacttgggttatctttcgctagtttccatccttttccatccttaaaatgatggtatcgctcttttgtgttggtcagtcttttcttggtaaaacgacctgttgcttgtcctgttttgacactagcttttccaagnttataagaaagccgactgtagcgttt

SEQ ID NO: 1419 - DNA, 4000 bp, Escherichia coli
  misc_feature (253)..(253): n is a, c, g, or t
  misc_feature (1937)..(1937): n is a, c, g, or t
  misc_feature (1948)..(1948): n is a, c, g, or t
  misc_feature (1951)..(1951): n is a, c, g, or t
  misc_feature (2165)..(2165): n is a, c, g, or t
gagcacggcaaacttgccgctgtgattttcccaaccgtgcatcatgcccccaccgccgcgtccgctgcgtccagaaccagagtcgtacataccgggagtgaagaattcggcgcacgtggcgaagccagcggctgcgtttccagtgttcttcgcacctttgatcatgtcgtagatgagtttcgggtgattgcacagctttttcaacgcggtgattgcgggaagcacggcggttgctttgccagtcagcgcttgngtcgcagccttggagctcaaaaagtgttcgtacagcgcctgttgcagcggcgagagcttacagcacacaacctcgacaactttgggcggcaagtgtttactcaaaatggtattcgtccggcgaaggataaacttgttgacgagatctgagagttccgtgttcgccgcctgcgccttttccatctctgcttcggtgcagtctggctcacgtccggctaagattggacgttcgtactttttcgcaaattccgccggcgttcccaagagccccgggttacagaaaccaaccatggagtaaaattcatccaaatgattttgcatcggcgtaccgctcaacatgacgcgacgaaggcacggcaccgaacacaacgccttgtttgtcaacgtctcgccattcttcaaacgatgcgcttcatcgcacatgatgagatccaccgccccgtcaaagttgaaacgactcgagtgaattcgaaacgtctcgtaactcacaatcattacctgcgcgaggtgtcgaggcgccaagaaggatttcaccgaactcaccacctctgcacgcgtggaatcgcaaattggaagcgttttcacgcgaccattcagccacttgttgcactcgtcgtcccagttggacacgagcgaagtcgggcacacgatgagcgcccgtttcacggcgggagaaccgtcgagtccttgccgcaacagcgtccacaagagcgtgatgccctgaagtgtcttacccagacccatgtcatccgccaagatgcaccccgtgccttcgaaatcgcgaagacccatgacgcactcaaacataaacttgacgccttcgcgttggtgcggtcgcaaccagcgcgtgagcattctatccacgacaacgggcttggcattcggacgcggttcctcaccgctcgtccccgcctcgccctccggcgcgcgatcaccaggggtccacaacacgagatcttccacgccctccggaagctcgatgtgttccgattccatcgacgtcaacgccttgggtttcggcatagccgcggcgacgtcgctcgccttggctccccacggcacaaagacgcgtctgctcgccaatctgcgcatcaactcggctgagggaagaaaggcacgcgcacaacacaaaaaaatcgtcagtcagccagccaacgcaggcgctctcatcgctgcgcgttcgccttctcgcgttcgacacacgctcgcgttcgcgcgcgcgcggtgccgacttttgaaaacacgcgcagacagcccgttaacgcgcgcgcgtccgaattcaacccacgtaccactccgattcggcgcgttcggaaacggcgacttgaacgcccgtcgcaaaaccaccgccgggtcttccaccgtcaacccgcggacgtacggtttcacgctcgtctccagcgttccgctcaacaacgccgcgacgttcgcagccttgacatccttttgcgacatgacgacggcatcgtcgtcttcatcttcctctgcttcgtactcggattcctcctcctcctcctcctcctcctcctcggattccgtctccatggtttcctcgtcggcgtcttccgcgtcgtcctccgacatcgtccgcgtcgtccgtcgcgcgcgacgccgtgtcgcgtcgacgacggcgagtcgaacgttcgttcggggtgggctttgtcgtgtaccccactatcattgangattcataacnctnaatgatcacatacgacgagtcatgacccgtaaaaccaaactaggggtacacgacgcacgacctctagggcaagacgcgcgtcgctcgagacgacggcagtatccggaccgggaacgcggcgcgccattccctcggtggggttttcgaggagaggacgacggcgacgatgttgcggagagcgctcatgacgcagctgcgccggagcgcggcgaangcgccgcggtggatgtccgcgacgacgaccaaggagacgactgggatcgtcggtttgtcagtgctggaggatgggaagggtgcgtacgcagccatctgtaaacgcgtgctgagcgagattcaacgcgggattcccgcggatgcggggtacaggcaggtggtggaggcggtgtacgccgatcggttggcgaagacggaggcaggggcgagcgtgagcgagatcgaggcggcgatcgggcagggacaaatcgaagagttgtacgagattgccgaggatgagttggagctgattccgaagatgcgggagtggaaaccgtgggagtttgatcacgagattgaaatcatcgaggcgccaaaggaaaacccgtacttggaggaggcgagaaaggagtagactggttggttgacgtctgcgcgcggaatttttcctttccgcgcgcgaagtatacacctcgaatcgcgcgcgcgcatcgacgaggaaattgtaacatacactaaagtatcaaaaacagtcttcttctcgtttttgtctttttttttccgtcttcctcgtcgtttctcctcatcgcgcatcgcgttttgaaatcgagttggatttgacctgtacgtccacgatgcgccgcgcgggtgtgtcggttcagagttgactcgaacaaccccacttttcgcgcgcgtgagaaatgtccgacgccccgtcatcggcgccgacgacgacgcggatcaagacgtaccttcgactgcgaccgtcttcgagaccttcgagcgatcgcgcgagcatacgcgcgctggatgacgcgacgagtttggagggcgaagactcggaagatgaaacgttgtcctcgtccaagcgtcggcgaatcgtcgagtgtaaggcggcgctggatcgaaggacgggcgcggcgcagacggtcgagcaaaagtttgcgttcgacggtgtctttgacgagagtgcgactcagaacgcggtgtttgacgaggttggaagcgacgtggtgcgcgcggcgttggacggttacaacgcgactctgttcgcgtacgggcagacgggaagcgggaagacgtacactctgactggcggggtagccgagtacgaggatcgaggcattgttccaagagcgctttcgatgattttcaacgagattgaatcgatgagcgctcaggacggcgtcaaatttacagtcgaggtgaactacgtcgagatttacttggagcaggcgtacgatttgctcgccacaaacttggacgaaagacagagcgccgcgagagggtacgcaagagcgtctgaaattccgttaccgaaagtgcgtttcatggaggatgaaaatgggcagatgcataccatggatttgacgacgcgcgtcgtgtctagcgaaggcgaagcacttgatttactctttgtcggcgataccaatcgagcagtagcggaaaccccgctgaacatggcgtcgagtcggtcgcactgcgtgtttacagtgataatcacgcgtcgctcgagagatactgacacgctgaggcgtgcgaaactccatctcgtcgatttggcgggaagcgaacgagtgaacaagagtcgagtcaacggaacgacgcttcaagaggccaagtacattaacgtttctctgcattttctcgagcaagtcatcgtcgcgctgcaggaacgcgcagagggcaacgtgaatattcacgtcccgtatcgaaacagcttgatgacattgatgcttcgggatagtttaggaggtaactgtcgcaccgtcatgattgccactgcaagcgcggagatggacgcattcgccgagagcgtaagcacgtgccgattcgcgcagagagtgcgcaaaattt

SEQ ID NO: 1420 - DNA, 4000 bp, Escherichia coli
  misc_feature (143)..(143): n is a, c, g, or t
  misc_feature (254)..(254): n is a, c, g, or t
  misc_feature (538)..(538): n is a, c, g, or t
  misc_feature (543)..(543): n is a, c, g, or t
  misc_feature (737)..(737): n is a, c, g, or t
  misc_feature (762)..(762): n is a, c, g, or t
  misc_feature (979)..(979): n is a, c, g, or t
  misc_feature (1001)..(1001): n is a, c, g, or t
  misc_feature (3229)..(3229): n is a, c, g, or t
  misc_feature (3469)..(3469): n is a, c, g, or t
  misc_feature (3560)..(3560): n is a, c, g, or t
accagagcggttttgatcatcttgatagacgcctgttattaacccttatggaaaaatttgacggaggcccagttggtgtggatagcttggcggccgcattgagtgaggaaagaggtaccattgaggatgtgctggagccttanctaatccagcagggctatttaatgagaacctctcgaggacgcatggcgacgcgcatggcatatgagcattttggtttgaagagccccaaacgtattcaacagcagatgganatcatggatgactgaattttgttggccgatgcgtgtctatattgaagatacggatgcgggtgggatcgtctactatgccaattatttaaaatttatggagcgtgctcggacggagttaatgcgaaccctaggttacgggaaaccagctctgtttgacggtttacagttagtggtccacgaactgaatattaaatatcatagtcctgcgctacttgatgatgagcttaaagtgtcagcggaattgacaaagataggtagggtaacatttttgatgagccaaaccnttcancgaggtgacagcttactggttgagggtgaggtaaaagtggcctgtttagatgccttaaccaaaaaaccagcggcaatgccggcgccaatgtatcaaaaactaaagggccttttgggctgaaactggagtttagagcagtgaatgaagaaaatttatcgattttagcgttaattttaaatgctggtgttctggtncaggcggtgatggggattttgcttntcgcgtcagtcatgtcttggataatgattgttcagcggggtatttttcttaatcatgcgcagactagtttccgagagtttgaggatacattttggtcgggagtggatctggcgcagttctatcaggagctaacggataaggccaaagagtcgggtgtcagtaatggtattgaaaatgtgtttagagcaggttttagagagtttaaccgcttaacgcngtctgacaaagccgatccagangctgtaatggagggtgctgatcgagcaatgcgagtggcgctatcccgcgaggatgaaaagttgggtactaatcttccgtttcttgcgaatgtggcatcagtgagtccttatattggcctgtttggcactgtatggggaattatggtcacggtaagaggcttgggtatgatgcagcaggcaaccttagcggcggtggctccggggatttccgaggcgctgataccgacagcaatggggctctttgcagccattcctgcggttatcgcttacaaccgttatgcggctaaagttgaggcaattaatgcaagctatgaaactttctcggacgagttctctagtatcctgcacaggcaggtttactctcgataatttagctcctggagttggatagattgaataggaaaaaacaaaaacgcaaattggtagccgaaattaatgtggttccctacattgatgtgactctagtgttgatggtgatattcatgatcaccgctcctttgttgatgcaaggcgttaaagttgaattgcctcaagctaactcaagccccatggatagcgacgatcaagaaccctttattgtttcaatcaaaagtgatggtacatactggattgatgacaaggggattaaccaatctaggccgcttaatttaatcaaagatagagttagcaagattattcgtcaagaacctaaaacacctattttggtttggggggacgcctcagtggattatggcgtggttgtgaatcttatgagtgagttgcaacgttccggagctacatccgtaggtttggtgactgagccgccgcctcagtagcatgaaagtttctattagctacgcattaggtattacgtttagcttgaccatacatgggctaattattgctgctatgtatggagggtggaaagctgaaccagagagggtagtaattcagccgcgatttatagatgcgaaactggttgaactagcccctaagcaaaaggtaattaagaagaagaaaaacaccgacgcaaacgctgcccagagaaaacgagatagtcaacgaagacgagcggctgagaagaaaaaagcggatgcccttaagagtaggcaacggcaagcagagcttgatagaaaagaaaaagagcgtctggcaaaagaacgagaagaacaaagagaacgagcagagagggagcgactagctgagttgcaaagacagcaaaaggagcaagaatttgctgacgctattgctgaagagcagaggttagtaaatgccgagaaagatgagcgcgaggcaaatagttatcgacagctcattcagcaacgactttccgaaaattggaatcgccctccgagtgcgcgaagaggtatggaaacaatgattcgattgcaactagtgcctacgggtcgcgtggtaggtgtcacagttcttaagtctagtggggattcagcatttgaccgatccgtcgaacaggccgcattcaaagcggatcaatttatagagttacaaaagatgtcgccaagtttgtttgaaaagaagtttcgccaagtagatgttttatttagccctcaagaccttaggttgtaatcaatggagatccgatgctacaaaaaagtatatttttaaatcgctctgtcaaaatatttttactgtcgagtatattggccattgctcctgccatagcctggggagagctagtgattagagtcactcaaggtaacgataaacccacgattgtagctattcctccaatggttatggcgggcgcacagctctctgaggatattagctcaattgttgagtcagaccttgagcgaagcggcttgtttaaggttgttccaagaaataacatgctctctttcccatctgatgctgatgatgtttatttccgagattggcgattgctggggagtgagtatctgcttgttggtgctgtcacaaaggatgatgatctaattgaattgagttttagcctacttaacgtcaatgcccaaaatactgtgtttaagcatagtgttaggggcacagaaaatcagttaagagatttagcccatatggctagtgataaggtatatgaggagataacaggcattcgaggggcgtttagtactcgccttgcgtacgtaacagctgatcaggtaaatggtaatttcgtctataaattaaatgtctcagactcagatggcgctagagagagattaatgctggaatcatcagagccaattatgtctccagcgtgggcaccctcnggcgatgagttagcctatgtttcttttgagacagggcggcccgcaatatggcgtcagagtcttgtaaccgctgctcgcaaacagttgactaactttcgtggccttaacggggcccccgcttggtcgccagacggtaaaaagctggctatggttttgtcaaaagatggcaatcctgagatttatatcttggatctgacgtctaataaactgtcgagattgactcgtcatttcgccattganactgagccaacgtgggaaccagatggaaaaagtttgttatttacctcagatagagggggaactccgcaaatttataaattaacggttgcanctaaggcagtgcaaagaataacattcagaggtaattacaacgctaggcccagtttggcgccagacggtcgcaccttagtggttgttcatcgagaatcgggtgttttccatatagcgactctcgatttaaagacacggcggatggtagaattaacagagactagacttgatgagtctcccacagtggctcccaacggagctatgttgatatacgctacgaaacagggtgacaggggagtgttgtcagcggtttctctcgatgcgggcataaagtattccctgccggccaagtctggtgacgtaagagaacctgcttggtcaccatttttgaggtagaattaggatacgcaatttaacgaacaacacattttaaaaggagctctacatgaatatttctctaactaaacttggtttaccggcactttgtctgtcggtattgct

SEQ ID NO: 1421 - DNA, 4000 bp, Escherichia coli
  misc_feature (1)..(2): n is a, c, g, or t
  misc_feature (4)..(6): n is a, c, g, or t
  misc_feature (10)..(11): n is a, c, g, or t
  misc_feature (14)..(21): n is a, c, g, or t
  misc_feature (23)..(24): n is a, c, g, or t
  misc_feature (26)..(30): n is a, c, g, or t
  misc_feature (32)..(32): n is a, c, g, or t
  misc_feature (34)..(39): n is a, c, g, or t
  misc_feature (41)..(50): n is a, c, g, or t
  misc_feature (53)..(53): n is a, c, g, or t
  misc_feature (56)..(71): n is a, c, g, or t
  misc_feature (73)..(74): n is a, c, g, or t
  misc_feature (76)..(76): n is a, c, g, or t
  misc_feature (79)..(83): n is a, c, g, or t
  misc_feature (85)..(88): n is a, c, g, or t
  misc_feature (90)..(91): n is a, c, g, or t
  misc_feature (93)..(99): n is a, c, g, or t
  misc_feature (101)..(102): n is a, c, g, or t
  misc_feature (104)..(121): n is a, c, g, or t
  misc_feature (124)..(128): n is a, c, g, or t
  misc_feature (130)..(132): n is a, c, g, or t
  misc_feature (134)..(134): n is a, c, g, or t
  misc_feature (136)..(139): n is a, c, g, or t
  misc_feature (141)..(150): n is a, c, g, or t
  misc_feature (152)..(152): n is a, c, g, or t
  misc_feature (155)..(161): n is a, c, g, or t
  misc_feature (163)..(166): n is a, c, g, or t
  misc_feature (168)..(179): n is a, c, g, or t
  misc_feature (181)..(185): n is a, c, g, or t
  misc_feature (188)..(196): n is a, c, g, or t
  misc_feature (199)..(199): n is a, c, g, or t
  misc_feature (201)..(203): n is a, c, g, or t
  misc_feature (207)..(209): n is a, c, g, or t
  misc_feature (213)..(220): n is a, c, g, or t
  misc_feature (222)..(222): n is a, c, g, or t
  misc_feature (225)..(229): n is a, c, g, or t
  misc_feature (231)..(232): n is a, c, g, or t
  misc_feature (234)..(234): n is a, c, g, or t
  misc_feature (236)..(238): n is a, c, g, or t
  misc_feature (241)..(246): n is a, c, g, or t
  misc_feature (250)..(251): n is a, c, g, or t
  misc_feature (253)..(256): n is a, c, g, or t
  misc_feature (259)..(259): n is a, c, g, or t
  misc_feature (261)..(263): n is a, c, g, or t
  misc_feature (266)..(272): n is a, c, g, or t
  misc_feature (276)..(279): n is a, c, g, or t
  misc_feature (281)..(284): n is a, c, g, or t
  misc_feature (287)..(292): n is a, c, g, or t
  misc_feature (295)..(295): n is a, c, g, or t
  misc_feature (299)..(301): n is a, c, g, or t
  misc_feature (304)..(305): n is a, c, g, or t
  misc_feature (307)..(310): n is a, c, g, or t
  misc_feature (312)..(314): n is a, c, g, or t
  misc_feature (317)..(317): n is a, c, g, or t
  misc_feature (320)..(321): n is a, c, g, or t
  misc_feature (324)..(324): n is a, c, g, or t
  misc_feature (326)..(334): n is a, c, g, or t
  misc_feature (336)..(336): n is a, c, g, or t
  misc_feature (338)..(340): n is a, c, g, or t
  misc_feature (343)..(343): n is a, c, g, or t
  misc_feature (345)..(356): n is a, c, g, or t
  misc_feature (360)..(367): n is a, c, g, or t
  misc_feature (370)..(370): n is a, c, g, or t
  misc_feature (373)..(373): n is a, c, g, or t
  misc_feature (377)..(377): n is a, c, g, or t
  misc_feature (379)..(388): n is a, c, g, or t
  misc_feature (391)..(395): n is a, c, g, or t
  misc_feature (397)..(398): n is a, c, g, or t
  misc_feature (400)..(406): n is a, c, g, or t
  misc_feature (410)..(410): n is a, c, g, or t
  misc_feature (412)..(412): n is a, c, g, or t
  misc_feature (415)..(415): n is a, c, g, or t
  misc_feature (418)..(428): n is a, c, g, or t
  misc_feature (431)..(440): n is a, c, g, or t
  misc_feature (443)..(448): n is a, c, g, or t
  misc_feature (451)..(453): n is a, c, g, or t
  misc_feature (455)..(459): n is a, c, g, or t
  misc_feature (463)..(463): n is a, c, g, or t
  misc_feature (466)..(467): n is a, c, g, or t
  misc_feature (469)..(474): n is a, c, g, or t
  misc_feature (476)..(485): n is a, c, g, or t
  misc_feature (488)..(490): n is a, c, g, or t
  misc_feature (492)..(492): n is a, c, g, or t
  misc_feature (494)..(495): n is a, c, g, or t
  misc_feature (498)..(500): n is a, c, g, or t
  misc_feature (502)..(505): n is a, c, g, or t
  misc_feature (508)..(517): n is a, c, g, or t
  misc_feature (520)..(521): n is a, c, g, or t
  misc_feature (524)..(524): n is a, c, g, or t
  misc_feature (526)..(527): n is a, c, g, or t
  misc_feature (529)..(533): n is a, c, g, or t
  misc_feature (535)..(538): n is a, c, g, or t
  misc_feature (543)..(543): n is a, c, g, or t
  misc_feature (545)..(547): n is a, c, g, or t
  misc_feature (551)..(564): n is a, c, g, or t
  misc_feature (566)..(566): n is a, c, g, or t
  misc_feature (568)..(568): n is a, c, g, or t
  misc_feature (570)..(577): n is a, c, g, or t
  misc_feature (581)..(592): n is a, c, g, or t
  misc_feature (594)..(595): n is a, c, g, or t
  misc_feature (598)..(598): n is a, c, g, or t
  misc_feature (601)..(601): n is a, c, g, or t
  misc_feature (607)..(609): n is a, c, g, or t
  misc_feature (611)..(616): n is a, c, g, or t
  misc_feature (618)..(623): n is a, c, g, or t
  misc_feature (625)..(626): n is a, c, g, or t
  misc_feature (629)..(632): n is a, c, g, or t
  misc_feature (634)..(634): n is a, c, g, or t
  misc_feature (638)..(640): n is a, c, g, or t
  misc_feature (642)..(642): n is a, c, g, or t
  misc_feature (645)..(647): n is a, c, g, or t
  misc_feature (649)..(650): n is a, c, g, or t
  misc_feature (652)..(654): n is a, c, g, or t
  misc_feature (656)..(657): n is a, c, g, or t
  misc_feature (659)..(668): n is a, c, g, or t
  misc_feature (671)..(681): n is a, c, g, or t
  misc_feature (683)..(683): n is a, c, g, or t
  misc_feature (688)..(688): n is a, c, g, or t
  misc_feature (690)..(690): n is a, c, g, or t
  misc_feature (692)..(693): n is a, c, g, or t
  misc_feature (697)..(698): n is a, c, g, or t
  misc_feature (700)..(702): n is a, c, g, or t
  misc_feature (705)..(722): n is a, c, g, or t
  misc_feature (726)..(726): n is a, c, g, or t
  misc_feature (728)..(730): n is a, c, g, or t
  misc_feature (733)..(739): n is a, c, g, or t
  misc_feature (741)..(749): n is a, c, g, or t
  misc_feature (754)..(763): n is a, c, g, or t
  misc_feature (766)..(766): n is a, c, g, or t
  misc_feature (768)..(770): n is a, c, g, or t
  misc_feature (775)..(781): n is a, c, g, or t
  misc_feature (783)..(784): n is a, c, g, or t
  misc_feature (788)..(797): n is a, c, g, or t
  misc_feature (800)..(802): n is a, c, g, or t
  misc_feature (804)..(812): n is a, c, g, or t
  misc_feature (814)..(818): n is a, c, g, or t
  misc_feature (821)..(823): n is a, c, g, or t
  misc_feature (826)..(831): n is a, c, g, or t
  misc_feature (833)..(839): n is a, c, g, or t
  misc_feature (841)..(841): n is a, c, g, or t
  misc_feature (843)..(843): n is a, c, g, or t
  misc_feature (845)..(845): n is a, c, g, or t
  misc_feature (847)..(848): n is a, c, g, or t
  misc_feature (850)..(852): n is a, c, g, or t
  misc_feature (854)..(855): n is a, c, g, or t
  misc_feature (857)..(862): n is a, c, g, or t
  misc_feature (864)..(864): n is a, c, g, or t
  misc_feature (866)..(871): n is a, c, g, or t
  misc_feature (873)..(880): n is a, c, g, or t
  misc_feature (883)..(888): n is a, c, g, or t
  misc_feature (890)..(894): n is a, c, g, or t
  misc_feature (896)..(896): n is a, c, g, or t
  misc_feature (898)..(903): n is a, c, g, or t
  misc_feature (905)..(909): n is a, c, g, or t
  misc_feature (912)..(912): n is a, c, g, or t
  misc_feature (916)..(921): n is a, c, g, or t
  misc_feature (923)..(923): n is a, c, g, or t
  misc_feature (925)..(929): n is a, c, g, or t
  misc_feature (932)..(934): n is a, c, g, or t
  misc_feature (936)..(936): n is a, c, g, or t
  misc_feature (939)..(942): n is a, c, g, or t
  misc_feature (944)..(956): n is a, c, g, or t
  misc_feature (958)..(958): n is a, c, g, or t
  misc_feature (960)..(961): n is a, c, g, or t
  misc_feature (963)..(964): n is a, c, g, or t
  misc_feature (966)..(970): n is a, c, g, or t
  misc_feature (973)..(974): n is a, c, g, or t
  misc_feature (976)..(981): n is a, c, g, or t
  misc_feature (983)..(985): n is a, c, g, or t
  misc_feature (987)..(987): n is a, c, g, or t
  misc_feature (989)..(989): n is a, c, g, or t
  misc_feature (992)..(992): n is a, c, g, or t
  misc_feature (996)..(998): n is a, c, g, or t
  misc_feature (1000)..(1007): n is a, c, g, or t
  misc_feature (1010)..(1015): n is a, c, g, or t
  misc_feature (1018)..(1018): n is a, c, g, or t
  misc_feature (1021)..(1025): n is a, c, g, or t
  misc_feature (1027)..(1030): n is a, c, g, or t
  misc_feature (1033)..(1034): n is a, c, g, or t
  misc_feature (1036)..(1037): n is a, c, g, or t
  misc_feature (1039)..(1049): n is a, c, g, or t
  misc_feature (1053)..(1056): n is a, c, g, or t
  misc_feature (1059)..(1065): n is a, c, g, or t
  misc_feature (1067)..(1069): n is a, c, g, or t
  misc_feature (1071)..(1075): n is a, c, g, or t
  misc_feature (1077)..(1082): n is a, c, g, or t
  misc_feature (1085)..(1086): n is a, c, g, or t
  misc_feature (1088)..(1091): n is a, c, g, or t
  misc_feature (1093)..(1099): n is a, c, g, or t
  misc_feature (1328)..(1328): n is a, c, g, or t
  misc_feature (1538)..(1538): n is a, c, g, or t
  misc_feature (1953)..(1953): n is a, c, g, or t
  misc_feature (1980)..(1980): n is a, c, g, or t
  misc_feature (1992)..(1992): n is a, c, g, or t
  misc_feature (1998)..(1998): n is a, c, g, or t
  misc_feature (2013)..(2013): n is a, c, g, or t
  misc_feature (2124)..(2124): n is a, c, g, or t
  misc_feature (2151)..(2151): n is a, c, g, or t
  misc_feature (2265)..(2265): n is a, c, g, or t
  misc_feature (2559)..(2559): n is a, c, g, or t
  misc_feature (2562)..(2562): n is a, c, g, or t
  misc_feature (2835)..(2835): n is a, c, g, or t
  misc_feature (2922)..(2922): n is a, c, g, or t
  misc_feature (3042)..(3042): n is a, c, g, or t
  misc_feature (3069)..(3069): n is a, c, g, or t
  misc_feature (3231)..(3231): n is a, c, g, or t
  misc_feature (3303)..(3303): n is a, c, g, or t
  misc_feature (3309)..(3309): n is a, c, g, or t
  misc_feature (3315)..(3315): n is a, c, g, or t
  misc_feature (3333)..(3333): n is a, c, g, or t
  misc_feature (3528)..(3528): n is a, c, g, or t
  misc_feature (3660)..(3660): n is a, c, g, or t
  misc_feature (3678)..(3678): n is a, c, g, or t
  misc_feature (3777)..(3777): n is a, c, g, or t
  misc_feature (3859)..(3859): n is a, c, g, or t
  misc_feature (3867)..(3867): n is a, c, g, or t
nnannnaaannaannnnnnnntnnannnnntncnnnnnntnnnnnnnnnnaanttnnnnnnnnnnnnnnnntnncnaannnnntnnnntnnannnnnnntnnannnnnnnnnnnnnnnnnnaannnnngnnntnannnnannnnnnnnnnanttnnnnnnncnnnntnnnnnnnnnnnncnnnnnttnnnnnnnnnctnannntttnnntttnnnnnnnncnttnnnnntnnangnnnaannnnnnaaannannnnaantnnnttnnnnnnnaaannnnannnnaannnnnnaantttnnnaannannnncnnnaanttnnccntnnnnnnnnncntnnnaangnnnnnnnnnnnntttnnnnnnnnttnaantttngnnnnnnnnnnttnnnnncnngnnnnnnnaaangnaanttnnnnnnnnnnnttnnnnnnnnnnaannnnnnaannnannnnnaaanttnntnnnnnnannnnnnnnnnaannngnannttnnngnnnnttnnnnnnnnnnttnnttnanngnnnnngnnnnaaagntnnnaaannnnnnnnnnnnnnangntnnnnnnnnaaannnnnnnnnnnntnnaanttnaaaaannncnnnnnncnnnnnncnnttnnnnantttnnncnttnnnannannntnnannnnnnnnnnaannnnnnnnnnntnaaaangntnnaaanngnnnttnnnnnnnnnnnnnnnnnntttngnnnaannnnnnncnnnnnnnnnaaaannnnnnnnnncangnnnaaaannnnnnnannaaannnnnnnnnnttnnnannnnnnnnngnnnnnaannnccnnnnnnannnnnnntnantngnngnnngnnannnnnncntnnnnnnannnnnnnnaannnnnngnnnnntngnnnnnntnnnnnaangaannnnnngnannnnnggnnnanttnnnnannnnnnnnnnnnncnannannannnnnaanngnnnnnncnnnancnaanaaannngnnnnnnnnttnnnnnnaanttnnnnncnnnnggnngnntnnnnnnnnnnntttnnnnaannnnnnncnnntnnnnnannnnnnaannannnngnnnnnnnaatggcaagcgttaaatttaaagatcaactagatgcagctaacaagctcatcgagatcttgccaaaaaaagagctaaatgacgctaagacgatagttctttgcatgtcgcttgagtcagttatcctgactgatgtggtttgcagggggctaaatttaagctatgagatgctctttagcgagccaatccctgcgccaaacaacagcgaatgcgacgtagcgatagttagngaaactgaggatatcgtgctaaacgatcctctcataaaagcttttaacataagctatgactacatctacggcgaagcgcatagaaaatatgaagagaaaattttaaaaaatgtctataaatacagaaaaggaaatttgataggagagctaaagggcaagaatattttactgatcgatgaggggtgtgagactggcatgacggcactcatntgcataaagacgctgcttgatgtgaaggtaaaatccatctcatacgcaacgccgatgatagccactgatgtctttgcaaatttaaatgatatggtcgatgaaatttacacgataaacaagatcgttgattttatcgatgtggattcgtattacgagaaaaagatcgaggctacgagcgagcgcatcatgtcgatattagaagagagccctcactatttaccgttacaaaaacaacaaggagataaaaataatgcaatatagtatagaagtcaataatcaggtcgaaatttttgaccttaataaagtagctaaacaagctagtggggcagtgcttttaagggtgaaaaacaccgtagttttagcaactgtggcaagagaagatgtgcaagttgaagaggactttttgcctctaacngtgcaatacatcgaaaaagcttacgcngctggtaaaatnccaggnggttacgtcaagcgngagaccaagccaggcgactttgagacgctaacagctcgcatcatagatagatcacttcgcccactttttccaaaaggctacgcatacccaacacagatcgttgtcatggtnctttcagctgatcctgaggttgatttncaagttgtgagcctaaatgcggcttcagttgcactttaccttagcgacatccctgtaaatcgcccagtttgtggtgtaagagttggctatatagatgataaatttgttatcaanccaagcaactctgagctaaaacaaagcgcgatcgatctttatgttgctggcacaaaagatgagcttttgatgatcgagatgagaagcttgcctcagcaaactacgcagctcataccgatggtagcgatcgagccgatgatagatcctagcctaagcgatagcatggcgcaaaagcaagtgatgaatgaatttagtgaagataagatggttgaggcgatcgactttgctggcaaggctatactaagagctagcagcgcttatgaagaggcgtttaaagagcataaaaaagaggangcngcacttgagctaaaaccagagatagaaaacgaaaatatcgctatttacatcgataaattttataaagcagaggttaaaaacgcgatcaatcaaatggcaaagagcgagcgtgcaagcgagcttggcaagatcgctaaacaaatttcaagcgatgaggtagctcaaaaagagggctgggacgaggctgtcatctcaaatgtccttggtaaatataaaaagaaaatagtaagagagcagatcataaacgagggcgttagagccgacggacgcggncttgaagaggttagacctattagcatcgagacaaatgtccttccaaatgctcacggctcatgcctctttacaagaggtcaaactcangcgctagttgtcgccactcttggcacagatagcgatgctcagatgtatgacatcctaactgaaaaagctcctttggttgagaaatttatgtttaactacaacttcccaggctttagcgtnggcgaagcaagcccacttaaagctccnggcagacgtgagcttggacatggaaatttagccaaacgtgcccttgcaccaagcatcgatctagcttctccatatacgataagggtcgtttcagaaattttagagagcaacggctcaagctctatggctagcgtttgcggtggttcgctcgcacttagagcngctggggtcaatacccaaaaactagtcgctggtgttgcgatgggtcttatatttgaaggcgataaacacgcngttttnactganatcatgggtcttgaagancacgacggcgatatggactttaaagttgctggcacaagtgatggcatcacagcgcttcagatggacatcaagcttggaggcatcagcctagaagtgctaaaagaggcgctttatcaagcaaaacgcggcagagagcacatccttgctctaatgacacaggctgataaaaatatagagataaacgaagatgtattnccaaaacttgagctatttaacgttgatccaagcaagatcgtagatatcatcggtcaagctggcaagactataaaagagatcatcgagaaatttgaagtttcgatcgaccttgatagagaaaaaggcgaggtnaaaatcgcaggcggcgcnaagaaaaacgtcgatgcagcaaaagactacatcatctctatcacttcaaaagagaactctcgctcatttggcaaaaagccgtttaaacacgacaaagancgtgtaaaaccgacatttaatatcggagatgagtttgttggaagcgtaaaaagcgtggttgattttggagtatttatcgagntaaaaganggtgttgatggtctgcttcacatctcaaagataaagagcccattaaacgtaggcgatcaggtaaaagtgtgtgtgagcgagcaaaaaggaaacaaaatttcgctctctttggttgaataaatttttaaaggat

SEQ ID NO: 1422 - DNA, 4000 bp, Escherichia coli
  misc_feature (474)..(474): n is a, c, g, or t
  misc_feature (1695)..(1695): n is a, c, g, or t
  misc_feature (1992)..(1992): n is a, c, g, or t
  misc_feature (2015)..(2015): n is a, c, g, or t
  misc_feature (2036)..(2036): n is a, c, g, or t
gggatcaccgtgccggcgatggtcgacgtgccgagcgggcaggtggtcaccaacgacttcccgacgatcaccagggacctgttcttcgagtggcggccctaccaccgcgacggcgcgccggacctctggccggcggcggtccgggccgagatggacgagctgatggagtgggtctacacggaggtgaacaacggggtctaccggtgcgggttcgcctcgtcccagcaggcgtacgacgacgcgtacgaccggctgttcggcgcgctcgaccggctctcggaccggctcgcggaccggcggtacctcctgggtgacgcggtcaccgaggcggatgtccggctgttcaccacgctggtccggttcgacgccgtctaccacggccacttcaagtgcaaccggcagaagctgaccgagctgccggtgctgtgggcgtacgcgcgggacctgttccagacgccggggttcggcgacacngtggacttcgaccacatcaagcggcactactacgaggtgcaccggaccatcaacccgagcggcatcgtgccgcgcggtccggacctggcgaactggctggagccgcacggccgggcggcgctcggcgggtcgccgttcggcaccggcacgccccccggtccgccgtcgccgccggagaccgtgccaccggaccacaccccactcccctgagcgacccgccctcagtcgtgctcggcgagttcgcggaactcgtcggggacgccgcgggagcgggtgcgggccggcaggtagcccaccgcttcgcggccgaaccggtcgcggaccgcgtcgaccgagctgtccagcgcccagcgggctgagccgcgcgcggacccgggccggcgcgggtcgtccgggggcaccggcagctccagctggatcgagtgctgcagggtgaggttggagaccgagatcgccagcaggctgatctcgaccgccgcgtcctggtcccggatcgcctgccaggccagctgttcggccacctcggtcagcgtgagcgtggccgcgatcggtccgggcagggtcagcgaccgggtcaccgacttcatcccggcgaaccgcacccgcacggtgacggtccggccggcccggtgcttggcccgcagccgcccggccacccggtcggcgaggtggctgagcacctcggtcaccaggccaggggtcggctggtgcgcgccgatcgccgactgcgcgccgaccgacttggcccgcccgaggccgctgatccggcgcgggtcctcgttgaccgccagcgcggccagcttcagcccgacggcgtggccgagcagaccctccagagcgcgcggcgacatctcggccagctcgccgatcgtgtgcacaccacgctcggccagccgccgctgcgccaccgggccgacgccccacatcagcccgaccggcagcgggtcgaggaactcccgctcccgctccggctcgaccaccaccagcccgtccggcttggccacctgcgaggcgaccttggccaggtgcttggtccgggccgcgccgatcgagatcggcagcccgacctcccggcgcaccctggcccgcagccgggcggcgatctcgcccggcggcccgaacaggtgggtcgagccggtgacgtcgaggaacgcctcgtcgatcgagatccgctccaccgccggcgtgacggcgttcaggatgtccatcacgtcgtcggcnagccgctggtactgggagaagtgcccccggacgaacgtgatccgcgggcacagctggcgcgcctgccagcccgccatcccaccgtgcacgccgaacgccttcgcctcgtacgaagcggcgagcacgacgcccccgcggtcgctgccgcccaccgcgatcggccgaccccgcagcgccgggtcgagcagttgctcgaccgacgcgtagaacgcgtcgaggtccgcgtgcaggatcgtcggcccgcggggcatgatcgcactgtatcgaacacgtgttcgaacgactaggcctgatgtncgccagactttctggcagtcttnccggaccgtgacaggcagccntccgcttggcgcgggtggtcaacccgccctccgtgtggtgtgaccgaggcatttccgtaccgactcacgggaggctgacgccatgcggagactgacctttggcatgaacgtgagcgtggacggctacatcgccgcgccgggcgacaacctcggctggagcgtgccgagcgacgagctgttccagtggtggtccgaccgggtgggggcgacgggcctggcgctgtacgggcgcaaactgtgggagacgatgagctcccactggccgaccgccgaccagcagcccggcgccaccccggcgcagatcgagttcgcccgccgctggcgggacatgccgaaggtggtgttctcctcgacgaccagcgcggtcgactggaacacccgcctggtcaccggtgacgctgccaccgagatcacccggctcaagactgaggatggcggtcccatggacatcggcggcgccaccctcgccgcggcagccatgcgggccgggctgatcgacgagtacgtgatggtcacccacccggtcctggtcggcggcggcacgccgttcttcacggccctggacgactgggtggacctggacctggtggagacccggacgtttcccgacggcgtgctcctgaccagatacgagaccaggcgctgagtcagccgcgggcctcgaccaggccgaggccgaccggcgacgcggtccggtgcaccgcggtgacggtgaacccggcgtcggcgagcagctcgcgatactcggcctcggtccgctcccgggcggcgccgaacagcatgagcatcgtcaggtccatccggatcgccgccggctgatcccgggcccgctccggcagcagcgcctcggcgaccagcagccgggcgccggagggcaccgccttgcggcaggtcgcgaggatccggccggcctcctcgtcggaccagtcgtgcagcacccgggacagcacgtacgcgtcggcgccggccggcagggcggcgaagaagtcgccggcgaccaccgtagaccggtcggcgagcccggccgcggccagccgttcccgcgccggctcgaccaccgccggccggtcgaccagcgtcgcggtcagtccgggcgtcgcccgcagcaccgcgccgaccagcacgccgtagccgccgccgacgtcgacgaggtgccggatcccgccgaagtcgtacgcgtcgaccaggtcggcggcctcccggtcggcccggccggccatggccgcggcgaagacctgctcgtgcgccggggtcgcgtccaggtggtcgaagaaccggcggccgtacacccgctcgaacgcggtgtccccgccgcggaccgccgccggcaggccggccgcggcgtcgaagtagagctcgccgcggacgagcgccagctcgcgcatggacccgggtacgtccgagcgcagccaggcgccggtcgcggtgagcccgaaccggccgtccggcagctcgtccagcacctggtcggcggcgagcccgcgcagcacccgggtcagcggcccgaccggcacccccaccgccgcggccaggtggtccgcgctgcgcggccccgcggccagctcgtcggcgacgccgagccgggcggcgaggaagagcagctgcgtgctgaggtaaccgtccatcagccggccgagccgaagcgggccggccgtctcgctcgggacccccgtcatccaggcaggtaaccacgcccggtggtcacccggcagtggctttgccccaaggggcaggctctctcgacgctgcgggcagcgcggtccggccggtcagccgctccagccgagcgtccggtcgcgctggtcaaccccgagctccccgtacgggtagtccggcgggtgcgggtcgctggccgcgtccagggccgcggtctcggccgcggacaggtgcaggtccgccgcgccgaggttggcccgcagctgctcggtggtgcgggcgccgaggatcgtcgcggtcacccccgg

SEQ ID NO: 1423 - DNA, 4000 bp, Escherichia coli
  misc_feature (468)..(468): n is a, c, g, or t
  misc_feature (473)..(473): n is a, c, g, or t
  misc_feature (489)..(489): n is a, c, g, or t
  misc_feature (553)..(553): n is a, c, g, or t
  misc_feature (667)..(667): n is a, c, g, or t
  misc_feature (765)..(765): n is a, c, g, or t
  misc_feature (767)..(767): n is a, c, g, or t
  misc_feature (777)..(777): n is a, c, g, or t
  misc_feature (903)..(903): n is a, c, g, or t
  misc_feature (1162)..(1162): n is a, c, g, or t
  misc_feature (1996)..(1996): n is a, c, g, or t
ttacaattgttctgataagcaaactagattctaaatgataatattccgaatcattctgagtttgaaaaggcaattcagagggataattcaattcattatgttgagagaacatgttggttgaaaataataatattataagtactacaaggaacttaaattgattcatggtgataatttttatacttcataaatttaaaaaaaagaagagtaaaacgtgataaaatctctaaatactttttgataaattcaatttaataaaagtcaaatgaagtgggtgttaagggattcgaacccatgacctctaccctgtcaaggtagcgctctaaaccaactgagctaaacacccaaaatgtttctgctaattattgacatttaaatagtgcaaaatattttatgtttgaatcaaatatattacttcttactcaattcgcaccttaactaataatactttgaagcagtaattctctnatagntaaaaataatctgtanttataacgggtaatatgcctgtggttttatgtaaaccatacctcaaaaaagtaatatttatttnacattaaaacaactaggaattggattatcaaaaatgtgggagtaaaatatgaggtttacgttctgtctacatcttcaacttcattaccccactcccacgaggattgaatctatnacaaaaatgataattaaaattgaacaaactactcttgatatatattttaatcttatgattgtatagtgtaaaattataaagacttttcttttaaagcntnttaatctatnggttagcatcaaaaagttactgtagtttgacctattaaagagtgttagaaataaatgaaaatacgacaaatgatttcccgatggtttattagaaatcagagctatatgagtaattaaaatataggntaaaacatgctggttttatttataaaatatcaaaaagataggaggtaatttacaattgcaaataaataaaaacaaactgttaaaaaaattgcaataataaagactccctttgctaaatctttattagtaatattatttatccagactattgttggttttataccttttatgagtaaaaaaaaaccaaaaaatgctaaaacataagctaataactccatatgactaatataacaaatcccaaaacttacagaagagtatntgcctatgattcttttataaaattgaatatattttacagaaaatcgttcatgatgactagataaaaaataattccatttatcatcatataaaaaagggcaggtattattttcaaaagttcatctttaattcttatgcgaactaaaattgctactagcatcattaatgtcagtgcaagggaagaaattaaaagtaagtatggaatcaaaagccctaaaagcaaacctaaaccccctaatatctgaaaagttccaatggtaaatcgatgattcaaaaagccccatcgttcaaattctgctttcatccttctagaccgaaaagaactaataccataaaaaagaaatgatataccagaaaaaaaactcaatataatggttagggtcatgagctaaagtaaacccatatttactgcagcaataaacaaggataaaactaaaaaaagaagagaagggatgaatttaatcaatggatttctcactttgatatgtgccaattgcgcacaaaacataaaaaaagccattgataaagaagaaaaaactaccaaacctgggtaaaaaacaccagcaattagtaaggctgaaagagatatcttagaagctcctactgaatttcgaattaaatcagaaagaccatactgtttaaattctttgacaatattatcaaacctaaaaacccaaacgaagagaaccgagaaggcaacaatcaactgactagcaagtgcaattttatccatatttaattatcttttgttaatgtacaaaaaaattatctttttacactttgtaacttatgttacataactatatgcatattaatttaattttgaatatcaatncttcaattttgaattggtttatggttaaactgttaggaataattcctagcagttttttttatccttattttcttatccaattttgagtacgacccaaaattgaaaaccctaaaaatcctcttacttttaatttatcttcagcttctaaagtaagataacaatcatacactttaccagacttaggatccaagatagtaccttcctcccaactcccatcctcgaggacaagatcattgactataataagcccctcaataggcttgtttttattttctcccttacactcaccacataatttaccttgatctccgggaagtaataatttaagaatcttaccataaagctttccattttcttgataaagtaaaacctctgattttttttgtcctgtttcatcatcctgagttatccatatgccctcaacggacgaaggctgtattgtattaagaaaaacgtaggtgatgaggtataaaaaatgcaacatattttgataaattgaaaattgttgcctaaaaataaaaaatctctttctattttagtgtcattaaacttttaaatatgaattcgtttctaaataaattcaagtttattttccttttaattcctgtgggcctctttatagccttcctagacggcaaaatattacagggttttttagcctctaatcaaattccagatcattatctgtttattggatctctagttttggttgtaatgggtataattttcgctatacttcgatttgataataaaaatgaataaaaaagagcgtttggtcttccctatctttgcaaaaaaaatatgaagcattttagccaaaaagatatagatactctatccaaaatttacagacttaatctaatcaatagcgcaacaggctataaatctgcacaattagtgggaagtgtttcttcagagggaaatgaaaatttagcagtttttagttctattgtacatctgggaagtaatccagcccttatagggatgatcctgcgtccaactaccgtacctagacatacttatgcaaacatgaaagcaaccggcgttttcactttaaacgcgattcacgaaagtcagatagaagatgctcaccatacctctgcaagttatcctgagtccatctctgaatttgacaaaacccaacttaaagtggagaggaaaaagaattttttagctccatttgtgaaagattcaccaatccaaatggcctgtaaatatttgaatgaataccatattaaagaaaatgatactcttttaattgtagggagtatagaagacctttatgtcaaagattcaatcttacttgaagacggttggattcaattagacttgggaggtatcgtaacaataaatggcttggacggttatgcaattccaaaactccaagaacggtttccttatgctcgaccaaaagatgaataatccaaaatttacagaagcattgagtgagcaatggatcaactatgcatctaatcatagcgagccaatccctgaaattcttattgaacttgagcgcgaaacgcatcaaaaaatacttcaaccccgcatgttaagcgggccattacaaggccgattattgagtttaatttctcacctaattaatcctgtgtccattattgaaataggaacttataccggatacgctacactctgtctagcagagggactgcaagaaaagggtattatacacaccatagatagtaatgaagaactagttcccattcaacaacacttttttaataaaagtgcttttaaatgtcaaattaaaagatatttaggcgctgcagtagaggtattgcctgaactttctggcccttttgatctcgcttttatcgatgctgataaagtaaattacaccatttattttgagatgcttctgccaaaaatgaaaaagggtggattaattatttctgataatgtattatggagtggaaaagtgataaaaaaagccgatcctaaagatgaaagtacaattgcattacaacattacaatgaaaaattaaa

SEQ ID NO: 1424 - DNA, 4000 bp, Escherichia coli
  misc_feature (40)..(40): n is a, c, g, or t
  misc_feature (53)..(53): n is a, c, g, or t
  misc_feature (89)..(89): n is a, c, g, or t
  misc_feature (92)..(92): n is a, c, g, or t
  misc_feature (98)..(98): n is a, c, g, or t
  misc_feature (130)..(130): n is a, c, g, or t
  misc_feature (146)..(146): n is a, c, g, or t
  misc_feature (160)..(160): n is a, c, g, or t
  misc_feature (237)..(237): n is a, c, g, or t
  misc_feature (266)..(266): n is a, c, g, or t
  misc_feature (286)..(286): n is a, c, g, or t
  misc_feature (291)..(291): n is a, c, g, or t
  misc_feature (329)..(329): n is a, c, g, or t
  misc_feature (370)..(370): n is a, c, g, or t
  misc_feature (388)..(388): n is a, c, g, or t
  misc_feature (392)..(392): n is a, c, g, or t
  misc_feature (400)..(400): n is a, c, g, or t
  misc_feature (402)..(402): n is a, c, g, or t
  misc_feature (404)..(404): n is a, c, g, or t
  misc_feature (407)..(408): n is a, c, g, or t
  misc_feature (417)..(419): n is a, c, g, or t
  misc_feature (421)..(423): n is a, c, g, or t
  misc_feature (426)..(426): n is a, c, g, or t
  misc_feature (429)..(429): n is a, c, g, or t
  misc_feature (432)..(432): n is a, c, g, or t
  misc_feature (436)..(437): n is a, c, g, or t
  misc_feature (439)..(441): n is a, c, g, or t
  misc_feature (444)..(445): n is a, c, g, or t
  misc_feature (449)..(451): n is a, c, g, or t
  misc_feature (454)..(454): n is a, c, g, or t
  misc_feature (456)..(456): n is a, c, g, or t
  misc_feature (460)..(463): n is a, c, g, or t
  misc_feature (465)..(465): n is a, c, g, or t
  misc_feature (467)..(469): n is a, c, g, or t
  misc_feature (471)..(471): n is a, c, g, or t
  misc_feature (475)..(475): n is a, c, g, or t
  misc_feature (478)..(478): n is a, c, g, or t
  misc_feature (480)..(483): n is a, c, g, or t
  misc_feature (486)..(487): n is a, c, g, or t
  misc_feature (489)..(489): n is a, c, g, or t
  misc_feature (493)..(495): n is a, c, g, or t
  misc_feature (497)..(499): n is a, c, g, or t
  misc_feature (501)..(501): n is a, c, g, or t
  misc_feature (505)..(507): n is a, c, g, or t
  misc_feature (509)..(510): n is a, c, g, or t
  misc_feature (513)..(513): n is a, c, g, or t
  misc_feature (515)..(515): n is a, c, g, or t
  misc_feature (519)..(519): n is a, c, g, or t
  misc_feature (521)..(521): n is a, c, g, or t
  misc_feature (523)..(528): n is a, c, g, or t
  misc_feature (530)..(530): n is a, c, g, or t
  misc_feature (532)..(533): n is a, c, g, or t
  misc_feature (535)..(542): n is a, c, g, or t
  misc_feature (544)..(545): n is a, c, g, or t
  misc_feature (547)..(547): n is a, c, g, or t
  misc_feature (550)..(550): n is a, c, g, or t
  misc_feature (552)..(554): n is a, c, g, or t
  misc_feature (556)..(558): n is a, c, g, or t
  misc_feature (564)..(565): n is a, c, g, or t
  misc_feature (567)..(567): n is a, c, g, or t
  misc_feature (571)..(571): n is a, c, g, or t
  misc_feature (573)..(573): n is a, c, g, or t
  misc_feature (575)..(576): n is a, c, g, or t
  misc_feature (578)..(578): n is a, c, g, or t
  misc_feature (581)..(582): n is a, c, g, or t
  misc_feature (585)..(586): n is a, c, g, or t
  misc_feature (590)..(590): n is a, c, g, or t
  misc_feature (592)..(592): n is a, c, g, or t
  misc_feature (595)..(595): n is a, c, g, or t
  misc_feature (597)..(598): n is a, c, g, or t
  misc_feature (604)..(604): n is a, c, g, or t
  misc_feature (606)..(608): n is a, c, g, or t
  misc_feature (610)..(612): n is a, c, g, or t
  misc_feature (614)..(619): n is a, c, g, or t
  misc_feature (621)..(621): n is a, c, g, or t
  misc_feature (623)..(625): n is a, c, g, or t
  misc_feature (630)..(634): n is a, c, g, or t
  misc_feature (640)..(640): n is a, c, g, or t
  misc_feature (642)..(642): n is a, c, g, or t
  misc_feature (644)..(650): n is a, c, g, or t
  misc_feature (653)..(655): n is a, c, g, or t
  misc_feature (658)..(659): n is a, c, g, or t
  misc_feature (661)..(662): n is a, c, g, or t
  misc_feature (665)..(666): n is a, c, g, or t
  misc_feature (669)..(670): n is a, c, g, or t
  misc_feature (674)..(675): n is a, c, g, or t
  misc_feature (677)..(678): n is a, c, g, or t
  misc_feature (681)..(682): n is a, c, g, or t
  misc_feature (691)..(691): n is a, c, g, or t
  misc_feature (693)..(693): n is a, c, g, or t
  misc_feature (695)..(697): n is a, c, g, or t
  misc_feature (699)..(700): n is a, c, g, or t
  misc_feature (702)..(702): n is a, c, g, or t
  misc_feature (704)..(704): n is a, c, g, or t
  misc_feature (707)..(708): n is a, c, g, or t
  misc_feature (710)..(710): n is a, c, g, or t
  misc_feature (712)..(713): n is a, c, g, or t
  misc_feature (715)..(724): n is a, c, g, or t
  misc_feature (727)..(728): n is a, c, g, or t
  misc_feature (731)..(731): n is a, c, g, or t
  misc_feature (733)..(733): n is a, c, g, or t
  misc_feature (735)..(735): n is a, c, g, or t
  misc_feature (738)..(744): n is a, c, g, or t
  misc_feature (746)..(751): n is a, c, g, or t
  misc_feature (753)..(753): n is a, c, g, or t
  misc_feature (757)..(757): n is a, c, g, or t
  misc_feature (759)..(761): n is a, c, g, or t
  misc_feature (763)..(764): n is a, c, g, or t
  misc_feature (766)..(776): n is a, c, g, or t
  misc_feature (778)..(779): n is a, c, g, or t
  misc_feature (781)..(781): n is a, c, g, or t
  misc_feature (783)..(783): n is a, c, g, or t
  misc_feature (785)..(794): n is a, c, g, or t
  misc_feature (796)..(796): n is a, c, g, or t
  misc_feature (800)..(810): n is a, c, g, or t
  misc_feature (813)..(814): n is a, c, g, or t
  misc_feature (816)..(820): n is a, c, g, or t
  misc_feature (822)..(826): n is a, c, g, or t
  misc_feature (828)..(828): n is a, c, g, or t
  misc_feature (831)..(832): n is a, c, g, or t
  misc_feature (834)..(837): n is a, c, g, or t
  misc_feature (839)..(847): n is a, c, g, or t
  misc_feature (849)..(850): n is a, c, g, or t
  misc_feature (853)..(853): n is a, c, g, or t
  misc_feature (855)..(858): n is a, c, g, or t
  misc_feature (861)..(861): n is a, c, g, or t
  misc_feature (864)..(865): n is a, c, g, or t
  misc_feature (868)..(868): n is a, c, g, or t
  misc_feature (870)..(872): n is a, c, g, or t
  misc_feature (874)..(876): n is a, c, g, or t
  misc_feature (879)..(879): n is a, c, g, or t
  misc_feature (881)..(883): n is a, c, g, or t
  misc_feature (885)..(886): n is a, c, g, or t
  misc_feature (888)..(888): n is a, c, g, or t
  misc_feature (890)..(897): n is a, c, g, or t
  misc_feature (899)..(901): n is a, c, g, or t
  misc_feature (904)..(908): n is a, c, g, or t
  misc_feature (910)..(911): n is a, c, g, or t
  misc_feature (913)..(913): n is a, c, g, or t
  misc_feature (915)..(921): n is a, c, g, or t
  misc_feature (923)..(923): n is a, c, g, or t
  misc_feature (926)..(928): n is a, c, g, or t
  misc_feature (930)..(930): n is a, c, g, or t
  misc_feature (932)..(932): n is a, c, g, or t
  misc_feature (934)..(947): n is a, c, g, or t
  misc_feature (950)..(953): n is a, c, g, or t
  misc_feature (955)..(959): n is a, c, g, or t
  misc_feature (961)..(963): n is a, c, g, or t
  misc_feature (965)..(967): n is a, c, g, or t
  misc_feature (969)..(970): n is a, c, g, or t
  misc_feature (972)..(974): n is a, c, g, or t
  misc_feature (977)..(983): n is a, c, g, or t
  misc_feature (987)..(987): n is a, c, g, or t
  misc_feature (989)..(993): n is a, c, g, or t
  misc_feature (997)..(997): n is a, c, g, or t
  misc_feature (999)..(1000): n is a, c, g, or t
  misc_feature (1002)..(1006): n is a, c, g, or t
  misc_feature (1009)..(1014): n is a, c, g, or t
  misc_feature (1016)..(1020): n is a, c, g, or t
  misc_feature (1023)..(1027): n is a, c, g, or t
  misc_feature (1030)..(1035): n is a, c, g, or t
  misc_feature (1037)..(1039): n is a, c, g, or t
  misc_feature (1042)..(1045): n is a, c, g, or t
  misc_feature (1048)..(1049): n is a, c, g, or t
  misc_feature (1052)..(1052): n is a, c, g, or t
  misc_feature (1054)..(1054): n is a, c, g, or t
  misc_feature (1056)..(1058): n is a, c, g, or t
  misc_feature (1060)..(1061): n is a, c, g, or t
  misc_feature (1064)..(1066): n is a, c, g, or t
  misc_feature (1068)..(1069): n is a, c, g, or t
  misc_feature (1071)..(1073): n is a, c, g, or t
  misc_feature (1075)..(1075): n is a, c, g, or t
  misc_feature (1077)..(1077): n is a, c, g, or t
  misc_feature (1080)..(1081): n is a, c, g, or t
  misc_feature (1084)..(1088): n is a, c, g, or t
  misc_feature (1090)..(1096): n is a, c, g, or t
  misc_feature (1099)..(1104): n is a, c, g, or t
  misc_feature (1106)..(1108): n is a, c, g, or t
  misc_feature (1110)..(1110): n is a, c, g, or t
  misc_feature (1115)..(1115): n is a, c, g, or t
  misc_feature (1118)..(1120): n is a, c, g, or t
  misc_feature (1123)..(1123): n is a, c, g, or t
  misc_feature (1125)..(1128): n is a, c, g, or t
  misc_feature (1130)..(1135): n is a, c, g, or t
  misc_feature (1138)..(1138): n is a, c, g, or t
  misc_feature (1143)..(1143): n is a, c, g, or t
  misc_feature (1146)..(1150): n is a, c, g, or t
  misc_feature (1152)..(1153): n is a, c, g, or t
  misc_feature (1155)..(1157): n is a, c, g, or t
  misc_feature (1159)..(1161): n is a, c, g, or t
  misc_feature (1163)..(1163): n is a, c, g, or t
  misc_feature (1165)..(1165): n is a, c, g, or t
  misc_feature (1168)..(1169): n is a, c, g, or t
  misc_feature (1173)..(1174): n is a, c, g, or t
  misc_feature (1178)..(1178): n is a, c, g, or t
  misc_feature (1180)..(1180): n is a, c, g, or t
  misc_feature (1182)..(1189): n is a, c, g, or t
  misc_feature (1191)..(1191): n is a, c, g, or t
  misc_feature (1194)..(1195): n is a, c, g, or t
  misc_feature (1197)..(1202): n is a, c, g, or t
  misc_feature (1206)..(1208): n is a, c, g, or t
  misc_feature (1211)..(1212): n is a, c, g, or t
  misc_feature (1214)..(1215): n is a, c, g, or t
  misc_feature (1217)..(1218): n is a, c, g, or t
  misc_feature (1220)..(1220): n is a, c, g, or t
  misc_feature (1222)..(1222): n is a, c, g, or t
  misc_feature (1225)..(1225): n is a, c, g, or t
  misc_feature (1227)..(1228): n is a, c, g, or t
  misc_feature (1231)..(1231): n is a, c, g, or t
  misc_feature (1237)..(1237): n is a, c, g, or t
  misc_feature (1239)..(1240): n is a, c, g, or t
  misc_feature (1242)..(1242): n is a, c, g, or t
  misc_feature (1244)..(1244): n is a, c, g, or t
  misc_feature (1251)..(1251): n is a, c, g, or t
  misc_feature (1256)..(1258): n is a, c, g, or t
  misc_feature (1261)..(1261): n is a, c, g, or t
  misc_feature (1265)..(1265): n is a, c, g, or t
  misc_feature (1270)..(1270): n is a, c, g, or t
  misc_feature (1272)..(1272): n is a, c, g, or t
  misc_feature (1274)..(1274): n is a, c, g, or t
  misc_feature (1277)..(1277): n is a, c, g, or t
  misc_feature (1279)..(1282): n is a, c, g, or t
  misc_feature (1284)..(1284): n is a, c, g, or t
  misc_feature (1288)..(1288): n is a, c, g, or t
  misc_feature (1293)..(1293): n is a, c, g, or t
  misc_feature (2072)..(2072): n is a, c, g, or t
  misc_feature (3167)..(3167): n is a, c, g, or t
  misc_feature (3583)..(3583): n is a, c, g, or t
  misc_feature (3727)..(3727): n is a, c, g, or t
aacacgagagattactaataatatttactggattggaacnggttttaaaaagngcggaaatgaagttttaattggtggatcaactgggntangtgaanctgaatcagttatagctgatgctgttgtattncaacaatttgcaatgntacttgcaattaanaatggtttaaatcctgatgcaccaattggtttattaaaagttactcaaacaatttaaatgctgctatctgaaggtanttttgctactagtcgggcatatattgatngtaactgggttgatggtggnataantgttgaagattataaattaacttcttatagtgaatcanctggtgatcaaggaatggcaattcctggctttgtagatctncaagtaaatggtcatggnggtnttgatttntnangannaaaagatgnnncnnntanaanaanaatnncnnnttnnttannnaancntggnnnnantnnntntttnccnannnnaannantggnnntnnngnaaannntnnaananttanancnnnnnntnannannnnnnnnannanccntnnncnnntgaggnnanaatnantnncnctnnttnngaangnccntnnatttcncnnntnnngnnnnnngngnnnccagnnnnncatatntnannnnnnnatnnnaanntnnttnnagnntttnncnnaannggaaaaatntntnnngnnantnttnnancnnannnnnnnnnngcnnttnangnaannnnnnntnnnnnngnctcngnnntnntnnnnnnnnnnngnnantnannnnnnnnnncnaaannnnnnnnnnntgnntnnnnngnnnnngnggnnannnntnnnnnnnnntnnaangnnnngcnaannaantnnnannnccnannngnntnannnnnnnntnnnttnnnnngnnangnnnnnnntnttnnntnantnnnnnnnnnnnnnnatnnnnannnnnannnannnanngnnncannnnnnnaatntnnnnncagntnnannnnnacnnnnnntnnnnnctnnnnngcnnnnnnannngannnnaannttnantnnngnnaannngnnannnangntannaannnnngnnnnnnnagnnnnnncnnnanattanctnnnggngnnnncnnnnnnacnaactnacnnnnncnnannngnnngnanggnntttnnctanangnnnnnnnngnttnnannnnnncacnnncgnnanntnngntnggnanntcngatttngnncnantatctcngggtnnnccngcgnagatntngncantnnnnantggnttttnctttttcaccccccacgcataaactatccctcctgcctcgcaaggggtaaacctgatttagaacagataagtaggtatcgcttggccaagaaagacggtgctattgagatcgaaggcactgttgctgaagcactaccgaacgcaatgttccgagttgagttaacaaatggacataaagttttagcacatatcagtggaaagatgcgacagaactacattcgtattttgccagaagataaagtgattgtagaacttagtccgtatgacctcactagaggtcgaattatttatcgttacaaataaataatttttaaactgtagttgttagaaaggtaatcgtgaaggtcaaacctagcgtgaaaaagatttgcgacaagtgcaaagttattcgtcgtaatggccgcgttatggtgatctgcgacaacctacgtcataaacaacgtcagggttaatttaaaaaacgcgtgatgcgacgtaattaaggtaaaacttaattatgacccttagtccgaaaggctgaggccagataagaaattatctgggggcattgcggaggacctttcggatattagaaacaggttaacgatatggcacgtcttgttggtgttgatcttcctcgcgaaaagcggttagagatcgcacttacctatatttttggaatgggacttacccgtgcgcaagcaacacttgccgctactggtatctcaccaaacatcagagttaaagatctacaagagccagaattggcaaagcttcgtgaattcattgaagccaattanaaaattgagggtgatcttcgccgtgagatcgctggcgatattcgtcgcaaagttgaaattcaaagttaccaaggttctcgtcaccgcaaaggattaccagtccgcggtcaacgtactcataccaatgctcgtactcgcaagggtccacgtgttgcaatcgctggtaagaagaaggagaccaagtaatggccgccgaaaaagctaaaccagctaaagaagcagcagcaaaagctgcaccaaagaaaattaaagcacgtaagaaggataagaaaaatgttgccttcggtcatgcttatattaagagcacatttaataacaccattgtttcaatcacagatccagcaggtggcgtaattgcttggtcatcatctggtcaggttggatttaaaggttctcgtaaatcaactccatttgctgcgcaaatggctgctgaggctgctgctcgtaaagcgcaagagcacggcttaaagaaagttgatgtatttgttaagggacctggctctggccgggaaactgcaattcgttcattacaagcagccggtcttgaagttggagccatcgcagatgtaactccagcaccacataacggttgtcgtccacgtaaaccacgtcgagtataaggaaagggagaaaactatggctcgctataccggtgcagattgcaaaagatgccgtcgcgaaaaagtaaagctcttccttaagggctctaagtgcgatggaccaaagtgtccaattgagtcacgtccatatccaccaggacaacatggccgtgctcgttcaaaagattctgagtacttattacagatgcgtgagaagcaaaagtgtgcacgtatttacggagtacttgagaagcagttccgtggttactacgaagaagcaaaccgtctgcaaggtaagactggtgagaatcttttggtactacttgaaactcgtctagacaatgttgtcttccgcgctggctttgctaagagccgggatatggcacgccaattagtgcgccatggtcacttcttagttaatggcaagagcgtgaacattccatcatttagaactacaccgatggacataattgatgttgtaccagcttcattgganaccacaccatttatcgtcgcaagtgcagagcttggtgagaaaactgttccagcatggatggaggttgtgggttctaaaatgcgaattttggtccacgccgttccaacccgcccaattattgatactcaagtacaagagcaactaattgttgagctttactccaagtaatcaagtacttaagcagtaaagatttaccgcagtaaaactaaatatcgtaagccaaccgaaagatcaaatagagggtctttcagaacatacggaggaacaaagtgctaattgcacaacgcccaatcctcactgaggaagttgtaagcgaataccgttcacggttcattattgagccgctagaacctggtttcggctacacacttggtaattcaattcgtcgcaccttattatcttcaattccaggagcngctgttactggtattagagtaaataatgcgctgcacgagttcactgctttagaaggtgtgaaagaggatctaactgagatcgtcttaaacatcaaaaacctagttttatcttcagataatgatgaaccatcacttctttacatncgtaaaaatggtgagggaattgttactggcgcagatgtggccgctccaacaggagttgccgtacacaatccagaacttcacattgcaacactaaattcaaaggcaaagtttgagatcgagttaactgttgagcgtggtcgtggttacatcaccgcggtacaaaacaaagcagcagggggagagattggccggattccggttgattcaatttactcaccagtgcttcgtgttacctacaaagtagaggcaacacgtgttgaacaacgcaccgac

SEQ ID NO: 1425 - DNA, 4000 bp, Escherichia coli
  misc_feature (744)..(744): n is a, c, g, or t
  misc_feature (857)..(857): n is a, c, g, or t
  misc_feature (860)..(860): n is a, c, g, or t
  misc_feature (864)..(864): n is a, c, g, or t
  misc_feature (1990)..(1990): n is a, c, g, or t
  misc_feature (2437)..(2437): n is a, c, g, or t
  misc_feature (2542)..(2542): n is a, c, g, or t
  misc_feature (2584)..(2584): n is a, c, g, or t
  misc_feature (2653)..(2653): n is a, c, g, or t
aagcacgaacggcgcgaacaggaacggcagcccgtagatgatgtacttctgcggcccttccatcccctggccgcggaccgtcatcgccaggcccgaggcgagctgggtgacgatgaagaggacgacgaggacggccgcgacggcgccctcgggcggctggatcaggctcgggatgaacaggaagccctccggcggcgagttctgcacgtccatctggaagctgtcgcccttgagcatgtagtagagcgagatgaagaccgggatctgcagcagcagcggcaggcaggaagcgagcggattgatctcgttctcctggtagaacttcatcatcgcctgctgctgggcctgcttgtcgtccttgtgcttctcctggatctgcttgagctgcggctgcagctcctgaagcgcccgcatcgagcggatctgcttcatcgagatcggcaggatcgcgagccggacgacgaagacgagggcgatgatcgccggaccccagccgagcccgagcgtgtcgtggaagaagacgatgatcgcctcggggatgtcggtgaagatcgatgcgacgggcagggtcatcggctggaggctctctcgctacgctcggtaacggttcgggtggctcggaagatcgggcgctcggagacgggatcgagaccgccggcgctgaaggggttgcatcgtaggacgcgccaggcggcgaggatcatgccgcgaaacgccccgagctcgcggacagcctcctcggcntaggcagagcaggtcgggtagtagcggcagcgctggccgagcgcgggggagaggaagcggcggtagaagcggatcggcagcagcgccagggtcgcggcgaagcccgtccgcgncgncgancccgtttcacgtgcaacggtggccgggctcaactgggaccgcccccgggtcgcccgcggccgcgtttcacgtgcaacgcccactccccctgccctcattctccggcctcgtcgagcagcgtcgtcagcgaggccgtcagccccgccgtgccttcccggtcgatcaggccggcgacgtcgctgcggccgacgaggacgaagtcgtagccgtcgggaagccggtcggcgagtccccagaacgcctcgcgcatcgcccgcttcaccttgttgcgatcgatcgcaccgccgaccttgcggccgaccgagacgccgagacggacctcgtcgccggagtcgtccccgcgggggaacgcgtagaggaccaggaagcggttcgcgtgcgagcgcccgtcgcggtaggcgcgatcgaaatcgccgctgcgcgagaggcgaccccgcttgcgaccctcgccaccggcctcgcgggacatctagacggtcaggcgcttgcggcccttgcgacggcgccggcggatgatctcgcgaccatggcgggttcgcatccgggcgcggaagccgtgcgcgcgggcgcgctttctcttctttggctgccaggttcgcttcattctcggtccctctcgtgcccgcggaaggggaatcggcggggcatgccggacggcgcggggacggagcagtatagggaggtcgtccggagggttatggcgcgatttgcggagtcgggcgcgggggtcgttcgattcttcgagtggggccgcgatcgccgacctatgatcgcccgcggaggccgtccccggcgctcatttccacccttgcacgccgaatcgagacaaccgagcgaccagaccgagccgggccgggagctggcgacgatctggaacggagtccgcgaggagctccgccggacgctgccgccgtccgcgttcgagaactggctcgagccgctccgcgccgtcggcatccagggcacccgcctctacgtctccggccccgaccgcgtccgcgactggttccagcgccgctacggcgccgctgcgaccgaggcgctgcggaggcgcgcgcccgggttcaccgagatcgccttcaccgagcccccggcgggtgccgagcgcgatcccggcggtgatgcnggcggttccgccacgccgccgattcccgccgggctcgcatccggcctcgacttcgaccacttcgtgatcggctccggcaaccgcttcgggcactccgccgcgctcgcggtggccgagtccccgggcgagtcctacaacccgctgttcctctacggctcgccggggctcggcaagacgcacctgctcgtctcgatcgccgactacctgcgcaaccgccggcccgacctcgacgtcgcctacaccaccgccgagcgcttcacctccgagttcgtgaccgcgctgcgcggcgacggtcgcccgaccgagcgcttcaagcggcgctaccgcggcgtcgacgtgctgctgatcgacgacgtccagttcctcgaaggcaaggcgcggaccgaggacgagttcttccacaccttcaacgagctctacgcgcaggggagccagatcgtgctctcnagcgaccgcccgccggaggcgatgggccggctcagcgagcggatgcgcgaccgcttcgcctgggggctgacggtcgagctgcagggccccgacccggcgacgcgnatcacgctgctgcggcggctcgcggtcgagaacgggatcccngtgcccgacctcgaggtgctccagcagatcgccggcgccgcgccgggcaacctccgccggctcgaaggngcgctgacgcgggtgaccgcgttcgcctcgatgctcggcgaggtcccgagcgtcgatctggtccgcaaggcgctcggctccgacgccgcgccgatcgacgcgaccccggtccgcgagcccgcggccgagcggctcgagcggatccagcgcgccgtctgcgacgtgttgcgtctctcgctcgaggacatgcgctcgccgcgccgcgctccgaacctcgttcgcggccgccagctcgcgatgtatgtcgcccgcaaccagaccgatctctcgctcgccgagatcgcccgtggcttcgaccgcgaccactcgacggtgatccactcgatccgccgcgtcgagcgcgacctcgagccgggctcggatatccacaaggcgctggagctgatccacgagcgcctccacatcgccggggagggcgcgtgaggggcggtcgggattccacggcaggggacttgtccacgaccgcttccacaacccgcgatcgcgcatcgctgctgccgtcgcggcgttctgaaagggtttccacggacctaacatcaactcggatgaccggaagaggatgcagatggaattgaaagccgaacgcgatccgctgctcgacggcctgcagaccgctgccagggccctgtcgacgcggacgacgctgccgtcgctcggcgggatcatgctcgtcgcgaacgggggcaaggcgatcgcgcgggcgaccgacggcgagctggcggtctcggtcgagctcgacgccgaggtcgacggcgacggtgaggtcctgctgccgggccggctcctggccgacgtctcgcgggcgctgccgcagggccccgtgaccctggccgaacgcaaggacaagggcgatgtcgagctcaccgccggcaccgccaacttccacctgcggctgctcgacgccgaggacttcccgcccctgcccgccgccgagggcgagctcctgaagatgcccgggggagcgctcgccgagaccgtcgaccgcgtcgcgcgggccgcctcgcgcgacgaggtccggccgatcctgaccgggatcctcgtcagcgtcgaggaatcgaccctgacgatggtcgcgaccgactcctaccggctcagcgtcaagcggaccgagctcgagggcggggcgccgcagcagttcgaggcgaacgtgccggcgcgggcgatgcgggagctggcgcgcgtcgtcgagcagcacggcgtcgaggaggtcgagatcgcgctgcccggcaaccagatcgtcttccgggccggcaacgtgacgatgtcatcgcggctgatcgagggccagttcccgagctaccggcagctccttcccgacgccttcgaccacgacgtccggttgccgcg

SEQ ID NO: 1426 - DNA, 4000 bp, Escherichia coli
  misc_feature (202)..(202): n is a, c, g, or t
  misc_feature (1403)..(1403): n is a, c, g, or t
  misc_feature (1406)..(1406): n is a, c, g, or t
  misc_feature (1479)..(1479): n is a, c, g, or t
  misc_feature (1876)..(1876): n is a, c, g, or t
  misc_feature (1937)..(1937): n is a, c, g, or t
  misc_feature (1991)..(1991): n is a, c, g, or t
  misc_feature (2190)..(2190): n is a, c, g, or t
  misc_feature (2631)..(2631): n is a, c, g, or t
  misc_feature (2733)..(2733): n is a, c, g, or t
  misc_feature (2745)..(2745): n is a, c, g, or t
  misc_feature (2862)..(2862): n is a, c, g, or t
  misc_feature (2868)..(2868): n is a, c, g, or t
  misc_feature (2883)..(2884): n is a, c, g, or t
  misc_feature (2889)..(2889): n is a, c, g, or t
  misc_feature (2896)..(2896): n is a, c, g, or t
  misc_feature (2901)..(2901): n is a, c, g, or t
  misc_feature (2930)..(2931): n is a, c, g, or t
  misc_feature (2940)..(2940): n is a, c, g, or t
  misc_feature (2949)..(2949): n is a, c, g, or t
  misc_feature (2952)..(2952): n is a, c, g, or t
  misc_feature (2963)..(2964): n is a, c, g, or t
  misc_feature (2967)..(2967): n is a, c, g, or t
  misc_feature (2982)..(2982): n is a, c, g, or t
  misc_feature (3018)..(3018): n is a, c, g, or t
  misc_feature (3210)..(3210): n is a, c, g, or t
  misc_feature (3213)..(3213): n is a, c, g, or t
  misc_feature (3244)..(3244): n is a, c, g, or t
  misc_feature (3278)..(3279): n is a, c, g, or t
  misc_feature (3295)..(3296): n is a, c, g, or t
  misc_feature (3303)..(3303): n is a, c, g, or t
  misc_feature (3309)..(3309): n is a, c, g, or t
  misc_feature (3312)..(3312): n is a, c, g, or t
  misc_feature (3318)..(3318): n is a, c, g, or t
  misc_feature (3328)..(3328): n is a, c, g, or t
  misc_feature (3341)..(3341): n is a, c, g, or t
  misc_feature (3348)..(3348): n is a, c, g, or t
  misc_feature (3376)..(3381): n is a, c, g, or t
  misc_feature (3383)..(3385): n is a, c, g, or t
  misc_feature (3388)..(3392): n is a, c, g, or t
  misc_feature (3395)..(3400): n is a, c, g, or t
  misc_feature (3403)..(3404): n is a, c, g, or t
  misc_feature (3407)..(3407): n is a, c, g, or t
  misc_feature (3409)..(3410): n is a, c, g, or t
  misc_feature (3412)..(3413): n is a, c, g, or t
  misc_feature (3415)..(3415): n is a, c, g, or t
  misc_feature (3417)..(3417): n is a, c, g, or t
  misc_feature (3419)..(3425): n is a, c, g, or t
  misc_feature (3431)..(3434): n is a, c, g, or t
  misc_feature (3436)..(3436): n is a, c, g, or t
  misc_feature (3439)..(3446): n is a, c, g, or t
  misc_feature (3448)..(3452): n is a, c, g, or t
  misc_feature (3454)..(3454): n is a, c, g, or t
  misc_feature (3456)..(3456): n is a, c, g, or t
  misc_feature (3458)..(3459): n is a, c, g, or t
  misc_feature (3461)..(3461): n is a, c, g, or t
  misc_feature (3463)..(3463): n is a, c, g, or t
  misc_feature (3465)..(3468): n is a, c, g, or t
  misc_feature (3470)..(3473): n is a, c, g, or t
  misc_feature (3476)..(3476): n is a, c, g, or t
  misc_feature (3478)..(3487): n is a, c, g, or t
  misc_feature (3489)..(3490): n is a, c, g, or t
  misc_feature (3492)..(3498): n is a, c, g, or t
  misc_feature (3500)..(3500): n is a, c, g, or t
  misc_feature (3503)..(3504): n is a, c, g, or t
  misc_feature (3506)..(3506): n is a, c, g, or t
  misc_feature (3508)..(3508): n is a, c, g, or t
  misc_feature (3510)..(3511): n is a, c, g, or t
  misc_feature (3513)..(3513): n is a, c, g, or t
  misc_feature (3515)..(3520): n is a, c, g, or t
  misc_feature (3522)..(3526): n is a, c, g, or t
  misc_feature (3529)..(3530): n is a, c, g, or t
  misc_feature (3532)..(3532): n is a, c, g, or t
  misc_feature (3534)..(3536): n is a, c, g, or t
  misc_feature (3538)..(3539): n is a, c, g, or t
  misc_feature (3541)..(3543): n is a, c, g, or t
  misc_feature (3545)..(3546): n is a, c, g, or t
  misc_feature (3549)..(3550): n is a, c, g, or t
  misc_feature (3552)..(3553): n is a, c, g, or t
  misc_feature (3555)..(3560): n is a, c, g, or t
  misc_feature (3563)..(3568): n is a, c, g, or t
  misc_feature (3572)..(3576): n is a, c, g, or t
  misc_feature (3578)..(3578): n is a, c, g, or t
  misc_feature (3580)..(3582): n is a, c, g, or t
  misc_feature (3585)..(3585): n is a, c, g, or t
  misc_feature (3587)..(3589): n is a, c, g, or t
  misc_feature (3591)..(3593): n is a, c, g, or t
  misc_feature (3596)..(3607): n is a, c, g, or t
  misc_feature (3609)..(3612): n is a, c, g, or t
  misc_feature (3615)..(3616): n is a, c, g, or t
  misc_feature (3618)..(3621): n is a, c, g, or t
  misc_feature (3623)..(3627): n is a, c, g, or t
  misc_feature (3631)..(3631): n is a, c, g, or t
  misc_feature (3634)..(3634): n is a, c, g, or t
  misc_feature (3636)..(3637): n is a, c, g, or t
  misc_feature (3639)..(3651): n is a, c, g, or t
  misc_feature (3653)..(3653): n is a, c, g, or t
  misc_feature (3656)..(3660): n is a, c, g, or t
  misc_feature (3662)..(3663): n is a, c, g, or t
  misc_feature (3666)..(3667): n is a, c, g, or t
  misc_feature (3669)..(3671): n is a, c, g, or t
  misc_feature (3673)..(3675): n is a, c, g, or t
  misc_feature (3677)..(3684): n is a, c, g, or t
  misc_feature (3686)..(3688): n is a, c, g, or t
  misc_feature (3694)..(3698): n is a, c, g, or t
  misc_feature (3701)..(3702): n is a, c, g, or t
  misc_feature (3704)..(3715): n is a, c, g, or t
  misc_feature (3717)..(3722): n is a, c, g, or t
  misc_feature (3724)..(3729): n is a, c, g, or t
  misc_feature (3731)..(3732): n is a, c, g, or t
  misc_feature (3734)..(3734): n is a, c, g, or t
  misc_feature (3736)..(3738): n is a, c, g, or t
  misc_feature (3741)..(3748): n is a, c, g, or t
  misc_feature (3751)..(3751): n is a, c, g, or t
  misc_feature (3753)..(3754): n is a, c, g, or t
  misc_feature (3757)..(3760): n is a, c, g, or t
  misc_feature (3762)..(3762): n is a, c, g, or t
  misc_feature (3764)..(3767): n is a, c, g, or t
  misc_feature (3769)..(3770): n is a, c, g, or t
  misc_feature (3773)..(3774): n is a, c, g, or t
  misc_feature (3776)..(3777): n is a, c, g, or t
  misc_feature (3779)..(3780): n is a, c, g, or t
  misc_feature (3782)..(3790): n is a, c, g, or t
  misc_feature (3792)..(3795): n is a, c, g, or t
  misc_feature (3797)..(3808): n is a, c, g, or t
  misc_feature (3810)..(3814): n is a, c, g, or t
  misc_feature (3816)..(3816): n is a, c, g, or t
  misc_feature (3819)..(3821): n is a, c, g, or t
  misc_feature (3824)..(3828): n is a, c, g, or t
  misc_feature (3831)..(3832): n is a, c, g, or t
  misc_feature (3834)..(3834): n is a, c, g, or t
  misc_feature (3836)..(3841): n is a, c, g, or t
  misc_feature (3843)..(3846): n is a, c, g, or t
  misc_feature (3848)..(3852): n is a, c, g, or t
  misc_feature (3855)..(3856): n is a, c, g, or t
  misc_feature (3858)..(3861): n is a, c, g, or t
  misc_feature (3863)..(3864): n is a, c, g, or t
  misc_feature (3866)..(3866): n is a, c, g, or t
  misc_feature (3868)..(3871): n is a, c, g, or t
  misc_feature (3874)..(3875): n is a, c, g, or t
  misc_feature (3877)..(3877): n is a, c, g, or t
  misc_feature (3879)..(3883): n is a, c, g, or t
  misc_feature (3885)..(3889): n is a, c, g, or t
  misc_feature (3891)..(3891): n is a, c, g, or t
  misc_feature (3893)..(3893): n is a, c, g, or t
  misc_feature (3895)..(3895): n is a, c, g, or t
  misc_feature (3897)..(3897): n is a, c, g, or t
  misc_feature (3899)..(3899): n is a, c, g, or t
  misc_feature (3902)..(3902): n is a, c, g, or t
  misc_feature (3905)..(3908): n is a, c, g, or t
  misc_feature (3910)..(3910): n is a, c, g, or t
  misc_feature (3912)..(3912): n is a, c, g, or t
  misc_feature (3914)..(3914): n is a, c, g, or t
  misc_feature (3916)..(3916): n is a, c, g, or t
  misc_feature (3918)..(3918): n is a, c, g, or t
  misc_feature (3922)..(3922): n is a, c, g, or t
  misc_feature (3924)..(3931): n is a, c, g, or t
  misc_feature (3933)..(3935): n is a, c, g, or t
  misc_feature (3937)..(3943): n is a, c, g, or t
  misc_feature (3945)..(3950): n is a, c, g, or t
  misc_feature (3952)..(3953): n is a, c, g, or t
  misc_feature (3955)..(3955): n is a, c, g, or t
  misc_feature (3957)..(3960): n is a, c, g, or t
  misc_feature (3962)..(3962): n is a, c, g, or t
  misc_feature (3964)..(3964): n is a, c, g, or t
  misc_feature (3966)..(3972): n is a, c, g, or t
  misc_feature (3974)..(3978): n is a, c, g, or t
  misc_feature (3980)..(3980): n is a, c, g, or t
  misc_feature (3982)..(3985): n is a, c, g, or t
  misc_feature (3988)..(3989): n is a, c, g, or t
  misc_feature (3991)..(3991): n is a, c, g, or t
  misc_feature (3994)..(3996): n is a, c, g, or t
  misc_feature (3998)..(4000): n is a, c, g, or t
gctgatggcgcctaggtcgtgcaagatgtcttctgctgcgatggtttctttgcgaatacggctctctgcaaaggccaagtcttctgcaattgaaggatcgaggtggtggcaaaccatcagcatgtcaacgtgttcgtcgagggtgttgatggtgtagggccgcgttggattggtagaggagggcagcacgttggcttcgccnaccactttcaaaatgtcgggggcatgaccgccacctgcgccttccgtgtggaaggtgtgaatggtgcggcctttgaatgctgccacggtgtcttccacaaaacccgattcgttcagggtgtcggtgtggatggccacttgagtatcggtttcttcagccacgttcaaacagttatcaatggctgcaggtgttgtgccccagtcttcgtgtagtttgaggccaatgacgcccgccttgatttgttcgtgcaatgcagcaggcaaagcagcattgcctttgcccaagaaacccaagttcatggggaatgcatcagctgcttgcagcatgcgctcaatgttgtgcgggccaggcgtgcaagtggttgcgaaggtgccagttgcaggcccggtgccaccacccagcatggtggtaattccgctggacaaagcttcttctatttgctgcggtgctatgaagtgaatgtgcgtatcaatgccacctgcagtgacgatcatgccttcgcagctgatgatctctgtgccggggcctatgatgatatcgacaccaggttgcgtgtcggggttgcctgctttgccaatggcggcgatgcgattgcctttgaggccaatgtcggccttcacaatgccccagtggtcaataatcagggcattggtgagcacgcaatccatggcgccttctgcgttggtgcgctgcgattgcgacatgccatcgcgaatggttttgccgccaccaaacttcacttcttcgccgtagctgccggcctgtaatgtgaaatctttttcaacttcaatgatgagctcggtgtcggccaagcgaacacggtcacctacggtggggccaaacatttcggcgtaagcgcgtttgttgatatgggccatgttaagaaactttcttggaaggcgcgtcaagcgcgccgttggtcagggctctaaagccatagatcacgcggtcgccagcgtagtcgaccaattcaacggtgcgttgttggcctggttcaaatcgaacggcggtgcctgaagccagattgagtcgcatgccatgcgctgcagctctgtcaaagctcagaccgccattggtttcagcaaagtgatagtgcgatcccacttgaatggggcgatcgctggtgttttgaaccaccagtgtgcaggtccgtctgccaacattgaggtcgtggtggccttcgtcgatgaggagttcgccnggnatcatgatcgggtccttaaacaatgggttgatgcacggtgaccagcttggtgccatcaggaaaggttgcttcnacttgaatgtcgggaatcatttctgcaataccgtccatgacatctgcacgtgtgagcagggtgcgaccttcgctcatgagttgggccacggttttgccatcgcgtgcaccttccatgacggctgcactgatgtaggccacagcttctgggtaattcaattgaaggccacgggcttttcggcgctcggccaagagccctgctgtgaatatgaggagtttgtctttttcgcgtggggtgagttccatggtgcactcgtttgaagttcagattcaagcttacctcaagcaacatgcatgcccttgagcttcttgagaatctttgggctgcaccgcaaaagggcataactattttggtgccgacaaagatgaaatgcacaaacttggttcattttttggantttggcctgcctcatgtgtggggaaactcgttctacattgaatcgaattaggtcatttccnctctcaacgggattggaaacccaagtgttggcacagcccttgcagaaggctaancagcgttgcagttcttcgcttgtttaccaaccttccttaatttgattggagtgctcttatgttgaatcgtcgtggcaatctcaaagccttggccctagcgtctgccctcgtggccggtggcttgtctttctctgtacaagctcaaacgtctaacaccatcaaagtgggcatcttgcacagcttgtctggcaccatggcnatttctgaaaccgtgttgaaagacaccgtgctcatggccatcgatgaaatcaacgccaaaggcggtgtgttgggcaagaaactcgaacccgtggtggttgaccccgcttccaactggcctttgtttgctgaaaaaaccaagcaactcttgggtcaagacaaagtgtctgtgatttttggttgctggacttctgtgtcacgtaaatctgtgttgcctgtggttgaagaaatgaacggcttgctgttctaccccgtgcagtacgaaggtgaagagctgtctaagaatgtgttttacacaggtgcagcacctaaccaacaagccattccagcggttgactatttgatgagcaaagacggtggctctgccaagcgttgggtgttgttaggtaccgactatgtgtacccacgtacaaccaacaaaattttgcgcgcttacttgaanagcaaaggcgtgaaagattctgacattgatgaaaaatacacaccctttggtcattcagactaccaaacgattgtggcggacgtgaagaaattttcagctggnggtaaaacagcngtggtctccaccatcaacggtgactccaatgtgcctttctacaaagagttgggcaatgcaggcttgaaggccaaagacgtgcctgtggttgcgttctctgtgggtgaagaagaactncgcggngtggacaccaagccnntggtnggtcacntggcngcttggaactacttcatgagcatcaaganncccgccaangacgagttnacnaaaaagtgggnngcntatgccaaggccaanaacattgcaggtcacaaagacaagcctttgaccaangacccgatggaagccacttacattggtatcaacatgtggaagcaggctgttgagaaggccaagtctactgatacagacaaagtgattgctgccatggctggtcagaccttcacagcacctagcggtatcacatctaagatggatgagaaaaaccaccacttgcacaagtcagtgttcattggcgaaatcaangcngacggccaattcaatgtggtttggaaaacancaggccctgtgaaagccaagccatggagcccctnnattcctggcaatgacnngaagccngacganccngctaanaagtaatttntgaagctcgtccnagagganggacggcttcgtccttcctctttttttnnnnnncnnnaannnnnaannnnnntcnnttnannanntngncnnnnnnntttttnnnngnttnnnnnnnngnnnnngncntnntngncnnnncnnnnaangnnnnnnnnnntnncnnnnnnnanggnntngntnnangnnnnnncnnnnnaannantnnnanncnnnannaanntnntnnnnnnggnnnnnnaaannnnntngnnnttntnnnannnttnnnnnnnnnnnncnnnnaanntnnnngnnnnnaaanttngnntnnnnnnnnnnnnntnggnnnnngnnaanncnnngnnncnnnnnnnngnnnaaaaannnnnttnncnnnnnnnnnnnnannnnnngnnnnnnannancnnnttnnnnnnnnaantnnaannnncntnnnngnnttnnanntnntnnnnnnnnnannnnannnnnnnnnnnnannnnncnaannnttnnnnnaannancnnnnnncnnnnannnnnccnntnnnnannangnnnntgnncnannnnnannnnncnangntntnaanttnnnncnantngncnaagncnnnnnnnnannngnnnnnnncnnnnnngnngntnnnntngnannnnnnnannnnntngnnnnaanncnaannncnnn

SEQ ID NO: 1427 - DNA, 4000 bp, Escherichia coli
  misc_feature (1)..(1521): n is a, c, g, or t
  misc_feature (1609)..(1611): n is a, c, g, or t
  misc_feature (1614)..(1618): n is a, c, g, or t
  misc_feature (1620)..(1621): n is a, c, g, or t
  misc_feature (1623)..(1625): n is a, c, g, or t
  misc_feature (1627)..(1627): n is a, c, g, or t
  misc_feature (1629)..(1631): n is a, c, g, or t
  misc_feature (1633)..(1634): n is a, c, g, or t
  misc_feature (1673)..(1675): n is a, c, g, or t
  misc_feature (1743)..(1744): n is a, c, g, or t
  misc_feature (1746)..(1746): n is a, c, g, or t
  misc_feature (1945)..(1945): n is a, c, g, or t
  misc_feature (1987)..(1987): n is a, c, g, or t
  misc_feature (1991)..(1991): n is a, c, g, or t
  misc_feature (1996)..(1996): n is a, c, g, or t
  misc_feature (3730)..(3730): n is a, c, g, or t
  misc_feature (3757)..(3757): n is a, c, g, or t
nnnnnnnnnnnnnnnnnnnnnnnnnnnnnnnnnnnnnnnnnnnnnnnnnnnnnnnnnnnnnnnnnnnnnnnnnnnnnnnnnnnnnnnnnnnnnnnnnnnnnnnnnnnnnnnnnnnnnnnnnnnnnnnnnnnnnnnnnnnnnnnnnnnnnnnnnnnnnnnnnnnnnnnnnnnnnnnnnnnnnnnnnnnnnnnnnnnnnnnnnnnnnnnnnnnnnnnnnnnnnnnnnnnnnnnnnnnnnnnnnnnnnnnnnnnnnnnnnnnnnnnnnnnnnnnnnnnnnnnnnnnnnnnnnnnnnnnnnnnnnnnnnnnnnnnnnnnnnnnnnnnnnnnnnnnnnnnnnnnnnnnnnnnnnnnnnnnnnnnnnnnnnnnnnnnnnnnnnnnnnnnnnnnnnnnnnnnnnnnnnnnnnnnnnnnnnnnnnnnnnnnnnnnnnnnnnnnnnnnnnnnnnnnnnnnnnnnnnnnnnnnnnnnnnnnnnnnnnnnnnnnnnnnnnnnnnnnnnnnnnnnnnnnnnnnnnnnnnnnnnnnnnnnnnnnnnnnnnnnnnnnnnnnnnnnnnnnnnnnnnnnnnnnnnnnnnnnnnnnnnnnnnnnnnnnnnnnnnnnnnnnnnnnnnnnnnnnnnnnnnnnnnnnnnnnnnnnnnnnnnnnnnnnnnnnnnnnnnnnnnnnnnnnnnnnnnnnnnnnnnnnnnnnnnnnnnnnnnnnnnnnnnnnnnnnnnnnnnnnnnnnnnnnnnnnnnnnnnnnnnnnnnnnnnnnnnnnnnnnnnnnnnnnnnnnnnnnnnnnnnnnnnnnnnnnnnnnnnnnnnnnnnnnnnnnnnnnnnnnnnnnnnnnnnnnnnnnnnnnnnnnnnnnnnnnnnnnnnnnnnnnnnnnnnnnnnnnnnnnnnnnnnnnnnnnnnnnnnnnnnnnnnnnnnnnnnnnnnnnnnnnnnnnnnnnnnnnnnnnnnnnnnnnnnnnnnnnnnnnnnnnnnnnnnnnnnnnnnnnnnnnnnnnnnnnnnnnnnnnnnnnnnnnnnnnnnnnnnnnnnnnnnnnnnnnnnnnnnnnnnnnnnnnnnnnnnnnnnnnnnnnnnnnnnnnnnnnnnnnnnnnnnnnnnnnnnnnnnnnnnnnnnnnnnnnnnnnnnnnnnnnnnnnnnnnnnnnnnnnnnnnnnnnnnnnnnnnnnnnnnnnnnnnnnnnnnnnnnnnnnnnnnnnnnnnnnnnnnnnnnnnnnnnnnnnnnnnnnnnnnnnnnnnnnnnnnnnnnnnnnnnnnnnnnnnnnnnnnnnnnnnnnnnnnnnnnnnnnnnnnnnnnnnnnnnnnnnnnnnnnnnnnnnnnnnnnnnnnnnnnnnnnnnnnnnnnnnnnnnnnnnnnnnnnnnnnnnnnnnnnnnnnnnnnnnnnnnnnnnnnnnnnnnnnnnnnnnnnnnnnnnnnnnnnnnnnnnnnnnnnnnnnnnnnnnnnnnnnnnnnnnnnnnnnnnnnnnnnnnnnnnnnnnnnnnnnnnnnnnnnnnnnnnnnnnnnnnnnnnnnnnnnnnnnnnnnnnnnnnnnacgacattcgcatgtgtattaattaatacacacacatgcatcgttgcacgcgcgtgtcatgatcacgggtcaggactcaagagtatannngtnnnnntnngnnnanannntnncgatgcgtcgtccgtcccgacggcccgacgccccgcacnnngacgcgcgccgacgcgcgaccgcgcgatggcgcgcgcgcgcgcggcgccgacctcgcgcctcgcgacnncncgcgcgcgtctcgcgaccgcgcgaccgcgcgcgcgcgtcgcgagacgcgcggcgacgccggacgacgacgcgacaaaaaactgccggcggctcgtggtgcgcgaattgcgcgagcgattgatcgcgtccggcgcgcacgacgccgcgatcgtgcgtcgtgcgaacaaggcggcgttggtggagatgtgcgaagcgctgntgcggcgggagcgcgcgcgcgagcgcggcgcggcgagcgggngagnggggncgcgcgaggacgagggggagacggcggaggcgggcgacgaggacggcgaggcgacggcgacgggggacgcgattcgagcgcacgggggagggtatcagcgcacgatgtttaatgggaaggttgtagacgccgtttcgggggggtcgacggcgttggaggaggatatgaagtcgaattttagcggcgcggagttgacgtttctcggcacgtcgagcggggcgccgagctttacgcgaaacgtctcgtcggtggcgttgaggttagagaacgaggtttggttgtttgattgcggtgaggcgacgcagcatcagttgatgcggtcgaagctgaagtatgcgaagatcacgaggatttttatcacgcacatgcacggggaccacatcttcggtttgcccgggttgatttgcgcgattagcggcgcgcgcacggcgcactcgaggtcgtacggtggttctgtcgtgcctttgcacatcataggcccgccggggatacggcagttcatttactcatccatcacgtggtcgagatcggtgctcgggatgccgctgatcgtgacagagttgaggcagcctgcgcgcgcgagcggcggctcgcccgcggcgcacacgtcggtcgatccgcgagggaagattttcatgggcgaatattggcccgataacgtctccgaaccgctgccgcacttcagagacgccgcacgatggaacgaactcgggatgagcgagcagctgccgatttggaccgcgtataacgatggaaacttttgcgttcgcgcctcggtgctgcgacatcccgtgccgtgcttcggttacgtcatcgacgagtgtgacgccagcggtcggctcgacgccgagaagtgtgtggagatgggactgcctccagggcgcgaatatgccatgcttaaagcagggcagtcggtgacgacgaaggatggacgcgtgattcgtcccgaagacgtcataggcacgcctcgaccggggcgtcgactggtgcatctcggcgacacgtgcgacagcagctcgatggtttccctggcgcagggtgcggattccttaattcacgaatctacgtttgaagcaaagaaagtgtcagaggcgctgtacaaaggacactccacggcgcgcatggctgggaagtttgccgcgcaagtcaacgcgcgcgcgttgattttaacgcatttttcaaatcgctacgccggcggcatccatcgcgctgattcaaacagcgatgatctcggtgccagcggagacgacgacgacgacgacgaagatgattgtgaagatatgtcgccacccgatgtcgactccgacggcgaagcactcgccgagggcgatcgcatgaacgtcgagcgtctcgtcgaggaagccaaggaggccaagggcgactcgcgcgtcatcgccgcgagcgacttcttcgtcttcaacgtcggtcggcgcgaagagttcgacgatttcgatttctccaagggtgatcgatcggtgttattcgccagcccccgcaagacgaccccagagacgttcgtcgtcgatcaggacgacggccgcgcgtcgtcgtcatcgggtggcgacgatcgagaccgtcgaccgcggcgaggcggcggctccgccgaccgtggcggtcgcggccgcggcgcccgggccccggttagtggacgctatcagcggtcgccatcttcgcaatagctttcacgcgcgagctcatgtaaacatacacaccgtcgagtcgacgcgccgtccngaagcccctatccacgacgtccccttnccacgcggtcatcactgtgcgccgcggacccgaattcgcgcgccatgttcgccgcccgcgcgcccgcgaagctcgccgcgtcgcccgcgcgcgcgtcccgcgcctctcgcgccgtcgtcacgtgcggcgcgtctcgtaaagcgcgccgagcgcaaaccggcggcggcggcgccgacgcggcgacgaaacccaaacccgcgctgagcgcggcgaacaaagccgcgcgcgataaagctcgcaaag

SEQ ID NO: 1428 - DNA, 4000 bp, Escherichia coli
  misc_feature (1989)..(1989): n is a, c, g, or t
  misc_feature (2297)..(2297): n is a, c, g, or t
  misc_feature (2302)..(2303): n is a, c, g, or t
  misc_feature (2312)..(2313): n is a, c, g, or t
  misc_feature (2318)..(2319): n is a, c, g, or t
  misc_feature (2324)..(2324): n is a, c, g, or t
  misc_feature (2327)..(2327): n is a, c, g, or t
  misc_feature (2329)..(2330): n is a, c, g, or t
  misc_feature (2333)..(2334): n is a, c, g, or t
  misc_feature (2336)..(2337): n is a, c, g, or t
  misc_feature (2339)..(2340): n is a, c, g, or t
  misc_feature (2343)..(2344): n is a, c, g, or t
  misc_feature (2347)..(2347): n is a, c, g, or t
  misc_feature (2350)..(2350): n is a, c, g, or t
  misc_feature (2353)..(2353): n is a, c, g, or t
  misc_feature (2355)..(2358): n is a, c, g, or t
  misc_feature (2361)..(2361): n is a, c, g, or t
  misc_feature (2363)..(2363): n is a, c, g, or t
  misc_feature (2367)..(2378): n is a, c, g, or t
  misc_feature (2380)..(2380): n is a, c, g, or t
  misc_feature (2383)..(2383): n is a, c, g, or t
  misc_feature (2387)..(2387): n is a, c, g, or t
  misc_feature (2389)..(2390): n is a, c, g, or t
  misc_feature (2393)..(2394): n is a, c, g, or t
  misc_feature (2398)..(2398): n is a, c, g, or t
  misc_feature (2403)..(2404): n is a, c, g, or t
  misc_feature (2411)..(2413): n is a, c, g, or t
  misc_feature (2415)..(2422): n is a, c, g, or t
  misc_feature (2424)..(2425): n is a, c, g, or t
  misc_feature (2428)..(2441): n is a, c, g, or t
  misc_feature (2443)..(2444): n is a, c, g, or t
  misc_feature (2446)..(2447): n is a, c, g, or t
  misc_feature (2449)..(2450): n is a, c, g, or t
  misc_feature (2452)..(2453): n is a, c, g, or t
  misc_feature (2455)..(2459): n is a, c, g, or t
  misc_feature (2461)..(2463): n is a, c, g, or t
  misc_feature (2465)..(2471): n is a, c, g, or t
  misc_feature (2474)..(2475): n is a, c, g, or t
  misc_feature (2478)..(2479): n is a, c, g, or t
  misc_feature (2481)..(2484): n is a, c, g, or t
  misc_feature (2486)..(2487): n is a, c, g, or t
  misc_feature (2493)..(2494): n is a, c, g, or t
  misc_feature (2496)..(2496): n is a, c, g, or t
  misc_feature (2498)..(2499): n is a, c, g, or t
  misc_feature (2503)..(2503): n is a, c, g, or t
  misc_feature (2505)..(2505): n is a, c, g, or t
  misc_feature (2507)..(2513): n is a, c, g, or t
  misc_feature (2517)..(2517): n is a, c, g, or t
  misc_feature (2519)..(2526): n is a, c, g, or t
  misc_feature (2528)..(2528): n is a, c, g, or t
  misc_feature (2531)..(2532): n is a, c, g, or t
  misc_feature (2534)..(2534): n is a, c, g, or t
  misc_feature (2536)..(2537): n is a, c, g, or t
  misc_feature (2539)..(2539): n is a, c, g, or t
  misc_feature (2541)..(2541): n is a, c, g, or t
  misc_feature (2544)..(2545): n is a, c, g, or t
  misc_feature (2547)..(2549): n is a, c, g, or t
  misc_feature (2551)..(2562): n is a, c, g, or t
  misc_feature (2564)..(2567): n is a, c, g, or t
  misc_feature (2569)..(2569): n is a, c, g, or t
  misc_feature (2572)..(2572): n is a, c, g, or t
  misc_feature (2574)..(2580): n is a, c, g, or t
  misc_feature (2582)..(2583): n is a, c, g, or t
  misc_feature (2585)..(2587): n is a, c, g, or t
  misc_feature (2590)..(2593): n is a, c, g, or t
  misc_feature (2597)..(2598): n is a, c, g, or t
  misc_feature (2600)..(2600): n is a, c, g, or t
  misc_feature (2603)..(2604): n is a, c, g, or t
  misc_feature (2607)..(2607): n is a, c, g, or t
  misc_feature (2609)..(2609): n is a, c, g, or t
  misc_feature (2611)..(2611): n is a, c, g, or t
  misc_feature (2613)..(2625): n is a, c, g, or t
  misc_feature (2630)..(2630): n is a, c, g, or t
  misc_feature (2632)..(2632): n is a, c, g, or t
  misc_feature (2652)..(2652): n is a, c, g, or t
  misc_feature (2658)..(2659): n is a, c, g, or t
  misc_feature (2664)..(2664): n is a, c, g, or t
  misc_feature (2698)..(2698): n is a, c, g, or t
  misc_feature (2707)..(2707): n is a, c, g, or t
  misc_feature (2710)..(2710): n is a, c, g, or t
  misc_feature (2713)..(2713): n is a, c, g, or t
  misc_feature (2716)..(2716): n is a, c, g, or t
  misc_feature (2719)..(2719): n is a, c, g, or t
  misc_feature (2785)..(4000): n is a, c, g, or t
acaaagatatacaagattaaagcaacaaaaacaaagagtatatgctcaaagaggaagacgttctaagaatagtggcaatgaaggaaatagcaatggaaatggaaatactttaaatacagaagaaaataatatctttaataaaaacaatatattaaatcttaatgagattcaacaataccttttgaatgaagaaaagaatagtaaaaagaataatggattgctacaagtgtcttcaagtaatatgaatactactccaccatcgatgacaacaacaccaaactttagtctttctacccacttaaataataatacaaaattgaataatgccaattctatcgattttaatttacctctggataaatctattattaatggtaatgaagatgatgctagtaaaaagaataaggatttatattctcaacttttaaattctatgggtagcagcaatacttctcctcctcctcctccaaaggtgaaaagtggaaagagagagatgaaggttgtcgactccaccacaattcttagtaaggtgaatgatagaagtaaggagattgcagaaaagaaaaagagaagatctgctgcaactatgagatgtcgagaacgaaagaagaatcaattacaaaagaaggaacaatatattaaatatttggagaatcaaattttatttttgaatggatccattttacatatgagtaatgaaattacgtggttgagaagatcttttcttgatcagtatggtgaacaatcgcttaaaaatatttatttgaaaaatggatttaagaatgttaactttgatagtgtcatgtactctggatcaagtccatttagtccatccacatttaccaatacaagtatgttatcgcctgatttaacgctaagtccaggaagtggacaagaacaaaaccaagatcataaccaaggttcagatcaagattctagctttttaactcctgcttccccttcatccttgaaaaatatttcttcaacatcgacgaccgatacggttactactacgaccaaaaagaggtcaacgaagacgacagctactgattccatagttataggtgatgatgatgatactcatggttcatctactacccgtcgtagagaaaatcatagtcatttcatggcaggagcaactcctacctcaacaaattccaatactggtgtacgtagtcatcgtagcggtcaagaggataatagtaattcaggttttcttcgtacctaccaacctactccgacttcaaccctagatcaatcttcaccatctgtgtcttcgttggataatgttgaaaccctttcaagccaaaaggatctctttagtcaacttgatatggaaactctgaatgaatttacaagattatccaaggaacaaagagaaattttattgaagatattggaaagacaacaaataggtaatactaaggataatcctgctcctccgccaccgcaaaggaactatataaatattgccgctaatgatgaagaggtgaatggtggtaatagtcgtatgatttcaaaaccatcgtcttcattattaaattttgatccagcttcgactgctgccaatactaatcaatttaattcgttatctccaaatcttttgcaatccttaaatcaacaagacttacaaacgatttcattccgttcttcttctatgacacttccatcctcctctgctgtatcaggaccatcttcttctgttactacaaccacgaaggatcaaattttcttaactccttcatcacataccgctaatactaatagtcttaacttaacgacatcttctgatctattaacatcacttaatgcacaaaataatcttcaaaatagtaatccagtatcttctaccatttcaaaggattcaaccacaagtggaatacctacatctacaaatactcaagattcagagtatatcaatttagaaaatttaatttattatatttagaaagtttttatttttttttttttttttttaaaaaaaaaaanaaaaaaaaaatttttaattttttatttcattctattctttttcctatttttcattttcattttcatttattattatatatatatatatatttttaataattattataacatgacttttaaaaaaaaaatggttatatttataaaacataatagtatcatggaaatatatataaattctaacgtaatattaaaatagtcttgttcatgcatttactataatacttttaatggtataaaatggtcaagatttaaaaaaagtaaataaataaataaataaaatttaaaaaaaaaaaaaaaaaaaaaaaaanaaaannaaaaaaaannaaaannaaaanaanannaannannannaannaanaanaanannnnaananaaannnnnnnnnnnnanaanaaanannaannaaanaaaannaaaaatnnntnnnnnnnntnnttnnnnnnnnnnnnnnannannannannannnnnannnannnnnnnaannatnntnnnnannaatatnnanannaaananannnnnnntaanannnnnnnntntanntntnnantntanntnnntnnnnnnnnnnnnannnntnttnannnnnnnanntnnnaannnnaaannanaanntanananannnnnnnnnnnnnatttntnattattatttaattttatanatatannttatnttttatttttttttttttaatttttttttttttnatttttttnttnttnttnttnttttttttttttctttttttttttttttttttattttttttttttttttattttatagcttttttnnnnnnnnnnnnnnnnnnnnnnnnnnnnnnnnnnnnnnnnnnnnnnnnnnnnnnnnnnnnnnnnnnnnnnnnnnnnnnnnnnnnnnnnnnnnnnnnnnnnnnnnnnnnnnnnnnnnnnnnnnnnnnnnnnnnnnnnnnnnnnnnnnnnnnnnnnnnnnnnnnnnnnnnnnnnnnnnnnnnnnnnnnnnnnnnnnnnnnnnnnnnnnnnnnnnnnnnnnnnnnnnnnnnnnnnnnnnnnnnnnnnnnnnnnnnnnnnnnnnnnnnnnnnnnnnnnnnnnnnnnnnnnnnnnnnnnnnnnnnnnnnnnnnnnnnnnnnnnnnnnnnnnnnnnnnnnnnnnnnnnnnnnnnnnnnnnnnnnnnnnnnnnnnnnnnnnnnnnnnnnnnnnnnnnnnnnnnnnnnnnnnnnnnnnnnnnnnnnnnnnnnnnnnnnnnnnnnnnnnnnnnnnnnnnnnnnnnnnnnnnnnnnnnnnnnnnnnnnnnnnnnnnnnnnnnnnnnnnnnnnnnnnnnnnnnnnnnnnnnnnnnnnnnnnnnnnnnnnnnnnnnnnnnnnnnnnnnnnnnnnnnnnnnnnnnnnnnnnnnnnnnnnnnnnnnnnnnnnnnnnnnnnnnnnnnnnnnnnnnnnnnnnnnnnnnnnnnnnnnnnnnnnnnnnnnnnnnnnnnnnnnnnnnnnnnnnnnnnnnnnnnnnnnnnnnnnnnnnnnnnnnnnnnnnnnnnnnnnnnnnnnnnnnnnnnnnnnnnnnnnnnnnnnnnnnnnnnnnnnnnnnnnnnnnnnnnnnnnnnnnnnnnnnnnnnnnnnnnnnnnnnnnnnnnnnnnnnnnnnnnnnnnnnnnnnnnnnnnnnnnnnnnnnnnnnnnnnnnnnnnnnnnnnnnnnnnnnnnnnnnnnnnnnnnnnnnnnnnnnnnnnnnnnnnnnnnnnnnnnnnnnnnnnnnnnnnnnnnnnnnnnnnnnnnnnnnnnnnnnnnnnnnnnnnnnnnnnnnnnnnnnnnnnnnnnnnnnnnnnnnnnnnnnnnnnnnnnnnnnnnnnnnnnnnnnnnnnnnnnnnnnnnnnnnnnnnnnnnnnnnnnnnnnnnnnnnnnnnnnnnnnnnnnnnnnnnnnnnnnnnnnnnnnnnnnnnnnnnnnnnnnnnnnnnnnnnnnnnnnnnnnnnnnnnnnnnnnnnnnnnnnnnnnnnnnnnnnnnnnnnnnnnnnnnnnnnnnnnnnnnnnnnnnnnnnnnnn

SEQ ID NO: 1429 - DNA, 4000 bp, Escherichia coli
  misc_feature (1375)..(1375): n is a, c, g, or t
  misc_feature (1999)..(1999): n is a, c, g, or t
ttgtttaaaggcagagaatatctactacatcggtgatttgatccgacgtacagaggttgagctgttaaaaaccccgaacctagggaagaagtctctgacagagatcaaggacgtcctcgcatccaggggcctatctttgggtatgcgtttagaaaactggccaccgtccagcttacgtggtgatgaccggttattgggttaagcagcattggtgtgtaccgggcgactgaacgtgatactcgctggtacaaattattcagattgttatagatagtaattcaggaacttaggtcatgcgccatagaaagagcggtagacaattaaatcgaaatacatcgcaccgtaaagcgatgtttaaaaatatggcttgctcgttgttcgagcatgaagtcatcagaaccacagtgccaaaggcgaaagaactgcgtcgggttactgaaccgatgattaccattgcgaaagttgattcagtcgcgaatcgtcgattgattttcgctcggactggcagtaaggcaatggtgggtaagctattcacagaaattggcccaaggtatgcagagcgcccaggcggctacactcgaattttgaagtgtggattccgtaccggtgacaaagcacctatggcgtttgtggaaatggtcgatcgtccgatacccgacttcgacaatgtcgaagagatagatgacgacgagtagctcgaagtctaattaatgaataagcgtcaaataaagtaaaaagaccgggcattcccggtctttttgcgtcaggagtagcgccgatgtatcaatcgtttgtacccacgttgagaacactaatgggccccgggccctctgatgtcaatccgcgaatattaacggcgatggcgcggccgaccatcggccaccttgatcctgagttcattcgaatgatggatgaaatcaagggtatgttgcagtatgcgttccagactaaaaatgaactgacgctacccgtttcggcgccaggctcagccggtatggaaacctgtttcgttaatttaatggagccaggtgacaaggtcatcgtctgtcaaaacggggtctttggtgggcgaatgtccgaaaatgtgcggcgacttggtggcgaagcggtcatcgtcgagcaagtttggggccgggccattgatcctgagcagttggaggcggcgctacgccagcacccagacgcaaaaattgttgcatttgtgcatgccgagacatcgaccggcgtgcagtccgatgcgcagacattgtgcgcgcttgccaaggcccatgactgcctgaccatcgttgattgcgtgacttctttagcgggtactgaagttgcattggatgcttggggcgcggatgcggcctacagcggcacacaaaaatgtctntcttgtgcgcctggcttatcccccatcagtctgagtcaacgcgctgtggataccgttaaatctcgaaaggcaccggtgagttcctggtttttggacttgaatctggtcatgggttattggggtgaagggcaaacacgtagttaccatcatacggcgccggtcaatgcgctctatgggttgcatgaggcattagtggtgttgcacgaagaaggtttggcgtcgagttggagtcgccatgcacggaatcataatgcgctgaaagctgggctagaagccatgggactgacattcgttgttccagaagccgagcggttgccgcagttgaacctggtcagcgtacctgaaggtgttgatgaggccagtgtgcgcaagcaattgctgcaacagtacaatctggaaattggcgctggcctgggtagtctggccggccgcgtctggcgaatcggtttaatgggatttgccagcaacccaaaaaatgtgctgttctgcgttaatgcgttagaagcggtattgtcacaatataacgcgccaattcatcgaggcgttgcgactggcgccgtccaggcagcctataaagtttgatgtaagtgggtgcttacatactaagcgggcgtccaaaaacancgttcgcccccttttaattaacgacggtttgcttttcacggtcgctggccgcgagcaatacgtcagctagaaactgtccggtaaacgagtgcggagacgcggccacatcttccggggtgccgctggcaatgatctcgccaccgcctgaaccgccctcgggtcccaagtcgataatccagtcggccgtcttaatcacatccagattgtgctcaatgacaacaatcgtgttgccgtgactgcgcagctttgacagaacttccagcagttgtttaatgtcgtggaagtgcagcccagtggtaggctcatcgagtatgtagagagtttggccggtatcacgtttagacaattctcgggccaacttaatccgctgcgcctctccgcctgatagcgttgtagcactctgacccaggcgaatatagccaagcccaacgtccattaaggtttgcaagcgacgctctatcataggcactgcattgaaaaactgatgcgcgtcttcaacggttaagctcaaaatttcatgaatgctcttgttcttatagagcacctcaagagtttctcggttgtagcgtttgccgcgacattcatcgcaggttacgtaaacatcggcgaggaagtgcatttcgactttgatcaggccgtcgccctgacaggcctcgcaacgcccgcccttgacgttgaaactgaagcgtccgggcttgtagcctctggatctagcctccgatgttgcggcaaacagttcacggatcggagtaaagatattggtataggtcgctgggtttgagcgtggtgttcgtccgatagggctttgatcgatatcgaccactttatccaaatgctcaatgccttggatagaatcgaagggtgcggtctgaggattagtcgccccgtttaacgccttggccgcaataggatatagggtgccgttgatcagcgtcgacttacccgatccagacacgcctgttacgcaagtcatcaacccaatgggaatattcaggtttaccttttgcaggttattaccacgcgcgccgaagatacggagttgtttgtcaggatccgcgggttgtcgctgagccggcactgcaatctgacgtttgcctgatagatattgaccagtaatcgacgcctcactgttaagaatgtcgctgagcttaccttgggcgatcacgtgcccgccatgaacgcccgcgccggggccgatgtcgacaatgtgatcggcggcgcgaatggcttcttcatcgtgctccaccacaatcactgtattaccgatgtcacgcagatgcgtcagggtattgaggagtcgctggttatcgcgttggtgtaagccaatcgacggttcgtcaagaatgtacatcacgcccaccaggcccgcgccaatttggctagcaagccgaatacgctgggcttcaccccctgacagcgtgtctgcgcttcgtgacagcgacagatagttcagaccaacatcaatcagaaaacgtaagcgggcgctaatttcctgcagaattttctcagcgatctgttgccgttgcccctgaagtgccagtgtggaaaaataatccagcgtctccttgatagaccaatgagtaatttcagataaagacctgccgttgatggtgaccgcccgggcgtcgggattcaagcgcgtgcccgcgcaggaaggacattgttgcgtgctcataaacttggctaaattttcgcgaaccaggctcgactcggtatcgcgataacggcgctccatgttaggcacgatgccttcaaaggggtgggctcgcgtataggtgtcgcccttgtcgttgacgtaacgaaactggatcatttcggcttcgttgccgtacaggatagtctggcgctgatccggttctagctcaccaaacggtgtcgtcatcgaaaattcaaaatgttccgcgatcgatgttagcatctgatagtagtagacgttgcggcgatcccagccctgaatagcgccttctgccagggacaactcatcatcgaagacaatttgct

SEQ ID NO: 1430 - DNA, 4000 bp, Escherichia coli
  misc_feature (362)..(362): n is a, c, g, or t
  misc_feature (446)..(446): n is a, c, g, or t
  misc_feature (710)..(710): n is a, c, g, or t
  misc_feature (725)..(725): n is a, c, g, or t
  misc_feature (1082)..(1082): n is a, c, g, or t
  misc_feature (1123)..(1123): n is a, c, g, or t
  misc_feature (1129)..(1129): n is a, c, g, or t
  misc_feature (1199)..(1199): n is a, c, g, or t
  misc_feature (1472)..(1472): n is a, c, g, or t
  misc_feature (1775)..(1775): n is a, c, g, or t
  misc_feature (2907)..(2907): n is a, c, g, or t
  misc_feature (2910)..(2910): n is a, c, g, or t
  misc_feature (2912)..(2913): n is a, c, g, or t
  misc_feature (2916)..(2916): n is a, c, g, or t
  misc_feature (3241)..(3241): n is a, c, g, or t
  misc_feature (3513)..(3513): n is a, c, g, or t
  misc_feature (3657)..(3657): n is a, c, g, or t
acagttgcatcagtccgtaatcggttacctgatatccatcctgctgcaatccggcgatggcatctgcgccaagttcggtcggtgtaaaataccagaacctgtcggaatccgcctggttgtaatctccgttcacgatttcattatccggatagtaataatacagcacggtccaacccagatgttttacaccattcgtgaccatatttacatcctcatcgggggtaccgatcagatccagtgtcttttcggtctccaccttctgctgttcatagctgtcatagcattcccgatagttctgaattcccaggccgaataatactaccagcaataccgccagcacaattctgcttacagcctccagncccttccaggacttcttctccagctctgcagccagttccagcacacggctgctgcccaccgccagcatgacgattgccaccgcncttaacggatacagatatctctgtgccagcatcggtgccataacaacacttaacaaataagcaaatgccaaagttccaaggattgtgcaggctcccactgccatggcatatgtcttgtcagaccagtttctcacagaaggcttctgcatatgtactccgtctttttccacagagaatacagaagaatccactgccagggtcaccaccagaaacagaatcaccaacgggaatacgataccattcatccctctgccgcccataacnatctccagactctgntccagtcccaggatctctgtcatccaccagcctctgctgacatttttcaagccggcatagaagaaatatagccagggtgcataacctatgaaaaatgctacgatggccagaacaccctttatccatgttttcccacggtatttgatccatacggccactccggtgaaaaacatcataatgcctacagccaccagtgcataatagtgagaatacgctgctgccagtgcccacagcaccatgcctgcccaggtcttcctgctgccgtcagcaatgactctgtaggaacaatagaagcaacccattacacacaggaaagccagcgcatacatgcggacttccagattgtactccagacangcctgtcccagaccggagatcatcacaaaaaatgttgccgnaagcantccgaaatgtttccgcacaacggtcagtgccagtacgatcccgatcacgaagggcaccagagaggccagntggaataccggtaccttatatccgaacagggtcccgaataatttcagccagtaataatacagtggcggatgattgtcccagtaatacaatacctgcaaaatgccatccacatccttgtgggccgtattcgcagaaaacgcctcatccccccacagtacgcggtcggacatcatgctgaaattcagacacaccaccagcactgtcaatgccagtactgccaccggtcctatgtatttgcgaaatacgctccacgccttgctgtcggtaatcttnctcaggacgctccggatcttctcatgctttccggctttcgcttcttccacgaacaattccgcaatggcatagaccagcatcatgctgatctccagacatagaactttcactgcatattctctggattccaacagctttctcaagatcgtattgccgtcattgccggtcagcgacaacaggatccagggaatgaccagcatacagagcaggcaggtgagatagcgaaggacatattctcccttcccgatcgtgacagactgtccgctttttttgttattttttaaaatagattgccgccagatnccaatggataccagcggcaacagcagggtaataatgatggtgaacatcgaatatcctctctgtcttttgtatttgtaactattcagagccatgtaaatagtatcgaatgagcgtcgaatccttgcattcgtaagagcatttgatactatttatagggcgaagtaaccaccatgagcaaaaaggaagcctcgcagaggcggttttgcgaatggtgttctgaatagttacatatatttattcttctacgtatttcaggatcgttgccgaggtctgtggcatctcgatcagaaccttgcctgccctgatctcatactccgcaccttccatgcaatacccgtcatccctggactgcaggatcactttcatcttacctgtcttaggggttccgatctcccacacatgaatctctttggtgatgggatgataattattgttgatcaggatcgcacactgccccttgcggttaaaacgtccgtaagaaataaagttgtagtcattttccagcattttcaaggagccgatccgcagctcctcgttctcccggcgcaggcggataatgtccttatgaaatgccagcagcacctgatcctcatgtccccagggatacgttctgcggttgtcaggatctgtgaaaccacagacaccggcctcatctccgtaatagattgtaggagcacccgtccatgtcatctggatcacaacgccttcccggaagactgccttattgataccctgttccgcagcctgcggtcccagtgtattggtacgtcccaccttatgatttgttctcgtcagaaaacgggaatgatcatggttggacagttcattcatagccacctgccagctgggcatggagaaactggaggtatgatgccgcatggctccccagaagctctctgcattgccgagcagatcctctctgtagtcatcgctgtgcttctccataccggtgaggaaccaggtcacgggctccatgaacgcatcgtagttcatgacagtatcccattcgttgccctgcagccagtctctggtattgccgtagtgctctgccagaataatagcctccggattggcctcttttaccgctttccggaattcctgccagaaatgatggttgaattcctgactgtgnccnanntcngctgccacatccagtctccatccatccacattgtagggcggagatacccattttttcgctacatgaaggacatagtccatcagttcctgggatccctcgtagttcagcttcggcagtgtgtcatgtccccaccatccgtcataggaattgttatagggccatgctgcctgattgtggaaatcaaagtaattccgataagggctgtcagcactgacataggcacccttgtcatatccttccgcattctcatagatgcgctctctgtccatccatttattaaaggaaccacagtgattgaacacgccatccagaatgactctcatgnctctgcggtgtgcctctgccaccacctgagcaaacagctcgttgctggcttccagattcgccttgttagtcacacggtcgatgtaacgggaagcaaaacggttctcccgctgtccgtcgggaagcagatccccttcatcactgacaatctttccaatatggggatcaatataatcataatcctgaatatcgtatttgtggttggaaggggagacaaacagaggattaaaataaatcacctcaactcccagatcctgcaggtagtccatcttntccagcacaccctgcaggtctccgccgtagaactcacggacatccatctgtgcgggataacgtccccagtcctctacgcggtgtaccggttctccgatgtagcaatattcattggtcaacacatcattggaagaatctccattncagaaacgatccgtatagatctggtacatgaccgctcccttggcccagtcgggggtgtggaaaccgggaatgataatgaaatcataatattcattaacttcctgcaccaggccccgcatatcaaagatgccggtaattctgccggtctgcacctcaaaataataagataccttctgatcatccagacgcattacgtaggcataatagtcaaaatcatttttgctctccacacgtaccataagatgcttctgtccgccgcataccaggaacactctgtccacattatttctggcggtccggaagcggatcgtcacttcggaaaaacaggccggctcttccggaa

SEQ ID NO: 1431 - DNA, 4000 bp, Escherichia coli
  misc_feature (1)..(2): n is a, c, g, or t
  misc_feature (4)..(12): n is a, c, g, or t
  misc_feature (14)..(16): n is a, c, g, or t
  misc_feature (18)..(19): n is a, c, g, or t
  misc_feature (22)..(28): n is a, c, g, or t
  misc_feature (31)..(43): n is a, c, g, or t
  misc_feature (45)..(45): n is a, c, g, or t
  misc_feature (48)..(48): n is a, c, g, or t
  misc_feature (51)..(53): n is a, c, g, or t
  misc_feature (55)..(55): n is a, c, g, or t
  misc_feature (57)..(60): n is a, c, g, or t
  misc_feature (64)..(66): n is a, c, g, or t
  misc_feature (68)..(70): n is a, c, g, or t
  misc_feature (73)..(73): n is a, c, g, or t
  misc_feature (75)..(76): n is a, c, g, or t
  misc_feature (78)..(82): n is a, c, g, or t
  misc_feature (84)..(92): n is a, c, g, or t
  misc_feature (95)..(95): n is a, c, g, or t
  misc_feature (97)..(98): n is a, c, g, or t
  misc_feature (100)..(101): n is a, c, g, or t
  misc_feature (103)..(103): n is a, c, g, or t
  misc_feature (105)..(106): n is a, c, g, or t
  misc_feature (108)..(109): n is a, c, g, or t
  misc_feature (111)..(117): n is a, c, g, or t
  misc_feature (120)..(121): n is a, c, g, or t
  misc_feature (124)..(126): n is a, c, g, or t
  misc_feature (128)..(130): n is a, c, g, or t
  misc_feature (132)..(137): n is a, c, g, or t
  misc_feature (139)..(142): n is a, c, g, or t
  misc_feature (144)..(146): n is a, c, g, or t
  misc_feature (148)..(153): n is a, c, g, or t
  misc_feature (157)..(160): n is a, c, g, or t
  misc_feature (184)..(184): n is a, c, g, or t
  misc_feature (274)..(274): n is a, c, g, or t
  misc_feature (298)..(298): n is a, c, g, or t
  misc_feature (451)..(451): n is a, c, g, or t
  misc_feature (595)..(595): n is a, c, g, or t
  misc_feature (859)..(859): n is a, c, g, or t
  misc_feature (1316)..(1316): n is a, c, g, or t
  misc_feature (1325)..(1325): n is a, c, g, or t
  misc_feature (1508)..(1508): n is a, c, g, or t
  misc_feature (1850)..(1850): n is a, c, g, or t
  misc_feature (1955)..(1955): n is a, c, g, or t
  misc_feature (1979)..(1979): n is a, c, g, or t
  misc_feature (1982)..(1982): n is a, c, g, or t
  misc_feature (1985)..(1985): n is a, c, g, or t
  misc_feature (1991)..(1991): n is a, c, g, or t
  misc_feature (2586)..(2586): n is a, c, g, or t
  misc_feature (2626)..(2626): n is a, c, g, or t
  misc_feature (2862)..(2862): n is a, c, g, or t
  misc_feature (2926)..(2926): n is a, c, g, or t
  misc_feature (2946)..(2946): n is a, c, g, or t
  misc_feature (3054)..(3054): n is a, c, g, or t
  misc_feature (3197)..(3197): n is a, c, g, or t
  misc_feature (3300)..(3300): n is a, c, g, or t
  misc_feature (3435)..(3435): n is a, c, g, or t
  misc_feature (3916)..(3916): n is a, c, g, or t
  misc_feature (3919)..(3919): n is a, c, g, or t
  misc_feature (3922)..(3922): n is a, c, g, or t
  misc_feature (3973)..(3973): n is a, c, g, or t
nngnnnnnnnnntnnngnnttnnnnnnnaannnnnnnnnnnnnanaanaannnanannnnaaannnannnaananncnnnnnannnnnnnnnacntnntnngntnntnnannnnnnnatnnttnnntnnntnnnnnnannnncnnntnnnnnnctannnnctaatcactacgcttccccaggtnaaaccactaccaaaagcagctaagacaagcaaatcattttccttgacacgtccttgttccaccgcttccgctaaggctattcctatagangctgctgtcgtgttcccatatttntgaatattgttgaacacctgagcatcagaaagtttgaatttctgttggataaactgggatatacgcaagttggcttggtgggggatgaatagatctatatctccttcggtaaggttgttagccttaagcccctccataatcacttctgagaancgtactacagcattcttgaagacaaactgtccattcatataagggtaataggaggtatcttctgggtcattttccttgataagatcggtaacccacttcttccctaccccaggggtaacgatggccaattcctctgcatgcgcnccctcactgtgtaggtgtgaagagagaatacctttaccttcttgggtagtgcgagagagtaccacagctcctgccccatctccgaaaagtactgccatattgcgccctcgtgtggtgaggtctaaggcgggcgactgcatctcagaagcgattaccaagatattcttatacatccctgttttgataaactgatctgctactgatagggcatatacaaagcctgaacattggttgcgtatatccaaagctcctatggtaccaagncctaactctttctgagctaaaaccccacaaccagggaaataataatcgggactaagggtcgcaaagataagaaaatcgatatcttccttatttattttcgctttttctatagctctctcggcggcacgtacccccatggaggtagtagtatctttccctcgggtggcaaatcgtcgttgttctatccctgtacgctctctaatccactcatcggaagtatccatcagcttagagagatcatcattggttacaatattttctggcacataatagcctgtgcctatgatagttgaattatacataagttatttaacattaaaaagaaagccttgataacaaggctttctattacaatatgatacttggttactttagtacttcttttactttgtcagctgcttcttggaactgaatagctgaatgcacagccaatcctgatttgtcaataatctctttngcaatctcngcattagttccctgtaggcgaacgataataggcactttaatatcagttcccatattcttataagcatctacaataccttgtgctacacggtcacaacgtacgatacctccaaagatattcaccaatattgcctttacatttggatcttttaggatgatacggaaagctgtttctacacgagcngcatcggcagtacctcctacatccaagaagttagcaggttctcctcctgcttgcttgataaggtccatggtagccatcgcaagaccagcaccattgaccatacatcccacattaccatccaagtctacatagttaagacccgcggctttggcttctacctcgataggtcgctcctcacgagtatcacgcaattcggcatagtccttatgacggaaaagagcgttatcatctatggtaactttggcatctaccgcaagtattttattatcagaggttttgagcactgggttgatttcgaacaaattcgcatcagaagtgatataagctttgtatagagaagtnacgaacttgaccatttccttgaaagcctctccttccagtcctaaattaaaagctacatttcttgcttgaaaagggagcaatcccaattctgggtctatctcttcngtaaagattaggtgaggagttttntcngcnactgcntctatatccatacctccttcggtagaatacataatcatattctttcctttagcacgattcagtaggatcgacatgtagtattccttaggctcgctttctcctgggtagaatacatcctcagcgataagtacttggtgtactttttttccttccttaggggtttgtggagttaccaaatgcatccctatgatttgggaagaaatttctttaacctgctccaagttcttagcaagcttcacgcctcctccttttcctcgtcctcctgcatggatttgagcttttactacataccattgtgttcctgtttgttctgtaagcttttctgctgctttgacagcttcatcggctgtagtggctacaataccacgctgtacacgtacaccgaagcttgagagaatttcctttccttgatattcatgtaaattcataatataactttaatttgtagtggcaaatgtacaaaaaaaatatgacatttccatgtttttttcatattttttttctcaatccttttttccttagaaatcagtcttgtgtagagagttcttttaacaattctcctaccaaggcatagatctctctgtaggaaagttcntccttgctcatatagagcaacgccaaggagtaggtacgcnctgtagagagcagcaccttctgatggcgatagctctcccttatcaggcgcttcattctattcctatccactgcttttttcataagccttttaggaacactgatgagcagttgggtaggttgtgtagagccttctataggggtatataggagcttcaatggatattttttcaatacctttgcctctcggaagagcttgtttaccctatggtaattacacaatctttctgccttgggnaaggtatttcttttttcttttagagaaaccattttatttagataaagtcgcataagcgagtatntgagtaaaaaccagccagtnttcacagctgtatatgcaataacaggtaacaaacaaaaacactttgcctattacctgttattttatctttttatgctatattaggcgttttcttcttcctcttctttncctgtaagaagtcggaaaccttcgccatggatatttacaatttctacattctcgtctttcttgagatatttacggagttttgctatatacacgtccatactacgagaagtgaagtagttgtcatctttccatattttgttcantgccaactcacgaggcatcaaatcattttcatgaagggctaataggcgcaatagttcattttctttaggagagagttttaggggttcttcatctctgtagcgnaggaaacgaagcttagagtttaggaaaaagtctcctatttggaattcgaattttttgctatctattactgtatcaattgactttctttggagcattgcacgaatcttcatgagcaatacttctgaatcaaaaggnttattcaagtaatcatcggctcctgatttgtatcctttgatcacatcctcacgcatagttcttgctgtaaggaaaatgataggcactttctcattcttttcacgaatttccttagcgagggtaaaaccatctttgtaaggcatcataacatcaagaatacacatatcataaggatccttgcggaacttatcaaaaccttccatcccgttcttggccaaagtaacatcgaagccactcatggataggtaatctttcaatacggtcccaaagtttgggtcatcttctacaagaagaatttttttattaactgcttccataatttcaacatttaaaaataatatatttttttacgtttatacaaaatttcatttattagatgataaggggcaccttgatcacaaacgtacttccttttcctttttcactctcggcatatacttccccatcgtgatattttacaatacgctttacataagcaagnccnagnccatgaccttttacattgtgcaaatcgcctgtatgttccctgtaaaatttntcaaagattttcttcagtacagccttg

SEQ ID NO: 1432 - DNA, 4000 bp, Escherichia coli
  misc_feature (368)..(368): n is a, c, g, or t
  misc_feature (1877)..(1877): n is a, c, g, or t
aatgttgcatggcatagtcttccacaaatggtggacgagaactcttgccgtaaccacgcaggttcggcgcccaagccgtatatccctggtcagcaagcataggcagctggtagcgccaagaatagctgctctctggaaagccgtgcagacagatagcgagcttgtcaccttcgccgcattggtccacctcgaaggtcaaaccattggcttgcacaaacctagtgatgattctcgaatctcgaggcgccgcgctgcggtcagccgtagtatctgtcattgcaatgatttcctgagtcttcaatcgtgaatgctaacagctattagatgttggccatcgcgcgccaacccatcataatttgacgagatcngtctgaactacatagactgctggtcattgtttctgtaaccgagtatctcatgacttatcctgatctcaaattcggcattttcctcgccccctttcatgccttgagtgaaaatcccactgcggcgctggcacgcgacctgagcctcattgagcgattggatgagttgggctacgattacgcctggattggcgaacatcactcagccgggtttgagattatcgcctcaccggaactctttatcgcggccgcagcacagcgcacccagcatattcacttcggtaccggcgtctcgtcactgccctatcatcacccgttcatgctcgccgatcgcatcatgcaactcgaccatatgacccgcggcagagtctcttttggggtgggtccaggtgccctgccctctgacgcgtttatgctgggcatcaaccctctggatcagcgcgacatgatgcttgaggctattgaggtgctggttcccctgctccgcggcgagactgtgacccgcaagacccgctggtttgaactcaatgaggcgagactccaactgcaaccctacacaaaacccatggtcaacatggccgttgcctcccaggtttcccctgccggtgccagagccgccggcacccatgggctgggtctgctgtccatcggcgccacgaacgctggtggcttcagcgcgctggcgaccaactgggaaatctacgcccgcaaggccaaagagcataagcaggtgatcgataggcgcaattggtcgttggtcggcccggtacatattgccgagtctcgagagcaggcattagacaacgtgcgctacggcctggaagcctgggtcaattacttccaagaggctgcggcactccccatcgccccgaatgagcctggcgttgatcaagcccaggcactgatcgatagcggcatggccgtgatcggcaccgcggatgatgcaatccagcaaattcagcggctacaggaacaatctggtggatttggcagcttcctgcaactggcccataactgggcagactgggagcagacctgcaaaagctatgaattgtttgcccgccatgtagcgccctgttttcagtccaccaatgccaaccgcaccgcaagctatgcctgggccagcaagaaccacgaccgcttcctcaacgctgtcggtggtgcgatccaacaagaaattgacaaagacgagcaagaaaagcaggccaagtgagaatctattcgctatactacgcgcttcacctcggtcctctcgcaacgaataattgcgaaccccgccaggcctggaagggagcaacggtagcgacgactttgtgtgccgggatgtggctgaggtgatctaatttcttttgtcgtggccgtgaaatcagcctgtcgctatgcccagcctagtctcggggcaaatcacgaccagaccaacaatcgtcaacagactcaattgaattgccagaccagttcagctaggctggcgcgctgctgtacgggcattatcgtatcatcagccaatcagcntagatcagttttacggagaggtgtccgagtggcttaaggagcacgcctggaaagtgtgtatgggttaatagctcatcgagggttcgaatccctctctctccgccaataccctatgtaaatcaatcacttatggtttgctgccttaaaagcccaacaaaaagcccaacatcaaataaacgctgtgttttggctaagtacctaagcccccggagcggctcaaggttgctactatcaattacctatacggccaagcagtttagtaatttttttgcttccgggtcgtttagatggtcacaaactttgctacgccacctcgatactcacctgacccaccacaccgctgatttatttttaacccgcgcgtgcacaatcctgaattgcataatctgcccgccagtatgctggggcggtctaaaaccctacggccccatgcacttgctgaccgctgatttggttttatttcgtgagcgcagttggggtttttgaaaatgggtagatttaccctgccaaactgcagatggcctgcttcccctaggcgcgctcccgcctttcgcactcgacatcgcaaactgacacgcaatacagtattgcgtgtcgcaagcccgcagtcagtacattgaggtctagatatatcgcaaggcaccctaatgccaataatgcaattctaggtgatcagcacgggtcggtagcacaagggattgaaaatccctgtgtcggtggttcgattccacctctggccaccattaaccttcgcatttcttgcggggttcatagaatccacgatattccccgattgttaagacaggtgtgaaaagtcgtaattatcccatggtccaccatcgaggccacgtaacctgcgtttagggaaaattaaagcgtcgtacggaatctcggcatagttaatgccagatttcacagacgaaataatccatctctcgcaaaagatctggtcaccttagtacatccacacctccgtaggtcttgcaaaatgttgcaatgctggaaaacacttcgcagttaagttcactcccaaaatcgccagggggttttgtctataaacgacacaaacccgaagaatctgatttatacaaaatcattgaacaaaaccttcctatattccagtcccatctttccaatgcggacatttcactacctgctttcgtccacaatgaatttcgcagctaccttcgatgcgggttgttggaacatggttttcttcgtgtgaaatgcagccgttgcaggttcgaacacttggtagctttttcatgcaaactcaggggtttctgcccatcctgcggtgctcgtcgcatggttgaaacatcagcacatttgattgatcacgtgatacctgctgcaccagtaagacaatgggttctcagctttccctggccactacgattgctttttgcacgtcaacccaacacgcttagccgatgcctcgcggtcatcatccgtgtaatagaaacagacctcattcatcgcgccggactaacgagagcgagtggtgcacgaagcggtatcgtgacgctggtacaacgttttggaagtgctctaaatttaaatattcacctacatatggtcgcactcgacggcgtttacaccgttagcaaatcaggcaaagctaaatttcatcgtgtaaaggcaccgaatcaaacagagctgcaaaccttactcaatcgtgtgatccaacgtgtagttcgcagactcgagaaagaaggtttgctcattccagacccagagcaaccttggcttgacctagacttccatgagccattagattcgctcagcaccgcatcgatacgatatcgtatcgccatagggccccattccggcagccgtactcttacactacatgatccatcatttatccgaacagacaaacctattaaatcctttactgctgatcgagatggcttttcgctcaatgccgccgtttcatgtcagccctatcaacgggatcgattagagcgtctatgcaggtatgtcaccagaccggccatttgtctagaccgactcactgttagagtcgatggtaagatccaatatgagctaaagaacccttttcggaatggcaccacacatatcttgttttctccagtggatttcctgagcaaactcgctgc

SEQ ID NO: 1433 - DNA, 4000 bp, Escherichia coli
  misc_feature (1039)..(1039): n is a, c, g, or t
  misc_feature (1768)..(1768): n is a, c, g, or t
  misc_feature (1799)..(1799): n is a, c, g, or t
  misc_feature (1830)..(1830): n is a, c, g, or t
  misc_feature (1985)..(1985): n is a, c, g, or t
  misc_feature (2506)..(2506): n is a, c, g, or t
  misc_feature (2511)..(2511): n is a, c, g, or t
  misc_feature (2833)..(2833): n is a, c, g, or t
  misc_feature (3340)..(3340): n is a, c, g, or t
  misc_feature (3345)..(3345): n is a, c, g, or t
  misc_feature (3350)..(3350): n is a, c, g, or t
  misc_feature (3353)..(3353): n is a, c, g, or t
  misc_feature (3357)..(3357): n is a, c, g, or t
  misc_feature (3367)..(3369): n is a, c, g, or t
  misc_feature (3376)..(3376): n is a, c, g, or t
  misc_feature (3378)..(3378): n is a, c, g, or t
  misc_feature (3385)..(3385): n is a, c, g, or t
  misc_feature (3387)..(3387): n is a, c, g, or t
  misc_feature (3390)..(3390): n is a, c, g, or t
  misc_feature (3392)..(3393): n is a, c, g, or t
  misc_feature (3395)..(3395): n is a, c, g, or t
  misc_feature (3398)..(3398): n is a, c, g, or t
  misc_feature (3401)..(3401): n is a, c, g, or t
  misc_feature (3405)..(3406): n is a, c, g, or t
  misc_feature (3408)..(3408): n is a, c, g, or t
  misc_feature (3410)..(3410): n is a, c, g, or t
  misc_feature (3414)..(3415): n is a, c, g, or t
  misc_feature (3438)..(3438): n is a, c, g, or t
  misc_feature (3440)..(3442): n is a, c, g, or t
  misc_feature (3444)..(3444): n is a, c, g, or t
  misc_feature (3721)..(3721): n is a, c, g, or t
  misc_feature (3923)..(3923): n is a, c, g, or t
caccattaaacaaatataaaatatataaatcaataacttagaaacggccttttttgcgcccttttgtccaccttctttctgatagaaaatactatgtggtgtaacccgcgctcgccgctggatgcggatgcgcaaattggcatataagtcgatcaaatcctcaaatctgtcccaaaggtgctgacgttagacactgaaaactccttaaagttcttgtgcattttgtgatcgggcattttttgtatcgaccataaagcaacaacttcaaccgcctgccaccatcattaaaataacaggggcgacgatagaatgaatttcacatcaatggccgtcaggtgatgagttgctcatccaaggatcgactattgcgagtgggacgcaaattaacgaagtttagggtcagagacacatagcatggtgatggggaatgctgtgcctctaaccctttacgctgcccgttacctcaaacgaggaaaaaagtcataagtatccttaggaaagcaaaattcgtgccgatataatttcaaaggatagttttacatccgatacataaggcgaagagcgcctttggcattgtggcggttgctaatcaagtaacgctcatcggagggcattagcgtgattgaaacgtttccaaactttggatttttttcgaagagagattattgacgatctggcctgacctttttgattttaagaagcttttgggttaaactgttggttatgagatgaggtacgaacatgagtatgcccaagataatagttgccagcttgctatgttttttcgttgttctcgggggctatgcaatgatttttaagccccgcaacgataattttgatgaaggcgcaggccaagttttaggcactaagaagtagcatgtttgcaatggtggaatttatcatccagtggcttgccgcttctgtggcggcgtttggccgggcttgaggcgcagatttggtctgacaaactggcccataatcgtgagataaaagacatcaaagaggcgttgcgatcgatagcgtctaagctggaccgtgncgcgctggcatcgcgcgagaggtgatttatcgccttggaaacaaggctccatttcgatttccacatacgtcgtttcgggggcttttatcccaaatgttcttattttttgctgtggcgcaattcatcacgtatttgggtaagtaactcttctgcagttggcggcttgggtcttggctccatctcctcctcgttttctccatctaccaaatcttcaattttgttcacggcctttatgagtaaaaagaccgcccatgcaataatcataaaattgataatcgctgtaatgaaactgccccatgcgagcacgggcgctcccgcttctcgcgcctgtgcaagcgtttcatatgttcgaccatttaacgccataaaataattggagaagtccaaatttcctgtgacaatcccgagcaacggattgacgatgtcctttaccagactttgcacaattgcggtaaaggccgcgccaataacaataccaactgcaaggtcaatcacatttccccttgcaatgaacttcttaaattcgtcaaaggtttttctcggcatctcttctctccagccttttttgcaggtgcccccttatcacaatcaaagcatagactgcaccgttggcagaagcgacgatttttaaccgatgcccaaggacgtaaggaggagaagctctgggaagcgcgcggacagccgcatctgactgttagatgttgattgttagtgcattattggcctctnacccatggatatgatggcttcgctgatggtngagaaccagatgcactgcgtcggcttttcanatataggatttcctccatttttggatgatgatctgtgattcccgtaggttgaagaatatttcaccgttgagtagtttatctctgagcctagcgatgaagcgctcgcaatatccattttcccaatttaccttgttgatattccttgttatcataancatggggttttggtcgcttgtcagaaggtagatcaggacaaatctaggtgaaaatttagtttttttgaattaaggtgaatttgacgccataattaacgaaattttagccgttactttaagaaactgtatgcaaaattggtgagataaggctgtcaatgatgagtcgtctaaaagtcatgcggttgagaacaatctctcttttattggccataggcgtattgcaggcctgcgtttcgcaatttggtggggcgaacgggccagagcttggcaatgaaaagcaacccagaatacttacaattggggattctcttatgcgatggaatgccctctcagggaattctattgcgcaagtgatctcaaaaaacttgaatgaaccggtggtggacagatctcaggtcggctcagtgatgcttttcaaacaaaatgcgggccaaggtgcggcagtgagcataccggaacagtatattgccaaagactgggactggaccgtcatgacaggtggtggaaacgatttacttttnggttntgggtgcatggcctgcgacgacaccattaatgagatggtttctgaaaatgcaagggatggcaaaataccggattttctgaaaacaatacgcgataacggctccaaaatcctgtatataggttatttacgtagtcccggccttcttactccaattgaacattgcaaaaatgaaggtgacctttttgaagcccgtttagcaaaatttgcggacagtgaggagaatatttactttgcatccatgcaaaatcttgttccccgcggtgacgccagttatttttctttggatcgcatccatccgtcccgcaagaccagcaaaatgatnggggagtttgccgccgactttattggcaaacacgacgatagaaaataatcccaagcgcttcaggaacaccgcgatttcttaaaaaagatgttctcaaatgctttaaaaattagggggcctcttctaaaggatcgccaccaatttatcacggatatacatccagttggatttgctattcgctgtcaaaaggtgaccctgccgcatgtttggtgaatattctgaaccatccagcatacgagcgtaccctccggcctgttgaacaataaaagagccggccagatgatcccagggttttaaaaaagctgaaagacaaaaatcatatgccccctgtgcaaccaatcgatattcatgacaggaacactgcaaagaggtgatccgattaaaatcgctaagcgcatatgaaagatctgcgcgcagcattcggtcaaaaagatgtatacttaccaggccattgagcatgtggggcggtttcggctttgcgacctcaagcgtatttttttggccggnttttnaaatntgnagcncttttccgannnttagggnanaaaactnanaancnncnttnaanggannananaggnncccaaaaaccggttttccaaaangnnncncagcaaggatgatcccgaagacggaaataccgttggcaaaattccacgttccgtcaatgggatcaattataaaggccaattcgctttgtgcgacctgtgtgagtattgtcgggtctttttcaaatgcttcttcccccacaacatacgcctttggaaacaatgccgaaagctctgaagcgatcaaagcttctgctgccaaatccgccactgtcacaggatcatcaagagacgatttacatgaaacatctgtcgactttaaattccgaaatctgggaanaatttctgactgtgcgactttcctgataattgtaacaattggttctaaatttgacactaggtgatcagagacagaattttgatccatgccacagccccctcgtcaataggcacccaacaaatgtcagagtgccgtctcggcactattcataatttcttaaaacccgcgcaggtctggcgtttaatgcgcgaagtgcaaatancaaccccgcgccaatattggccaaaataccgccagaaatgattgcgaccgcgtttggccaaataacatgaaaatccg

SEQ ID NO: 1434 - DNA, 4000 bp, Escherichia coli
  misc_feature (1293)..(1293): n is a, c, g, or t
  misc_feature (1344)..(1344): n is a, c, g, or t
  misc_feature (1464)..(1464): n is a, c, g, or t
  misc_feature (1986)..(1987): n is a, c, g, or t
  misc_feature (1992)..(1992): n is a, c, g, or t
  misc_feature (2200)..(2200): n is a, c, g, or t
  misc_feature (2206)..(2206): n is a, c, g, or t
  misc_feature (2225)..(2225): n is a, c, g, or t
  misc_feature (2548)..(2548): n is a, c, g, or t
  misc_feature (2573)..(2573): n is a, c, g, or t
  misc_feature (2645)..(2645): n is a, c, g, or t
  misc_feature (2647)..(2647): n is a, c, g, or t
  misc_feature (2663)..(2663): n is a, c, g, or t
  misc_feature (2689)..(2689): n is a, c, g, or t
  misc_feature (2692)..(2692): n is a, c, g, or t
  misc_feature (2794)..(2794): n is a, c, g, or t
  misc_feature (2800)..(2800): n is a, c, g, or t
  misc_feature (2813)..(4000): n is a, c, g, or t
ggtattatcagaaagtagactatccaattcggattgtaattctctaacccttgaatctgcatcagctttactctcctctagcttgctattcttgcgttgcagcgaggagtttttgagctctaggtcacgaattttcgcataggcactttgctcctcgttggttgcacttttttgggcattctgaagctttctattttctagagaaagctctttgttttcctgagctaagtcttgctcatctgctttcgcttgctggagttggcggcgaagacgtgcattcgtatcgtccaagtactggttgctgttcacatttctcaaaccttcctgtttgagtttgagcatttgcgtttcaagagcagccacttggccaagtgccttgtttaattcattttgcaactccgcttctcgggcagaatcaaaaactggagcgggtgcgtccactttctgttgaacaaatgtacgagttttttcgaccagagcgttatgcttggcagcaagttcattgtagcgttggatcaggaaatcagggtctcgcagttgcgcatctgtttgagcccaaaccaaggagtgcagcaaaaacaatttgcatgcgatcagggcggtaagattggataaataattcacgggtatttggggcttatacttaaacttatgagaatagaaaaaagccacccttggcaagcgtgagttattagtaatctctgatcattgaaaaaaaagagcaacggctgtgggtgatcgggctcttaaatcgagaaaattgtgtctttccttgccgcccgaaacaagcgatcattgaccgctccggcaaggtggtgctcatccggtaggctggcaatttgtatgcttgatttaccggccttgtccgcgaggtgaaggcaggcatataagttctgagcaatttcggcaggatctccatccgtggataaactgattacaggaatatttttttcattccagagctgtttatcttggtcacgatggacaagaacgattgtgtctttacctgttttttcggcatttgcacataatatgtccacactggcatgcaaaaggaggggggtctgaggagcatagtgaatggaacttgtcccaggagagagctggggctcggtggcagctagcatcctccctttcttttcaccgatttcggatgttactttttgaacattcgtgccgagcacggcccgaatttgttccgcagatataggaccttcccggaaaatttttatattttgggggtcgaccagggagagcacagtggattccagaccaatctggcaaggcccgccntccaaaatcttaggacagttctccccaaatgattccatgatatgctccggncgggttgggctaatgtggttggatcggttggcactgggggcggcgaggggaaagtctagctggccaaggaccttacgaaaaaggggatgcgcaggagagcgtagggcaacggtgggcagnccggcagatatacgctcaggtatgcaatctctcttcggtaggattagggtgagaggtccgggccaaaatacctctgccaactgagtagccagattgttaaagtgggcaaggttcctggcctgatcaaggccggtggtatggacaataagggggttggtggaagggcggcccttgagtttgtagatcagatcaagggtactgtccagtagggcatttcctgccagaccatagacagtttcgctgggaagggcaactaggcgacctgcttttaggtgaagcagggagtcatcaagggagataatcaattttgaagtaaagactacttcaatatctgcatgtgtcttgcttttttgatcaacttggaaaccttacgctgttgcatcggggtaaggccggtgtacttccttggcaaaattttaccagtgtcagtcgtgtactttgcaagagcatccttgtccataaaggagtagtgctcgggatttttgctctttacagcggtgtcctgtgtttcagtcatagagnnttatnaataccaaatgattttctaagatcaatctcaaaaagttagggatcagccgactttatagattgaccaagcctcgaacttttgatgttttgtttccttgctatgaaagttgtatcttcaattaagacactcaaaaaccgccaccccgactgcaaggtcgtccgacgcaggggcagagtctatgttatcaacaagaccaaccctcgcttnaaagcncgccaaggctaattatttncggtcatgagaaaagatatacatcccaaactcaaccctacctgctttgtcgatgtgtccagcgggaagaagtttacaactctttctaccaccacctctaagaagatggaaaacattgacggggtggatcatcacttgatctattgtgatgttacaatggattcccaccccgcatacaccggtgaaaaacgctttgtggacactgctggacgggtagagaagttccagtccaagttctcccgcaaacgctaggtaagctttcgtacctctggctcgggttattgagccaaaaaataatcccttgacggattatcctatacaggnaaaagatgggctatctttcgtctantacactgtcttttattttatctttttcccttggtaattatggcgggggaacctgtgcgtacatggacgagtncngatgggcgcactttgnaggcccaatacattgaatcctctgcnggnaaagtaaccatcaagatggggagccgggaatatactcttccactatcccgattctcccaggcagatcaggactatgttgctggggttgccaaccaacctccncccgcntaccaacccattnnnnnnnnnnnnnnnnnnnnnnnnnnnnnnnnnnnnnnnnnnnnnnnnnnnnnnnnnnnnnnnnnnnnnnnnnnnnnnnnnnnnnnnnnnnnnnnnnnnnnnnnnnnnnnnnnnnnnnnnnnnnnnnnnnnnnnnnnnnnnnnnnnnnnnnnnnnnnnnnnnnnnnnnnnnnnnnnnnnnnnnnnnnnnnnnnnnnnnnnnnnnnnnnnnnnnnnnnnnnnnnnnnnnnnnnnnnnnnnnnnnnnnnnnnnnnnnnnnnnnnnnnnnnnnnnnnnnnnnnnnnnnnnnnnnnnnnnnnnnnnnnnnnnnnnnnnnnnnnnnnnnnnnnnnnnnnnnnnnnnnnnnnnnnnnnnnnnnnnnnnnnnnnnnnnnnnnnnnnnnnnnnnnnnnnnnnnnnnnnnnnnnnnnnnnnnnnnnnnnnnnnnnnnnnnnnnnnnnnnnnnnnnnnnnnnnnnnnnnnnnnnnnnnnnnnnnnnnnnnnnnnnnnnnnnnnnnnnnnnnnnnnnnnnnnnnnnnnnnnnnnnnnnnnnnnnnnnnnnnnnnnnnnnnnnnnnnnnnnnnnnnnnnnnnnnnnnnnnnnnnnnnnnnnnnnnnnnnnnnnnnnnnnnnnnnnnnnnnnnnnnnnnnnnnnnnnnnnnnnnnnnnnnnnnnnnnnnnnnnnnnnnnnnnnnnnnnnnnnnnnnnnnnnnnnnnnnnnnnnnnnnnnnnnnnnnnnnnnnnnnnnnnnnnnnnnnnnnnnnnnnnnnnnnnnnnnnnnnnnnnnnnnnnnnnnnnnnnnnnnnnnnnnnnnnnnnnnnnnnnnnnnnnnnnnnnnnnnnnnnnnnnnnnnnnnnnnnnnnnnnnnnnnnnnnnnnnnnnnnnnnnnnnnnnnnnnnnnnnnnnnnnnnnnnnnnnnnnnnnnnnnnnnnnnnnnnnnnnnnnnnnnnnnnnnnnnnnnnnnnnnnnnnnnnnnnnnnnnnnnnnnnnnnnnnnnnnnnnnnnnnnnnnnnnnnnnnnnnnnnnnnnnnnnnnnnnnnnnnnnnnnnnnnnnnnnnnnnnnnnnnnnnnnnnnnnnnnnnnnnnnnnnnnnnnnnnnnnnnnnnnnnnnnnnnnnnnnnnnnnnnnnnnnnnnnnnnnnnnnnnnnnnnnnnnnnnnnnnnnnnnnnnnnnnnnnnnnnnnnnnnnnnnnnnnnnnnnnnnnnnnnnnnn

SEQ ID NO: 1435 - DNA, 4000 bp, Escherichia coli
  misc_feature (50)..(50): n is a, c, g, or t
  misc_feature (103)..(103): n is a, c, g, or t
  misc_feature (1990)..(1990): n is a, c, g, or t
  misc_feature (2033)..(2033): n is a, c, g, or t
  misc_feature (2635)..(2635): n is a, c, g, or t
  misc_feature (2914)..(2914): n is a, c, g, or t
  misc_feature (2935)..(2935): n is a, c, g, or t
  misc_feature (3121)..(3121): n is a, c, g, or t
  misc_feature (3486)..(3486): n is a, c, g, or t
gctgaactccgactcggtcactgcgacctggtcgtgatcgtccgccgcancggcgcgatcgtgaaggaggggctcgagcgattggccctcgagatggacgttngcaccggcatcaccgccgagtgcatcgacgaacgtcggtgcaaggtcgatcatctcgacgaggtcggtggagaccgaccccctcgtggcgtcggcgcccgctcgcgggtcggccacgatcatcgggattcgcacgacctcttcgtggagccagtccttttcccccatccagtggtcgccgaggtagtcaccgtgatcggaggtcaacacgatcatcgtgtcgtcggaacggcccagatcgtggagtgctcggaacagccggccgagatggtcgtcgagttgtttcaccaggccgaggtaggcggggtagacggtcgtgcgcacctcgtcacgcgagaacgtcgacccgattcggctgcgctggaatgctcggagcaccggatgcgcagtttcgagctcggcgtcgcaacggttgggcgacggcagatcgttgcgatggaccaggcggtgatagggctcggacaccacgtagggccaatgcggcttgatgaacgaaaggtggatacaccagcggtcgtcgcctgcatctcggatgaagtcgatcgcccggttggtcatgtaggcggtctcggacagttcgtcggggatgattgccgggtactgcgacgcctcgagcagccaccccgacatgcgttcaccgtcgggggtcaggaccgagttggccgcggtgtgccacgggttggggccgtcgtagccctgttcgacgaggaaccggttgtagccccgttcgaacagctgcggccgcgtgttgggaacgagtccgtcatcgcgttcgatcggctcgaatccgcactggttgacgatcgtcgtccacggatcgtcggggtcgagtcgcagccgatcgaggccgctgcgatcgcgggccatgtgggtcttgccgatcaggacgcttcgcacaccgagtggtcgcagatgatcgccgatcgtgggctcggcgaccgacaggggaacgctgttgtaccgggacccgtgcgactggacgtagcggccggtgtaggcactcatgcgcgaggagccacagaccgatccctgtgcgaaggcccggtcgaaccggacgccacgatcggccaacgcatcgatgttcggggtgtcgatcagcccgccggcacacgacagggcgtcgtggcgaagctggtcacacatgatgaagaggacattgtgcaccgacgcatccacgccctgacggtaaccgtcgagggcgtggatgcgtgacgaccgactcaggcgacgaatccctcgaggggcgtcggctccggcacctcccagtcgaggggcatctgggagaagtcgaagaacggtgattcgtcgccttcgtcgattgcgtcctgcacctggtcgtagaaccctttgccggtctcctcggcgaaggtgattgcaacctcttcggcagtatcggagcgtgccggccgctggcagtactcggggaacgatgcctcgccggcgtctccctcctcgtacccgcgggcgaacagttgcttgagcacaccgaacccatcgttgcgaacgagcatctcgcctcgcgggtgaccaccgagacgctgcatgtgctcgatgaacttctcgagatcgtgtgtgtcgtaggcaacgtgctgaacggcgtggtctccgtggcgctcggtgaacctggtcacctgactgatctcggcccgatcgatgccctcgatcagcgcaacaccgaagtcgccgtagtcgatgcaccagatcttcatcgacgacccaggatcgtcgggccgcacgtcgtcgatgcgattgatcagcgtgcccccctcgacctcgatgtggaaccacgcccacttctcgatctggcccttggcgcaggcgtaggtgacatggtcgactttcttcaggtgcgatcccatggcctgatcacagcagagtgttcagtatnatgcaatgatgttgaacattctgttgctcaaagcagcatctcnaagccagaacgtctgatccgatggcccgactgtccgccccacatgaacacctcgacgcaaccgacgttgcccttctccaggcggcacgggccagccccagggcaagcatcgcccagctcgctcgcgacaccggcctggctcgcggcaccgtctacacccgcctcgaccagctgcacgccgacgggatcatcgtcggctggggaccagaactcgacagccgcgcactcggcttcgatgtcctggccttttgcacgctccagatcgcgcagggggcccacgacgagacgatcgcagcactggccgacatcgccgaaatcaccgagattcacaccgtcaccggtgacggtgacctgctcgtgcggatcgtcgcccgctccaacgatcacctgcacgaggtgctcatgacggtgacctccctacccccggtgcgccacagccacacccagctctcactggcaacccgtcaccaccgacctgtcgtcgacgcactctgaacccaccgatcccctcgaaaccgcgcgggggtgtcgtcacaccgacctgtgtccagctgctcgcctcgttcgaatcatcccccctcgattgcggcgttgagtgcctcnagcccgctcgggtcgagcgcgccgcgccacgaccagacgacgacatcgacaccgacatcgaaaaaaccctgcgctgtgtcgagaagctcggcgggttcaccgtcggttccgagatgtaccgatcgggtgatctcggcctgatcgcgtccgaccctgtcgcagtggccgcggagcacctcgtcgagttcctgccaatccgacggctgttcgggaaaggtcatgtcccactggtctgcgaacctggctgcggtccgcagcgtacggatccgtccctttccnccgatcacgatcggtatccgntcctgcaccggcttcggttcgcaccacgccttctcgagttcgaagaagcgacccgagaacgacgtctccttgttggccaggagcgacacgatgatctccatgccctcctcgaggcgatcggaacggtcgcgcaacgggccgaggtcgatgccgtaggcatcgctttccatgaagttccagcccgcncccatgccgagttcgaatcgaccatcggagatgatgtcgatcgtggctgccatgttggcggtcaccgcagggtggcgatggtgcataccgttgaccatcgacccgatccgcagccgtgaggtcgcctgcgccagcgcagccaacatcgtccagccctcgaggttcgggccgtcgtagggcggcgccagcgggtagaagtgatcccagttccaggccgactcgaatgccggcatctcgtcggccatctgccagaagtgcagaaactcctgccaggttgcgtggtgcggcggcgtcttcagtgcgtgacgtcccatcggcatgccctttcgtcggcgtaccgagaccgtaccgctccgatgccgagngctcagcccagcgactgacgacgcagctcgcgacgtgcgatcgccatcaggtggacctcgtcgggtccatcggcgatgcgaagcgcacgcaggtcggcgtacatgcgggcaagcggagtgtcgtcactgacgccggccgccccgtgcacctggatggcgcgatcgacgacggtcgtggccatccgcatcacctgcaccttgatgatcgacatgtgcggtgcggctgccttgtcgccttcggtgtccatcaacgcagcgacccgcagggtcgcaaggcggcaggcgtcgatgtcgatcctcgactcggcgatccagtccatgacgtttgctcgtgacgcaaccggcgcaccaaatgtctctcgtgcctcggctcgtcgacacatcagcgtgagtgctcgctcggcgaccccgatcgtccgcatgcagtgctgcacccgagccgggccgaggcgagcctgcccgatcgcaaagccgtctccgacgtcgccgaggatggcgtcgtcgccgacccgca

SEQ ID NO: 1436 - DNA, 4000 bp, Escherichia coli
  misc_feature (33)..(33): n is a, c, g, or t
  misc_feature (650)..(650): n is a, c, g, or t
  misc_feature (654)..(654): n is a, c, g, or t
  misc_feature (659)..(659): n is a, c, g, or t
  misc_feature (665)..(665): n is a, c, g, or t
  misc_feature (667)..(667): n is a, c, g, or t
  misc_feature (671)..(675): n is a, c, g, or t
  misc_feature (681)..(683): n is a, c, g, or t
  misc_feature (685)..(685): n is a, c, g, or t
  misc_feature (691)..(692): n is a, c, g, or t
  misc_feature (694)..(696): n is a, c, g, or t
  misc_feature (698)..(698): n is a, c, g, or t
  misc_feature (700)..(701): n is a, c, g, or t
  misc_feature (704)..(706): n is a, c, g, or t
  misc_feature (708)..(709): n is a, c, g, or t
  misc_feature (715)..(715): n is a, c, g, or t
  misc_feature (717)..(717): n is a, c, g, or t
  misc_feature (719)..(719): n is a, c, g, or t
  misc_feature (721)..(722): n is a, c, g, or t
  misc_feature (724)..(724): n is a, c, g, or t
  misc_feature (726)..(726): n is a, c, g, or t
  misc_feature (728)..(730): n is a, c, g, or t
  misc_feature (733)..(733): n is a, c, g, or t
  misc_feature (737)..(738): n is a, c, g, or t
  misc_feature (740)..(740): n is a, c, g, or t
  misc_feature (743)..(743): n is a, c, g, or t
  misc_feature (747)..(747): n is a, c, g, or t
  misc_feature (753)..(753): n is a, c, g, or t
  misc_feature (756)..(756): n is a, c, g, or t
  misc_feature (763)..(763): n is a, c, g, or t
  misc_feature (765)..(765): n is a, c, g, or t
  misc_feature (767)..(768): n is a, c, g, or t
  misc_feature (771)..(771): n is a, c, g, or t
  misc_feature (774)..(776): n is a, c, g, or t
  misc_feature (781)..(782): n is a, c, g, or t
  misc_feature (785)..(785): n is a, c, g, or t
  misc_feature (788)..(789): n is a, c, g, or t
  misc_feature (792)..(792): n is a, c, g, or t
  misc_feature (794)..(794): n is a, c, g, or t
  misc_feature (796)..(797): n is a, c, g, or t
  misc_feature (799)..(801): n is a, c, g, or t
  misc_feature (803)..(803): n is a, c, g, or t
  misc_feature (805)..(805): n is a, c, g, or t
  misc_feature (809)..(809): n is a, c, g, or t
  misc_feature (811)..(812): n is a, c, g, or t
  misc_feature (816)..(816): n is a, c, g, or t
  misc_feature (820)..(822): n is a, c, g, or t
  misc_feature (825)..(826): n is a, c, g, or t
  misc_feature (828)..(828): n is a, c, g, or t
  misc_feature (831)..(831): n is a, c, g, or t
  misc_feature (833)..(833): n is a, c, g, or t
  misc_feature (837)..(838): n is a, c, g, or t
  misc_feature (840)..(840): n is a, c, g, or t
  misc_feature (842)..(844): n is a, c, g, or t
  misc_feature (846)..(847): n is a, c, g, or t
  misc_feature (850)..(850): n is a, c, g, or t
  misc_feature (853)..(853): n is a, c, g, or t
  misc_feature (855)..(855): n is a, c, g, or t
  misc_feature (857)..(858): n is a, c, g, or t
  misc_feature (862)..(863): n is a, c, g, or t
  misc_feature (865)..(866): n is a, c, g, or t
  misc_feature (868)..(868): n is a, c, g, or t
  misc_feature (874)..(876): n is a, c, g, or t
  misc_feature (879)..(879): n is a, c, g, or t
  misc_feature (881)..(881): n is a, c, g, or t
  misc_feature (886)..(886): n is a, c, g, or t
  misc_feature (889)..(891): n is a, c, g, or t
  misc_feature (893)..(893): n is a, c, g, or t
  misc_feature (896)..(896): n is a, c, g, or t
  misc_feature (898)..(898): n is a, c, g, or t
  misc_feature (908)..(908): n is a, c, g, or t
  misc_feature (910)..(911): n is a, c, g, or t
  misc_feature (913)..(913): n is a, c, g, or t
  misc_feature (915)..(916): n is a, c, g, or t
  misc_feature (918)..(918): n is a, c, g, or t
  misc_feature (920)..(920): n is a, c, g, or t
  misc_feature (922)..(924): n is a, c, g, or t
  misc_feature (926)..(926): n is a, c, g, or t
  misc_feature (928)..(928): n is a, c, g, or t
  misc_feature (930)..(930): n is a, c, g, or t
  misc_feature (932)..(935): n is a, c, g, or t
  misc_feature (939)..(939): n is a, c, g, or t
  misc_feature (941)..(941): n is a, c, g, or t
  misc_feature (944)..(945): n is a, c, g, or t
  misc_feature (947)..(948): n is a, c, g, or t
  misc_feature (956)..(956): n is a, c, g, or t
  misc_feature (958)..(958): n is a, c, g, or t
  misc_feature (970)..(971): n is a, c, g, or t
  misc_feature (975)..(975): n is a, c, g, or t
  misc_feature (979)..(981): n is a, c, g, or t
  misc_feature (985)..(985): n is a, c, g, or t
  misc_feature (988)..(988): n is a, c, g, or t
  misc_feature (990)..(990): n is a, c, g, or t
  misc_feature (992)..(993): n is a, c, g, or t
  misc_feature (995)..(995): n is a, c, g, or t
  misc_feature (998)..(998): n is a, c, g, or t
  misc_feature (1000)..(1000): n is a, c, g, or t
  misc_feature (1003)..(1004): n is a, c, g, or t
  misc_feature (1009)..(1009): n is a, c, g, or t
  misc_feature (1015)..(1017): n is a, c, g, or t
  misc_feature (1550)..(1551): n is a, c, g, or t
  misc_feature (1555)..(1557): n is a, c, g, or t
  misc_feature (1562)..(1563): n is a, c, g, or t
  misc_feature (1566)..(1568): n is a, c, g, or t
  misc_feature (1571)..(1571): n is a, c, g, or t
  misc_feature (1573)..(1574): n is a, c, g, or t
  misc_feature (1579)..(1579): n is a, c, g, or t
  misc_feature (1581)..(1581): n is a, c, g, or t
  misc_feature (1583)..(1584): n is a, c, g, or t
  misc_feature (1589)..(1590): n is a, c, g, or t
  misc_feature (1592)..(1593): n is a, c, g, or t
  misc_feature (1596)..(1596): n is a, c, g, or t
  misc_feature (1598)..(1599): n is a, c, g, or t
  misc_feature (1601)..(1602): n is a, c, g, or t
  misc_feature (1605)..(1609): n is a, c, g, or t
  misc_feature (1611)..(1611): n is a, c, g, or t
  misc_feature (1614)..(1616): n is a, c, g, or t
  misc_feature (1621)..(1621): n is a, c, g, or t
  misc_feature (1623)..(1624): n is a, c, g, or t
  misc_feature (1630)..(1630): n is a, c, g, or t
  misc_feature (1634)..(1635): n is a, c, g, or t
  misc_feature (1638)..(1641): n is a, c, g, or t
  misc_feature (1643)..(1644): n is a, c, g, or t
  misc_feature (1646)..(1651): n is a, c, g, or t
  misc_feature (1653)..(1656): n is a, c, g, or t
  misc_feature (1659)..(1659): n is a, c, g, or t
  misc_feature (1662)..(1662): n is a, c, g, or t
  misc_feature (1665)..(1665): n is a, c, g, or t
  misc_feature (1668)..(1672): n is a, c, g, or t
  misc_feature (1674)..(1675): n is a, c, g, or t
  misc_feature (1677)..(1679): n is a, c, g, or t
  misc_feature (1681)..(1683): n is a, c, g, or t
  misc_feature (1687)..(1687): n is a, c, g, or t
  misc_feature (1696)..(1697): n is a, c, g, or t
  misc_feature (1700)..(1701): n is a, c, g, or t
  misc_feature (1704)..(1704): n is a, c, g, or t
  misc_feature (1706)..(1709): n is a, c, g, or t
  misc_feature (1711)..(1712): n is a, c, g, or t
  misc_feature (1714)..(1715): n is a, c, g, or t
  misc_feature (1717)..(1718): n is a, c, g, or t
  misc_feature (1720)..(1720): n is a, c, g, or t
  misc_feature (1723)..(1723): n is a, c, g, or t
  misc_feature (1726)..(1730): n is a, c, g, or t
  misc_feature (1734)..(1734): n is a, c, g, or t
  misc_feature (1737)..(1737): n is a, c, g, or t
  misc_feature (1739)..(1742): n is a, c, g, or t
  misc_feature (1748)..(1749): n is a, c, g, or t
  misc_feature (1751)..(1752): n is a, c, g, or t
  misc_feature (1754)..(1756): n is a, c, g, or t
  misc_feature (1758)..(1758): n is a, c, g, or t
  misc_feature (1761)..(1763): n is a, c, g, or t
  misc_feature (1766)..(1766): n is a, c, g, or t
  misc_feature (1769)..(1771): n is a, c, g, or t
  misc_feature (1773)..(1775): n is a, c, g, or t
  misc_feature (1779)..(1779): n is a, c, g, or t
  misc_feature (1781)..(1781): n is a, c, g, or t
  misc_feature (1783)..(1783): n is a, c, g, or t
  misc_feature (1785)..(1785): n is a, c, g, or t
  misc_feature (1787)..(1791): n is a, c, g, or t
  misc_feature (1794)..(1794): n is a, c, g, or t
  misc_feature (1796)..(1798): n is a, c, g, or t
  misc_feature (1800)..(1800): n is a, c, g, or t
  misc_feature (1805)..(1807): n is a, c, g, or t
  misc_feature (1809)..(1809): n is a, c, g, or t
  misc_feature (1811)..(1811): n is a, c, g, or t
  misc_feature (1813)..(1813): n is a, c, g, or t
  misc_feature (1815)..(1815): n is a, c, g, or t
  misc_feature (1817)..(1818): n is a, c, g, or t
  misc_feature (1821)..(1821): n is a, c, g, or t
  misc_feature (1823)..(1823): n is a, c, g, or t
  misc_feature (1828)..(1829): n is a, c, g, or t
  misc_feature (1832)..(1832): n is a, c, g, or t
  misc_feature (1836)..(1837): n is a, c, g, or t
  misc_feature (1845)..(1845): n is a, c, g, or t
  misc_feature (2034)..(2035): n is a, c, g, or t
  misc_feature (3655)..(3655): n is a, c, g, or t
  misc_feature (3696)..(3696): n is a, c, g, or t
  misc_feature (3889)..(3889): n is a, c, g, or t
tctcatcgtcgcttttgatttcgtatcgccacngaaaagatgccccagtcgatgccgacgacgactttaacagagaacgtcgtctctccgccgcagacgccaccgcgttttcaaaagcaatcccatatcctttcattacatcctctgcatctgctcccaccactgtccgaatcggacagttcacgtgaatcggcggtaaatgcttcaccgcttcctcgtacggcgttttacgagacgcgcccggaacatccgtcgccgtcgcggtactcttcgcctgcggtttcctcttttggaaaaaactgtgcactttctgaggaggctgctcttccgttttcgtcttctccttttcgtcgtcgttgtccttctcttgcgtcaaatcgacaatcgacgactcttcttcttcttgttttgtgcaacagaatttttgaatatctttgttcaaattcgtcgtcgtttttgcgtctgtctgctctcctcctttggtcaagtcaatggtcgcttccgcgactctcttcgcgtcgttgatattctcaacgttattattattgtacgcgttcgtttcctccttcttcttttctttcgtcgtaaacatcggatgcatcgtcgtcgtcttgggaggacgtttttcttcttctttttccatcatctcncgcnctctntcacancncaannnnnctctcnnngngaaaannannncncnncgnnnannagaganancnanngngntnnntgncgcnntnttntgcncctctnttntctctcncnannatntcnnntcgcnnaangtnntcntntnnannngngnagananntttnaatnnngcnnanaananaaanntnannnannttntcncncnnaaannannanaaaaannnctntnaatgngannngnganancataaaaaanannancnngngngnnntntntntnnnngagngnganngnnagagagananaaaaaagagagnngagngatnnngagnggngngnngncgngngcnnagaanagacgnnntggtcagagagatgtgtgggatttgattgtgaataacgacgatatttgttttaaacacattcttccgagattgaattcgaatgatgtgaaattcttgtacgaggtgaatagtgaaacgagaaagttgattaagaggtcatctcgtgcgggtgatttgaaaaagtggtttagaatgaacgagatgtcgtcgatatcgactttggaagtagcgtgggagcattatccgtggggcacgtatgactacgatgtggaagaaaagatggacgaaacatatttctgctatcgagttgcttacacgaataaactcgagttgctcaagtggatacgagaggagaaacagtgtgattgggatgaaaagacgattagagcggccacaagacaaggtaatctggaaatgataaagtattgcgttgcaaatgagtgtcctatcagtacgtgggcgtgtgcacatgctgccgaaagcggtcatctcgagatactcaaatacttacgcgaagaagtcaaagcgccttggggttggatgactgccgctnncgcnnntgaanntgnnnatntnnatatncncnnatatnntnntgngnntnngtnnnnnanatnnngcgtntnngcgtgngaanntgnnnncnnannnnnncnnnnggnctnttngannnnntnncnnnannncgcnaaagcgccnnggnnctntnnnncnntnngnngngcncannnnnacanacncnnnnactgtnnannannncnccnnnacnacnnntnnnctcncncncncnnnnngcnannngnagatnnnangntncncnngtnanaaacnngtncacnnatacacanagagagagagagagagagagagagagacaaattaatatacaatacgttacgcgttacacttcaatcacacaacgtgtgtttctcttaaccagcttgatgcaaaaaaaaatcatttccaatcggatttccgcacaaaacaacgaacctcttcgcgcggacggcgcaagaactcaacacgctttaaacgannacaatgactgaacaacagaagtacgggaaggacatattcaacgggaagggagagaattggtaccacgagttaatcgaggacggtttagctttatcctacagagtggacgaagtgtaccaccggggaaaaagcgagtttcaagagattgaggtggtgcagacgcacgcgttcgggaagttattaatcacggacgggttgatgcaatcctcggagtgcgacgaggtggtgtatcacgaagcgttggtacacccggcgatgactttacacgaaaacccgaagcgagtgttcatcgccggcggcggcgaaggagcgactctgagagaagtgttaaggcacccgatggtggaagagtgcgtgatggtggacatcgacggcgttttggtcgagcagtgcagagaacactgcccgttttataacgcgaacgcgtacgatgatccgagagcgaagctggtcattggtgacgcgaagaaaggtttagaggattacccggaaggatcgttcgacgtgatcatcatggatttatccgacccgttggacggcggtccgtgttatcaactctacaccacgtcgttttacgaaaccgcgaaatcgaaattgaaaccgaacggtattttagtcacgcaaagcgggtgcgcgtccgtgcgagacgcgcagttcgtgtggtcgccaattcacaacacgttgaaacaggttttcgacaacgtcagcggatacaccatgtgcgtcccgtccttcacctccgagtgggggtttaacgtcgcgagcacggacccggcgaaaccagatttacgcgaaaaaggcatgaacgaagtcgacgcgagattaaaagcgcgcaaattggattctgttttacaattttacgactctatttcgcacgctcgcatgtttagcccgccgaagcagttgcgaaagatgatcgaaaacgagacgagagtgatgacggttgaaaaccctctcttcatgtgcaccacagacactcacacagggttgttcgagaagaaatagtacgaccagtggacgatggttaagtaatagtatccgtatgtatcttttctttaatatcaccagattatagataccaacttccgttaatactaagacgcttcgatagactcaaaatcgaaccttttttccttctcttggtctttcaaagagcgccgacacataaattttcttcactctttctctctgtcggtaacgcacgtacttccttcggtaaaaaaccccgacagaagataataactactactaatactattgctcttaatactaataatgtacaacggcatcggattaaccaccgcgcgcggttccgggacgtccggttacgtccaatcgaacaaattccaccgagagcgcagtcgtttgcacagagacgattttcattctcaagatctgaaaacaatacacgatcgcgagaagaaacgaggcggagacgacgtctcgaaacgagaagggaacagaggaattttagaacacaacgagaaacggaaaatcgaagtctctttggtcgcgtttcgagacaagttggaagaggatttgggtgaaggaaaagaggaggacatcgaaaggaaagtgaacgaagaaagaacgcggctgacgaagaagatgaaagaggancaagaacgacaatcacagagagaagaagaagaagaaaacancagaagagggtttaagcggaaaaactttaacagaggaggaaaagaagaagaaacgcacgaagtcgccgagcgacagcggcggaagatggcgaatttgcgccaggcgtttggcatatcgagggaagacgacgaacgaagagaaggcgaagcgttcgatcgagagttacagcgagagatgcgagaggagaagcancggaagagggaggatgagattttacgcagagagaaagaaatggcgaagagaaggaaagaggagaagaaagaggagaagaggaggagaaaggaaaggaagaaagaggagaag

SEQ ID NO: 1437 - DNA, 4000 bp, Escherichia coli
  misc_feature (1982)..(1982): n is a, c, g, or t
  misc_feature (1992)..(1992): n is a, c, g, or t
  misc_feature (2700)..(2700): n is a, c, g, or t
  misc_feature (3421)..(3421): n is a, c, g, or t
  misc_feature (3628)..(3628): n is a, c, g, or t
  misc_feature (3736)..(3736): n is a, c, g, or t
  misc_feature (3748)..(3749): n is a, c, g, or t
  misc_feature (3771)..(3771): n is a, c, g, or t
  misc_feature (3774)..(3778): n is a, c, g, or t
  misc_feature (3780)..(3781): n is a, c, g, or t
  misc_feature (3783)..(3783): n is a, c, g, or t
  misc_feature (3786)..(3789): n is a, c, g, or t
  misc_feature (3791)..(3793): n is a, c, g, or t
  misc_feature (3795)..(3795): n is a, c, g, or t
  misc_feature (3797)..(3798): n is a, c, g, or t
  misc_feature (3800)..(3804): n is a, c, g, or t
  misc_feature (3806)..(3807): n is a, c, g, or t
  misc_feature (3809)..(3810): n is a, c, g, or t
  misc_feature (3812)..(3818): n is a, c, g, or t
  misc_feature (3821)..(3822): n is a, c, g, or t
  misc_feature (3824)..(3825): n is a, c, g, or t
  misc_feature (3827)..(3829): n is a, c, g, or t
  misc_feature (3832)..(3833): n is a, c, g, or t
  misc_feature (3837)..(3841): n is a, c, g, or t
  misc_feature (3843)..(3843): n is a, c, g, or t
  misc_feature (3845)..(3846): n is a, c, g, or t
  misc_feature (3848)..(3854): n is a, c, g, or t
  misc_feature (3856)..(3859): n is a, c, g, or t
  misc_feature (3861)..(3861): n is a, c, g, or t
  misc_feature (3865)..(3865): n is a, c, g, or t
  misc_feature (3869)..(3876): n is a, c, g, or t
  misc_feature (3879)..(3879): n is a, c, g, or t
  misc_feature (3881)..(3883): n is a, c, g, or t
  misc_feature (3885)..(3885): n is a, c, g, or t
  misc_feature (3889)..(3890): n is a, c, g, or t
  misc_feature (3893)..(3893): n is a, c, g, or t
  misc_feature (3895)..(3900): n is a, c, g, or t
  misc_feature (3906)..(3906): n is a, c, g, or t
  misc_feature (3910)..(3910): n is a, c, g, or t
  misc_feature (3912)..(3913): n is a, c, g, or t
  misc_feature (3919)..(3926): n is a, c, g, or t
  misc_feature (3928)..(3930): n is a, c, g, or t
  misc_feature (3934)..(3934): n is a, c, g, or t
  misc_feature (3936)..(3938): n is a, c, g, or t
  misc_feature (3940)..(3940): n is a, c, g, or t
  misc_feature (3942)..(3944): n is a, c, g, or t
  misc_feature (3947)..(3947): n is a, c, g, or t
  misc_feature (3950)..(3951): n is a, c, g, or t
  misc_feature (3953)..(3953): n is a, c, g, or t
  misc_feature (3955)..(3956): n is a, c, g, or t
  misc_feature (3958)..(3959): n is a, c, g, or t
  misc_feature (3961)..(3965): n is a, c, g, or t
  misc_feature (3967)..(3968): n is a, c, g, or t
  misc_feature (3970)..(3976): n is a, c, g, or t
  misc_feature (3978)..(3980): n is a, c, g, or t
  misc_feature (3982)..(3983): n is a, c, g, or t
  misc_feature (3988)..(3993): n is a, c, g, or t
  misc_feature (3996)..(3997): n is a, c, g, or t
  misc_feature (3999)..(3999): n is a, c, g, or t
cccacttccttaaaactgacaaacaaaatctaatctataaaccacgatagtatccagagaggaatatcccaagttgggaatttttattcaatactctttactttaaatattttattttgattaaaaaatatgcatgtatcaaaattattatttaaatattgcaattatacttgataattgatgattgaaggtgtgtgactatgagtatcaaaattaatacaatatggagaataatatgaaagattatatggtagcacacaaatttaaaacagaagaattaagagaccaatattttgaaatgtctaaagatatgactgctgatgacatacgtgcaaatatgaaaaatgaaaatgctagttttcaaatgaattggaataatgaaaaaaatgacatggtaatgttttgttggtggaaagcaaattctccagaagcaatagaagaaacactcggagaaatgggtcaaatgtttgttaatgacataaaagaaatggcaaatgtaatggatgtgactgattaattttctataaacttaatattcaatttaaattaataaatttaggagttattttatggaaatgtttgggataataaaatttacatgcagttatgatgaatggaaatcaatttatgacggagatattcagttaagaaagcaatttatgaaagatgatatcattggaaaagttgatgaaaatacagcaatgtttaaagcaactattaccgatcctgctaaaatgggtgagataatgtcaaaaagaatggaagaaattggaccaaaattaggattaaaccacgatttttatagcattactcctatagaaaactaaattactgttctcttcttttttagatttgtaaggatttgtaataaataagttaattggaaaggaaatgagatgtctaaagtattagtccatatccatagtgatctacaatttaaaaacaaagttacgttaggattaatggttgcccttgctgctataaaaaaagatcatgaagttactctcttcttagcagcagatggggttcatatattaaattgtaaaagtactggtcaaatagttggacaaggtaccggagatttatatgaacaccttcttaatttgaaggaaacaaatgccactatattagtttctggtatgtccgcaaaggcaagagggtatgatgaatcgcttttagaggggtataatgcagaatttgctatgcctgacaaactaattgaacagtcattagagtcagatagcgttctctgttattgagttacctctcgcagagaagtaacctttgttatttaaccactttgcaatttcattctatgatatttctttttctagaagtttagatatgttttcataaaggaagaatttatattgtgaactaaaagggtttggagtagagaatttctaaatatgattgcaaaacagaagaatgcgtctgacttaaatcttacgcacccactccctcaagactgacaaccaaaacctaatctataaaccacgatagtatttagagagaaatatcaattactctttaccttaagtgactattttgagtagactataagcatgaaactaatcattgctactcctagtccatatgcacgcaaagtaagagtaatattacgtgaaaaaaatatagactttgaagaaataattgatgttccatggaatactgacactttaactcttggggttaacccattaggaaaaataccaatacttcttcgcgatggtcatgaaccattgtttgatagcaaggtaattgttcaatatttagatggatataaaccaaaacctcttttttaccctaatgactacacggaaaacatctcagcgcggttggttgaaactgtttcagacggcatatgtgattctatagttcttatattccttgaaaactcaagaaaagaaattttaaggagtaaaacttggattaaaagacaagagaaaaaaatctttgaaggagttcaatatctttcaaanaatcttgatnaaaaaaaatattttgtaggtaaccattttaatattgcagatgtaagtggatttacttgtttagaatatcttgatttaagatttcctaaatttaaatggagagataagtataaaaatttagtgtcatattggaacatacataaagatagacaatcatttaaagaaactaaaccatatgcacagattattgaacctctagatgattaaagagatgaaatatcattattgttctcaatgtaaaattcttggttaggaaaataaaattcagttctgctttcttttttcctaaataaacctaatctataaaccacgatagtatccaaagagaaattttaattattctttaccttcacaaagtattttgattaaaatatatatatgacaaagcatattaacttatattctaaatttgataaatttggagattattggtctccaaaagttattgctgaaatgaatgattatcaatttaaacttgtaaaaataaaaggtgaatttgtaaaacatcaacattctgatactgatgaagtgtttattgtaatagaaggtaaaatgagcattgaattcaaaactgagacaattgaaatcaaaaatggtgaaatgatagttgttccaaaaggagtggtacataagccttttgcagatgaagagtgcaaagtaatgttggtagaaccaagaggagttttaaatactggtgacactaaagganatttgactgctccgaatgatcaatggatttaaaagtgtttcaattttatacaaaatttttactgtttttaggaattacaattttcctttctatcactacatctgttgtttcgggtcaatcggattttgatttagtagagattaagttaattgataatctagatgataaaagaggattttgtatcgacataaaaggatataaatctagggcaaaaatagagagaggactgcaagcacatacctgttactcttatcaaggagaaattgctatagatcaaggtttagatgcaaataagttaaagaaaaaagaattatttttccctaattttgatgtttgtatacatccatcttcatataataatccactaattttaacccttataaaatgtaaaaattcacaagaatttatatttgataaagataatactattcgtttaaagaataacagtaatttatgtttaacagttgcaaaagaagaatcaagaaaaggtggtggcggttcacctgtacatttaatgagaaatttatctatgcaaatatgtaataacaaacattctgtttatcaaaattgggtaataagatattttaaaaaaggtaagatttttaaagaaaaactttcaaagttttaattttatactcttaattgaagaaaaaaggtaacaacattgatcgctgatattgtgttagtatctcattttaccattgttatttttataactttnggtttttttttaataccaattggatacaagtttaattgggattgggttaaaaatttaaaattaagaatatgtcattgtggaatgatgacttttgttactttagagagtttattgggaataacttgcccactaacttcatttgaaaatagtttacgtgggattaatgaatccacttcgtttatatcttattggatccatcaaattatntattggaatttaccatctcaattttttattattttatattgtattgttctagtatggacatttttattatggaaactctttccacctatgattaaaaagtgctaattngaactcccctcnnctcaaaactaacaaaaaaaacntannnnntnnantannnnannntnannannnnnanntnnannnnnnnttnncnntnnnaannaatnnnnnantnngnnnnnnnannnntntagnaaannnnnnnnatnannntnaaannttntnnnnnnaaaaanaaancnnaaaaannnnnnnngnnnaaanannngntnnnaanttnnancnncnntnnnnnanntnnnnnnngnnntnnaaatnnnnnnttnntna

SEQ ID NO: 1438 - DNA, 4000 bp, Escherichia coli
  misc_feature (87)..(87): n is a, c, g, or t
  misc_feature (213)..(213): n is a, c, g, or t
  misc_feature (216)..(216): n is a, c, g, or t
  misc_feature (261)..(261): n is a, c, g, or t
  misc_feature (290)..(290): n is a, c, g, or t
  misc_feature (650)..(650): n is a, c, g, or t
  misc_feature (1065)..(1065): n is a, c, g, or t
  misc_feature (1138)..(1138): n is a, c, g, or t
  misc_feature (1228)..(1228): n is a, c, g, or t
  misc_feature (1293)..(1293): n is a, c, g, or t
  misc_feature (1522)..(1522): n is a, c, g, or t
  misc_feature (3054)..(3054): n is a, c, g, or t
tcaagtaaagcttgacctatcttcttagcctcttccatagatgttttacgaaccttagtttgtgctaaggtaaggttttccataacngtcatatgtgggaacaaattaaagttttggaataccattcctacttcagcacgaacgtcatttaactttttcttatcagaaagatccatgccatctacgataaccttaccagatgtaggttcctcnaantagttcatagtgcgcagtaccgtacttttaccagaaccagaaggnccgatgattacaactacttgaccttgttnaatatgtaaattaataccttttagtacttcatttttaccaaaagatttatgtacattttctaatttaatcatttaatgctatatttcctttcaagatatccaactaattgtgagatagtcactgtcataataaggtaaatcacagcaaccgtaccccagatttcaaaggatgcataggttttagcaatgattaattgaccacgacgtgtcaactcctcgaaaccgataacagaaactaaagaggaatctttcaacatggcaataaattcgttccctaacggaggaataattgctttaaaagcttgaggcataatgatgtaacgcatggtttgtccccaagttaaaccaagagaacgaccngcctccatttgacctttatcaatagattgaataccagcacggaaaatttcagatacataagcaccagagttaatactacatgcggtaacagccgcaatatatggatcaatccgttgacctgtaatcataggcaaggcaaaatagattaggaaaatttgcaccagtaatggtgtaccacgaatgatatctacataacattttgcaagcaatctaactaatctaaatttagataaatttgctaaagatactaaaagaccgataaaaaagccacaacctacagacatggctgtaatttctacagtcactagagcaccttgtagcaagagcggtaaattatccgcaattaacccccaattaaaactcataatctctcctattatttaaattctaaaactactggcatatcagcaggtgnatctacattaaaccattttttatataatgtattaaattcaccatcagccttcatatcagcaattgctttattnatttcttcttgcaatgctttgttatccttattaattgctaagcccaaatattctttagtatttggatatgccataaatttaatatgttgntcaggatgcttagtactgtaatattgagctacaggtaaatcgattacagttgcatctactccacnattttgtaattctaacaaagcttcattactatggtcaaattcttttacagtagtaccttcaattttatgagctaaatctgcaccagtagtacctaattgggctgcaatttttttaccctttaagtcatcaagagaattcacagccgttccatctttatatactactgctaaggcattttcataataaggagaagaaaataatactttttcacttctcgcttttgtaatngtcataccagatgcagcaacatcaatatcatgtgtgttcaaagctggaatcaaagcatcaaaagctacattttttagctctacatctttattaatacgcttaccgatcgcacgaatcaattcaatatcaaaacctgtataatcttgagttttttcatctttaaactcaaatggaacaaatgtagcattagtgccaacgacaagtttattagatgtaggttgattagaagaaccacatccaccaactaaagaagccgccatcactaacatacaaccgccaagaattattttttttactttgctatttaacatattatcaacctcattattttaacttactactactttataatagtatatagattaagtataattatgtcaataattttgtatataattttagatgcaatcgcaaaatctctatatttatattttaattttatacattgtttgtataaatattacgttcatgtataaaaactttcccatagttagtggttttctatagattttataatatacaactgtataaaaaaagcacatgagaaaagcctcatgtgcccctatacggctgacctggtctttgcccccacactcgcctgctggaaggttcgctcataagtccaagactccccactactacctctctcgattttatcggcaggacttacacctaagccgcaccatgctcacaaccctttgggctgcttatgtggatcgttttgcctgcgactagcctcgactttcaaccacagacccgtatagacgtattataaagaataacagtattcatgtctagttttactattattttaaaaaattttgattatatagttaagtagccaaacataatttttttaccaaacatactatcgcataattcttagaacaatgagaataaattttgcaacccctatttgttgatgtatagaaaattggaatagaaaacctaaaatattcttcataatattttaatatttctaaaatcacattttttaagtaccatatctagtggattcttaaattgtcaattagtttttgtatgccaaatatgaatacaacatatttgtaagaacatacgtatcatacacaaaaaattatttatggtgtataatttgtatactgttaaattagaacggcctaaagttgtacgatatgaacataagtacgaggggttgtaccatatgttcagtttgttagttagaggggtttattatgtttatgttatcattgatgcaaccatcaggtttgtatgaactggagaaagatagtttagaagccataagcgcacaacttttacagatgatacaaatgaaaagctatcatctctatacacattctatccaggtttcaaactatgctgttagcatcgcagctaaaatgggtttgccattaaatgaaattgaacagattcgtcacgcagctctacttcatgacgtgggtctattaatggtacctaatgcattaatccaaaaatctccatatcttaataagcaagaaatgtctaagtataaacaacatgcggcaagtggngccaatatgattgaaaactatccttgctgccaacaaattttgccttatattcgttaccatcatgaaaaatgggatggctctggttatcccaaacatttacgtggtgccaatattccgttaggagctcgaattattgctgtagcagattactatgatacaacagttaatccttctactgaattttgggcgaaaacaaaagctaaagcaaaagaagaactctttagtgcatctggctcactctttgatcctgatgtagttaaagcatttattgatgtgcttggctaatatgaaatcaaatattatattcctacatttagtaataaagattagaaactaccactagccagcgtaagggcatcaatgcgtagcgctttatgcttttgtaagacttttgctacagcttcaattgtggcacctgtagtatatatatcatcaacaattaatatattcttattggtaaaatcaatatccttataatcagcacatataacaaaggcatcatcaatattttgatgtctttctttatttgttaatccccacatatctcgagaagtatcaaacttgtatatacaatctaaccatttaaagttttttctatctatctcccataaagaatgagcccattcaagaaagaataaatctacttgattatatcctctcttagcttttttcttttcgctagatggtacaggaacaatataatcatacataattttacaattactattcacaatattagactcattatatttcatgtaaaagttgtacgatactaaaaaaggagcggcccctttggactgctcctttttttcattaaattttacatcgtaaatcatagactttagaccaccacgatattcggccaacacacatacatcatctacatagtgtaaaaatttatgtggtacatgacgaatatgtaataaatctgtaaaacaagctttac

SEQ ID NO: 1439 - DNA, 4000 bp, Escherichia coli
  misc_feature (770)..(770): n is a, c, g, or t
  misc_feature (1161)..(1161): n is a, c, g, or t
  misc_feature (2008)..(2008): n is a, c, g, or t
acggccattgcccgtaataacgcctgcggtaaggccgtcatcttcatcaagttcttttatcgcgttccacagcccattggacagagcgccattgatcgcgttcatcgcatccggacgatttaaggtaatgatcatcacgcgatcacggcgttcgactaggacggcttgttcttcactcatgggtcaaatcctttcttattaggcaattgtgcgaactcgaaccatagcgcaattgacgctggggtaaaactccgtctcgctcaaaaactcactcgtgccaagatttgagaagtatttaaaaatccaaaagataaccaaggaatgctggttgctgaagtttgctgacctctgttagggtcaaaatcctaacaaaaccagatggcaacggagggtgaatagatgtcccacagaagcgcgcaagaaaccatagaactgttttggcagattcaaaatgatggggactacactcaggtcgtgaagctctttgcagaaacggctgttttggtcgatcctgtgtttggcgtctttgagggtcgagccgcaattgccgaatttatggcaaaaatgaatattgaaatgcagtcgagacaaaccacttttaaagctattgagattgccggaggcggtgatacggcctgggctcagtggcttgctgagacgccgacaggcaccatcgaaggatgcggtctttatcgggttgaagagggtcttttaacttactacaaagactatatgaatccaccaagttccgcttgaggctttaggcaggngaggcagcgcctgcatcgatcgtcatccagacttggaatgcctgcaagctagtttttgtatggagggatgcagatgttaacgcgtaaatatgggtatctctgggataacgcatcgggcgatgtatccgatgctacaaggcgcctagagacaagtggtgcttgcgtggtcaaaggggtttttgacgaggacgctgttgcacagcttcgggaagccattgacgaggtgtttgcagtatttccggccgatcgtcgaagtgagcatcgcgctcaacaggcggaccagcaatttcgatatgaaatgttgaatcgaagtagtcaatgcctaaaagccgtggccaactcgataattcttagtactatcgagccgcttttgggagaggattgtcatgtnattgccaacacggcatggcgaaatccacccaacccgaatgatagcgctcagccctggcatgtagatggcggtcctcacatccccttgccggcggatgttttgtggccgccggagattccccaccctgtgtttgcgatcggttgccatatcctgttgcaagattgtgcgctgaacgatggtcccacggggtttattccgggcagtcacctgtctgggcgacctccgccttaccgccaggcgttggatgcaaacctcacttatcaaggccaaggcgcagttcccttaacgggtgaggttggcgatgttttgttatttgtgtctgatgtttggcaccgaagaatgcctacaggcgcaaacgatcgcggtcggtattttttgcaggtgcactatgcccgtcgagacattcagcaacggcttaaaacaagtgatatcagccatcagttgagtgattcgatactgtcagatctcgatggcaaagataactcgcggttgcgaaccttggttgggttgcatagtcctgggttttatgatggctagggtttaatttgcgcatcctgacaaggtgatcatcattgcttgtctgccaaggcgcagcctacaagccttttaatccgatgattaagccaaggtgattaaagcaaggtgattaaagccgattatttcgcagcggtgattaaacaaaacgcggcgactcaggcataaacccttggggttgggtttttagttagcttcggcaaagcatgcagtgcctgatctatctggcgccagagtgcgctcttaagcccaggaaccgtccgcgaaatgcgccaatgtaaagtctagtctaatgagccctgggcagggcttntgccgacgtattcacaaatcgtccgtttaatttttttggcgacgatgggtcacgcgcgaaggttcattattgaccagcggatggtattgttaggctccgatccgagtagggtagtctaccaagtattcagactaagccgggggtgttgcggcctgcattttcgccatttcttcccagctcaaataacgcgtgaggccgtcgtcatcgaagaagatgactgggccgttacagataaaaagatactcagtatcttcaagtgcaactgtcgcgccatggagcacgccgttgggttcgtagtcgtagtcgccggcattcaaaatgccatctctgacttgcagcttgcctttgatcacgaaggtatgcgcatctgaaagatgcttatgaggcgacgctgtgtagcctttgttccagcgaaaaagtgctgcccagccaccactttcggcgccggtccaaagcacttttgtccatgcctgacccggctctgtttcgatccagggcgcatctgatcgcacaataatatcggccagctgattattgataggagtaatgtcttgtaatgccatgctgtgtacctgataaggagttgacggtgtcaacatatacccttctgcgttgtgtttaaagtcaagccgaatttggaccttaatgtagctaatgcgagttgaaagatagcagacggcgtgtgcgagcaactgattgctcggtcgaaggtttaatggttgcacgatcgagaagtcaataaccgtttaccgactaggtcgcacggtcacaccaagacatccgtggtccgttgggcgtagattcagctaatccggtattttgtcgtcagcttatcgagtctgtttatggcttcaaacaggatgagctttgttgagttgggcggaaatctcacgattgcggcaatgtatttaccccggtcttagagtaatttttttacatgctcggcgcagtcttccgcggggctccagaaccaacccttaggatcccaggctcggccgcaagtcatgtaaacgcattggctgtacgccccgatcacttcgtctttgcgaccaagttcatcgagggcgcgggctttggcccaaagcgcgagggcaacatcattgatgaggtagttggcctctatttttgcgcgcgccttagcggagacacgaccagtcttgggacagcgcttaccggcatcatgcattcgcttttgttggtggcccgcttctggtccccagcgatcaaagcaagcatcaacggttgccactgcggcttcagagtcttggctggcaaactgctcaacggctcgcacagcccaaaaggctgaatcccctagggttgcatctgtagaaatacagggatctgcctcaccagcattattggcgaatgcagcctttgagaaatcaaaaatcaagaaaacgagagccataaggctcgcagatagattaggcctaaacatgaaagaggtatccttaattcattgctgaagggtgcatgtgctgatcagccgtcgcagaagggcaccgggtttctgcgcgtttggtcaggaaaggcgacgctcaaggtaaacctcagcttctggcgcgaccgcactggtccttcttgcactgggctctgtcctgaccaaaagtcacgaaacataggtcgttgagctacccatgcggttaacgcttcagcgcggaaaaacagcgaggcgctaaaactctcacgtacttggctcacggttacttcatgaaggatccgtgtttttggcgcagcgctcgcggtatctaaaaatttctgggccaacggtgggacccagctgttcgaatggggacgttcatgaacgaccaggccttcggttaagcccctcctgacagcagtggcagcctgtatctgggcacatctgggcttcgatatctgccgcgattgatgacaactcagcgtcattgcctcgtgatgattggctagctgagttgcacaattggcctgggtcaagcgagcctctcagcgacaaaatcgagaaaggca

SEQ ID NO: 1440 - DNA, 4000 bp, Escherichia coli
  misc_feature (594)..(594): n is a, c, g, or t
  misc_feature (645)..(645): n is a, c, g, or t
  misc_feature (978)..(978): n is a, c, g, or t
  misc_feature (1985)..(1985): n is a, c, g, or t
  misc_feature (1987)..(1987): n is a, c, g, or t
ttttcttcgcgcaactcatccgtgatgtttgacagcgttaaaccaagcagctcggcttttggcacctctatcgtttcctctggcactggcgcggttgccaaaattgcctcttcacccggccgttgccccaaaatcacgtccagcgttttacgctgcccgtcgcgcaatacgatcgtctttacaactttgcccacgggcgatttgccaaccaatttgaccagggatccagaatcggtaaccgcctgcccgtcaaacatcacgatcacatcggtcacttgcaggcctgccgctttcgccgggccatcaaaaacatccaacacgatggcaccagatggttcatccatcgcaagcgcatccgccatttcatcggtgacattgccaatattcacgcccaaccagccccgacgcacttcgccaaattcccggatttgatcaacaacgggcaaaaccacattggacgacatggaaaagccaatccctatcgatccgccattcggcgagaggatggccgtattcacaccgatcacatccccgttcatattgaacaaagggccgcccgaattgccgcggttaatcgctgcatccgtctgaatntaatcgtcataattacctgataactcacgatttctagccgaaattatcccngctgataccgaaaatccctgccctaaaggattgccgatggccatcacccaatcgcccacgcgcgccacatcgctattgccaaaggcaacgaaagcaagcggaccctctgcctctactttcaaaaccgcgatatcaacgtttttatcaactccaaccaatgttgcagaaagctctgccccatcggaaaactcaaccataatctcatcagcaccttcgatcacgtggttattggtcaccacatagccatcttctgaaatcacaaagcctgacccaagcgccgagcctctgcgcggtccaggccgcgaggggccacgctcattaaaatcgcgaaanagatcctcaaatgggctgccctcgggcaccacgccgcgtggcattacattttccgacatttttgtcgttgtcgtaatattgaccacagcggggctaatctcttcaaccagatcagcaaagctttccggagcgctgcgcgccgccgccattaggctttgtaaaagaaccaaaattgtcaccagaaaggccagtttcacggctttaaagcttatctgccccggggcttttgcggttataacgggcacatatgcgctgcctcgcttaatattcataaatgcaactccttgtcatttgctcaatgtggtttgctcgaccgcggatcttttggagattgtcaaaatatccggcctccgcctttaaataagcccgccccccccaacagacaagggccacagccaatcttcagctaaatgtgaacaaacgtgtgctgatgcggtgcgctaggcgattatccgcgcagcccataaaataatagcgcccagcaaagcgatgacggccccaatgaaccggcgctgcgaaagcggcaaggcttgcaaatattgcaacatcgcttcaaccaaagaaggggccagcacatagaccagcccctcgaaaactaaaatcaatccaatcgcccataggcagatttcgatcatttagcgattacatccgatttcaaatagttgaaaaactcggaatccggcgacataaccatcgtcgaattctgacccttcaacgcggttcgataagccgccaaagatctgtaaaattcgaagaattccggatctgccccgaacgcgctggcaaagattgcgtttcgttctgcatccgccaaaccgcggatgatttcagattcgcgcttcgcctcagatacgatctcaacttgcgttctgtccgccaaggcccgtacccgctgcgccgcttcgttcccgcgagcgatttcatctgcggcttcacgttcgcgctcggcgcgcattctggcaaaggtcgcatctaagttggcgcgcggtagatcggttctcttcaancntacatcaaccacttcgatgcccagcggcagcgctttttcaatcgccgcgttgcggatccgcgacatcagaacagcccgatccgaactgagaatatcgttcgagctaaccgagcccagaacttcacgcatttcacttttcaaaatgctgtccaaacggctttctgcaacttgcacaccgccggtgccaacggcttcacgaaactggttcacatccgtgatccgataccgcgtaaacgcatccaccaccaaacggcgatcatccaaaggcgtcacttccagcgggtcaacatcgcggcttaaaatccgatcatcatagaagacaacttcttgaataaagggaattttaaacgccaaaccaggatcttctttcaccgcaaccacgcggccaaattgcaaaaccagtgctttattccgctcatcaacgatgaacacggttgacatgaacagcgcgatcaaaacgacagcgactggaacaataaaacttaacttacgcattagtttttctcctgacgcaattggttcaatggcagatagggcaccacgccctgaccgccggtttgatcatcgatgatcaccttctcaagcccacctaatacctcttccatggtttccagatacagccgtttgcgggttacctcgggggctttgctatattcttccaaaaccgcactaaagcggctggcttcacccgtcgcctcattcaccacgcgcgcacggtacccttcggcttcttcaaagacctgcgcagattcaccacgggcttgcgccaagacgcggttcgcataagcatccgcttgcttttccagacggtcgcgctcttgctcggcggcttgcaccgcgcggaacgcatcaatcacctgttcgggcgggtctgcccgatcaaagttcacccgcaccaagctgacgccgctgccgtaactgtcgagcgtttcttgaatgagggtttcaagatttgcagcgatcaaaccccggtcacggttcaggatcggggccaattcagattgggcaataatttcgcgcatcgcagattcagacacggcgcgaatggtcatttgtggatcgcgcaagttgaacaaatattttgcgggatcgctaatattccagaccacctcaaaatcaatatccacgatattctcatcgcgcgtcagcatcaaacccgcgtcactgccgcggccacccacgccaatgctttcattttgttctcgggttaccggcaacacttcacgggtgactagtggccaaggggcaaagttcaaacccggattgccaatagaggaaaacttgccaaggaataactcaaccgacttttcttccggcttcacagtgtaaaaactggaaaaactccaaaacgccaccaataaagccgcgatcaataaatagccgctgcggcccatgccggggccggattgctgcgaagatccgttggatcctccgcccgaaccgccgcccaataaaacctttagctgctcttggcctttgcgcagcatatcatccaattctggcggcatttgcgggccatcattgcgcggacgacgatcgtcgccgccgttgccattgggacggttgcgatcatcattatcaccgccgccgccgccgcggccccatgggccacctgagtttccagtcattaaattcgttcccttatttgaccttgcatatttgtgaatttccccatctctttacatgggcgtatttttttcaatttcaaccgctgcgtgatggatggcgcatcgtaaccagttcttcggccaatgtcggatgaaccgccacggtttgatcaaaatccgctttcgtcgcccccattttgatcgcaatcgcaaccatttgaatcatttcaccggccccgggggcgatgatatgacagcctaaaaccttttgggaagcttgatcgacaaccaatttcataaaggttttttcgtcttgttgcgcaaagccttggcgcatcggcttgaactgcgtggtgtaaatatcaaccgggcctttggcacgggcctctgcctcgctctgcccgat

SEQ ID NO: 1441 - DNA, 4000 bp, Escherichia coli
  misc_feature (617)..(617): n is a, c, g, or t
  misc_feature (1881)..(1881): n is a, c, g, or t
  misc_feature (1986)..(1986): n is a, c, g, or t
  misc_feature (3123)..(3123): n is a, c, g, or t
ggacttcaccattcgagcaatcacccccggtgtaaagttaatccactgctacaatccgctaaacgaccttttcaacctcgaagtcagaatggattttggttttgatcatgagccgaaactatcttttgccaagcgcatgcttgatcgagcaggtgcgggcgaaattgaatctgatgctctcaaaattgagtggtacaaattaggcacagattttggcttcggcattcaggagcatttctcaaattttttcattaatggactcgatgaaaactttgaggaatccttagaccttactggaatccacctactggatcctaaaactttagatagtgtttgggcacaaactaaagacataattctctccgagcgtgatgatgagacaaaagaccctaattcactgacgcatgcactcgctcactttcaccgatacggagacaaatctcgctacctcaaacgctcctcggataatgaattaatggcatcttctactgttgagctcaaaaaaatactcaaaaaagccatctttgctccccgttcgattctttattttgggccgaaatctcctgaccaagttgaaaacctaatccgtaagtcttttcttggtaaagcaccggagncaacctcgaatgacaacacacctgaccgttcaattgaccctcaaaaaaaccaagtttatttcctccataaagaaatggctcaggcacaggttcgtttggaattctcatcaggtttacttgatgaaaacctcacaccttcagttcaactttttaatgaatactttggcggaggtatggctggacttgtttttcaggaactgcgtgaggcaagggctttggcttactcagcttgggctcgtttttttactccttccagacctaacgaagaaaatattttagttggttcaataggttgccaagcagataaaacaatcgatgcggttcatgctttcattgatctgttaaaaaaaatgcccattagtgaaacccgttggtcttcagctcaaacatccttgctaagtacctatcggacaaaccccatccattcccgtgcgattccaggattcgtttatgatgtcaatgccctcggtttagatttggatccgagaaaaagtagatacaaagctcttcagaattctaagattgagaattttacagacttttaccaagaaaaggtacagtcccgtccaatcttgttttctatcgtaggagattctaacagaatcaatataaacgatttggcaaaactcgggaaagtgactgaaatcaaacctgaacaactcttcaggcgctaggaggcttttcctgggctcccctagtgctgtcaggcataccatcagatagtggtgtgattgggctaacttcttcttcgcgacccaggaaagtattttcactttccgaatttttctttatttgttcagaaagcccgatctctcttttatcagattgacttgttgcatctaaaataacttcagagtccggaagatccatcacattacgaaaaaaattaaaaacttttaagctttctgactgcctttcctcagaattattcagtctcaaagaaagttgttgggttcttccattttgtaattctgtcatcgtacagctacaacccgacttttgattagagcccggaaactcgatcacatcaattcttcccattggagaaaattcgctttgatctttggaagtctccatgtacagggacactctccgtttttcaaaattaaacatcctcaaacattttacctcgtgagacttcgtttgcttaagcatagactccattccttggcgcaatctatcgataatctgaacagcacgattcatatctcccatattcgtaaaaactccatgtttttagcaacagaaatttgacttatcacanaggtctccaggaattactcatgtctagttaaaataattgtaaaatcgagtcttccgtaaacattatatcggaattgacggtttctattctcatatgtattttgantgcttgcttgcgggtcggtagctcaatcggtagagcagtggccttttaagccattggttccgggttcgagtcccggccggcctaccaagcggaacatttcccaccccaagcaaaaactactgatcactcaaatattttgatgtaagttttttcaccgtttgccagtcgatctttccacttcccaaggtgggaattaccgaaacagttagaaattgtttagggatccataaattgggtagacctatctgtttgagtttctgcttaatttcttcagcattgatttcaaaagtactaagaacaatcattcgctcccctttttgttcatctcggactgcagagacaacaagcttaacctcttgatctgatgtcatgtctaatgcgttcataatctcatcctctattttagagtgaggaaccatttctccacctatcttggagaaccttgataccctaccctcaatccaaagaaaaccatcacgatcaactcgacccaagtcaccagtatgaaaccaaccatctggagtgatagtcttattggataaatcggtatcctcccaatatccgttaaaaatatttggccccctaaaacaaagaattccaccacgatcagaatctgttatttgaccattttctgggtcaagagtacgacattcaattccaccaagtaaacgccccacagatccttttcttttttgatttccaggaagattaaatgaaactgcaggagaagtttctgtaagcccatatccctcaagatattcgcaatcaccgaaatcttcccactgcttacataatgcaccaggacttttttctgctccagatacaacatatttgacgcttagaagatcattcttttgggctgttttcaaatatcctcgcaaaaaagtgggagtgcctagtaaaacttcaactttctcctctctaattgccctaatacttgatttactatctaaaggattgggtgtgcatacgagtactaggccacgcaaggtcgaaaaaatcataccaacagaaagaccaaaactgtgaaataaagggaggttaagtaaaactctcgttttttcctcaaataattgtaaagcaaacatttgtttacaattggctaatatatttgagtgacttaatgggactcctttnggtttccccgcactgccactagtaaaaagaaggagggcagtttccgtatttccattagtggaaatattgaagtgggatcgtactctcttgggcatgatcaaaaccgttgtgtagatcaataaaaccaaccatcgttttgcccgaagtttttttaagatttcatcaatcaatatgcattgattagtccagggaaattccgggaccttttttttcattttcgaagcggtaattaatgtttgtaaaccaatacgctcaataatctcctgattaatttctctccctaatgtaaaattaagattaactggtactcgcccgctgaggagtaatgaaaggttcgccagaatccccccgaaaccaggcggcagaatcactccaaccagtttttctgattcaagccttttatttaaataagaacaaaagagtagggaaagactcagggttacacctctactgaacttcattttggggttgagaccataatcgcaaataaattcctgaaatggtttttttctcagagaatcaaaaagggcacttcctaaatgatgatgttgtgaaatagacacaagaaaaccctaggacaaatgaattggaattgccaaccagattgaggatgagatgtagtttcttatcgaggaaagggcttggtaactatcccttgcacccttctgctcgaagtactatttatagataagcatcaatttttttataaatatgggagagaataatattttgatttacgatactacccttagggatggttctcaggccgagggtgtatcgttcacggtcgcatccaagctcagggttgcacaaaaactggatcagtttggtgtcgattacattgagggcggatggccagggagcaatcctcgagata

SEQ ID NO: 1442 - DNA, 4000 bp, Escherichia coli
  misc_feature (27)..(27): n is a, c, g, or t
  misc_feature (1447)..(1447): n is a, c, g, or t
  misc_feature (1450)..(1450): n is a, c, g, or t
  misc_feature (1463)..(1463): n is a, c, g, or t
  misc_feature (1468)..(1468): n is a, c, g, or t
  misc_feature (1483)..(1483): n is a, c, g, or t
  misc_feature (1504)..(1504): n is a, c, g, or t
  misc_feature (1507)..(1507): n is a, c, g, or t
  misc_feature (1534)..(1534): n is a, c, g, or t
  misc_feature (1567)..(1567): n is a, c, g, or t
  misc_feature (1571)..(1571): n is a, c, g, or t
  misc_feature (1662)..(1662): n is a, c, g, or t
  misc_feature (1681)..(1681): n is a, c, g, or t
  misc_feature (1689)..(1689): n is a, c, g, or t
  misc_feature (1704)..(1704): n is a, c, g, or t
  misc_feature (1977)..(1977): n is a, c, g, or t
  misc_feature (1986)..(1986): n is a, c, g, or t
gcaaaatcatccggactaaaccctttntcagtaagtaaactcactgccaatgcatcgcccatcgcaagtgccactgtggtggacgaggtaggtgctaaattatgcggacaagcttctttttcaacgccgacatcaagatgaacgttacagacttcgccaattgaagagtgggcattgccagtcatgccgataatcggcacaccaagtcgctggattactggcaccaaggtcataatttcatctgattcacccgaataagaaatggtgatgaccacatcaccttcagtaatcatgcctaaatcaccatgacctgcctcacctgggtgcactgcaaaagatggggtgcctgtggaagcgaacgtggcagcaattttattgccaatgtggcctgatttacccatgccaataaggataactttgccagtgcaattctgaatcagttgacaggcatcaacaaaactttgatcaagactttcggccaacttggttactgcttgggcttcggttaagataacgtccttggcagattgtatgagtgagtttgacatgggttctaaaattagttgatataatgttcgattttatcgataactaggatcaatgggcaaggaaaaaatcaaaattttatttgtgtgcatgggtaatatttgtcgatcacccacagccgagggcacatttagatcgcaagttaaaaaacaaggtgtcaaagatttatttgaaatcgactctgccggtacacatgcttatcatattaatgaggcaccagattctcgctcgcaattatcagcacgtaagtttggcgtggatttgtctgatcaacgtgggcgccaagtgcatgaatccgatttttatcattacgattatatttttgccatggatgcctcaaatttagcagatcttgagtttatctgtccagaagaatatcaacataagctttctttgatgttagacaatatcccaaataataacggcagaagtgtacccgatccttattttgaagggcgctttgacgaggtgtttgagatgctgaatcgtgccagtgattttttgttgcaaagtttgttgaaaaaagtctaaaacttattgacacggaccctccttacacagtataatttgcctctttattgcccttgggaaaacagcgggtaatttttaagacttaattaattaagagaatttcggagaaattgtatttatgtcaacgattaaccaattggtgcgtagtccacgtaaaaagaaagttgttaaaagtggtgtgccagcattagacagctgtcctcaaaaacgtggtgtttgtactcgcgtatacacaaccacacctaaaaaacctaactcagcattacgtaaagttgctcgtgttagattaaccaacgcagctgaagtaacaacttacattggtggtgaaggtcataacttacaagagcactcagtgattcttattcgtggnggncgtgttaaagatntaccnggtgttcgttaccanacagtacgtggtgcactaganacngttggtgttgacggcagaatgcaaggncgttctaagtacggtactaagaaacctaagaantaanaacaatttaaaataagagaaacactatgagaagaagatccgcccctaaaagagaaatcctaccagacccgaagtttggtgatttagtattngctaagtttgtaaacatcntaatgttngatggtaaaaaatcngtagctgagaagatcgtttatgatgcgttagatacaattgaagctaaaggtaatgctgagccaatcgaaactttcaagcaagcgttagacaacatcggtcctcaagttgaaatcaaatctcgtcgtgttggtggttcaacttaccaagtcccaattgaagttaggtctgagcgtaaggtcgcactagccatgcgttggattattgaagcatcacgcaagcgtggtgaaaaaggcatgaagcttagattagcaggcgaagtattggacgcggtncaaaatcgnggtactgcatttaagaagaaagaagacactcatagaatggcagaagcaaataaagcgtttgctcattttcgctggtagtcgaatatttaaggatttaagaaaatggcaagaaatcacccacttagtcgctatcgcaatgttggcatcatggcacacattgatgctggaaaaacaacaactactgagcgtatcttattgtacacaggccgtactcacaaaattggtgaagtgcatgacggtggtgcaaccatggactggatggaacaagagcaagaacgtggtattaccattacttctgcagcaacaacctgtatgtggaaaggtatggacgatcagttcgatgagcaccgtattaacattattgatactccgggacacgttgacttcaccattgaagttgagcgctcattaaaagtattagacggcgcatgtgccgtattttgtgcagtgggcggtgtagagcctcaatctgaaaccgtatggcgtcaagctaacaaatacaacgttccaagaattggttttgttaataagatggatcgtgcaggcgcagatttcttacgtgtttgtgagcaagttaaaacacgcctaggtggccacccagtgccgatgcaaattgctattggtgctgaagaagactttaaaggtgtggttgatttaattaccatgaaagccatttattggaatgaagaagaccagggtgcgacttacgaaactaaagatattccagcagacctacaagacttagcagacgaaaagcgtgaattcatgattgaatctgctgcagaagctaatgacgacctaatggaaaaataccttgaagaaggtgagttgagcgatgatgaaatcaaagagggcatccgtttacaaaccattaaaagtgaaattattccaatgttctgtggttctgcctttaagaacaaaggcgtacaagcggtattggatgctatgattatatatatgccgtctccactagatgtggaatctattactggcatcttggatgacaaagatgaaaccgtcgcaccaagaaacgcagatgataatgagccatttgcagcattagcgtttaagattgcaactgacccatttgtaggcacattaacattcttccgcgtgtactcaggcgtcctaaaagcaggtgattttgtatttaattcatccaaaggaaaaaaagaacgcattggccgtatggtgcagatgcactcaaacgagcgtgatgaaattaaagaagtacgtgctggtgatattgctgccgcgattggccttaaagacgtaaccacgggtgacactttatgtgaccttaaagagaaaattgttcttgaaagaatggaattccctgagccggttatcgcattagcagttgagcctaaaaccaaagcagaccaagagaaaatgggaattgctttaggtaagctggccgctgaagatccgtcatttagggtatcaagtgatgaagagtcgggccagacaattattgcaggcatgggcgagcttcacttagacattattgttgatcgtatgattcgtgaattcgacgttgagtgtaacgttggtgcgccacaagtgtcttaccgtgaagccattacaacattagttgagcatcaacacaagtttgctaagcaatcgggtggtcgtggtcagtacggacatgtgtatttacgcattgagcctcaagagccaggtgctggctatgaattcgttgacgaaattaaaggtggtgtaattcctaaggaatacattcctgcggttaacaagggtgttcaagagcaaatggaaaacggtgtattggctggtttcccactagtagatattaaagtaacggtttatgatggttcttaccatgatgttgactcgaacgaaatggcgtttaagattgccgcttctaagtgtttagcagaaggcgtaagaatggccaatcctcaattgctggaacctatgatggcagtagaaattgtcacccctgaagattacatgggtgatgtaatgggtgacttaaacagacgacgtggtttag

SEQ ID NO: 1443 - DNA, 4000 bp, Escherichia coli
  misc_feature (1)..(2): n is a, c, g, or t
  misc_feature (4)..(4): n is a, c, g, or t
  misc_feature (6)..(10): n is a, c, g, or t
  misc_feature (13)..(14): n is a, c, g, or t
  misc_feature (16)..(16): n is a, c, g, or t
  misc_feature (18)..(19): n is a, c, g, or t
  misc_feature (21)..(22): n is a, c, g, or t
  misc_feature (24)..(26): n is a, c, g, or t
  misc_feature (28)..(28): n is a, c, g, or t
  misc_feature (30)..(34): n is a, c, g, or t
  misc_feature (39)..(41): n is a, c, g, or t
  misc_feature (43)..(44): n is a, c, g, or t
  misc_feature (46)..(47): n is a, c, g, or t
  misc_feature (50)..(50): n is a, c, g, or t
  misc_feature (52)..(54): n is a, c, g, or t
  misc_feature (57)..(57): n is a, c, g, or t
  misc_feature (63)..(66): n is a, c, g, or t
  misc_feature (68)..(72): n is a, c, g, or t
  misc_feature (74)..(77): n is a, c, g, or t
  misc_feature (81)..(83): n is a, c, g, or t
  misc_feature (85)..(86): n is a, c, g, or t
  misc_feature (88)..(92): n is a, c, g, or t
  misc_feature (94)..(95): n is a, c, g, or t
  misc_feature (97)..(97): n is a, c, g, or t
  misc_feature (99)..(104): n is a, c, g, or t
  misc_feature (106)..(114): n is a, c, g, or t
  misc_feature (116)..(116): n is a, c, g, or t
  misc_feature (118)..(119): n is a, c, g, or t
  misc_feature (121)..(122): n is a, c, g, or t
  misc_feature (124)..(124): n is a, c, g, or t
  misc_feature (127)..(127): n is a, c, g, or t
  misc_feature (130)..(131): n is a, c, g, or t
  misc_feature (134)..(137): n is a, c, g, or t
  misc_feature (140)..(141): n is a, c, g, or t
  misc_feature (143)..(144): n is a, c, g, or t
  misc_feature (146)..(149): n is a, c, g, or t
  misc_feature (151)..(152): n is a, c, g, or t
  misc_feature (154)..(162): n is a, c, g, or t
  misc_feature (164)..(164): n is a, c, g, or t
  misc_feature (166)..(167): n is a, c, g, or t
  misc_feature (169)..(173): n is a, c, g, or t
  misc_feature (177)..(178): n is a, c, g, or t
  misc_feature (180)..(180): n is a, c, g, or t
  misc_feature (182)..(183): n is a, c, g, or t
  misc_feature (185)..(188): n is a, c, g, or t
  misc_feature (190)..(190): n is a, c, g, or t
  misc_feature (192)..(209): n is a, c, g, or t
  misc_feature (212)..(214): n is a, c, g, or t
  misc_feature (217)..(217): n is a, c, g, or t
  misc_feature (219)..(220): n is a, c, g, or t
  misc_feature (222)..(227): n is a, c, g, or t
  misc_feature (229)..(230): n is a, c, g, or t
  misc_feature (232)..(233): n is a, c, g, or t
  misc_feature (238)..(240): n is a, c, g, or t
  misc_feature (244)..(248): n is a, c, g, or t
  misc_feature (251)..(251): n is a, c, g, or t
  misc_feature (253)..(253): n is a, c, g, or t
  misc_feature (256)..(259): n is a, c, g, or t
  misc_feature (264)..(264): n is a, c, g, or t
  misc_feature (266)..(266): n is a, c, g, or t
  misc_feature (270)..(270): n is a, c, g, or t
  misc_feature (273)..(274): n is a, c, g, or t
  misc_feature (277)..(277): n is a, c, g, or t
  misc_feature (279)..(280): n is a, c, g, or t
  misc_feature (282)..(282): n is a, c, g, or t
  misc_feature (285)..(285): n is a, c, g, or t
  misc_feature (287)..(291): n is a, c, g, or t
  misc_feature (297)..(297): n is a, c, g, or t
  misc_feature (300)..(300): n is a, c, g, or t
  misc_feature (303)..(304): n is a, c, g, or t
  misc_feature (306)..(306): n is a, c, g, or t
  misc_feature (309)..(309): n is a, c, g, or t
  misc_feature (312)..(313): n is a, c, g, or t
  misc_feature (315)..(316): n is a, c, g, or t
  misc_feature (318)..(320): n is a, c, g, or t
  misc_feature (324)..(325): n is a, c, g, or t
  misc_feature (327)..(328): n is a, c, g, or t
  misc_feature (330)..(334): n is a, c, g, or t
  misc_feature (336)..(340): n is a, c, g, or t
  misc_feature (342)..(343): n is a, c, g, or t
  misc_feature (345)..(345): n is a, c, g, or t
  misc_feature (347)..(349): n is a, c, g, or t
  misc_feature (351)..(351): n is a, c, g, or t
  misc_feature (353)..(355): n is a, c, g, or t
  misc_feature (357)..(357): n is a, c, g, or t
  misc_feature (359)..(362): n is a, c, g, or t
  misc_feature (364)..(369): n is a, c, g, or t
  misc_feature (371)..(371): n is a, c, g, or t
  misc_feature (373)..(373): n is a, c, g, or t
  misc_feature (375)..(375): n is a, c, g, or t
  misc_feature (377)..(377): n is a, c, g, or t
  misc_feature (379)..(379): n is a, c, g, or t
  misc_feature (381)..(381): n is a, c, g, or t
  misc_feature (383)..(383): n is a, c, g, or t
  misc_feature (385)..(385): n is a, c, g, or t
  misc_feature (387)..(387): n is a, c, g, or t
  misc_feature (389)..(390): n is a, c, g, or t
  misc_feature (392)..(399): n is a, c, g, or t
  misc_feature (401)..(401): n is a, c, g, or t
  misc_feature (403)..(405): n is a, c, g, or t
  misc_feature (407)..(409): n is a, c, g, or t
  misc_feature (412)..(415): n is a, c, g, or t
  misc_feature (417)..(417): n is a, c, g, or t
  misc_feature (419)..(422): n is a, c, g, or t
  misc_feature (424)..(427): n is a, c, g, or t
  misc_feature (430)..(430): n is a, c, g, or t
  misc_feature (432)..(438): n is a, c, g, or t
  misc_feature (440)..(444): n is a, c, g, or t
  misc_feature (446)..(449): n is a, c, g, or t
  misc_feature (451)..(451): n is a, c, g, or t
  misc_feature (454)..(454): n is a, c, g, or t
  misc_feature (457)..(460): n is a, c, g, or t
  misc_feature (463)..(466): n is a, c, g, or t
  misc_feature (468)..(472): n is a, c, g, or t
  misc_feature (474)..(476): n is a, c, g, or t
  misc_feature (478)..(478): n is a, c, g, or t
  misc_feature (481)..(484): n is a, c, g, or t
  misc_feature (488)..(488): n is a, c, g, or t
  misc_feature (491)..(494): n is a, c, g, or t
  misc_feature (496)..(505): n is a, c, g, or t
  misc_feature (508)..(509): n is a, c, g, or t
  misc_feature (511)..(519): n is a, c, g, or t
  misc_feature (521)..(522): n is a, c, g, or t
  misc_feature (524)..(528): n is a, c, g, or t
  misc_feature (530)..(534): n is a, c, g, or t
  misc_feature (536)..(537): n is a, c, g, or t
  misc_feature (540)..(542): n is a, c, g, or t
  misc_feature (546)..(549): n is a, c, g, or t
  misc_feature (551)..(551): n is a, c, g, or t
  misc_feature (554)..(555): n is a, c, g, or t
  misc_feature (557)..(558): n is a, c, g, or t
  misc_feature (560)..(560): n is a, c, g, or t
  misc_feature (565)..(572): n is a, c, g, or t
  misc_feature (574)..(574): n is a, c, g, or t
  misc_feature (576)..(584): n is a, c, g, or t
  misc_feature (586)..(586): n is a, c, g, or t
  misc_feature (588)..(590): n is a, c, g, or t
  misc_feature (592)..(594): n is a, c, g, or t
  misc_feature (597)..(599): n is a, c, g, or t
  misc_feature (601)..(602): n is a, c, g, or t
  misc_feature (604)..(605): n is a, c, g, or t
  misc_feature (607)..(608): n is a, c, g, or t
  misc_feature (610)..(611): n is a, c, g, or t
  misc_feature (614)..(614): n is a, c, g, or t
  misc_feature (616)..(618): n is a, c, g, or t
  misc_feature (620)..(624): n is a, c, g, or t
  misc_feature (627)..(627): n is a, c, g, or t
  misc_feature (629)..(630): n is a, c, g, or t
  misc_feature (633)..(633): n is a, c, g, or t
  misc_feature (635)..(636): n is a, c, g, or t
  misc_feature (638)..(652): n is a, c, g, or t
  misc_feature (654)..(655): n is a, c, g, or t
  misc_feature (657)..(657): n is a, c, g, or t
  misc_feature (660)..(666): n is a, c, g, or t
  misc_feature (668)..(670): n is a, c, g, or t
  misc_feature (672)..(672): n is a, c, g, or t
  misc_feature (675)..(675): n is a, c, g, or t
  misc_feature (677)..(680): n is a, c, g, or t
  misc_feature (682)..(684): n is a, c, g, or t
  misc_feature (686)..(686): n is a, c, g, or t
  misc_feature (688)..(690): n is a, c, g, or t
  misc_feature (693)..(693): n is a, c, g, or t
  misc_feature (695)..(695): n is a, c, g, or t
  misc_feature (701)..(701): n is a, c, g, or t
  misc_feature (703)..(705): n is a, c, g, or t
  misc_feature (707)..(709): n is a, c, g, or t
  misc_feature (714)..(716): n is a, c, g, or t
  misc_feature (718)..(724): n is a, c, g, or t
  misc_feature (727)..(730): n is a, c, g, or t
  misc_feature (732)..(740): n is a, c, g, or t
  misc_feature (742)..(746): n is a, c, g, or t
  misc_feature (748)..(749): n is a, c, g, or t
  misc_feature (751)..(755): n is a, c, g, or t
  misc_feature (757)..(759): n is a, c, g, or t
  misc_feature (761)..(763): n is a, c, g, or t
  misc_feature (765)..(769): n is a, c, g, or t
  misc_feature (771)..(776): n is a, c, g, or t
  misc_feature (779)..(779): n is a, c, g, or t
  misc_feature (781)..(782): n is a, c, g, or t
  misc_feature (785)..(785): n is a, c, g, or t
  misc_feature (787)..(788): n is a, c, g, or t
  misc_feature (790)..(798): n is a, c, g, or t
  misc_feature (800)..(800): n is a, c, g, or t
  misc_feature (802)..(803): n is a, c, g, or t
  misc_feature (805)..(806): n is a, c, g, or t
  misc_feature (808)..(811): n is a, c, g, or t
  misc_feature (814)..(817): n is a, c, g, or t
  misc_feature (819)..(825): n is a, c, g, or t
  misc_feature (828)..(831): n is a, c, g, or t
  misc_feature (834)..(839): n is a, c, g, or t
  misc_feature (843)..(846): n is a, c, g, or t
  misc_feature (848)..(851): n is a, c, g, or t
  misc_feature (853)..(857): n is a, c, g, or t
  misc_feature (859)..(864): n is a, c, g, or t
  misc_feature (867)..(867): n is a, c, g, or t
  misc_feature (869)..(876): n is a, c, g, or t
  misc_feature (879)..(879): n is a, c, g, or t
  misc_feature (881)..(883): n is a, c, g, or t
  misc_feature (885)..(885): n is a, c, g, or t
  misc_feature (887)..(887): n is a, c, g, or t
  misc_feature (890)..(892): n is a, c, g, or t
  misc_feature (894)..(898): n is a, c, g, or t
  misc_feature (901)..(901): n is a, c, g, or t
  misc_feature (903)..(904): n is a, c, g, or t
  misc_feature (907)..(908): n is a, c, g, or t
  misc_feature (910)..(910): n is a, c, g, or t
  misc_feature (913)..(915): n is a, c, g, or t
  misc_feature (918)..(918): n is a, c, g, or t
  misc_feature (921)..(922): n is a, c, g, or t
  misc_feature (924)..(924): n is a, c, g, or t
  misc_feature (926)..(933): n is a, c, g, or t
  misc_feature (936)..(939): n is a, c, g, or t
  misc_feature (941)..(941): n is a, c, g, or t
  misc_feature (943)..(946): n is a, c, g, or t
  misc_feature (948)..(948): n is a, c, g, or t
  misc_feature (950)..(966): n is a, c, g, or t
  misc_feature (969)..(974): n is a, c, g, or t
  misc_feature (976)..(978): n is a, c, g, or t
  misc_feature (980)..(987): n is a, c, g, or t
  misc_feature (989)..(991): n is a, c, g, or t
  misc_feature (993)..(993): n is a, c, g, or t
  misc_feature (996)..(996): n is a, c, g, or t
  misc_feature (998)..(999): n is a, c, g, or t
  misc_feature (1001)..(1001): n is a, c, g, or t
  misc_feature (1003)..(1003): n is a, c, g, or t
  misc_feature (1005)..(1009): n is a, c, g, or t
  misc_feature (1012)..(1012): n is a, c, g, or t
  misc_feature (1014)..(1017): n is a, c, g, or t
  misc_feature (1019)..(1021): n is a, c, g, or t
  misc_feature (1023)..(1029): n is a, c, g, or t
  misc_feature (1031)..(1031): n is a, c, g, or t
  misc_feature (1035)..(1035): n is a, c, g, or t
  misc_feature (1037)..(1038): n is a, c, g, or t
  misc_feature (1041)..(1043): n is a, c, g, or t
  misc_feature (1045)..(1045): n is a, c, g, or t
  misc_feature (1047)..(1048): n is a, c, g, or t
  misc_feature (1051)..(1051): n is a, c, g, or t
  misc_feature (1053)..(1054): n is a, c, g, or t
  misc_feature (1057)..(1062): n is a, c, g, or t
  misc_feature (1064)..(1066): n is a, c, g, or t
  misc_feature (1068)..(1070): n is a, c, g, or t
  misc_feature (1072)..(1072): n is a, c, g, or t
  misc_feature (1074)..(1076): n is a, c, g, or t
  misc_feature (1078)..(1088): n is a, c, g, or t
  misc_feature (1090)..(1090): n is a, c, g, or t
  misc_feature (1092)..(1093): n is a, c, g, or t
  misc_feature (1095)..(1095): n is a, c, g, or t
  misc_feature (1097)..(1098): n is a, c, g, or t
  misc_feature (1100)..(1100): n is a, c, g, or t
  misc_feature (1103)..(1113): n is a, c, g, or t
  misc_feature (1116)..(1116): n is a, c, g, or t
  misc_feature (1118)..(1119): n is a, c, g, or t
  misc_feature (1124)..(1128): n is a, c, g, or t
  misc_feature (1130)..(1132): n is a, c, g, or t
  misc_feature (1137)..(1137): n is a, c, g, or t
  misc_feature (1140)..(1140): n is a, c, g, or t
  misc_feature (1142)..(1143): n is a, c, g, or t
  misc_feature (1145)..(1146): n is a, c, g, or t
  misc_feature (1148)..(1150): n is a, c, g, or t
  misc_feature (1152)..(1158): n is a, c, g, or t
  misc_feature (1160)..(1164): n is a, c, g, or t
  misc_feature (1167)..(1170): n is a, c, g, or t
  misc_feature (1172)..(1174): n is a, c, g, or t
  misc_feature (1180)..(1180): n is a, c, g, or t
  misc_feature (1183)..(1184): n is a, c, g, or t
  misc_feature (1187)..(1187): n is a, c, g, or t
  misc_feature (1189)..(1195): n is a, c, g, or t
  misc_feature (1199)..(1199): n is a, c, g, or t
  misc_feature (1203)..(1203): n is a, c, g, or t
  misc_feature (1205)..(1205): n is a, c, g, or t
  misc_feature (1207)..(1207): n is a, c, g, or t
  misc_feature (1210)..(1210): n is a, c, g, or t
  misc_feature (1215)..(1215): n is a, c, g, or t
  misc_feature (1221)..(1221): n is a, c, g, or t
  misc_feature (1224)..(1224): n is a, c, g, or t
  misc_feature (1229)..(1230): n is a, c, g, or t
  misc_feature (1234)..(1235): n is a, c, g, or t
  misc_feature (1243)..(1245): n is a, c, g, or t
  misc_feature (1249)..(1250): n is a, c, g, or t
  misc_feature (1261)..(1261): n is a, c, g, or t
  misc_feature (1264)..(1264): n is a, c, g, or t
  misc_feature (1267)..(1267): n is a, c, g, or t
  misc_feature (1269)..(1269): n is a, c, g, or t
  misc_feature (1271)..(1271): n is a, c, g, or t
  misc_feature (1274)..(1274): n is a, c, g, or t
  misc_feature (1277)..(1278): n is a, c, g, or t
  misc_feature (1280)..(1280): n is a, c, g, or t
  misc_feature (1301)..(1301): n is a, c, g, or t
  misc_feature (1303)..(1304): n is a, c, g, or t
  misc_feature (1306)..(1306): n is a, c, g, or t
  misc_feature (1308)..(1310): n is a, c, g, or t
  misc_feature (1312)..(1313): n is a, c, g, or t
  misc_feature (1320)..(1320): n is a, c, g, or t
  misc_feature (1322)..(1323): n is a, c, g, or t
  misc_feature (1325)..(1326): n is a, c, g, or t
  misc_feature (1331)..(1331): n is a, c, g, or t
  misc_feature (1335)..(1335): n is a, c, g, or t
  misc_feature (1337)..(1337): n is a, c, g, or t
  misc_feature (1340)..(1342): n is a, c, g, or t
  misc_feature (1345)..(1345): n is a, c, g, or t
  misc_feature (1347)..(1348): n is a, c, g, or t
  misc_feature (1352)..(1352): n is a, c, g, or t
  misc_feature (1355)..(1355): n is a, c, g, or t
  misc_feature (1357)..(1357): n is a, c, g, or t
  misc_feature (1364)..(1364): n is a, c, g, or t
  misc_feature (1369)..(1369): n is a, c, g, or t
  misc_feature (1380)..(1380): n is a, c, g, or t
  misc_feature (1382)..(1383): n is a, c, g, or t
  misc_feature (1385)..(1387): n is a, c, g, or t
  misc_feature (1389)..(1389): n is a, c, g, or t
  misc_feature (1391)..(1391): n is a, c, g, or t
  misc_feature (1394)..(1396): n is a, c, g, or t
  misc_feature (1398)..(1401): n is a, c, g, or t
  misc_feature (1403)..(1404): n is a, c, g, or t
  misc_feature (1408)..(1409): n is a, c, g, or t
  misc_feature (1411)..(1416): n is a, c, g, or t
  misc_feature (1420)..(1421): n is a, c, g, or t
  misc_feature (1423)..(1424): n is a, c, g, or t
  misc_feature (1429)..(1429): n is a, c, g, or t
  misc_feature (1438)..(1443): n is a, c, g, or t
  misc_feature (1446)..(1447): n is a, c, g, or t
  misc_feature (1449)..(1457): n is a, c, g, or t
  misc_feature (1461)..(1462): n is a, c, g, or t
  misc_feature (1464)..(1465): n is a, c, g, or t
  misc_feature (1467)..(1467): n is a, c, g, or t
  misc_feature (1470)..(1474): n is a, c, g, or t
  misc_feature (1476)..(1478): n is a, c, g, or t
  misc_feature (1480)..(1482): n is a, c, g, or t
  misc_feature (1484)..(1485): n is a, c, g, or t
  misc_feature (1488)..(1498): n is a, c, g, or t
  misc_feature (1500)..(1501): n is a, c, g, or t
  misc_feature (1504)..(1515): n is a, c, g, or t
  misc_feature (1517)..(1517): n is a, c, g, or t
  misc_feature (1520)..(1522): n is a, c, g, or t
  misc_feature (1525)..(1525): n is a, c, g, or t
  misc_feature (1528)..(1529): n is a, c, g, or t
  misc_feature (1532)..(1533): n is a, c, g, or t
  misc_feature (1535)..(1537): n is a, c, g, or t
  misc_feature (1539)..(1540): n is a, c, g, or t
  misc_feature (1542)..(1544): n is a, c, g, or t
  misc_feature (1547)..(1549): n is a, c, g, or t
  misc_feature (1552)..(1553): n is a, c, g, or t
  misc_feature (1556)..(1558): n is a, c, g, or t
  misc_feature (1562)..(1567): n is a, c, g, or t
  misc_feature (1570)..(1571): n is a, c, g, or t
  misc_feature (1574)..(1575): n is a, c, g, or t
  misc_feature (1577)..(1577): n is a, c, g, or t
  misc_feature (1583)..(1585): n is a, c, g, or t
  misc_feature (1587)..(1587): n is a, c, g, or t
  misc_feature (1589)..(1589): n is a, c, g, or t
  misc_feature (1594)..(1594): n is a, c, g, or t
  misc_feature (1596)..(1597): n is a, c, g, or t
  misc_feature (1601)..(1602): n is a, c, g, or t
  misc_feature (1605)..(1607): n is a, c, g, or t
  misc_feature (1609)..(1609): n is a, c, g, or t
  misc_feature (1611)..(1611): n is a, c, g, or t
  misc_feature (1613)..(1614): n is a, c, g, or t
  misc_feature (1616)..(1616): n is a, c, g, or t
  misc_feature (1618)..(1620): n is a, c, g, or t
  misc_feature (1623)..(1623): n is a, c, g, or t
  misc_feature (1642)..(1642): n is a, c, g, or t
  misc_feature (1647)..(1647): n is a, c, g, or t
  misc_feature (1659)..(1659): n is a, c, g, or t
  misc_feature (1662)..(1662): n is a, c, g, or t
  misc_feature (1750)..(1750): n is a, c, g, or t
  misc_feature (1978)..(1978): n is a, c, g, or t
  misc_feature (1984)..(1985): n is a, c, g, or t
  misc_feature (1987)..(1987): n is a, c, g, or t
  misc_feature (2033)..(2033): n is a, c, g, or t
  misc_feature (2066)..(2066): n is a, c, g, or t
  misc_feature (2834)..(2834): n is a, c, g, or t
nngntnnnnntgnnantnntnnannncnannnnntcgtnnncnncnntcncnnnccnaaaccnnnncnnnnncnnnngccnnngnncnnnnncnnantnnnnnngnnnnnnnnncnanngnnancgnaanncannnncannannannnntnncnnnnnnnnntntnngnnnnnggannangnnannnngntnnnnnnnnnnnnnnnnnnctnnnacncnnannnnnncnncnncgccnnngccnnnnncantnacnnnnacgcngncgcnggnnatngnnangcngnnnnnggtcanggncanngnganagnntnnannnccanngnnannnnngnnnnngnnanannnanannngnannnncnnnnnngncngngncngnantntnanngnnnnnnnnanannnannnaannnnanannnntnnnnttntnnnnnnncnnnnncnnnnanacnaannnnaannnntnnnnntnnnantgnnnntggngtnnnngnnnnnnnnnncannannnnnnnnncnncnnnnncnnnnncnnccnnnaccnnnncntcnncnncntccgnnnnnnnngnannnnnnnnntncnnntnnnatnnntnntnntnntnntcntnnncnnnnncancnncancnncnnnnnnnnnnnnnnncnncnccnnnnnnntnnntnttntnnnngnnngngnnngcngngcctgngnnngnnnaagcnnnannnnnnnggnnnngnnnnnnnnngnnnnngnnannnnnannntnnnannnnnannnnnnatngnnatngnnannnnnnnnncngnnanngnnnncgnnnncnnnnnnntgnnnntgnnnnnnacannnncnnnntnnnnntnnnnnngcncnnnnnnnntgntnnngntntgnnntnnnnntgnanncgnnanctnnncanatnnanannnnnnnncgnnnncnannnnantnnnnnnnnnnnnnnnnnatnnnnnnannntnnnnnnnntnnnantgncnntncngnnnnngcngnnnngnnncnnnnnnnanacananncannntngnnatngnnatnnnnnngnnngnnnangnnnannnnnnnnnnngnanngnanngnaannnnnnnnnnnccnanncccannnnnannnagacncantnncnntnnngnnnnnnncnnnnncannnntnnntgttcntgnnccntnnnnnnnttcnaatncngnagntgctnctccgnctncgagnntgcnnccgctgtnnngccnnccgccgccgtngtngtnantngcngcnncntctgatgctgacaaggctttntnntnannncnnaagtcgncnncnncaccncaanancannnatngnnaccnccncnttcccantcgcngccgccgatgnannannntnantcnnngnnnnanntatnnannnnnntgcnngnngtagntgctgctgnnnnnncannannnnnnnnngtannannancannnnngnnnannncnnctnnnnnnnnnnncnnctnnnnnnnnnnnntngtnnnggnggnnacnncnnngnngnnngtnnnagnngcnnnggtnnnnnnaanntcnncnttgccnnnangnaggangnngccnnaannnangncnncnannncancaactttgtacgccaccancccanttggtgcgggcntgncctcatccgcagccggcttaatccagagggcaatggtgaaatcgccgctgccggcatccagcgcatcgtagtgcgggacggtaatacnaccccaagttgattccggcagcgtgagataatagtttgccacagacctgctcccgttagttccagatttcggttaccgtgatgctggaggtcaatgtttcgccgtacagtgttccggttgtcccattgaacccaacagtcaccgagcttgcactccccaatttgaccatatatgtaatctcagacagcgatggtgcagtggtgtaataagtgataacaatagtcccanaatggnngnatgaaccgccgccccatccgcacgccagtgctttgcctgctgcatncttgaatagtgcagcacacacagaggtgccgtngccattcattccgtactgtaccactgcgtccaccttgatgatattcccaatagccttgggtgtaatcgccgcctgcataaccagtgtgcctccacccccataggttggggctgagctgcttggaatagtggaattgcagagcagataattggtatatttgctgtagacgacttgtgccggcaagcctttgtaatttggaactccgccggcactgtgtccaacaagcaggaagttgttcagctctgttccccaagtgccggcagacccgccgatggttggtagtgatgccatttatactgtgcctccgtagcgtccgctgccgtaattgccgaaaccatacaataccgtgtcggacgcataaacgatattgaccggctgactgttggctgtaaacaccgttgagcagtccagaaaagactgcgtatcctgacggcctgtataacgagcagcaaactgctcgatgtaatactgctctatgccgccgatgatgcgccgcacgcacacatacacttcatcctccggcattcctcgaatcacacacacactactgaactgcccttgatacggcgtaagcagtaagccgcccgtgacatgttcgctccatgcggaaacctcttccttcggctcataggtaaaagacaccaaagcgccgtcctgccgtacaatccacaaaatagcatacggcacccgctggacagcgatttgcacaggcaaagaatcaaaaatatcatccaccagcagagttgcattgtcggactcataccgcanggtagcatccatcagccgcattgaacggagtgtgcggccgcccccttgaaaataaaacagggtgttgttgagatggacgggctgcatcgaattgctgcccaatgcagactgcacacggcatcgcacatcatccggcgtgattgggtcgtcaatgttgctggcagatattttgtattctttgttggctgttccaaccaccaagtattcatccgaagccatccactgaatattggatacatcggagtcttcaatggtaacagtcacagcatcgctgtcggtgtcgccagcagtgaaattcaggaacctggatgaggaggagccccaaagggtttggggattattgctggtggacgcaaaccataaacggttttcgtggattaccagtgttctggggtacccccgatatgcattaaacgctccttctgcccacatcgatgtagtaaccgcagagtcatcagaattattgctcaatacaggctgaatgactgtagccgagacgcttgtgggcgagatatagcctgtaatcttcacaatgccgacattggtttggtcttttgctgtcaggacggctgaaccgctggacgatgaactggtgaatgtataatacacatcatcgtccaattcatctgatgtgtaagcagtgttggccaagaatgtgcggtattcctgccaagcaccattgccttgacgccgccagattttgaaggtgttggagttgacggtcacatcaaacgaaaaagaccccttaatctttatgcccgtgcccgtcggcacagcattggtggtgttgtctggtgtggacatggtgttgtctggccttgtgtgcttcagcatccacagcgaccccacatgctgcggcagaaacggcgcattacctgtgccgctggcagtcagcgtgccgattgcccctgcgggaaagtaatgtccacaacgggctattccgcctgtgcgggtaaagcccagcaggtatgtgtctgttgtgttttcgcccaaaaaaggcccgccgaccaaattggcttcctgaataacccagctggcatcgccgtatcgggaaagcgtatacggcggatagtctgggtgggttaaatacagcacatcaccggactgtgtgtaatgcagctgccaaacatcatcaagggtgtatggcgaagcaatggaataaatcc

SEQ ID NO: 1444 - DNA, 4000 bp, Escherichia coli
  misc_feature (637)..(653): n is a, c, g, or t
  misc_feature (662)..(662): n is a, c, g, or t
  misc_feature (674)..(674): n is a, c, g, or t
  misc_feature (680)..(680): n is a, c, g, or t
  misc_feature (682)..(683): n is a, c, g, or t
  misc_feature (688)..(689): n is a, c, g, or t
  misc_feature (706)..(707): n is a, c, g, or t
  misc_feature (709)..(709): n is a, c, g, or t
  misc_feature (713)..(713): n is a, c, g, or t
  misc_feature (718)..(718): n is a, c, g, or t
  misc_feature (729)..(729): n is a, c, g, or t
  misc_feature (746)..(746): n is a, c, g, or t
  misc_feature (749)..(751): n is a, c, g, or t
  misc_feature (753)..(756): n is a, c, g, or t
  misc_feature (765)..(765): n is a, c, g, or t
  misc_feature (767)..(768): n is a, c, g, or t
  misc_feature (770)..(771): n is a, c, g, or t
  misc_feature (773)..(773): n is a, c, g, or t
  misc_feature (776)..(777): n is a, c, g, or t
  misc_feature (779)..(780): n is a, c, g, or t
  misc_feature (784)..(784): n is a, c, g, or t
  misc_feature (789)..(789): n is a, c, g, or t
  misc_feature (791)..(792): n is a, c, g, or t
  misc_feature (799)..(807): n is a, c, g, or t
  misc_feature (809)..(809): n is a, c, g, or t
  misc_feature (818)..(824): n is a, c, g, or t
  misc_feature (834)..(835): n is a, c, g, or t
  misc_feature (838)..(838): n is a, c, g, or t
  misc_feature (845)..(845): n is a, c, g, or t
  misc_feature (847)..(847): n is a, c, g, or t
  misc_feature (849)..(849): n is a, c, g, or t
  misc_feature (853)..(853): n is a, c, g, or t
  misc_feature (857)..(857): n is a, c, g, or t
  misc_feature (859)..(862): n is a, c, g, or t
  misc_feature (864)..(865): n is a, c, g, or t
  misc_feature (868)..(868): n is a, c, g, or t
  misc_feature (871)..(872): n is a, c, g, or t
  misc_feature (875)..(876): n is a, c, g, or t
  misc_feature (879)..(881): n is a, c, g, or t
  misc_feature (883)..(884): n is a, c, g, or t
  misc_feature (886)..(886): n is a, c, g, or t
  misc_feature (889)..(890): n is a, c, g, or t
  misc_feature (897)..(897): n is a, c, g, or t
  misc_feature (900)..(901): n is a, c, g, or t
  misc_feature (905)..(906): n is a, c, g, or t
  misc_feature (908)..(908): n is a, c, g, or t
  misc_feature (910)..(910): n is a, c, g, or t
  misc_feature (916)..(917): n is a, c, g, or t
  misc_feature (930)..(930): n is a, c, g, or t
  misc_feature (933)..(933): n is a, c, g, or t
  misc_feature (936)..(936): n is a, c, g, or t
  misc_feature (941)..(941): n is a, c, g, or t
  misc_feature (944)..(945): n is a, c, g, or t
  misc_feature (947)..(948): n is a, c, g, or t
  misc_feature (950)..(951): n is a, c, g, or t
  misc_feature (956)..(956): n is a, c, g, or t
  misc_feature (962)..(962): n is a, c, g, or t
  misc_feature (969)..(970): n is a, c, g, or t
  misc_feature (978)..(978): n is a, c, g, or t
  misc_feature (984)..(985): n is a, c, g, or t
  misc_feature (988)..(988): n is a, c, g, or t
  misc_feature (991)..(993): n is a, c, g, or t
  misc_feature (996)..(997): n is a, c, g, or t
  misc_feature (999)..(1001): n is a, c, g, or t
  misc_feature (1004)..(1006): n is a, c, g, or t
  misc_feature (1008)..(1008): n is a, c, g, or t
  misc_feature (1011)..(1013): n is a, c, g, or t
  misc_feature (1015)..(1015): n is a, c, g, or t
  misc_feature (1017)..(1017): n is a, c, g, or t
  misc_feature (1021)..(1022): n is a, c, g, or t
  misc_feature (1025)..(1028): n is a, c, g, or t
  misc_feature (1031)..(1032): n is a, c, g, or t
  misc_feature (1038)..(1039): n is a, c, g, or t
  misc_feature (1041)..(1041): n is a, c, g, or t
  misc_feature (1043)..(1045): n is a, c, g, or t
  misc_feature (1054)..(1055): n is a, c, g, or t
  misc_feature (1057)..(1057): n is a, c, g, or t
  misc_feature (1059)..(1060): n is a, c, g, or t
  misc_feature (1062)..(1062): n is a, c, g, or t
  misc_feature (1065)..(1068): n is a, c, g, or t
  misc_feature (1071)..(1071): n is a, c, g, or t
  misc_feature (1073)..(1073): n is a, c, g, or t
  misc_feature (1076)..(1076): n is a, c, g, or t
  misc_feature (1079)..(1079): n is a, c, g, or t
  misc_feature (1081)..(1081): n is a, c, g, or t
  misc_feature (1084)..(1084): n is a, c, g, or t
  misc_feature (1086)..(1086): n is a, c, g, or t
  misc_feature (1088)..(1088): n is a, c, g, or t
  misc_feature (1091)..(1093): n is a, c, g, or t
  misc_feature (1101)..(1101): n is a, c, g, or t
  misc_feature (1104)..(1109): n is a, c, g, or t
  misc_feature (1112)..(1113): n is a, c, g, or t
  misc_feature (1115)..(1115): n is a, c, g, or t
  misc_feature (1117)..(1117): n is a, c, g, or t
  misc_feature (1128)..(1128): n is a, c, g, or t
  misc_feature (1132)..(1132): n is a, c, g, or t
  misc_feature (1134)..(1135): n is a, c, g, or t
  misc_feature (1139)..(1139): n is a, c, g, or t
  misc_feature (1144)..(1144): n is a, c, g, or t
  misc_feature (1147)..(1148): n is a, c, g, or t
  misc_feature (1153)..(1154): n is a, c, g, or t
  misc_feature (1156)..(1156): n is a, c, g, or t
  misc_feature (1164)..(1165): n is a, c, g, or t
  misc_feature (1172)..(1172): n is a, c, g, or t
  misc_feature (1175)..(1176): n is a, c, g, or t
  misc_feature (1181)..(1181): n is a, c, g, or t
  misc_feature (1189)..(1189): n is a, c, g, or t
  misc_feature (1193)..(1193): n is a, c, g, or t
  misc_feature (1197)..(1197): n is a, c, g, or t
  misc_feature (1991)..(1991): n is a, c, g, or t
  misc_feature (2052)..(2052): n is a, c, g, or t
  misc_feature (2787)..(2787): n is a, c, g, or t
  misc_feature (2867)..(2867): n is a, c, g, or t
  misc_feature (2912)..(2913): n is a, c, g, or t
  misc_feature (2917)..(2917): n is a, c, g, or t
  misc_feature (2920)..(2920): n is a, c, g, or t
  misc_feature (2923)..(2923): n is a, c, g, or t
  misc_feature (2926)..(2927): n is a, c, g, or t
  misc_feature (2929)..(2929): n is a, c, g, or t
  misc_feature (2931)..(2931): n is a, c, g, or t
  misc_feature (2935)..(2935): n is a, c, g, or t
  misc_feature (2939)..(2939): n is a, c, g, or t
  misc_feature (2941)..(2941): n is a, c, g, or t
  misc_feature (2944)..(2944): n is a, c, g, or t
  misc_feature (2946)..(2946): n is a, c, g, or t
  misc_feature (2949)..(2949): n is a, c, g, or t
  misc_feature (2952)..(2952): n is a, c, g, or t
  misc_feature (2954)..(2954): n is a, c, g, or t
  misc_feature (2957)..(2959): n is a, c, g, or t
  misc_feature (2961)..(2961): n is a, c, g, or t
  misc_feature (2964)..(2964): n is a, c, g, or t
  misc_feature (2973)..(2973): n is a, c, g, or t
  misc_feature (2975)..(2976): n is a, c, g, or t
  misc_feature (2978)..(2978): n is a, c, g, or t
  misc_feature (2981)..(2982): n is a, c, g, or t
  misc_feature (2984)..(2984): n is a, c, g, or t
  misc_feature (2987)..(2987): n is a, c, g, or t
  misc_feature (2989)..(2990): n is a, c, g, or t
  misc_feature (2992)..(2993): n is a, c, g, or t
  misc_feature (2995)..(2999): n is a, c, g, or t
  misc_feature (3001)..(3031): n is a, c, g, or t
  misc_feature (3033)..(3034): n is a, c, g, or t
  misc_feature (3036)..(3047): n is a, c, g, or t
  misc_feature (3049)..(3050): n is a, c, g, or t
  misc_feature (3052)..(3056): n is a, c, g, or t
  misc_feature (3058)..(3070): n is a, c, g, or t
  misc_feature (3072)..(3088): n is a, c, g, or t
  misc_feature (3090)..(3091): n is a, c, g, or t
  misc_feature (3094)..(3094): n is a, c, g, or t
  misc_feature (3097)..(3097): n is a, c, g, or t
  misc_feature (3099)..(3100): n is a, c, g, or t
  misc_feature (3103)..(3103): n is a, c, g, or t
  misc_feature (3106)..(3124): n is a, c, g, or t
  misc_feature (3126)..(3133): n is a, c, g, or t
  misc_feature (3135)..(3136): n is a, c, g, or t
  misc_feature (3138)..(3139): n is a, c, g, or t
  misc_feature (3141)..(3142): n is a, c, g, or t
  misc_feature (3144)..(3146): n is a, c, g, or t
  misc_feature (3149)..(3149): n is a, c, g, or t
  misc_feature (3153)..(3154): n is a, c, g, or t
  misc_feature (3156)..(3158): n is a, c, g, or t
  misc_feature (3160)..(3172): n is a, c, g, or t
  misc_feature (3174)..(3175): n is a, c, g, or t
  misc_feature (3177)..(3182): n is a, c, g, or t
  misc_feature (3184)..(3185): n is a, c, g, or t
  misc_feature (3187)..(3187): n is a, c, g, or t
  misc_feature (3190)..(3190): n is a, c, g, or t
  misc_feature (3193)..(3193): n is a, c, g, or t
  misc_feature (3196)..(3197): n is a, c, g, or t
  misc_feature (3199)..(3200): n is a, c, g, or t
  misc_feature (3202)..(3203): n is a, c, g, or t
  misc_feature (3205)..(3206): n is a, c, g, or t
  misc_feature (3209)..(3210): n is a, c, g, or t
  misc_feature (3212)..(3215): n is a, c, g, or t
  misc_feature (3217)..(3219): n is a, c, g, or t
  misc_feature (3221)..(3230): n is a, c, g, or t
  misc_feature (3232)..(3233): n is a, c, g, or t
  misc_feature (3235)..(3236): n is a, c, g, or t
  misc_feature (3238)..(3239): n is a, c, g, or t
  misc_feature (3241)..(3242): n is a, c, g, or t
  misc_feature (3244)..(3245): n is a, c, g, or t
  misc_feature (3247)..(3268): n is a, c, g, or t
  misc_feature (3270)..(3271): n is a, c, g, or t
  misc_feature (3273)..(3274): n is a, c, g, or t
  misc_feature (3276)..(3298): n is a, c, g, or t
  misc_feature (3300)..(3317): n is a, c, g, or t
  misc_feature (3319)..(3320): n is a, c, g, or t
  misc_feature (3322)..(3331): n is a, c, g, or t
  misc_feature (3333)..(3356): n is a, c, g, or t
  misc_feature (3358)..(3359): n is a, c, g, or t
  misc_feature (3361)..(3362): n is a, c, g, or t
  misc_feature (3364)..(3368): n is a, c, g, or t
  misc_feature (3370)..(3371): n is a, c, g, or t
  misc_feature (3373)..(3376): n is a, c, g, or t
  misc_feature (3378)..(3379): n is a, c, g, or t
  misc_feature (3381)..(3408): n is a, c, g, or t
  misc_feature (3410)..(3411): n is a, c, g, or t
  misc_feature (3413)..(3414): n is a, c, g, or t
  misc_feature (3416)..(3417): n is a, c, g, or t
  misc_feature (3419)..(3420): n is a, c, g, or t
  misc_feature (3422)..(3423): n is a, c, g, or t
  misc_feature (3425)..(3426): n is a, c, g, or t
  misc_feature (3428)..(3429): n is a, c, g, or t
  misc_feature (3431)..(3432): n is a, c, g, or t
  misc_feature (3434)..(3436): n is a, c, g, or t
  misc_feature (3438)..(3452): n is a, c, g, or t
  misc_feature (3454)..(3455): n is a, c, g, or t
  misc_feature (3457)..(3458): n is a, c, g, or t
  misc_feature (3460)..(3485): n is a, c, g, or t
  misc_feature (3487)..(3488): n is a, c, g, or t
  misc_feature (3490)..(3519): n is a, c, g, or t
  misc_feature (3521)..(3531): n is a, c, g, or t
  misc_feature (3533)..(3559): n is a, c, g, or t
  misc_feature (3561)..(3562): n is a, c, g, or t
  misc_feature (3564)..(3599): n is a, c, g, or t
  misc_feature (3601)..(3616): n is a, c, g, or t
  misc_feature (3618)..(3619): n is a, c, g, or t
  misc_feature (3621)..(3622): n is a, c, g, or t
  misc_feature (3624)..(3630): n is a, c, g, or t
  misc_feature (3632)..(3633): n is a, c, g, or t
  misc_feature (3635)..(3645): n is a, c, g, or t
  misc_feature (3647)..(3648): n is a, c, g, or t
  misc_feature (3650)..(3662): n is a, c, g, or t
  misc_feature (3664)..(3667): n is a, c, g, or t
  misc_feature (3669)..(3669): n is a, c, g, or t
  misc_feature (3672)..(3676): n is a, c, g, or t
  misc_feature (3678)..(3681): n is a, c, g, or t
  misc_feature (3683)..(3683): n is a, c, g, or t
  misc_feature (3685)..(3686): n is a, c, g, or t
  misc_feature (3688)..(3689): n is a, c, g, or t
  misc_feature (3691)..(3693): n is a, c, g, or t
  misc_feature (3695)..(3696): n is a, c, g, or t
  misc_feature (3698)..(3706): n is a, c, g, or t
  misc_feature (3708)..(3709): n is a, c, g, or t
  misc_feature (3711)..(3712): n is a, c, g, or t
  misc_feature (3714)..(3715): n is a, c, g, or t
  misc_feature (3717)..(3718): n is a, c, g, or t
  misc_feature (3721)..(3722): n is a, c, g, or t
  misc_feature (3724)..(3732): n is a, c, g, or t
  misc_feature (3734)..(3735): n is a, c, g, or t
  misc_feature (3737)..(3738): n is a, c, g, or t
  misc_feature (3740)..(3741): n is a, c, g, or t
  misc_feature (3743)..(3764): n is a, c, g, or t
  misc_feature (3766)..(3804): n is a, c, g, or t
  misc_feature (3806)..(3831): n is a, c, g, or t
  misc_feature (3833)..(3833): n is a, c, g, or t
  misc_feature (3836)..(3836): n is a, c, g, or t
  misc_feature (3838)..(3839): n is a, c, g, or t
  misc_feature (3842)..(3842): n is a, c, g, or t
  misc_feature (3844)..(3849): n is a, c, g, or t
  misc_feature (3851)..(3851): n is a, c, g, or t
  misc_feature (3853)..(3854): n is a, c, g, or t
  misc_feature (3857)..(3858): n is a, c, g, or t
  misc_feature (3860)..(3867): n is a, c, g, or t
  misc_feature (3869)..(3874): n is a, c, g, or t
  misc_feature (3876)..(3877): n is a, c, g, or t
  misc_feature (3879)..(3882): n is a, c, g, or t
  misc_feature (3884)..(3886): n is a, c, g, or t
  misc_feature (3888)..(3889): n is a, c, g, or t
  misc_feature (3891)..(3893): n is a, c, g, or t
  misc_feature (3895)..(3895): n is a, c, g, or t
  misc_feature (3900)..(3901): n is a, c, g, or t
  misc_feature (3904)..(3905): n is a, c, g, or t
  misc_feature (3910)..(3911): n is a, c, g, or t
  misc_feature (3913)..(3913): n is a, c, g, or t
  misc_feature (3920)..(3921): n is a, c, g, or t
  misc_feature (3923)..(3924): n is a, c, g, or t
  misc_feature (3926)..(3928): n is a, c, g, or t
  misc_feature (3930)..(3931): n is a, c, g, or t
  misc_feature (3933)..(3933): n is a, c, g, or t
  misc_feature (3935)..(3935): n is a, c, g, or t
  misc_feature (3938)..(3938): n is a, c, g, or t
  misc_feature (3941)..(3941): n is a, c, g, or t
  misc_feature (3943)..(3944): n is a, c, g, or t
  misc_feature (3947)..(3947): n is a, c, g, or t
  misc_feature (3949)..(3949): n is a, c, g, or t
  misc_feature (3951)..(3961): n is a, c, g, or t
  misc_feature (3963)..(3968): n is a, c, g, or t
  misc_feature (3970)..(3972): n is a, c, g, or t
  misc_feature (3974)..(3980): n is a, c, g, or t
  misc_feature (3982)..(3983): n is a, c, g, or t
  misc_feature (3986)..(3987): n is a, c, g, or t
  misc_feature (3990)..(3990): n is a, c, g, or t
  misc_feature (3993)..(3994): n is a, c, g, or t
  misc_feature (3996)..(3997): n is a, c, g, or t
  misc_feature (3999)..(4000): n is a, c, g, or t
gaagcgattggactgattgtacgatattgagcggaactcacctgctccttgccaccgtagacgaccaacgttgtacccattatcccgtttttcgttaaggccttcaagatcgttatggatttgattaatagtttgttgggcagcgtgagcagacggattactgaagatcggccatgtgtgtttccagtcagtaaatttcttgtgttgatcgtagtctgacggcttgtcgttggtatgcgtattgtagtagtctctgactgcgtggttccggatctgtcggaggatatcaatatgtcgccatgcttcgctagccacctcatcggaaagataagcccggaagcgaagcgtaagatccatcgattcctcgtcttttgaatgggtttgtgggtaattaaaagagtgggaagttgttgacttcaccctcgaagtcaagtctcaaggcagtcgttttgtaccgtttgtacatatctctctgttagactcaaccgtagtgaatcgccgtaagtatacgtcgtgataattgctgtggatcgagtgctgcggctcagtggttgaaagaatgaaaaagggaccggcacgaggccggtggttgaaacggcgtgcagttactcgcggttcgaagtcagattagttctgnnnnnnnnnnnnnnnnngtgctgcgnggaggactgcgncgaggncnncgagnngtgcgacgaggggtgcnncnccgngggtngcgtcgtcggnggagtcgtcggaggagncgnnngnnnngtcgtcggngnngnngncgnngnngtcntcggngnngtcgtcnnnnnnnnngncgtcgtcgnnnnnnncgtcgtcggnntcntcatctncngnttcntcgncnnnngnngcntcnncgnngannntnncntcnncgacganganngagnngncngactcnncatccgagccggngangcngaagnagnngnngnnctcgncatccncttcttnnttgctgangtcganntcnccnnnaanntnnncgnnntngcnnntntngacnntcnnnncannacgganngngnnngaagcaccnncngnngnagnnnnacngngtncgncntcngngncgnnngcgacgtntgnnnnnncgnngncntcggcgtcttngacntnntcgncttcnagnncgtcnncnacgtttannttgtcgnatnngattnctgcgtcngcgnagtngatttctgtgctggatgatacatcggagtcagcctggaagtacgggtaggcatccacaatagaattgaatgctaaaggtggacttccgctgccgaatttgtaccgatcatcgccatcggtagcgtattcgagagttgccgtgtacgagtcaccatcgtctggagcaccgttgctccaggcgtcggtgttactggtatcgacaataacgaagaactgtccgttttcgttgtcaggaaggacaaagacttcgtcgtcggaagcaccgttgaggttaagcgacgttgcttcttggtttccggttgaggattctgcttcgacactgaagtcgataccctcgctatcttggttgttcagctgattgagcgtactggcagatgttccatccgtgaagatatcagtactggtcgtagctccagatttgttggccattgcaccgtagaggccagtagcttcgacctgcacaacaagacggtcatcgattgcgacttcgttgcgctgagtgacctcttcgaggacactatcgagctcagtctctgcgttagcatcgtctgttggtgcgacgtaagtcgtgatgtcgccgatctgtggctgcgacagttcaagcactgccgagtcgagctcgtcgtcgagctcggcctcatcgtcatcgttggcgacgaacacgttgtttccgttcgcggcgacttcgtagttggctgcctgcagcggtcgcgttagctgatcgttctcggtttcaccggactcaatgaggtccaatgcgtagaggtaatcgttgaacgtaccactgctaccgncgctggccccgttgagatcctgtccgtcgtcattctggaactcagcgtcgaatgtaccgcngtgagccgcactacctgcgacgttatcatcgtcactctcgtagacgtcgtcgtaagcagcgtcagttccggcaagtcgcgtgttcatcgtgaacgagacttggtcatcatcattgtcgtcttcgacgtggacaatgtcagtgaatccggagttctggtcaccgatctgaacccacgcttcgtccgtgtcttcaagatcgatagtgaactcagcgaagtcacctgctgcggtttggtagactccctgagagaaggaaccggattggtcctcttcactgatgctgattgatgcagaggcttcggccgtcgtgtcggtcacaacgaagtcgaatgtgtactcgccatcgtctgggagtccctcttcatctgcaagcttcgtgaagtttgcagtaagctcatcgtcgctgaacttattgttagtgctgaggttctgcaggtcaagcgtgacgtagccgtcgtcttcgagatcctgaacggtatcgtcatcactgtcgtaaccgaggcggtcgaatgagatgtgtgcctcatcgtcaacgacttcgtcccccgaagcgttgaacagcgctttgagctgagcagcgtcgagcccatctgcgctgaccgttacattctgtcgcgagacacgcgacgtatcgagttcaacgtaggtatcgttgtcagctcctgttgcttcgtcgttttcccagttggccgagagcgtctgctgggtaacttcgaacgacgttaggagttcacntgacacaccactcgtatccgagagcgtgtactcaccagcgtcaaggtcactagtgtcaatggtagcactctcttgatcancgtcattgtacgtcacaggacggacagtttgtgcgttgtcaacannactnctnctnctnntntnagtnatcntnagnanatnaantntannntnagnactaatatngnngntgnngncgncnncnncnnnnntnnnnnnnnnnnnnnnnnnnnnnnnnnnnnnntnntnnnnnnnnnnnncnncnnnnncnnnnnnnnnnnnntnnnnnnnnnnnnnnnnngnngcngcngnngcngcnnnnnnnnnnnnnnnnnnnannnnnnnnannannannannncancaannannncnnnnnnnnnnnnncnncnnnnnntnntnttnttnttnntnntnntnnttnntnnnntnnntnnnnnnnnnncnncnncnncnncnncnnnnnnnnnnnnnnnnnnnnnncnncnncnnnnnnnnnnnnnnnnnnnnnnngnnnnnnnnnnnnnnnnnngnngnnnnnnnnnnannnnnnnnnnnnnnnnnnnnnnnntnntnntnnnnntnntnnnntnntnnnnnnnnnnnnnnnnnnnnnnnnnnnntnntnntnntnntnntnntnntnntnnnannnnnnnnnnnnnnnannannannnnnnnnnnnnnnnnnnnnnnnnnntnntnnnnnnnnnnnnnnnnnnnnnnnnnnnnnnannnnnnnnnnnannnnnnnnnnnnnnnnnnnnnnnnnnncnncnnnnnnnnnnnnnnnnnnnnnnnnnnnnnnnnnnnngnnnnnnnnnnnnnnnntnntnntnnnnnnncnncnnnnnnnnnnnannannnnnnnnnnnnnannnncntcnnnnncnnnntnannannannntnntnnnnnnnnncnncnncnncnncgnngnnnnnnnnnannannannannnnnnnnnnnnnnnnnnnnnngnnnnnnnnnnnnnnnnnnnnnnnnnnnnnnnnnnnnnnncnnnnnnnnnnnnnnnnnnnnnnnnnnangangnngangnnnnnngngnngannannnnnnnnannnnnncnncnnnncnnncnncnnngncgtcnncgnngtcgnngncgacganncnncnnncnncncnacnacnannaananannnnnnnnnnnannnnnngnnnannnnnnngnnganncancanntnntnn

SEQ ID NO: 1445 - DNA, 4000 bp, Escherichia coli
  misc_feature (22)..(22): n is a, c, g, or t
  misc_feature (500)..(500): n is a, c, g, or t
  misc_feature (1418)..(1418): n is a, c, g, or t
  misc_feature (1422)..(1422): n is a, c, g, or t
  misc_feature (1755)..(1755): n is a, c, g, or t
  misc_feature (1991)..(1991): n is a, c, g, or t
  misc_feature (2001)..(2001): n is a, c, g, or t
  misc_feature (2391)..(2391): n is a, c, g, or t
  misc_feature (2415)..(2419): n is a, c, g, or t
  misc_feature (2421)..(2421): n is a, c, g, or t
  misc_feature (2423)..(2425): n is a, c, g, or t
  misc_feature (2427)..(2428): n is a, c, g, or t
  misc_feature (2430)..(2431): n is a, c, g, or t
  misc_feature (2433)..(2434): n is a, c, g, or t
  misc_feature (2436)..(2438): n is a, c, g, or t
  misc_feature (2440)..(2440): n is a, c, g, or t
  misc_feature (2442)..(2442): n is a, c, g, or t
  misc_feature (2444)..(2448): n is a, c, g, or t
  misc_feature (2450)..(2450): n is a, c, g, or t
  misc_feature (2452)..(2454): n is a, c, g, or t
  misc_feature (2456)..(2458): n is a, c, g, or t
  misc_feature (2460)..(2460): n is a, c, g, or t
  misc_feature (2473)..(2474): n is a, c, g, or t
  misc_feature (2478)..(2485): n is a, c, g, or t
  misc_feature (2487)..(2497): n is a, c, g, or t
  misc_feature (2499)..(2508): n is a, c, g, or t
  misc_feature (2510)..(2512): n is a, c, g, or t
  misc_feature (2514)..(2518): n is a, c, g, or t
  misc_feature (2520)..(2520): n is a, c, g, or t
  misc_feature (2522)..(2527): n is a, c, g, or t
  misc_feature (2529)..(2529): n is a, c, g, or t
  misc_feature (2531)..(2537): n is a, c, g, or t
  misc_feature (2539)..(2542): n is a, c, g, or t
  misc_feature (2544)..(2545): n is a, c, g, or t
  misc_feature (2547)..(2549): n is a, c, g, or t
  misc_feature (2551)..(2554): n is a, c, g, or t
  misc_feature (2556)..(2556): n is a, c, g, or t
  misc_feature (2558)..(2559): n is a, c, g, or t
  misc_feature (2606)..(2606): n is a, c, g, or t
  misc_feature (3624)..(3624): n is a, c, g, or t
  misc_feature (3804)..(3804): n is a, c, g, or t
  misc_feature (3828)..(3828): n is a, c, g, or t
  misc_feature (3854)..(3854): n is a, c, g, or t
  misc_feature (3861)..(3861): n is a, c, g, or t
  misc_feature (3905)..(3905): n is a, c, g, or t
  misc_feature (3909)..(3909): n is a, c, g, or t
  misc_feature (3912)..(3912): n is a, c, g, or t
  misc_feature (3933)..(3933): n is a, c, g, or t
  misc_feature (3983)..(3983): n is a, c, g, or t
cgaattgtactgaggttgcacngctgttgtttgaaattttgcgtggatagttgagcggataggcgatgatttgggttcgcgaggcgacggtgactgaatcttgaattgaaaatcgtaaattgttttttgatagttcgatacccagatcaaagtgatataatccagcaggagtatagctactggaagaagcaatgacggtaaagtttcgtttgctctgcgggagaataaaaagatcgttttgactttgaattagggtccaattatccggagtaatcgctgccggtttgaaccaaagtgtgtctatagagtagttagtgatttgtaaggtgaattgagcatttgcccctggtgcgatgagcgtgtcctgctttataatgttaacttcaacagggttcgttttttggctgaactggaatactaactgacctaaaaaattgggcaccagttgtgcttttcccaaagtgctgagaagtaagaatcctagaaggaatatcgagcgntatgtgatgcgtaaaaccacctccgcatgcgttaaaatgtgatggattctgatactccaaaaacatctccgctgtcggcctcatgtagcaagactaattcatacgtgcctggtgccacatctatattttcaagcaatacctttcggcattgttgaggttgaatactttgacggatagaggtgttctcgtacaccatatttccttccatgtccaagatagaggctttcgtatggaacgtggtggaggcattgcctcggttgaccaatgaaagttcaaaagcgtaatttacaccagcggtatctatgacaagactttgtgtgaataaatccacactagattgaacgctagggttattgtagataatgtttacgccatatcttatctgtactccaaattgaatcactccagccttttgcacgctatccactagtgcggtgttgttgatgaacaggcaagtattagcatttggcaagttgtagttcgaaggaatattcacaagtacactgaaatctctcttttctcttggcaaaagaaccagttcagtattttctaaagtcaaccagggacgacaactactttcaataggctcttcgccatccacatatacatatccttcgttacaatcattatagtagtccatcagggcaaaggtgacacgcttcgcatcatcactgttgttttgaagcgcaatattcagtgtctgtgctgtgccaagaggcgcatcgatgatctgtgtcaaaccgctatttactaccacttgactaaagagtagtgagggcataaatagtatagagagtaactttttcataaaacaaataaccccgagacagcgcactgtctcggggttaagaaattgaaacttaggtttaattggtaatcgtatacgtaatagtcggcgcgtttgcaccgttagaagangttngctctaaactcgagtaatcatttacacttgcagtgtaggaaagcgtgtagtacgcagtcccagtgtaagaagctccaatattttctattatagatgaaggtgaggatcccaccgcagtaccggaaccagtagtttcaaatccagaaactactgtccctacagaaccgtaagtagttgaggatagtgaagagactccagaattatctaccgtcaataccacatctacaccttgagggatgttagtgaattgtaccttaacaaccgcagtattgttgttaccgttgccggttggcatgtatgagtaatacaggtttgttgatgctgcggcagaantgagagaatatccatcaccagcggatgtcggtgtaccaaagttaaaagtcaatgaatttgcatccacccccacaagtgagtgtgtgctaattccaaaatctacagtctgttgatcataagactgaccgtaggaaagcgtcgcgatcaatgaaaatacgctgatccatttgaggtttttgatttgttttttcatggttttgaattgttagtcataaattggcctacattacggcacnataaggatanagcaaaaccatctcggataggtgttcaatcaagttttgaacaaatgtgcggagaccgcgtaaatactgatattccgcaggtaaatgtgttcaattgcatgttcaatcactaattgaacacgtcaatgagagctggataaagtatctctatactcagaaaaggacattccttcgacctctttaaaagccgaatagaaactcgtccgactttggtaaccaattaattggcttaggccatctacactatagtcgttcagtgcaccttgagcaataagatctttgacttaacttattcttatttgtcttttgaactctataggctccagaaaatctttgcttaaattagatcactccccagaaaaatccgctgatcccatactcgtgtatgtcncgattaaagcgataagctacgtgnnnnnangnnntnnanntnnannncntnannnnncntnnntnnngnattttaaatgctnnaaannnnnnnncnnnnnnnnnnntnnnnnnnnnnannnannnnngntnnnnnngntnnnnnnntnnnnanntnnnannnntntnngcttagcgcttcacgagcttgtattgttttatggtgtgttggttttngagcgtcaatacgagggttcctgaagctaccccgcggaggtcgatgcgttcggtgagggtgcctgagcggagcagttggcccgtagtgttgcgcaattcaaaggtggtgtttgcaggtgcgccacggaggtaaataaaatcctctgtggggttcgggtaaagcgctatagatccgtctagttcatttaagcctataccgtagatggttacgtctattgctgccgtgtctgcgacaccgccattgaaggcgtagacggcgaaagatgcagcgccgttggccggtccccattgcacttcaaacgagctgaagtcgggggcgctggagatgagggttgcgttggaaagggcgtaggaaatggaatccacgtactggtaattggtcatggtataggtggtgtttgccgatgcatagatggaatcggacggacctactaaaataggtgcggggggtgcgacgaagaaggatatcgtatcgatcaatttgctgtcgcataatccagtcaatgcggaagaatctgcactgtagccaaagatgagcgtccatggacccggcatgatggaatcgctcgtatggagtttgaaggcgtcgtagctcgaagagagtggggtgcttccggttacgaagttagtggcgtttccgaatgcgtcaaataattggacctgaacggaatcaaaatttgctgaggtcgggaagactgcatctgaagtattgaggtagatatcattttcgccgaaagttgctgaagcgcttgtggcatcaatcaaagtttgtggaggcgctgcactcggactaacgatattcactaagatttcacgttcgatcatacccatgattttgtaggtattcgtagtgtcttgagcccattcgacgattttcacattgactaccgcgttttgaacggtattagaattgatcaccaacatgcggttcgctgtatctattgaaacactacttccgctgccaagaggcgcagcattgctgtaaccggtagaataagcaatgttcgttgctgaaagngacgaggacgctccacttttaacagctacgatctggaaggacaggctgtcaccatccgcatcggcgctacagatttcaaaagggtacgttgtatttgcataagcggttgcaataccaggttgtatctcgggactgttattgtacgaacgaatggcgggcttaccattgactaaaacaccnctgaggtaaacactctggctggangcatttgcaatattcgtgattgcagnaggtctncaacacgtagaatacgcaaaggtgtagccggtgttgttgtcganggtnacntttgcagaataggtgtaggcntcaattccgtacgttgatccacagtttcctgtcaatgctccactactggnctggccaaggccaacgg

SEQ ID NO: 1446 - DNA, 4000 bp, Escherichia coli
  misc_feature (2573)..(2573): n is a, c, g, or t
  misc_feature (2594)..(2594): n is a, c, g, or t
  misc_feature (3428)..(3428): n is a, c, g, or t
  misc_feature (3449)..(3452): n is a, c, g, or t
  misc_feature (3461)..(3461): n is a, c, g, or t
  misc_feature (3468)..(3469): n is a, c, g, or t
  misc_feature (3475)..(3475): n is a, c, g, or t
  misc_feature (3486)..(3486): n is a, c, g, or t
  misc_feature (3594)..(3594): n is a, c, g, or t
  misc_feature (3603)..(3603): n is a, c, g, or t
  misc_feature (3855)..(3855): n is a, c, g, or t
tcatcagcagaggaagaaacagaattattattagtatcccagtaactagacccagcgtacccacattcgacccctttatacaaccaagggcatgaattagacactataactctagagggtaactttatacctataacatcgtatgctgcgcttaactcaaattctatatgagtgaacgtctcaacagcttttctatctatataccatatctcatctgtaaagtgagctgtatcatccgctatggcgttagcgtaccaaataccaggtcctgcagccgcttcacaagtactttgggtgtactccgtccaagtacctgcagatccgttcttattagtatctaaacaatcatccttactaaggcttgggtcagacccggactctcctgtacatacccctcccacagggtacccgtctgtgtagcagtagttatctaagtatttagcgaacgttttcttacgagtgacttttgaccctaccaaatcgttataatcattgattactcctgataatagtgaagtaatattagctaccgttaaattaggtcgaggtatagatccttgtgcggaaaactcgaatccagaggcttcaatagggagcccagagtatttattcccttgccatactatttcttgtaactctgcgttatagcctccgttgaaccatctaaacttaggtacagtagaaggcgccgaccctgcagatagatctaactcaaatagctctactatactaccaggtgttaaactatttatatcagttgtaattttattactcataggattcctttatggttcgaatactctgttgaatgttgcagtaatagtcctatatccacttatatcctctttaacactccatttagcacaggtgtactttttataagggtagatagtatatgtctccccgctagctagtatatccgcggctaaagatagttgggtggcactatctatggccgttactgtggtggttgtaggggtaggagtgactactaccgtaggagctgaggtatacccgctcccgccagctactaatgttattgctgttattacccctgcactagatactactgcagtagcagaagcccctgtaccccctcctcctgtgaaagatattgaaggcaatgaagtactattgtacccgcttcctccagtagataccgatacagacgctacagcatcggctgacaaactagcagtacatactcctccggtacctccgctatcggtaaccgtagtatttaaataacgattagtaaagtattgactagtatctataagtttcttagtagcagtactagtagtggtactagatatactataccctactgggtaccaatcgaaagatgtaactcctccttggtcctctaagaattttataatcttattagtttccgctacaggcctgtttttccactctaagctccactgttcgggtaaattatttataccatctacagttctttgctcatacccgtccccataagatacagtgagtaccttaggcttttgttccgttttcatccctctatcagggttactatttacttctgtgttaaaatttggcataattaatacggactaagtagtcctcctggtctttgttggttaagtagctcttgttgaataacttgagtcatcattccccctaacttgttaaagtctggcccattagacccctcacttgcttgagcagaactagtagtagtaccgtcactggcaacgttaattgtaacattaatgttattctcggtattgttttcagtagcagccccttttccaatcattgctaccgggatagctctaccatccggtaaaggaacaattgcttcattatccttaccttcccccactagtccaagtgtaggcttggttactactcccccttttgcaaaggcttggaagcctcctctaagcacgttaccgttagcactcataacagctgtagtagcccccgataccactgaagatattatagtatttcctatttgctgtacaaaactcatagcaagtttagcagtgtttaacttaccattgtatatgagatccttaaacccagtctgtaatgtattattagttgcagctcctacggtctgcatagtattagtactaaaggttgtattctcgttatcgttccacattccttgctctgcaagcattgctgtctgctccgatccctcattagttttaaaagcagctgcagtacttgcgtttttagcgtacccgccttcagtctccccaaataagctttctcctgctcctgcctgcccttgggctgcagtaatagcctctgggttcttaataactactgcgagtcctttaccttctcctttagctttggcatctgcttgagcttcttctgatctcttttcaagttcagttttagtagtattggctacaagagtttctaacttagtattagttacttcagcttttagattcatttcagctaacttatctgcaactgaagtatcccctgtctgtctgctagcttcttgccacgcactatctgaatctgtgatctctgatctattccatctagtctctgtgtaagcctttaattgctcccaccantccccaaatgccttctctgtnaacccgtcgtctgcaatttggtaccctgcagtacctatagccgctaatgtaacttgcggaatcattgctattttatctagtaactcaggcgtaccttctggagtgttatcaaatgccccataaccaaacttagtcatagaagcgcctttggctttaccaaagttaggatctgctatacctgtagtctttctattattataatagtcagcacttagctcattatccaactttccgtagtcttttattgcactaggtaaagacccgtcttttggagtaatccattctctaaaggaatctcttatttgctctaataaaggtactgcgtggtggtcatgtacggagtgtgatttacctgacttagatatatcatttgctttttgtgcagcatcggctgcttgtttagcttcggagtttagcctgctgttccagtctaaaattttatcccaccaagatttttcttcttccgctactttaggtacttcatcgcctactactagtttctctgttacaggttcattgttgtacgcatcactatttaccaactttttaattcttaaatacccgtccgtaactatattaggcacaatattaagtttacctacgcctaatattactccatccaaagcctttgtattcttctctgttacttcgtctgatgcgctaaagaaatcctttgtatcgtcccacattttaccgaagaagtccccggcaaaactagtctgttctttctgtttagctaatattgcctctgcttgttgttttgcttggtaagtttggaagtcctggttacctgctacagaacctcgctgtgcttgtgcaattagcagttttagntcctcgaactcagcgccaacnnnnctaaggccnccagtanntttatntatagcgcccnctcttgcttgggtcactcgggaaccaaaccaatctctctggtttgaaggcaatgcctcagtgagtttcttaatctcggccaaagctgtttgatcccctttggacaccntcatattcntcagactgtttcctaactgcttctgtctttgttctgggtttgttatctctacagataatatttcctttgaaagtatgtcaacttgtcttgacatcatattcttaatttcagttagtgcagacaaacgtttctcagcgtctgtcttagggaagatagcatccgcccactcgttgcctttctcgtctccgcctagcattcttaacccgcccgcaagtagccctttattaccaaacatcatatctgatatagaantagagataaaatttcccccccagtctgatagttcttgtgccattgctagcctaattctctcactctgtgtatatccatcatcaggctggtccttctgcataaatacatcggagagggcttgccctaaagagtcggttaaccctgt

SEQ ID NO: 1447 - DNA, 4000 bp, Escherichia coli
  misc_feature (3038)..(3038): n is a, c, g, or t
  misc_feature (3050)..(3050): n is a, c, g, or t
  misc_feature (3635)..(3635): n is a, c, g, or t
  misc_feature (3638)..(3638): n is a, c, g, or t
  misc_feature (3701)..(3701): n is a, c, g, or t
  misc_feature (3734)..(3734): n is a, c, g, or t
  misc_feature (3743)..(3743): n is a, c, g, or t
  misc_feature (3745)..(3745): n is a, c, g, or t
  misc_feature (3752)..(3752): n is a, c, g, or t
  misc_feature (3755)..(3755): n is a, c, g, or t
  misc_feature (3757)..(3757): n is a, c, g, or t
  misc_feature (3762)..(3763): n is a, c, g, or t
  misc_feature (3768)..(3769): n is a, c, g, or t
  misc_feature (3771)..(3774): n is a, c, g, or t
  misc_feature (3776)..(3776): n is a, c, g, or t
  misc_feature (3778)..(3778): n is a, c, g, or t
  misc_feature (3780)..(3782): n is a, c, g, or t
  misc_feature (3787)..(3788): n is a, c, g, or t
  misc_feature (3790)..(3790): n is a, c, g, or t
  misc_feature (3792)..(3795): n is a, c, g, or t
  misc_feature (3797)..(3803): n is a, c, g, or t
  misc_feature (3805)..(3807): n is a, c, g, or t
  misc_feature (3809)..(3814): n is a, c, g, or t
  misc_feature (3817)..(3820): n is a, c, g, or t
  misc_feature (3822)..(3823): n is a, c, g, or t
  misc_feature (3825)..(3836): n is a, c, g, or t
  misc_feature (3839)..(3841): n is a, c, g, or t
  misc_feature (3844)..(3859): n is a, c, g, or t
  misc_feature (3861)..(3866): n is a, c, g, or t
  misc_feature (3868)..(3871): n is a, c, g, or t
  misc_feature (3873)..(3873): n is a, c, g, or t
  misc_feature (3875)..(3877): n is a, c, g, or t
  misc_feature (3879)..(3884): n is a, c, g, or t
  misc_feature (3886)..(3887): n is a, c, g, or t
  misc_feature (3889)..(3893): n is a, c, g, or t
  misc_feature (3895)..(3899): n is a, c, g, or t
  misc_feature (3901)..(3902): n is a, c, g, or t
  misc_feature (3904)..(3904): n is a, c, g, or t
  misc_feature (3907)..(3910): n is a, c, g, or t
  misc_feature (3912)..(3921): n is a, c, g, or t
  misc_feature (3923)..(3923): n is a, c, g, or t
  misc_feature (3928)..(3931): n is a, c, g, or t
  misc_feature (3934)..(3934): n is a, c, g, or t
  misc_feature (3936)..(3936): n is a, c, g, or t
  misc_feature (3938)..(3941): n is a, c, g, or t
  misc_feature (3948)..(3950): n is a, c, g, or t
  misc_feature (3952)..(3956): n is a, c, g, or t
  misc_feature (3958)..(3960): n is a, c, g, or t
  misc_feature (3962)..(3973): n is a, c, g, or t
  misc_feature (3976)..(3976): n is a, c, g, or t
  misc_feature (3978)..(3981): n is a, c, g, or t
  misc_feature (3984)..(3988): n is a, c, g, or t
  misc_feature (3991)..(3991): n is a, c, g, or t
  misc_feature (3996)..(3998): n is a, c, g, or t
  misc_feature (4000)..(4000): n is a, c, g, or t
tgctgatgacgacatagtagatgatgatagtgacgatgatgacgtcatcaataatgttactgatgtgagtaatccactcgacggtttttcagatgtttacacgataatagcaaccggtaagatcaaaagaggtggtaccatagtcgccaaaagacagattaagacaaatgtaaccatcattccctctcctgacgtcgaagtagatcccggtgtacagacaagtggcgatattgttggaacaggtggaggttttggtatgacaaatgacggtggaactctttctacaagttttggttctcccggggtaaataacaatacaggccctgaccctgaggacggtattgttattcgccctgcacagcaattggacgaaaattttgttaaggcctttgctatcgatcaggggcactacaacaccctggacctgacgattggccttgctaatgacaattatccggaaccatcagctccgagtttctatcatgattcaccaacagacacaatgccaaactttacctttgttgagcaagactttaccgttggctcaaaccgtagagcgtatggcgtggtctgggtaaaaggaaacgttgttctggatggaacagccacaatggatgccataataatctgtgaaggtaatattacattcaatggcacatcagatatagtgggaggcataatccattacggtgattatataaatggaaatggaaacccgaccgctatcgcaataaataatgatttttttagtaatctgagtaagtcaatgccgattgtagttgtccaatcatcgcatgaagcagtgtctgctaattaggaaagtgaaaaccatgttaaataaaatacgctcttcaatttcaaatagaagtaaaggaaaacgtctgattggtctggacataggcaactattccgtaaaggcattaggtgtatacgccaacggaaccggtcaaaaaatagagtgccttgcaatgtcagaagcagatagagaaacaaggcagaaaggaagagatccggaggtactaactgagttaattaaaaattgtctggcagagggacgcatttctggcaaagatgttgttattatggtatcaggatcccaggtcttcatccggcgtattaccatgccgacgatgccaaaagaggagttggatgaagtgatgccctttgaggtgcagaaatatgtatccatccctatcgacaagatagttatggactatatggttgtaggtgagaaggaggtagatggagtaaacaagctggatattatcctggttgctgcccccaaagagctggtagagcaggagctttctattgctcgtgctgccggcctgaagcccgtcgcgatcagcgctgccccaatggtacaatggaaaacattcacaatgcgcaatggtgagcagatagataaagtgagcgctatggtggatatcggttatgagagaacagtcatcagcttctttaataaaggagtgctggaatttaccaggtctattaatctgggaggtaatgacgttacaaagtcactgatatcagcaccgataagtgaagcaggcaaagaacttcgtacactgttatatgacgatgcagatgccttaaaacgtgaacatggatttccctctccggaaaaagccggtgcgacaaaggagggtatatcatttgcccatctctctatgctcatgagacctgttctggaaaaactcctgagtgagatcaaggcgagttttgatttctacacaacagagtttaatgtacccaatgtagaaaaaattatcatctccggcggaggttcagaactgaaaggcttaagaggatttctggcaaatgagctgggtatggaagtagagtctgccaatcccacacttggtgctaaatacgcagacggagtatctgaggagattactgcagcgagcactccctctttagtgactgcatatggattggccacatggaagagagacgaattgaacctcatctcaggaaggaaagagaacaaaaaaatcgcctctattacatcacttgctgctccctgcggcgtagctgccatggcaatgcttatcttctatttaaacatttcaggaggagtggctagtgccaaatttgaactggaaggcaaaaagaaggagttatcatctttaagctcagcgactacacgggttctgcagcttggctccaaaaaaagaagactactgacggaaagggattcatacccacaggtacttagagaagatatagattccgctgtgatactaaaagagataaggctgcataccgcagacaatatacgtctggaatacatcagctttctctccgaatcatccacagcagaaaagaaaaaagtaaaggtaacgggaacagcattttttctggataagagaggctctgcaatttcagatttcatgacttcccttgaagattctattagatttgatgacatacggcttatccacctggagcaggacaagaattacacagccgaaggtttaaaatttcagataagctgtttatgcaatactatgtaggagataacagacatggcactaaaaattgatataccaaagttagataaaaagaaatgcctgatgatcggaattatcggatcattagccatgctggcggcattctatcaactatattttgatccttcaaagaaaaagatagccgatataaacagggtaatcgctgatcacaataagaaaatcatcaccgctaaaaaacattctgccatgacaaaaaagatggaagaagaagtagtggctcttgagaagcagctcggtactatcaggaccaagattgccacaagcggagagataattccaataattaatactatagaaaacgaagcgcttcgtcttgatctgaaggtgttaaagatgtccacaagggtagtagaaccaccacctcctcctgcacctgacgcgaatggaaatgcaaatgccgatgctaatactgcccttcccggacaaattcccggttatatcaaggtcacctttgatatcaacctgcagggcaggtacgacaaaatggaaaagttcataagngtactacagganctggcaacgttccttatcattgacacattagagatcagcagtgatgaaaaactgtatcctcagatggtgtcgaatattctgataaacgtttacaacaaaaaagaggtcggcgatgttgttgctgtcaaatagtagggagcgtttccatacgcgccgattaataaatgagtcgggtataaaaacccgacctacagaaaactgacacttttaaatagaactatgaaactaaacaaaactaaactatttttatttactactatcattatcctaaggtttacagctgtttgcgttgctaatataagcagcgacaatgcgaacagcgagtcgaatcctgtaaaggatgaagtgttgatgcgtgacccttttgcactccccctcgatgtaaatttcttaaagaaatcgcaggcatctgagaatgctgactcagaatcgggagaatggatagaaggaatggttgccagcaatgtaagaggcatcttcaggagtaacgggaaatccatagccaatatcaaccatgtatgggtagaaacaggcaaatgggtgggagatgagcaggtaaccgcaataaacaaagacagtgtagtnttntccggaaagagcggagtagaaagaaccattcttatgcaggagaaagttgccagatttgagacnactcagcggattgtatcaaggaccgttaaaggnaaatgaagnantaataantgntngaagnnagctnnannnngnantnnntaaanntntnnnntnnnnnnncnnnannnnnnttnnnncnntnnnnnnnnnnnnccnnntcnnnnnnnnnnnnnnnntnnnnnnannnntntnnntnnnnnntnnannnnntnnnnntnnantannnnannnnnnnnnntntaatnnnnttntngnnnntaaaatnnncnnnnngnnnannnnnnnnnnnntcntnnnnctnnnnnctncaacnnntn

SEQ ID NO: 1448 - DNA, 4000 bp, Escherichia coli
  misc_feature (252)..(252): n is a, c, g, or t
  misc_feature (1173)..(1173): n is a, c, g, or t
  misc_feature (1325)..(1325): n is a, c, g, or t
  misc_feature (3343)..(3343): n is a, c, g, or t
aagagctttgatgatgaaagacgaactaattaagcttggcttgacagaggataaaattttaggagtatttttcaacgtgcccaaggatagcaagggctgtatagagattgggtgtgctaagggaagaaaagttgtcattaatttatttaataaataatgcccccaaaaatatcccttatttattgatgccccttttgatattaactgattgtttaatttgataatttttaaatttatttgatagttttcgtntaaaatttaagataaaaatgcttatgaagaacctatttaaattaataactttgatgcctatgatggtctcgttccaggcatacaccgcgcaaccagatgcagggcaaattattaaagaaattgagcttaatgcgcctaaagttgtgaaagataaattgcttattaagcccaaccaacccattgttgaggataaagatgtcccaaagattgaaatcaagaaattttatataattaacaacaaggcattatcttctaaagaaatcttagcgtatctagacaagtttgtcggtaagcaggttactgtgaatgggctcaatgaaattgtgaatgagttatcaaattattaccgtgatttaggttttctggcacaggcttctttacccgaccaggatgtgacagagggtaatgtattgattaatatcactgagggtaactttgctggtgttgaagttgccaccgttgacggaaacgactcccacattgatcctgaatacgtaaaaaaattctttgaatcacatggcttaaataaaatcctaagccttcatgttgtcgatcgaaaggtacttatttttaatagaaatcatggtgttgaagcaacatcttcactggctgcaggggactatgagggcgacactaaggtactgatccaattggaaaatctaccaagatttgactctgtatttaatttagacaactacggctctagaacaacagggcgaacacgaggtctttacagccttaactggaacaatcccattggcactggagagcaattgcaagcaatttacatgaaaaccgagggtgtagattttattagtttaggttatgacgtgcctattggctatgacggacttcgtgcaaatttaactgttggttacatggagtatgaggtaattcatggtgagtatgaggacaatgacntaaatggagattccctctcgttccaaggcaaatttaactaccccattaaaattagctctcaaggctttatggatgtggtagcgcaatttagcaatagatcattcgttaacgactccggcagtataacgcttagtgagttcgacacaaacgtngcaaaatttggtatcgagggttcatacactgactatatgctgctggaaggagcttctaataactatgggatttttctccacaccggcgatgttgattacgccggctcaacagagaatggtctgtttacaaaattaacttttgagtatgagagggtgcaatacatcgacagctattggtcggctagtttccaaatatcaggacagatagctgacagcaatatgaattcctctgaacaattctatcttggggggcctaccggtatccgagcgtaccctgtcagcgaaggtgggggcacccacggcattctatccaccattgaaatcgcacgctccttaccctacgcacttgaagcaaaggccttctacgatatgggggcaatcaaacaggttaaggaccgttactcgggcgataacgtaacaaacaactcatatagccttaaaggatacggtgctggcctcgagtggagggcccctaacgactcatatttaggtgtaacatggtcacatcgtattggcggtaatccaaataaacagtcggacggaagcgatcaagatggggggcataaagaaaactttatttggctcaatggtcacatcacattttgataattgtgcccctttttttttaaaaaattcttgtttttaggggcaatttataataaagttttagatcgatcaaacagtttaaatttgcgcatgagtttttggaatataaacaaagtcatttttaccttaacgggagcgaccctaggggttttttgttgctcaataaatgctgagcctgtttctaatgccctacccacaggcggatcgatttcaagtggagacgtaatctttactagtgaaggttcaccaactgccccagttttaaatatcaatcaatcctctcaaaaagcggtccttaattggaattcatttgatgtgggatcacaatccactgttaactttaatcaacctaacacatcatcctcaacccttaatcgaattcacagccaaagtgcttctgaaattcatggccgcattaatgctaccggtgaggtattgttggttaatgaaaatggtattttatttggaaaaaattcacgaattgatgtcggatctattgctgcaagtgcaaataacatcaagaatgcggattatctaagcgataactatgtgtttgaggagggtgacaatgagtcaaccgtcaccaataagggtagcatcaaaacaagtcttggtggttacgccgcgctcttagccccccatgtgattaatgagggtatagtgacggcgcaaaaaggtacagtcgcgtttgcttctggaaatataattacccttagtgttaataatggctcacttacgtcgctgaccgtaactccaagtaaatataatgccttcatcgaaaataaatatatcgttgaggccccaggcggccgagttattctctcagcgactgcggtgaaccagattagggggggcgtgatcaaacaggcaggcctcattaatgtaggcaatacaccgactatgattgtaaatgaggcagggcggatcacaatatctagcaatcattatatagctacatcagaatcacaaaccttagcctcggcagaaaaccaaggtggcaagatatcgatcgatgctacaaaaaccgctgtattggaaggtggtgcggtaatgaaagcttcagccacaatgagcggtgatgggggcaacattagcataacctctggcgagcagcttgcactagggggcaacattgaagcgaatggggcaaatgagggtaacgggggcattattacgacgcactcccccaatgttatcagcgtagcatccagccttgctgtgtttgctatggcgggattgaataggatagatgaaaacgaaggtagttggacccatacagcaaatcaacattatatcgataccaatacagctgagatcatttcgaatacacttgatcatgctagcgttatgcttgttgcccaagcaggcgatattgtcatacccagcgatgtaaatgttattaagaagtcgtntaattcgccgaagacatcgttgcgtattatgtcgtcagctagtaccagcatcctcggaagcatctccaataatgaagccacagacttatccgttcaactaagcgccttatcaactattactcttggcagttctgctttcataagggccgcggaggtgagctttgaggctgagagagacatcaatgttctgggggatatttatgtctatggtagtaacaatagctcgcctctagctaggtttatgggggcaaatgtagcattaatgggggcaatttatggtgggcgacaggactcgaaatcttcaaccgtaagagcccatgccagcaagttcctctcaaccggacccaaaagtcgtattcagcttatgggtcgtgatgcgcagcttaatttatcatctgagcacgagttagtcatagagggtagtactatccaaaccaatgcaggcaatggcaggggggggacctacaccattaatgcgctagaggatattcttattagcaatgctaccatctcatccaatgcgagtgagggtggttttattcgaatcacttcatctaagaacaatgtcagtcttaaatcaagcctcatacagaccaatggcagttctggccgtgggggtacaattgagattgccggttataatcacaccgtcctttt

SEQ ID NO: 1449 - DNA, 4000 bp, Escherichia coli
  misc_feature (3)..(3): n is a, c, g, or t
  misc_feature (6)..(6): n is a, c, g, or t
  misc_feature (10)..(11): n is a, c, g, or t
  misc_feature (16)..(17): n is a, c, g, or t
  misc_feature (19)..(19): n is a, c, g, or t
  misc_feature (21)..(21): n is a, c, g, or t
  misc_feature (25)..(25): n is a, c, g, or t
  misc_feature (27)..(30): n is a, c, g, or t
  misc_feature (33)..(33): n is a, c, g, or t
  misc_feature (36)..(39): n is a, c, g, or t
  misc_feature (41)..(41): n is a, c, g, or t
  misc_feature (43)..(44): n is a, c, g, or t
  misc_feature (46)..(48): n is a, c, g, or t
  misc_feature (50)..(50): n is a, c, g, or t
  misc_feature (55)..(55): n is a, c, g, or t
  misc_feature (58)..(58): n is a, c, g, or t
  misc_feature (62)..(62): n is a, c, g, or t
  misc_feature (70)..(70): n is a, c, g, or t
  misc_feature (72)..(72): n is a, c, g, or t
  misc_feature (74)..(74): n is a, c, g, or t
  misc_feature (76)..(78): n is a, c, g, or t
  misc_feature (80)..(81): n is a, c, g, or t
  misc_feature (85)..(87): n is a, c, g, or t
  misc_feature (90)..(90): n is a, c, g, or t
  misc_feature (92)..(93): n is a, c, g, or t
  misc_feature (95)..(95): n is a, c, g, or t
  misc_feature (102)..(102): n is a, c, g, or t
  misc_feature (106)..(106): n is a, c, g, or t
  misc_feature (111)..(111): n is a, c, g, or t
  misc_feature (114)..(116): n is a, c, g, or t
  misc_feature (120)..(120): n is a, c, g, or t
  misc_feature (122)..(122): n is a, c, g, or t
  misc_feature (128)..(128): n is a, c, g, or t
  misc_feature (132)..(132): n is a, c, g, or t
  misc_feature (134)..(135): n is a, c, g, or t
  misc_feature (137)..(137): n is a, c, g, or t
  misc_feature (139)..(140): n is a, c, g, or t
  misc_feature (143)..(143): n is a, c, g, or t
  misc_feature (145)..(146): n is a, c, g, or t
  misc_feature (150)..(150): n is a, c, g, or t
  misc_feature (153)..(153): n is a, c, g, or t
  misc_feature (155)..(155): n is a, c, g, or t
  misc_feature (158)..(158): n is a, c, g, or t
  misc_feature (160)..(161): n is a, c, g, or t
  misc_feature (164)..(164): n is a, c, g, or t
  misc_feature (166)..(173): n is a, c, g, or t
  misc_feature (176)..(176): n is a, c, g, or t
  misc_feature (178)..(179): n is a, c, g, or t
  misc_feature (182)..(182): n is a, c, g, or t
  misc_feature (184)..(184): n is a, c, g, or t
  misc_feature (186)..(186): n is a, c, g, or t
  misc_feature (189)..(192): n is a, c, g, or t
  misc_feature (194)..(194): n is a, c, g, or t
  misc_feature (197)..(199): n is a, c, g, or t
  misc_feature (203)..(204): n is a, c, g, or t
  misc_feature (207)..(207): n is a, c, g, or t
  misc_feature (210)..(212): n is a, c, g, or t
  misc_feature (215)..(215): n is a, c, g, or t
  misc_feature (220)..(220): n is a, c, g, or t
  misc_feature (223)..(223): n is a, c, g, or t
  misc_feature (226)..(227): n is a, c, g, or t
  misc_feature (229)..(229): n is a, c, g, or t
  misc_feature (231)..(237): n is a, c, g, or t
  misc_feature (239)..(241): n is a, c, g, or t
  misc_feature (243)..(243): n is a, c, g, or t
  misc_feature (246)..(247): n is a, c, g, or t
  misc_feature (249)..(249): n is a, c, g, or t
  misc_feature (251)..(253): n is a, c, g, or t
  misc_feature (258)..(260): n is a, c, g, or t
  misc_feature (262)..(264): n is a, c, g, or t
  misc_feature (267)..(267): n is a, c, g, or t
  misc_feature (269)..(272): n is a, c, g, or t
  misc_feature (275)..(277): n is a, c, g, or t
  misc_feature (280)..(280): n is a, c, g, or t
  misc_feature (282)..(282): n is a, c, g, or t
  misc_feature (284)..(284): n is a, c, g, or t
  misc_feature (290)..(295): n is a, c, g, or t
  misc_feature (297)..(302): n is a, c, g, or t
  misc_feature (304)..(304): n is a, c, g, or t
  misc_feature (306)..(307): n is a, c, g, or t
  misc_feature (309)..(309): n is a, c, g, or t
  misc_feature (311)..(311): n is a, c, g, or t
  misc_feature (314)..(314): n is a, c, g, or t
  misc_feature (316)..(316): n is a, c, g, or t
  misc_feature (318)..(318): n is a, c, g, or t
  misc_feature (320)..(322): n is a, c, g, or t
  misc_feature (327)..(328): n is a, c, g, or t
  misc_feature (330)..(332): n is a, c, g, or t
  misc_feature (337)..(337): n is a, c, g, or t
  misc_feature (339)..(339): n is a, c, g, or t
  misc_feature (341)..(341): n is a, c, g, or t
  misc_feature (347)..(353): n is a, c, g, or t
  misc_feature (355)..(357): n is a, c, g, or t
  misc_feature (359)..(359): n is a, c, g, or t
  misc_feature (361)..(362): n is a, c, g, or t
  misc_feature (364)..(367): n is a, c, g, or t
  misc_feature (370)..(374): n is a, c, g, or t
  misc_feature (376)..(377): n is a, c, g, or t
  misc_feature (379)..(381): n is a, c, g, or t
  misc_feature (383)..(389): n is a, c, g, or t
  misc_feature (391)..(392): n is a, c, g, or t
  misc_feature (396)..(397): n is a, c, g, or t
  misc_feature (399)..(400): n is a, c, g, or t
  misc_feature (402)..(406): n is a, c, g, or t
  misc_feature (409)..(409): n is a, c, g, or t
  misc_feature (411)..(412): n is a, c, g, or t
  misc_feature (414)..(418): n is a, c, g, or t
  misc_feature (423)..(423): n is a, c, g, or t
  misc_feature (425)..(431): n is a, c, g, or t
  misc_feature (435)..(435): n is a, c, g, or t
  misc_feature (437)..(439): n is a, c, g, or t
  misc_feature (441)..(442): n is a, c, g, or t
  misc_feature (446)..(446): n is a, c, g, or t
  misc_feature (450)..(450): n is a, c, g, or t
  misc_feature (452)..(455): n is a, c, g, or t
  misc_feature (457)..(460): n is a, c, g, or t
  misc_feature (462)..(464): n is a, c, g, or t
  misc_feature (467)..(467): n is a, c, g, or t
  misc_feature (469)..(471): n is a, c, g, or t
  misc_feature (473)..(473): n is a, c, g, or t
  misc_feature (477)..(478): n is a, c, g, or t
  misc_feature (481)..(481): n is a, c, g, or t
  misc_feature (483)..(483): n is a, c, g, or t
  misc_feature (486)..(486): n is a, c, g, or t
  misc_feature (489)..(489): n is a, c, g, or t
  misc_feature (491)..(492): n is a, c, g, or t
  misc_feature (494)..(494): n is a, c, g, or t
  misc_feature (496)..(496): n is a, c, g, or t
  misc_feature (498)..(500): n is a, c, g, or t
  misc_feature (502)..(506): n is a, c, g, or t
  misc_feature (508)..(508): n is a, c, g, or t
  misc_feature (511)..(515): n is a, c, g, or t
  misc_feature (519)..(519): n is a, c, g, or t
  misc_feature (521)..(522): n is a, c, g, or t
  misc_feature (525)..(528): n is a, c, g, or t
  misc_feature (531)..(531): n is a, c, g, or t
  misc_feature (533)..(537): n is a, c, g, or t
  misc_feature (539)..(541): n is a, c, g, or t
  misc_feature (543)..(545): n is a, c, g, or t
  misc_feature (547)..(547): n is a, c, g, or t
  misc_feature (549)..(549): n is a, c, g, or t
  misc_feature (551)..(551): n is a, c, g, or t
  misc_feature (554)..(555): n is a, c, g, or t
  misc_feature (558)..(558): n is a, c, g, or t
  misc_feature (560)..(566): n is a, c, g, or t
  misc_feature (568)..(568): n is a, c, g, or t
  misc_feature (570)..(573): n is a, c, g, or t
  misc_feature (575)..(575): n is a, c, g, or t
  misc_feature (577)..(578): n is a, c, g, or t
  misc_feature (580)..(581): n is a, c, g, or t
  misc_feature (583)..(583): n is a, c, g, or t
  misc_feature (586)..(587): n is a, c, g, or t
  misc_feature (591)..(591): n is a, c, g, or t
  misc_feature (593)..(594): n is a, c, g, or t
  misc_feature (596)..(598): n is a, c, g, or t
  misc_feature (601)..(603): n is a, c, g, or t
  misc_feature (605)..(605): n is a, c, g, or t
  misc_feature (607)..(610): n is a, c, g, or t
  misc_feature (612)..(612): n is a, c, g, or t
  misc_feature (614)..(618): n is a, c, g, or t
  misc_feature (620)..(623): n is a, c, g, or t
  misc_feature (625)..(628): n is a, c, g, or t
  misc_feature (630)..(631): n is a, c, g, or t
  misc_feature (633)..(634): n is a, c, g, or t
  misc_feature (637)..(637): n is a, c, g, or t
  misc_feature (642)..(643): n is a, c, g, or t
  misc_feature (647)..(647): n is a, c, g, or t
  misc_feature (649)..(653): n is a, c, g, or t
  misc_feature (657)..(657): n is a, c, g, or t
  misc_feature (659)..(661): n is a, c, g, or t
  misc_feature (663)..(663): n is a, c, g, or t
  misc_feature (665)..(665): n is a, c, g, or t
  misc_feature (667)..(669): n is a, c, g, or t
  misc_feature (672)..(674): n is a, c, g, or t
  misc_feature (676)..(684): n is a, c, g, or t
  misc_feature (687)..(687): n is a, c, g, or t
  misc_feature (689)..(689): n is a, c, g, or t
  misc_feature (691)..(694): n is a, c, g, or t
  misc_feature (698)..(698): n is a, c, g, or t
  misc_feature (701)..(701): n is a, c, g, or t
  misc_feature (703)..(703): n is a, c, g, or t
  misc_feature (705)..(705): n is a, c, g, or t
  misc_feature (707)..(707): n is a, c, g, or t
  misc_feature (709)..(710): n is a, c, g, or t
  misc_feature (712)..(713): n is a, c, g, or t
  misc_feature (715)..(715): n is a, c, g, or t
  misc_feature (717)..(718): n is a, c, g, or t
  misc_feature (720)..(720): n is a, c, g, or t
  misc_feature (726)..(728): n is a, c, g, or t
  misc_feature (731)..(733): n is a, c, g, or t
  misc_feature (735)..(735): n is a, c, g, or t
  misc_feature (737)..(737): n is a, c, g, or t
  misc_feature (739)..(739): n is a, c, g, or t
  misc_feature (741)..(742): n is a, c, g, or t
  misc_feature (744)..(744): n is a, c, g, or t
  misc_feature (746)..(747): n is a, c, g, or t
  misc_feature (749)..(749): n is a, c, g, or t
  misc_feature (753)..(753): n is a, c, g, or t
  misc_feature (755)..(757): n is a, c, g, or t
  misc_feature (759)..(759): n is a, c, g, or t
  misc_feature (761)..(761): n is a, c, g, or t
  misc_feature (770)..(772): n is a, c, g, or t
  misc_feature (774)..(774): n is a, c, g, or t
  misc_feature (776)..(776): n is a, c, g, or t
  misc_feature (779)..(780): n is a, c, g, or t
  misc_feature (786)..(786): n is a, c, g, or t
  misc_feature (788)..(788): n is a, c, g, or t
  misc_feature (794)..(795): n is a, c, g, or t
  misc_feature (797)..(797): n is a, c, g, or t
  misc_feature (799)..(799): n is a, c, g, or t
  misc_feature (802)..(804): n is a, c, g, or t
  misc_feature (806)..(806): n is a, c, g, or t
  misc_feature (809)..(809): n is a, c, g, or t
  misc_feature (812)..(812): n is a, c, g, or t
  misc_feature (815)..(815): n is a, c, g, or t
  misc_feature (819)..(819): n is a, c, g, or t
  misc_feature (821)..(821): n is a, c, g, or t
  misc_feature (824)..(824): n is a, c, g, or t
  misc_feature (827)..(828): n is a, c, g, or t
  misc_feature (832)..(833): n is a, c, g, or t
  misc_feature (835)..(836): n is a, c, g, or t
  misc_feature (839)..(839): n is a, c, g, or t
  misc_feature (842)..(842): n is a, c, g, or t
  misc_feature (844)..(844): n is a, c, g, or t
  misc_feature (846)..(846): n is a, c, g, or t
  misc_feature (850)..(850): n is a, c, g, or t
  misc_feature (853)..(853): n is a, c, g, or t
  misc_feature (856)..(856): n is a, c, g, or t
  misc_feature (858)..(858): n is a, c, g, or t
  misc_feature (863)..(863): n is a, c, g, or t
  misc_feature (865)..(865): n is a, c, g, or t
  misc_feature (868)..(868): n is a, c, g, or t
  misc_feature (875)..(875): n is a, c, g, or t
  misc_feature (878)..(878): n is a, c, g, or t
  misc_feature (881)..(883): n is a, c, g, or t
  misc_feature (885)..(885): n is a, c, g, or t
  misc_feature (887)..(887): n is a, c, g, or t
  misc_feature (889)..(889): n is a, c, g, or t
  misc_feature (891)..(895): n is a, c, g, or t
  misc_feature (897)..(897): n is a, c, g, or t
  misc_feature (901)..(901): n is a, c, g, or t
  misc_feature (903)..(904): n is a, c, g, or t
  misc_feature (906)..(906): n is a, c, g, or t
  misc_feature (909)..(910): n is a, c, g, or t
  misc_feature (912)..(915): n is a, c, g, or t
  misc_feature (917)..(920): n is a, c, g, or t
  misc_feature (923)..(923): n is a, c, g, or t
  misc_feature (925)..(926): n is a, c, g, or t
  misc_feature (928)..(930): n is a, c, g, or t
  misc_feature (933)..(933): n is a, c, g, or t
  misc_feature (936)..(936): n is a, c, g, or t
  misc_feature (940)..(940): n is a, c, g, or t
  misc_feature (942)..(942): n is a, c, g, or t
  misc_feature (948)..(948): n is a, c, g, or t
  misc_feature (950)..(953): n is a, c, g, or t
  misc_feature (956)..(956): n is a, c, g, or t
  misc_feature (958)..(959): n is a, c, g, or t
  misc_feature (970)..(970): n is a, c, g, or t
  misc_feature (972)..(972): n is a, c, g, or t
  misc_feature (974)..(977): n is a, c, g, or t
  misc_feature (979)..(981): n is a, c, g, or t
  misc_feature (983)..(983): n is a, c, g, or t
  misc_feature (986)..(986): n is a, c, g, or t
  misc_feature (988)..(990): n is a, c, g, or t
  misc_feature (992)..(993): n is a, c, g, or t
  misc_feature (995)..(998): n is a, c, g, or t
  misc_feature (1004)..(1006): n is a, c, g, or t
  misc_feature (1010)..(1012): n is a, c, g, or t
  misc_feature (1015)..(1015): n is a, c, g, or t
  misc_feature (1017)..(1020): n is a, c, g, or t
  misc_feature (1022)..(1023): n is a, c, g, or t
  misc_feature (1025)..(1025): n is a, c, g, or t
  misc_feature (1029)..(1029): n is a, c, g, or t
  misc_feature (1031)..(1031): n is a, c, g, or t
  misc_feature (1034)..(1034): n is a, c, g, or t
  misc_feature (1036)..(1036): n is a, c, g, or t
  misc_feature (1039)..(1039): n is a, c, g, or t
  misc_feature (1041)..(1043): n is a, c, g, or t
  misc_feature (1046)..(1046): n is a, c, g, or t
  misc_feature (1048)..(1048): n is a, c, g, or t
  misc_feature (1053)..(1053): n is a, c, g, or t
  misc_feature (1055)..(1059): n is a, c, g, or t
  misc_feature (1062)..(1062): n is a, c, g, or t
  misc_feature (1064)..(1065): n is a, c, g, or t
  misc_feature (1068)..(1072): n is a, c, g, or t
  misc_feature (1074)..(1075): n is a, c, g, or t
  misc_feature (1077)..(1077): n is a, c, g, or t
  misc_feature (1079)..(1079): n is a, c, g, or t
  misc_feature (1082)..(1082): n is a, c, g, or t
  misc_feature (1085)..(1085): n is a, c, g, or t
  misc_feature (1088)..(1088): n is a, c, g, or t
  misc_feature (1091)..(1095): n is a, c, g, or t
  misc_feature (1097)..(1097): n is a, c, g, or t
  misc_feature (1100)..(1100): n is a, c, g, or t
  misc_feature (1102)..(1103): n is a, c, g, or t
  misc_feature (2520)..(2520): n is a, c, g, or t
  misc_feature (3353)..(3353): n is a, c, g, or t
tgnaanacannaattnnananaatntnnnnggntannnntncnntnnncngttgnctntttnaaaaatanantntnnntnncccnnnttntnngnctctccnctanaaaanttnnnaaantntaaaanagancnntntnnccncnnaaanacncnttntnntanannnnnnnngananntanananaannnnanacnnngagnnatntcnnnaanaaaanacnccnngnannnnnnntnnnanganntnannntcccnnnannnttntnnnnaannntcncncnataaannnnnntnnnnnnantnntntnaanananannnatttnnannnaaaantncntatatnnnnnnncnnnananntnnnngcnnnnnanntnnngnnnnnnncnnaacnntnncnnnnnaananntnnnnnttttntnnnnnnnaatntnnngnnaaanaaantnnnntnnnncnnnaancnnncnaacnnttntnacnccncnnangntnnncnnnnnanaannnnnttcncnnttnnnnaangnnnnngnnntnnnangngnaannccncnnnnnnnanannnnancnntnnanttnncccncnngnnnccnnntnannnntnannnnntnnnntnnnncnntnncanaaaanntttntnnnnnttcncnnntngnannnggnnnannnnnnnnnttnanannnntttnttntntnancnntnnananntntttttnnnaannntnangnanncncnntnaaanannnananaaaaaaaannnanantgnnaaaaanantttttnnananttnnngnttnaanttnggananacnccnnaaanntnnagnggnanantttnaangtntnttttntnttnttttttnttnttnnntntntnannnnntnttananntnttnnannnncnnnnttnanngnnntanaanaaananaaaatntnnnnaancnnttttttttatntnannnnannnanaantnnntnnannnnaaatannntttnnntanannnnanngntttntnttntnttntnnnaanantttanannnnnttntnnaannnnncnntntnaanttnggnaannnnnanttntnnaaaaaaaaatgttgttgaaattatatctgtgaaaaggtgattattttaattttgttgaaattgatttacctaaaaaattaaaacatctttatccggggtacattaaaacactaattgttacatgaataagtaattatgattatttcaatatagagctaattaatttaccaaaatcaaacttttagaagacaacaataaaacttattaggtgatttttggtttttatccgttatttgcaaaaaactttcctttgaattatctgactgttgaaaacatatccaaatcttatggagaacttacactatttgaaaatatttcatttagtgtccataaagatcaaaaaatagcttttgttgccaagaatggaacaggaaaaacttccattttaaatattttatctggtgatgatactgccgattctggtgacgttatatttagaaaagatattaatgtttcgtttttgtcacaagatcctaaatttgacgaaaaacgcactattgaagatactattctagcaagtgacaaccctattttaaaagtgatttcaaattatgaaaaagcacttttaaatccagaagatacagacacatatcaagctgcttttgatgctatggaacatcatcaagcttgggatttcgaaactctttataaacaagtacttttcaaattaaaacttgaaaatttagatcataaggtaagtacgctttctggtgggcaaaaaaaacgtctcgcactcgcaaatgcgttaatcaataaaccagatttattagttttagatgagcctacaaatcatttagacttagaaatgatagagtggttagaatcttttttcgcaaaagaaaacatcacactttttatggtaactcacgatagatacttccttgagcgagtgtgtaatgagattattgaattagacgaaggtcaactgcacagctataaaggtaattactcatactacctagaaaagcgggatgccagaattgagcaacaagctgtagaaacaggaaaagcgaaacaactctttaaaaaggaattggattggatgcgacgccaacctaaagcccgaaccaccaaatctaaatctagaattgatgattttgcagatataaaacatcgtgcgcatcaacgtagaaatgaccatgaggttcagttagaacttaacatggaacgtttaggaagtaaaattttagaattccataaagtatcaaaagcatataaagataaaaccattttagatggatttaattatatgtttcaaaaaggggaacgcgttggtattattggaaaaaacggaacaggaaaaacgacgtttctgaatatacttaccgaaacggctaaaccagattcgggaaaagttatcactggagacactattaaatttggctattacacacaaaacggtattaccattaaaccngagcaaaaagttattgatgttattcgtgaatttggtgattatattccattaaagaaaggcaagcaaataagtgcacaacaacttttagaacgttttttattcagtagaaaaaagcaatatgattttgttgaaaaactaagtggtggcgagcgtaaacgattgtatttatgtacagttctaattcagaatcccaactttttaattcttgatgagcctacaaacgatttggatatagtaacacttaatgttttagaaagtttccttctagattttccaggatgtgttattgttgtaacgcacgatcgttattttatggacaaagtaatagatcatttactaattttcaagggtgatggtgttattgaagattttccaggaaattatacagattatcgagtttatgaagacagccaacctgtgattactaaaacatctgaagggaaaaaagataaacaatcttggaaaaagaatgaagtttctaagctttcttataatgaagaaaaagaactaaaaaacatagagagcaaattaaaatcattggcatttgataaaaaggaactggaaaataagtttcataatcctgagttatcccaagatgacatcaataaattatctgctgagctacaaaaaattatagacactattgaaactaaagaagaacgctggttagaactgtcttctatgcttgaggattagtgttttcgtaattgaatactaaaatgatctatcaaatcactcaatacataaagtttttatttaagagtaccaaccaacacggcgtgcactccccgtttgtttatgatttagtaactcaatgtttttatgataaaacnaattacgaggcctataatgctatttttaattatagaaaagcgttactagagcgtaacactaaaattaaagtcgaagacttaggggctggttcacgcgtcatgaaacatcaagaacgcacagtttctgatatcgctaaaaaagctggcacaactcacacaagagcaaggcttttatacagactaacaaattattttaaacctgataatattttagagttgggaacgtctttaggtattgcaacatatgctatgcattcaggaactcccaaatcacatattacatccattgaaggatgccctaacacctcagcgttttcaaaaaagcaattcaagattcaaggtgcagaacatataaatattattactggggattttaataatgaaattgaaaagctaagttcaaatagttatgatttaattttctttgacggaaaccatcaaaaagaagcaactttgaaatattttgaaaccttattaaatacagctaataacgattctgtttttatttttgatgatatttactggtctgaaggtatgactagagcttgggaaatcatcaaagaacaccctaaagtaacgattactattgatacctttttttggggattcgttttctttagaaaggaacaagaaaaagaacacttcaa

SEQ ID NO: 1450 - DNA, 4000 bp, Escherichia coli
  misc_feature (1)..(3): n is a, c, g, or t
  misc_feature (5)..(10): n is a, c, g, or t
  misc_feature (13)..(15): n is a, c, g, or t
  misc_feature (17)..(20): n is a, c, g, or t
  misc_feature (22)..(29): n is a, c, g, or t
  misc_feature (31)..(33): n is a, c, g, or t
  misc_feature (35)..(35): n is a, c, g, or t
  misc_feature (39)..(41): n is a, c, g, or t
  misc_feature (43)..(44): n is a, c, g, or t
  misc_feature (47)..(51): n is a, c, g, or t
  misc_feature (54)..(54): n is a, c, g, or t
  misc_feature (56)..(59): n is a, c, g, or t
  misc_feature (61)..(62): n is a, c, g, or t
  misc_feature (64)..(68): n is a, c, g, or t
  misc_feature (70)..(72): n is a, c, g, or t
  misc_feature (74)..(74): n is a, c, g, or t
  misc_feature (76)..(83): n is a, c, g, or t
  misc_feature (85)..(87): n is a, c, g, or t
  misc_feature (90)..(94): n is a, c, g, or t
  misc_feature (96)..(112): n is a, c, g, or t
  misc_feature (114)..(118): n is a, c, g, or t
  misc_feature (120)..(121): n is a, c, g, or t
  misc_feature (123)..(125): n is a, c, g, or t
  misc_feature (127)..(129): n is a, c, g, or t
  misc_feature (133)..(133): n is a, c, g, or t
  misc_feature (135)..(140): n is a, c, g, or t
  misc_feature (144)..(150): n is a, c, g, or t
  misc_feature (152)..(152): n is a, c, g, or t
  misc_feature (155)..(158): n is a, c, g, or t
  misc_feature (160)..(166): n is a, c, g, or t
  misc_feature (169)..(169): n is a, c, g, or t
  misc_feature (171)..(172): n is a, c, g, or t
  misc_feature (174)..(177): n is a, c, g, or t
  misc_feature (179)..(179): n is a, c, g, or t
  misc_feature (181)..(181): n is a, c, g, or t
  misc_feature (185)..(188): n is a, c, g, or t
  misc_feature (190)..(192): n is a, c, g, or t
  misc_feature (194)..(197): n is a, c, g, or t
  misc_feature (199)..(199): n is a, c, g, or t
  misc_feature (201)..(202): n is a, c, g, or t
  misc_feature (204)..(207): n is a, c, g, or t
  misc_feature (209)..(212): n is a, c, g, or t
  misc_feature (214)..(214): n is a, c, g, or t
  misc_feature (216)..(219): n is a, c, g, or t
  misc_feature (221)..(221): n is a, c, g, or t
  misc_feature (223)..(231): n is a, c, g, or t
  misc_feature (234)..(240): n is a, c, g, or t
  misc_feature (242)..(242): n is a, c, g, or t
  misc_feature (244)..(259): n is a, c, g, or t
  misc_feature (263)..(264): n is a, c, g, or t
  misc_feature (267)..(269): n is a, c, g, or t
  misc_feature (272)..(272): n is a, c, g, or t
  misc_feature (274)..(282): n is a, c, g, or t
  misc_feature (285)..(285): n is a, c, g, or t
  misc_feature (287)..(288): n is a, c, g, or t
  misc_feature (290)..(290): n is a, c, g, or t
  misc_feature (292)..(292): n is a, c, g, or t
  misc_feature (294)..(297): n is a, c, g, or t
  misc_feature (300)..(300): n is a, c, g, or t
  misc_feature (302)..(303): n is a, c, g, or t
  misc_feature (305)..(316): n is a, c, g, or t
  misc_feature (318)..(319): n is a, c, g, or t
  misc_feature (321)..(322): n is a, c, g, or t
  misc_feature (326)..(326): n is a, c, g, or t
  misc_feature (328)..(330): n is a, c, g, or t
  misc_feature (332)..(332): n is a, c, g, or t
  misc_feature (334)..(339): n is a, c, g, or t
  misc_feature (341)..(343): n is a, c, g, or t
  misc_feature (346)..(346): n is a, c, g, or t
  misc_feature (350)..(352): n is a, c, g, or t
  misc_feature (354)..(356): n is a, c, g, or t
  misc_feature (361)..(361): n is a, c, g, or t
  misc_feature (364)..(364): n is a, c, g, or t
  misc_feature (366)..(368): n is a, c, g, or t
  misc_feature (370)..(371): n is a, c, g, or t
  misc_feature (373)..(376): n is a, c, g, or t
  misc_feature (379)..(382): n is a, c, g, or t
  misc_feature (385)..(386): n is a, c, g, or t
  misc_feature (388)..(392): n is a, c, g, or t
  misc_feature (394)..(397): n is a, c, g, or t
  misc_feature (400)..(402): n is a, c, g, or t
  misc_feature (404)..(404): n is a, c, g, or t
  misc_feature (408)..(410): n is a, c, g, or t
  misc_feature (412)..(412): n is a, c, g, or t
  misc_feature (415)..(425): n is a, c, g, or t
  misc_feature (427)..(436): n is a, c, g, or t
  misc_feature (438)..(438): n is a, c, g, or t
  misc_feature (440)..(443): n is a, c, g, or t
  misc_feature (447)..(447): n is a, c, g, or t
  misc_feature (450)..(452): n is a, c, g, or t
  misc_feature (454)..(454): n is a, c, g, or t
  misc_feature (456)..(459): n is a, c, g, or t
  misc_feature (461)..(461): n is a, c, g, or t
  misc_feature (463)..(471): n is a, c, g, or t
  misc_feature (473)..(473): n is a, c, g, or t
  misc_feature (475)..(477): n is a, c, g, or t
  misc_feature (479)..(480): n is a, c, g, or t
  misc_feature (483)..(485): n is a, c, g, or t
  misc_feature (487)..(488): n is a, c, g, or t
  misc_feature (490)..(492): n is a, c, g, or t
  misc_feature (495)..(497): n is a, c, g, or t
  misc_feature (499)..(502): n is a, c, g, or t
  misc_feature (504)..(512): n is a, c, g, or t
  misc_feature (514)..(520): n is a, c, g, or t
  misc_feature (522)..(525): n is a, c, g, or t
  misc_feature (527)..(532): n is a, c, g, or t
  misc_feature (535)..(539): n is a, c, g, or t
  misc_feature (541)..(541): n is a, c, g, or t
  misc_feature (543)..(544): n is a, c, g, or t
  misc_feature (547)..(549): n is a, c, g, or t
  misc_feature (551)..(557): n is a, c, g, or t
  misc_feature (559)..(559): n is a, c, g, or t
  misc_feature (561)..(562): n is a, c, g, or t
  misc_feature (564)..(565): n is a, c, g, or t
  misc_feature (567)..(573): n is a, c, g, or t
  misc_feature (577)..(578): n is a, c, g, or t
  misc_feature (581)..(583): n is a, c, g, or t
  misc_feature (585)..(585): n is a, c, g, or t
  misc_feature (587)..(589): n is a, c, g, or t
  misc_feature (591)..(595): n is a, c, g, or t
  misc_feature (598)..(598): n is a, c, g, or t
  misc_feature (601)..(603): n is a, c, g, or t
  misc_feature (607)..(609): n is a, c, g, or t
  misc_feature (611)..(611): n is a, c, g, or t
  misc_feature (948)..(948): n is a, c, g, or t
  misc_feature (1119)..(1119): n is a, c, g, or t
  misc_feature (2369)..(2369): n is a, c, g, or t
  misc_feature (3086)..(3086): n is a, c, g, or t
nnngnnnnnnttnnntnnnntnnnnnnnnannnanctannnanngannnnnganannnngnncnnnnngnnngntnnnnnnnncnnncgnnnnncnnnnnnnnnnnnnnnnntnnnnntnnannnannnagtnannnnnntgannnnnnncntgnnnntnnnnnnnatngnnannnncntntaannnntnnntnnnncnannannnntnnnntnannnntngnnnnnnnnncannnnnnntncnnnnnnnnnnnnnnnncaannaannnagngnnnnnnnnngcntnntntntnnnngcncnntnnnnnnnnnnnnanntnnctgncnnncntnnnnnntnnnttncttnnntnnncttanttntnnntnngnnnncgnnnncanntnnnnngnnnnctnnntngctnnntnctnnnnnnnnnnnannnnnnnnnncnannnntttnttnnntncnnnntngnnnnnnnnntntnnntnngtnnntnntnnntcnnncnnnngnnnnnnnnntnnnnnnncnnnntnnnnnncannnnntntnnctnnntnnnnnnnancnnanncnnnnnnnatannaannnangnnntnnnnnttnagnnntagnnnanccacaccctaagcaacttataggcttaaattgacaaactgccctatcagcacgtctagttttacgccctcaaataatccgcggcgtatatatctttgttaagcagcacatcacacgtttttatcgtgtctattaagtctcgatcctccgtatttattatagctgatgaaagaccggcgccaataagcatggctaaaaacgttctttctataagccgcgggttcttcgtgtcgtgcgagatgttgctgaggccaacggtcgtctttagaacggacgcgggactggtaagcattccaattcgccgcaccgcttcgacgactgccggtgcctgatcttgngctgtgctcaccggaagacaaactggatcaacgtacagcttctcgacgtcgatcccgtgctcgcaggcgcctgcgacaattatcgccgcccgttctacccgtttgtctacgtcgccaaggatgaattgctcgtccatcgtcatgcaaataatgtctgaatcgtattctgcngcaagtggaaaaagcgttgtcatcttctcctgttcagcggagatcgaattgatcatagatcttcctttgacctcactaatgcctgctttcatcacatcgagtttcggagtatcgactgaaagcgtaacgtcgaccacgtcttgtactgtcgtcactagccatctcattagctcaactgcgtcgctcttgccaagcccaacgttaaggtcaatgatttgtgcccccacgtcgacttggcgaattgctaggtcctgaatggcctttgtgtctcgtctatcgatgatggtccccacagtttttgagtagccgttgatgttgccgccaataattatcataggtatccccgctgctcccgcgcaagtgattagatgtgtgttatactttaacgctttcggatgagcgcgtacgaagctagccttctcgcaacctatatataaaaatatagtaaataacgacacgtcgattttgaacatatgtaaggcttttggggcaatttgaagaaagaattcaaggttgtttttaaacctgataacaaaaccgtcaaggttgaacgcggaaccaccgtacttgatgctgccacgagctctgacatctatatcgacagcatctgcggaggccggggcaaatgcggtaagtgtaaggtcctcatcgacggaaacgtccagagcgacgaaactgacatacttaccgctgaagaaaaagcgcgcggctattttttggcgtgtttggctcgagtcgctggcaatttgaaagtgaccgtaccaaaagaaagcagagtggagtcacaccaaatactcatgaaaagcgtgatcgcgcccttgccagcgattgctccgcccgtactgaaggtgccgctttccctcactcccccgtcgttagccgattacgtgagcgaccttgatagagtgacgcatgcgctgcgcaatctcgatatggggcacgttacgatcgggctaccgaccttaaagaagttaagcaaggtactccgagacaaccaatggaacgtgaacgtgacgctgatggatctctgggacagaaaagagattatcgacgtcggcccgccttcagacaacgatctaatcgggatcgcggtggacataggcactacgacgatcgtcgtcgagttagtggatttgacctctggcaaggtgattgacgcgcgatccgactataacaagcaagttgtgtacggcgaggatgtcctttcacgagtgatgtacacagaggagcacgaagatggcctccagaanctaacgagcacaattagatacggtatcaacgacctcatacgagagctcgtcatcgaaaataacacgcgatacgaaaagatttgccgcgcagtcctttcaggcaataccgttatgatgcaccttttttatgggttggatcccaagtacatacgccacgagccgtatatcccagtgatgtccttcgttccccagatgaaggcagttaagctcgggctgagcatcaacccaaacgcgtatatctatgcgcttccgtgccgaagcagctacgtcggcggcgacgtcacagctgacgtcattgcgtcaggaatgagcgacaataaggacgtttcactgctaatcgacgtcggcaccaacggcgaggtcgtgctcggaaataataccttcctcgtgtcgtgctcttgttcagcgggtccggcctttgaaggcggggaagtggagttcggcgtacgggcgatgaacggcgcaattgagcgcgtgtggatcaacaacggcctagtagagtactcgaccatcggcaacgcaaaggcaaagggcatttgtggatccggccttatcgaactcatcgcagagctctttagtaacggcgtgattgaccgaacggggaaaatccagctggacactaacaacatcaggactgaggtcggaagcaacggcaaccagttccttgtggcgttcaaagaagacacggccatcgacaaaaatatagtgatgaccgangtagacattcaaaacatattgcgaacgaaggccgctgtctatgcgagctgtagcgtgctgctcaaaacgtttggctaccaatttagtgaccttagcaacgtcttcatcgctgggagtttcggcaactacctcgacgtcaagaaagccatcacgattggattgttgcctgatctatcgcttaacacgttcaagttcatcggcaatggggctcttggtggagcgcgaatggtgttactgtcgcgagatctgcaagacaaagcggcagaaatcgtcaaaaatatgacacacatcgagttgagcgtcagcagcatgttctttaaagagtttacttcagcattgttcattcctcacacggaacttgaccagtttccccacgtttccaaacgaggttatacataaaggctcaagcggagtcaggttatcatttaccctgtttctgagcagtaatcctgtagacagaagacttgtgagagggcgtgtctgcttctgagctgtaacgagggtgtgcaattttaagtagcatagcagtataattttaggtagtagggcttacagtacggaaaacagcatgcaaaccattgctataacgggtaaaggtggcacgggcaaaacgacttttgcctctctccttgtaaaacatctgagcgccaataacaaagccattttggcagttgatgcagatcccaactcaaacttagatatgcgactgggacttcgcgtccagcagacaattggcgacttacgagaagacctgcttaaaaagtcttttcccgcaggggttgccaaaaatgagcttattgagtaccaaatacgactagctctcgttgaaggggatacgttcgaccttattgccatgggacggcccgaaggacccggatgctactgctatatcaacaacgtgttgcgggatgtcc

SEQ ID NO: 1451 - DNA, 4000 bp, Escherichia coli
  misc_feature (1)..(11): n is a, c, g, or t
  misc_feature (14)..(24): n is a, c, g, or t
  misc_feature (26)..(27): n is a, c, g, or t
  misc_feature (31)..(33): n is a, c, g, or t
  misc_feature (35)..(43): n is a, c, g, or t
  misc_feature (47)..(56): n is a, c, g, or t
  misc_feature (60)..(68): n is a, c, g, or t
  misc_feature (149)..(149): n is a, c, g, or t
  misc_feature (1772)..(1772): n is a, c, g, or t
  misc_feature (1942)..(1943): n is a, c, g, or t
  misc_feature (1948)..(1949): n is a, c, g, or t
  misc_feature (1960)..(1960): n is a, c, g, or t
  misc_feature (1966)..(1966): n is a, c, g, or t
  misc_feature (1973)..(1973): n is a, c, g, or t
  misc_feature (1978)..(1978): n is a, c, g, or t
  misc_feature (1985)..(1985): n is a, c, g, or t
  misc_feature (1990)..(1991): n is a, c, g, or t
  misc_feature (2000)..(2000): n is a, c, g, or t
  misc_feature (2003)..(2003): n is a, c, g, or t
  misc_feature (2009)..(2009): n is a, c, g, or t
  misc_feature (2018)..(2018): n is a, c, g, or t
  misc_feature (2050)..(2050): n is a, c, g, or t
  misc_feature (3633)..(3633): n is a, c, g, or t
nnnnnnnnnnnaannnnnnnnnnncnncccnnntnnnnnnnnncccnnnnnnnnnncccnnnnnnnnnccccccgtgtctcaaaagccaccacatggaaccgccccagcggatggatgtatatcaccgttccgtcgtaggcgcgtctgngtgcctttcttttccggttccggtctctgatctcttccgtctctccgaaagtctccggcacccgctgcactctgtctccgatcttcacagtgctttccctccgtggcggtacgggcgcgtgcggttgtactcgtgcttctgcgccagcaccgcctccacatccacgccttccttgccgcaccagtcgaggatgcggatgaggcagtccaccatctccgtggcaatgccctccggcttgcagctgtgctccggcttgccatccacttcgcactgtgtttccttgtcgcagtggccgcagcagccgtagatcatgggtttcccgttgcggtattcctccagcgcctcggacagttcgctgtggcacagcgccacaatgtctccgaagctgcgcggctcgtcccaccagccgtgctccaccgcgttctggtgaatgtcccgtgcccactcgttcagtgtctttgccatattcaattcctcccggttatgtattgccccgcatcagggtctgcctgatggagtacgctttttcatgcgcgcaggctgcgccgccgaagaaccgctccactcacgcctgcgcatctcgaagtggatatatgtccctcggttgatattgttcttgtagcaggtggcctccaccagctgaaagtccgggtagcggtcttcaaaccactgccactgcgttccgcactcgatggcctcctcgatgtctgctatgtcgtccatgttcagctgcccgtcaaactgcgcgcactgcgggatggtcaggttccggctctggttccagcgcttgaagaaatgcttgtccttggcgatgtagtgcgcaaggccggtcacgccggattcgttgaactgcagccgcttgctgttggcgtatcccagcccccacaccttctcgatggtgtcgcggtctaatcctccgctgagaatgacatggtgatgcactcttccgctggtcttgccgtattctgtgcagctgatgtacttcagttccatccccagctttgcataccggcgcttcagtcttcggatgtaattgctcaggatgtgctgcgcttcctcctccgtctgcggctcttcgccgggacggtaggtcagatgcagggcaatgtcatcctcggtgaagttgctgtgcactaagcgggtcagcttcttctccgcgttcttctggttcagcttctgctgaatttcgctcgtgggcttgcaccgcgatctccgcttccccggcgcttggaataccggatatatgtctccgtccatgtaatcgccgcagacatatacgctctcccggttgaatgttctccctgtgtacatccccgcagctcctctctggttgctaagttaagattggttacaagcctcaattcgcgcgtgcgcgcgcgaattatatataagtattcagcctgccatcgtcagtgccgggaggctgtccccggcagacaggacgcacagcgcgccctgtttcggctatgtggataaataatgcccgtagcaccacgctggcggtgcattcccttccacgcacgcttccttgcccttcggaaaaagctgcgtcacccgcccgtaggcgctctgcggtttcatcatgggaacgccgtccgcccgcgccggtgcgcgttcctccgnccttgcccggtatccgcagcgcagcgcgtctgtgtcgcggctccattcctcccggaaggcatgtgcgcagctgctgcagctcggtttcatgtttcgctccttcccgcgcgcacgcggcgcgcggatggtttcgatctcagattaaaggcagaagccgaaggccacgccanncgcanngctcgcgtagnagtagntggcgtngccgntgctgtngacanngcagaaatncgnggagtngctgccatncggagagcgaagccagtaccaccatgtaccgntccccggtctctctttcacgcggctgcgctccgtgctgaacagctccagctgtgtctcatctgtgtccgccggtgcccagtcctctgctccttccttaccgaacatctctgtgaacgacggcagccacagcttgtcctcgctctccagtcgttcgccgtccatggtctgcacgatgcggcgcggcacgatcatctcccgcagctcatccggcagcatgcggataatggtttcgttgagccacaggcgcatctcgctgtcccgccagccgcctttgctggtcatgcgcttgttcatcccgtgttcgtccttcatgcagtccttcagcaggaaaatcagcccacgctccgtggttcccacggcctgcaccgtcagctcttcgccggtcttcagcgtgatgtccagctcatctcccacctgcagcagctcctgcagctttccgtccgcctgcgccttcttaatggtgttccactcgatctcgcttgtgatggtctttctgatattcatggggcatcctcctgattatctgtaccgttcatcccacggtacgaagtattttccgcacgccttcttcaggcgctcgtccaccttgccctgcgtgaaccatatctgcttgtcggtctttgcatccgcaaggcacatttccgcataggtcataaaggtctggtcgtagcagtcgctcagcttcttcagccgctcttcgccccagccgaagtcttcgtgcatggtgatgagcatcatgtccttgcactgctgcagcgtaaagcgccgggtcttctcatcccgaacagcctgctgcgccgccagcttctgtaggtatccgctctgctttgccatcgcttatccctccagtgtttccttcagcgccagcagcttttcaatggtgtcctcataggccgcctccagcagcaccgcgcagtctgtcatgccctcgttgccgtatgggcagccccagtgttcctcgctgctgcatacccgcttgccgcaggcatccatcagctccacagtctgccgcgcgtccttcagctccttcagcagcccctgtgccttttgcagcgtctcaggctccagatcgctgcgctcgtattcccgcagcttctcgtagcagcgccgctgatcgcatcgtccatcctcgcagaagctcccgccggggatggaatcgcactgcgcaatgtcgcagaaggaaaggtcggtgtccactgtcagccgtttcatttgccgcacaccgccggtctgctctgcagctctccgccgcaggccgcatagcccgcaaggtctacccagttgtcgctcttgccgtgtcctgtggcaatgcgtgcgatcttcagcagcgccagcagcgccgccacatcctccggcacgatgcaaacctccgccgccgggtctccgacgcatttttctttgatgtaggtctcccacagctccccgatcacacggaagctgtcctccggtgtgccgtagtcttcttctctctgcccgcacacgcagacctccgccgcgtgcagcaattcgcttctcgtcatcattcgtcctccccgtgcagcaccgcgatgtttgccagcacgctggcattcgtccactccanggccaacaggatcgcgctacgctggaactcgcccgccagcgcgcagaatgcgtcgccgttatggtctttcaccgcgctccacatatccttgtgcacgtccttgatggccttcatccggctctccacgttctcgatgttttccttcagctgcgcccatgcctcccggtcactggcaaatccgcgtccgcgttcttccataattccgctcagcagctccgcagaggtcgcctgcatgttgcccatcaacttctgctgtgcgctcagattatccatgctgcacctccgcgatctcccagtcctccgccagcatgtccgtctggcttgccagccacggcacgcagctgcgcggtgcatccggattgttgct

SEQ ID NO: 1452 - DNA, 4000 bp, Escherichia coli
  misc_feature (955)..(955): n is a, c, g, or t
  misc_feature (1079)..(1079): n is a, c, g, or t
  misc_feature (1926)..(1926): n is a, c, g, or t
  misc_feature (1985)..(1985): n is a, c, g, or t
  misc_feature (1992)..(1992): n is a, c, g, or t
  misc_feature (1995)..(1995): n is a, c, g, or t
  misc_feature (2445)..(2445): n is a, c, g, or t
  misc_feature (2521)..(2521): n is a, c, g, or t
  misc_feature (2624)..(2624): n is a, c, g, or t
  misc_feature (2846)..(2846): n is a, c, g, or t
  misc_feature (2849)..(2849): n is a, c, g, or t
  misc_feature (3372)..(3377): n is a, c, g, or t
  misc_feature (3380)..(3380): n is a, c, g, or t
  misc_feature (3384)..(3386): n is a, c, g, or t
  misc_feature (3389)..(3389): n is a, c, g, or t
  misc_feature (3391)..(3391): n is a, c, g, or t
  misc_feature (3393)..(3395): n is a, c, g, or t
  misc_feature (3397)..(3402): n is a, c, g, or t
  misc_feature (3404)..(3404): n is a, c, g, or t
  misc_feature (3406)..(3408): n is a, c, g, or t
  misc_feature (3411)..(3411): n is a, c, g, or t
  misc_feature (3414)..(3414): n is a, c, g, or t
  misc_feature (3416)..(3417): n is a, c, g, or t
  misc_feature (3419)..(3421): n is a, c, g, or t
  misc_feature (3423)..(3423): n is a, c, g, or t
  misc_feature (3425)..(3425): n is a, c, g, or t
  misc_feature (3428)..(3428): n is a, c, g, or t
  misc_feature (3430)..(3432): n is a, c, g, or t
  misc_feature (3435)..(3435): n is a, c, g, or t
  misc_feature (3439)..(3440): n is a, c, g, or t
  misc_feature (3444)..(3445): n is a, c, g, or t
  misc_feature (3447)..(3449): n is a, c, g, or t
  misc_feature (3452)..(3454): n is a, c, g, or t
  misc_feature (3457)..(3457): n is a, c, g, or t
  misc_feature (3459)..(3459): n is a, c, g, or t
  misc_feature (3461)..(3461): n is a, c, g, or t
  misc_feature (3463)..(3466): n is a, c, g, or t
  misc_feature (3468)..(3469): n is a, c, g, or t
  misc_feature (3473)..(3473): n is a, c, g, or t
  misc_feature (3477)..(3477): n is a, c, g, or t
  misc_feature (3481)..(3482): n is a, c, g, or t
  misc_feature (3485)..(3486): n is a, c, g, or t
  misc_feature (3489)..(3489): n is a, c, g, or t
  misc_feature (3491)..(3491): n is a, c, g, or t
  misc_feature (3495)..(3496): n is a, c, g, or t
  misc_feature (3498)..(3498): n is a, c, g, or t
  misc_feature (3500)..(3500): n is a, c, g, or t
  misc_feature (3502)..(3502): n is a, c, g, or t
  misc_feature (3506)..(3507): n is a, c, g, or t
  misc_feature (3510)..(3510): n is a, c, g, or t
  misc_feature (3513)..(3513): n is a, c, g, or t
  misc_feature (3518)..(3525): n is a, c, g, or t
  misc_feature (3529)..(3529): n is a, c, g, or t
  misc_feature (3532)..(3533): n is a, c, g, or t
  misc_feature (3535)..(3535): n is a, c, g, or t
  misc_feature (3538)..(3539): n is a, c, g, or t
  misc_feature (3541)..(3541): n is a, c, g, or t
  misc_feature (3543)..(3544): n is a, c, g, or t
  misc_feature (3547)..(3547): n is a, c, g, or t
  misc_feature (3551)..(3551): n is a, c, g, or t
  misc_feature (3553)..(3553): n is a, c, g, or t
  misc_feature (3555)..(3555): n is a, c, g, or t
  misc_feature (3558)..(3558): n is a, c, g, or t
  misc_feature (3560)..(3560): n is a, c, g, or t
  misc_feature (3563)..(3563): n is a, c, g, or t
  misc_feature (3565)..(3572): n is a, c, g, or t
  misc_feature (3574)..(3574): n is a, c, g, or t
  misc_feature (3577)..(3577): n is a, c, g, or t
  misc_feature (3579)..(3579): n is a, c, g, or t
  misc_feature (3583)..(3583): n is a, c, g, or t
  misc_feature (3585)..(3587): n is a, c, g, or t
  misc_feature (3589)..(3592): n is a, c, g, or t
  misc_feature (3594)..(3595): n is a, c, g, or t
  misc_feature (3597)..(3597): n is a, c, g, or t
  misc_feature (3599)..(3601): n is a, c, g, or t
  misc_feature (3603)..(3603): n is a, c, g, or t
  misc_feature (3605)..(3607): n is a, c, g, or t
  misc_feature (3609)..(3609): n is a, c, g, or t
  misc_feature (3614)..(3614): n is a, c, g, or t
  misc_feature (3619)..(3619): n is a, c, g, or t
  misc_feature (3621)..(3625): n is a, c, g, or t
  misc_feature (3627)..(3633): n is a, c, g, or t
  misc_feature (3636)..(3640): n is a, c, g, or t
  misc_feature (3642)..(3643): n is a, c, g, or t
  misc_feature (3645)..(3647): n is a, c, g, or t
  misc_feature (3649)..(3649): n is a, c, g, or t
  misc_feature (3653)..(3659): n is a, c, g, or t
  misc_feature (3661)..(3661): n is a, c, g, or t
  misc_feature (3663)..(3663): n is a, c, g, or t
  misc_feature (3665)..(3665): n is a, c, g, or t
  misc_feature (3667)..(3667): n is a, c, g, or t
  misc_feature (3672)..(3673): n is a, c, g, or t
  misc_feature (3675)..(3676): n is a, c, g, or t
  misc_feature (3678)..(3679): n is a, c, g, or t
  misc_feature (3681)..(3690): n is a, c, g, or t
  misc_feature (3692)..(3692): n is a, c, g, or t
  misc_feature (3694)..(3695): n is a, c, g, or t
  misc_feature (3698)..(3698): n is a, c, g, or t
  misc_feature (3701)..(3704): n is a, c, g, or t
  misc_feature (3706)..(3706): n is a, c, g, or t
  misc_feature (3708)..(3708): n is a, c, g, or t
  misc_feature (3710)..(3710): n is a, c, g, or t
  misc_feature (3713)..(3713): n is a, c, g, or t
  misc_feature (3715)..(3717): n is a, c, g, or t
  misc_feature (3719)..(3721): n is a, c, g, or t
  misc_feature (3723)..(3723): n is a, c, g, or t
  misc_feature (3728)..(3728): n is a, c, g, or t
  misc_feature (3730)..(3730): n is a, c, g, or t
  misc_feature (3739)..(3743): n is a, c, g, or t
  misc_feature (3745)..(3745): n is a, c, g, or t
  misc_feature (3749)..(3749): n is a, c, g, or t
  misc_feature (3752)..(3752): n is a, c, g, or t
  misc_feature (3755)..(3755): n is a, c, g, or t
  misc_feature (3757)..(3757): n is a, c, g, or t
  misc_feature (3765)..(3765): n is a, c, g, or t
  misc_feature (3767)..(3771): n is a, c, g, or t
  misc_feature (3773)..(3774): n is a, c, g, or t
  misc_feature (3776)..(3778): n is a, c, g, or t
  misc_feature (3780)..(3783): n is a, c, g, or t
  misc_feature (3785)..(3786): n is a, c, g, or t
  misc_feature (3793)..(3796): n is a, c, g, or t
  misc_feature (3798)..(3798): n is a, c, g, or t
  misc_feature (3800)..(3800): n is a, c, g, or t
  misc_feature (3802)..(3802): n is a, c, g, or t
  misc_feature (3806)..(3811): n is a, c, g, or t
  misc_feature (3813)..(3814): n is a, c, g, or t
  misc_feature (3817)..(3817): n is a, c, g, or t
  misc_feature (3819)..(3819): n is a, c, g, or t
  misc_feature (3821)..(3821): n is a, c, g, or t
  misc_feature (3823)..(3825): n is a, c, g, or t
  misc_feature (3827)..(3829): n is a, c, g, or t
  misc_feature (3831)..(3836): n is a, c, g, or t
  misc_feature (3838)..(3838): n is a, c, g, or t
  misc_feature (3840)..(3840): n is a, c, g, or t
  misc_feature (3842)..(3844): n is a, c, g, or t
  misc_feature (3846)..(3846): n is a, c, g, or t
  misc_feature (3848)..(3848): n is a, c, g, or t
  misc_feature (3853)..(3853): n is a, c, g, or t
  misc_feature (3855)..(3858): n is a, c, g, or t
  misc_feature (3860)..(3860): n is a, c, g, or t
  misc_feature (3862)..(3863): n is a, c, g, or t
  misc_feature (3868)..(3870): n is a, c, g, or t
  misc_feature (3872)..(3872): n is a, c, g, or t
  misc_feature (3874)..(3875): n is a, c, g, or t
  misc_feature (3880)..(3881): n is a, c, g, or t
  misc_feature (3884)..(3884): n is a, c, g, or t
  misc_feature (3888)..(3888): n is a, c, g, or t
  misc_feature (3892)..(3892): n is a, c, g, or t
  misc_feature (3894)..(3894): n is a, c, g, or t
  misc_feature (3896)..(3896): n is a, c, g, or t
  misc_feature (3900)..(3900): n is a, c, g, or t
  misc_feature (3902)..(3903): n is a, c, g, or t
  misc_feature (3905)..(3906): n is a, c, g, or t
  misc_feature (3909)..(3909): n is a, c, g, or t
  misc_feature (3912)..(3912): n is a, c, g, or t
  misc_feature (3914)..(3915): n is a, c, g, or t
  misc_feature (3917)..(3917): n is a, c, g, or t
  misc_feature (3919)..(3919): n is a, c, g, or t
  misc_feature (3921)..(3921): n is a, c, g, or t
  misc_feature (3926)..(3927): n is a, c, g, or t
  misc_feature (3929)..(3930): n is a, c, g, or t
  misc_feature (3933)..(3934): n is a, c, g, or t
  misc_feature (3938)..(3939): n is a, c, g, or t
  misc_feature (3944)..(3945): n is a, c, g, or t
  misc_feature (3948)..(3950): n is a, c, g, or t
  misc_feature (3952)..(3954): n is a, c, g, or t
  misc_feature (3958)..(3960): n is a, c, g, or t
  misc_feature (3962)..(3962): n is a, c, g, or t
  misc_feature (3967)..(3967): n is a, c, g, or t
  misc_feature (3969)..(3969): n is a, c, g, or t
  misc_feature (3973)..(3973): n is a, c, g, or t
  misc_feature (3975)..(3975): n is a, c, g, or t
  misc_feature (3977)..(3977): n is a, c, g, or t
  misc_feature (3979)..(3981): n is a, c, g, or t
  misc_feature (3984)..(3984): n is a, c, g, or t
  misc_feature (3988)..(3990): n is a, c, g, or t
  misc_feature (3992)..(3992): n is a, c, g, or t
  misc_feature (3994)..(3995): n is a, c, g, or t
  misc_feature (3997)..(3997): n is a, c, g, or t
  misc_feature (3999)..(3999): n is a, c, g, or t
tcatctcctgctttagaaaacaatctttgaatatgagtaaactgtgatctacaccaagctaaatttttagctgctttaagtttattttttgctttggtaattttattaagttcagtagttgcatacataccagtagactcatgcccaccatcatctgttgtaacatcaacagactcttttttaagccatgtaatatctgcagctatcatgttgtaattagatttagcttcaatcaatcctgagtaatgcacaaagttagaaccatcatctacatgctctgcaaagtgagcctcccataaatttttagtcatgggctgtaatgctaatacaaatcttgcagcacctattaatgatgatgcacctctagcagccatcaacgcattttgattatcaacgataagctctttgtcctgagtcgttaccatgcttaatttattagtatgatgaccagctattattgcaccacccatttttacagctaatggaattaaataatgtttaataaaagcatccatattctggttactattttcatcaaagctaccagtctgataattgattaatggatctaaaaatatgtacttaatattattttcttttatagctaactctagctccttgtattgctgagtagctgctgctgcttctttagtgaattttacaagtttaagttcatgctctaaacctcttttaaaaagtttatacttaccatcattcttaccaagcttttgtgcacaagcagcccatctaatatctgactcattagatgtttcttctccaaataaacctaatacattccctctaacttcaacatccctgccaaaaaaagggttgccggtacagacacaataagcaagcatatgcagcagcattgttttacctacacccggttgtccaactattaaggttaatgcagcctccagcagcatcccaaacatcatccatggtctttttntaattttttctaatccagtatgctcaaatatttctaatggctttaaaggttctgcatcaggtggtggtggagtatctaaaacagtacctgcaggctgctgggattctttttctaataaagattntaaatattcatctttagagatatattctttttgctcagcaactggctcatgcctaactatttctgcaattcttttttgtattgctgcatctccaacagcatattttttatggatatccttatcagtaattctttttttataagctccatcatcccaaccaaccatggctgctataacagcatctaagtgctgcatcatttttttcttttctaaataggaagcaattaataataaagttttatgcctgcccggttctgtaagaccagcagcaattgctattaaagggtaatgttgaaatctatatttaaacttaaattgatcaaaagttagtttatttccttgtggggaataggggtattgtttttcactacaaaaagggaagttaattccagtttgtccactaagtgtaggctgagtcttatctacatcaaccttatttccatacagttcaataaattttttttctattgctagaatatcttttctaacaacagcagtttttaaatctttatgataaaatttccatgcatgccatttaatgccactaggagatctaaaaggaataattaaaggatctattgcataagcagctctacaaaattctacaggatcaacttctttatcaacgtcaactactgcacaattagctacaccattcctatttaaggagccaccttgttttagtgttccttttatatgagcttcccaatcaatctcctgttttttccaatactgattttttttaccatcagatttaaagccattccaaattaaagtattagctgtgttatgtttaaaaatttctgctataattctgggatctacgacagaattggtgtgcgcttcnccactcatttatcttaaactcccttgctggagattattatgtattgtttccataacaanatctgcnggntaaaatattctaccaccaagttttgcaaatttaaaaatagatctattttttgatctttgttttcttaatgcaccctcagtaactccaagcattttagctaggtcttgtgatgtaaataacagcccatctttctctaaaaatttctttagatcttcagctgatatagtttttatttttggtttcattccttttcctcgtgttggtttattagacatgagctctttttatttgagctgtagccttgtgtgaaatcttgtgggtgtcaggatttagagggggctcactagtgattaatagccctgcagccatcatgacaaagcccccaatgctggagtggaaaacaacagcatcttttctttatgctatttctaattaatttggaaatcctgcgagctgctagattgtggaaagttgcctaccaataactataagaacacaggctcttgaccngaggttaaaatagtttttcagtttcatctaacagatgtattaataaagaaacaactgaaactatgaaacaatcganaccctagctgttatttaaccttgtttcagcagcaagcagtgtcggttattgaaacaaggtaataagctatatcccccttgttgtttcacatgaattgaaactntttgaaactatgaaaccactacaagtacacattggtacacattaaattttgaattctttatccttaaaatgaggaacctttttcttaggtctcttttttccaaagtggtctttaaatgctgtaacattatttttaaaggtactaatagtctgaggtacaagatatccagttgcctcacaaaataaacctagctcacttttaaaaccattttttatgcaatcntcntatatcttttgagctccacctttagcatttgaaatagctttcatgagtctagtaactgcaacatgagcatcagggttacctaaaatcattgtggtgttgtaagtatcaaaaccgtatttaacagcatagtctgcaaggtgtgcagcatctactgctggtacattctcattaataaatttttctagatctttaaaagttttaacttttctagcttctaaaaatggatttgtttcaaacccaccaatactaaaattttttatccttgttcttgcgcctatcttttgcgtttttgaaacagataatgttgttgttttcttttttttcttttttgcaggcatcttgctttttccactccttttttagtttatcttctattaaaatccatacaacttcattgttgttattcttcatcgttagctgctttcttcaactgaaccacattatttccaacattataaatacttgtatgagtctttaatgctttttgatcctcggtataataatgctcttttgttactattannnnnntgnggcnnnttntnannnannnnnntncnnnccnttnanntnnncnanaanannncanaaanntttnncnnnggnnnttnantntnnnnanntttntatntttnnaannttncntttnncngnancccnnaanatnttctnnnnnnnnaaanccnntnttnnantnnaantctntnanttngnttntnnnnnnnntnttntnaatntnnngnnnngnntntnnngntnnngnaaaancccanannnnncnnnnnnnatnnnnngnntnnntntttnnnnnnntnanananttttnnanntnncnnnnnnnnnncncnntcnccnnnntnantncanannngnnntnttctntnttttttgtnnnnntnaaanaanttncnttttttcncnnnnnanncnnncnnnnannttttttnnnntntntnaaannnnnngnnttntncnannntnnncnnnnnntntntnnnantntttcncnnnntncnntttgnnntntnnaaaanntanaaangtgngntncccncnntnnctnttntnnangnanttttnnannttnnaaanntttcnnaannntnnnaatnnncnttttntntttncncncnnnatntttnnnantnntnana

SEQ ID NO: 1453 - DNA, 4000 bp, Escherichia coli
  misc_feature (1968)..(1968): n is a, c, g, or t
  misc_feature (1973)..(1973): n is a, c, g, or t
  misc_feature (1978)..(1978): n is a, c, g, or t
  misc_feature (1985)..(1985): n is a, c, g, or t
gataccttaaaggaaagtacaactaaataatgaatataggctgttacagatgctcattggcgcctgtagcagcctatatatgtttttgttatcttctaaagagttaatatcgtagctcttagctaacaataagttgttctcagcttggctacatcttgcaatgtgttaagtgctccgcaccattggtgtttaccctccgcacaataggtgctaagcaccagcacgagatgtgttggatgttaaaagtgttgttgggtatggttgaatagggttttacgggtcgttattcttataataagataagaatatgtagcttgttgggagtatgcttatcggttaatattgataagttctgtaagccagtatttaccgataaaatgtttgtgataccagacttaaagacataaaaaaaggactaccgctgtagtccaacctttgttaaccttaaatctaatactatgaaaaacacgttgcaaagataaagagtattttttatatttgcaacttttccaatgtctttttttatcatatgatgtattattgatttatatcaagtagtttatatgacaaaatgatagtttaatctctaatgaccgattttggttaatggtttcgccagagccgagatagttgaccttaatggttcattacttgtttggcaatagcggatgtaatgtaaagaggatttatataaagaaagttgaatataacctgaaagaaagactaaagtctgaaagaaaagttgaaatatagcttataaaaaagcatttttatccgttaaaactttgttatgtcattttttaagcctatctttgcaaaaaataaaaggattaagacgtttaaggatatgggattccgacattcagtgagattgatgttggaattctatctttttatgtctattgaaaaacgattaatttttaaaacaagatattatggcttatatgtcacaggaaggttacgacaaactcgtagccgatttgcagtatttagaatctgttgaacgtcccaaggcatctgctgctattgccgaagctgccgataagggtgacttgagtgagaattctgagtatgatgctgctaaggaggcacagcgtcatcttgaagcacgtattgctgaattgaagatgaccgtggcacaagcaaagattgttgatgtgtcacgtttgagcactgatgctgtacagattatgtctactgttgagatgacaaacgtaaagacaaatgctaagatgaagtatacgattgttagtgagacagaggctaacctaaagcagaataagatttcaatcaagactcctattgcacaggggttgttgaataagaaggtgggcgatgaggttgaaatcactatccctcgtggtactatcactctgcgcattgataagatctcaattgatgcataacaataaaacaaggaggtttgtatgacaatattcagtaagattgcagcgggtgagattccaagctacaagtgtgcagagaacgaacagttctatgcttttctcgacattgatcctgtaacaaagggacatacacttgttattcctcgtaaggaggttgactacatctttgatatggaagatgaggaacttgcagcctttgaggtttttgcaaagaaggttgcacgtgctataaagacagtcttcccatgtaagaaggtagcacaggtcgtcttgggattagaggttaatcatgcacatatccacctcttgccaatgaacagtgaggctgatgttaatttcaagcatcacgtacaggttgatgctgaggagcagaaggagattgctgcaaagattttcaaggctttccatgaattggattagcaattggcttttctggaataagatattatcaagacggggatatacagtcattgcatatccccgtttatcattttccttaatataaggaagagacgtttaacaaagtaatctcacctttacgcaaacttgctgctcccctccnttggnggggntgggggnggttttctttatacaaactcttctcccttctttatctgtacttcattcacatatttccttaccaatgcagaagaatcttctttcttacagataagtaatacattgtccttttctgcaatgatatagccatcaagtccatttatgacacctaatttccctttggagagctttatgatattattggcagcatcttcaaggataacatccgagtcaatgacaacattgtcgccatctcgcttgcttagagactcataaacaccatgccacgttccaaggtctgcccaaccaaagtcgcacctcatcacataaacattctccgacttctctaagatgccataatctaatgaaatgttaggatagcgtgggaaattatcatgtatgaaagcctcttcatcctctatcgttgttatcttactgcccatttcaccttcacgcaaaacagaagggaggaagccatagagacattgacgaaggtagtttgtgttagagaggaagagtcctgtattccaacaccactccttactatccatgaacatttgtgcaaattctcggtccggcttttcagtaaaggcttgcaccttatatatatcgccattaccagtgtagacgcccttctgaatatatccgtatccaggttctggtcgggtagggctaacacccattgtcagtatagcatcattcttctcaacgaatgataatccttcttttatattacgaaagaaagcatcatcattaacaatgttatgatcagaaggtgatataatgatgttcgctttggaatcaaacatcatgatacgatgcactgcccatgcaacacttggcgcagtgtttctgtggattggttcagccatgatatggtcggctgtcacttcaggcaactgctctctgacaaggtcaagataatcacagctggtattaatataaatgttctcttttggaagaatatttgcaaagcggtcaaatgtttgttgaagctgagtacgacccacaccaaagaagtctataaattgctttggatgcttatctctactgcagggccatagtcttcgtcccttgccaccggcaagaattacgcaatagttgttctgtttcgtagtcattatctatttaagctaaccgaatttgtttctccaaagataccttttataactcatacctccaaatcttttattgtaaaatactgcaaatacacattaatcaaagtaatgtcattaaataattcctcaaaaatttgccaaatccagattttctctctacctttgcacccgttgttcaaacaacagccatgcccagatggcggaataggtagacgcgctggtctcaaacaccagtggggcaacccatcccggttcgagcccgggtctgggtacaataaatcccttgtgaatcgatgatttgcaagggatttttctttgtaggggtacttaaagtgtactttgtgattaatggataaaatcagaactcactcaaacctttattcagaactcactttcatctttaatcatactattaagtttaaaatttatttcctgtcattttaacattgtttgtaaaggctttgataatgaataacttgtgtctcttttggtagtgacagtagtgacaggaaattaaattattgtctacacaaagtgttaagttgctgttaattgaaagagaaaagttgcagaattccaaaagaacaccaacaacttatcttttttcttcgtaactggtgaaaccttcaatacgaatataaatcactttaaggttaacttaagaggtgttgtcgtattttgcttgaaaataattcgatataagagaaaggggacgatagaaaggggagatgacttaaagggaggtgttttctattaaagattgagtcaaggctcattagatgaatttattttttgatttgtaaatgtgctgaagataacttggtagattgtataacgcatttattttcagataattagttttagatataaaactttattctttgttgctaattgacttttcgtctacgatataattaa

SEQ ID NO: 1454 - DNA, 4000 bp, Escherichia coli
  misc_feature (736)..(736): n is a, c, g, or t
  misc_feature (3472)..(3472): n is a, c, g, or t
  misc_feature (3628)..(3628): n is a, c, g, or t
  misc_feature (3730)..(3730): n is a, c, g, or t
tttggtacttcttccagtaaagagtgataaaagttctcttgtacccggctttgcgatttcgttgtggcaagcaattcattgattcggtttagtgaatggctaagtgcattcatttctttatctgccgattgctcgttgaacagtatcatgctctctttatcttccatcgcatccaagaatattcttattttggcattgaatttattcaattgttttaccaaagctctgataaaaaaaagtgaaataatcaagaaaagacagcctagaataagggcggtatgtgtaataataagtgcgataccagctccggctacagcaattattaataagatgtagcttaggataaccatatatagatgtttgctgaataccatgatcatcagagcttaaagcgttttattttattgtaaagtgtctggcggctgatgcctaactgttcggctgttgctgtcagatttccatcgttttgacggatggctgtttctatggcctggcgttctacttcttccagattaggaacggtagtggagaattgtggactccaggtttgttttacgaaaatgtctttggaacggattacatctccttcacataaaataactgctttctcgatggtatgttgcaattcccggatatttcccggccaatgataagaacataatttctctaaagcatgttcatgcaggaagatttcttttttttcgtatttagcagcatagcgctgcataaaataatnaatgaacaaatgtatatcttccctccgttcgcgtaaaggcgggatttccagatgaatagtattcagtctgtacaataaatcctcacggaaagtcccggaatccaccatatcctgaatattcttgttggtagctgaaagcagccggatatccactgggattactttattactgccgatgcgtgtaatttttcggttttgtaatacggtgagcaactttgcctgcatggctaaagggagatttcctatttcatccataaacagggaactgccggatgccgcttcaaactttcccggccggctctcgtaggcatcggtaaaagaaccgcgctcatgcccgaacagttcactttcgaataaagattcactgattgctcccatatctaccgttaccatagaatgttcctttcgtgtggaaagccggtgtatttcctgtgccagcatttcttttcctgttccgttttctccggtaatcaatatattggcatctgtgcgtgccactttcactactatcttcattaactgctgcatggcaggggatgttcccacaatcatcggtgatttgtttctatcggggattctgtttttccttttcttaccgcttccaaaagcatcttttattttgcgcactaaggtccggttatcccaaggtttcaacaaaaaatcagttgcatcattctttaaagcctttactgccagttctacatccccgtatgctgtaagcatgactacgggtagtgcaggagctatctcacggattcgtttcagccaatataacccttcgttgccgttattgattcctgccgagaaattcatatcaagaataatcacatctatcggagaggtatttatgatagatatgatttgattcggatgatgggctgtctttatttcgctgaactccgtttccagtaataattccagtgaggccaatactcctttattatcatctactattaaaatcgttcctttttccatctcatttttgctttcagaggctaaaggtatctgcttttgattgtttctgcaaatgaggcgtccaattattggacgttttttattattttctgtaatgcttttatttatcataacggtgacttgacattggaatgtgtcttcagtccgtgttgtcagcgttccaatatcttccttggttcgttctggttttatagtgtttataatttggacgttataccgtctaaaatttggacagctaatttatattttattttgtaactggttgattattaatgttctgatcttcttggcatatcgtttgcttcctattctgtgtttaaattaaaatgcaatgagaaataacttgataattgtgtgtttgttgtccggtctgtctttgcctgtatgtgggcaaagtacactggacgattgcatacgttatgcttggaaacataatcctggtttcaagaatgtccaaatagacgtaaaggaagcacgaacagactatgtggctgctatgggtaaatttcttccttatgtttcagtacaggcggaagtgggcaggcatatcggacgttctgtcgatccggatactaatggatatacagccgattcatataatcaaggaactataggaatggatataactctttctttattcgaaggatttgcccggatcaatcgtttgcgatatacgcattggactaaaaaagagaaggagtgggatcatctggcaaagaaaaatgatttggcttatcgggtagctgaggcttattataaagcggtattggataaaaagctttcagaactggcagctgaacagcttcgtttgggagaacgttatctgaaacagacggaagcttttgtagaactggggttgaaatcgctttcggacttgcaggaagtaaaagcgcgtcatcaaggagatgtgttcagagagcgtatgtatgaaaaaaatcgtcagatgtcctttctttatttaaaggaaatactgggtatgaaagagggcgatgttttgtctgtttctttatcagtcagtgaggatacgctcttgttaatgcctcaagtagaggtagaagaagtctatttacggtccgtacacgtactgccggattataaacggatggaaatgtgggaacgcgctgcccgtaaggagtatgctgtgacccttggacagttcagcccgactatcttcgcccgtttctcatggggatctgatttttataattccttgttctcgttacatcaattgcgtgaccattggaataaatatataggagtaggtatttcattccctattcttagcggattagatcggaatgccggaataaggaagaagaaattaaacttgcaacgggtgcggaacagcatagaggaagagaagttacatttacgtaatgaaacggaacgaattgtactttcattacattcgggatgggaagagcatcgacaggcttccctgcaggtaaaagcagaaacgcaagtgctgaaagaaacggaacggaagtgggaggaagggcttgtttccgtgtttcagttgatggaagcacgaaatcgcctgcttgtcgctaaagcggaaaaaataagagtgcgtttgcagtacgaactgacatcgcgactaactatgtattatcggacaggaagttttattaaccattaaaaaatatggacacactaattgaacgtaaaaagcgtttcactcccaggcggatttatggaggtgcgggagtattattcatattggtattcgttttttattttatttttcgtgataccggttcntccatgaccattgacaagagccgtatcactatcgctacagttacagaaaatgagtttaatgattatgtccgtgtgattggacaagtacttcccagccgcatgatttacctcgatgctatagaaggcggaagagtggaggaacgccttcatgaaganggagcgatggtaaagaaaggggatgtgattctgcgcctgagtaatcctctgctgaatatcggtatcatgcaaagtgaagcagatctggcctatcaggaaaangagttgcgtaatactcgtataagtatggagcaggaacggttgagtctgaagcaggatcgtatcggtattcagaaagaattcattataaagaaacgtcgttacggacaatacaagcggctgatggaggggcaattgatagcgagggaggactatctccaagctacggaggaatatgaagcggtaaaagaacaattgtcggtattggatgagcggatccgtcaagatagtttgtttcgtttgactcagataagcagtttggacgagaatata

SEQ ID NO: 1455 - DNA, 4000 bp, Escherichia coli
  misc_feature (428)..(428): n is a, c, g, or t
  misc_feature (1082)..(1082): n is a, c, g, or t
  misc_feature (2528)..(2528): n is a, c, g, or t
  misc_feature (2531)..(2531): n is a, c, g, or t
  misc_feature (2540)..(2540): n is a, c, g, or t
  misc_feature (2617)..(2617): n is a, c, g, or t
  misc_feature (2636)..(2636): n is a, c, g, or t
  misc_feature (2639)..(2639): n is a, c, g, or t
  misc_feature (2657)..(2657): n is a, c, g, or t
  misc_feature (2666)..(2666): n is a, c, g, or t
  misc_feature (2668)..(2668): n is a, c, g, or t
  misc_feature (2671)..(2671): n is a, c, g, or t
  misc_feature (2699)..(2699): n is a, c, g, or t
  misc_feature (2705)..(2705): n is a, c, g, or t
  misc_feature (2720)..(2720): n is a, c, g, or t
  misc_feature (2753)..(2753): n is a, c, g, or t
  misc_feature (2765)..(2765): n is a, c, g, or t
  misc_feature (2767)..(2767): n is a, c, g, or t
  misc_feature (2783)..(2783): n is a, c, g, or t
  misc_feature (2789)..(2789): n is a, c, g, or t
  misc_feature (2807)..(2807): n is a, c, g, or t
  misc_feature (2816)..(2816): n is a, c, g, or t
  misc_feature (2944)..(2949): n is a, c, g, or t
  misc_feature (2956)..(2956): n is a, c, g, or t
  misc_feature (2958)..(2968): n is a, c, g, or t
  misc_feature (2973)..(2974): n is a, c, g, or t
  misc_feature (2977)..(2978): n is a, c, g, or t
  misc_feature (2983)..(2983): n is a, c, g, or t
  misc_feature (2988)..(2991): n is a, c, g, or t
  misc_feature (2994)..(3001): n is a, c, g, or t
  misc_feature (3004)..(3005): n is a, c, g, or t
  misc_feature (3011)..(3012): n is a, c, g, or t
  misc_feature (3015)..(3015): n is a, c, g, or t
  misc_feature (3020)..(3021): n is a, c, g, or t
  misc_feature (3024)..(3025): n is a, c, g, or t
  misc_feature (3032)..(3036): n is a, c, g, or t
  misc_feature (3039)..(3039): n is a, c, g, or t
  misc_feature (3044)..(3044): n is a, c, g, or t
  misc_feature (3049)..(3049): n is a, c, g, or t
  misc_feature (3052)..(3058): n is a, c, g, or t
  misc_feature (3060)..(3061): n is a, c, g, or t
  misc_feature (3063)..(3068): n is a, c, g, or t
  misc_feature (3071)..(3074): n is a, c, g, or t
  misc_feature (3086)..(3086): n is a, c, g, or t
  misc_feature (3088)..(3088): n is a, c, g, or t
  misc_feature (3092)..(3092): n is a, c, g, or t
  misc_feature (3095)..(3095): n is a, c, g, or t
  misc_feature (3104)..(3104): n is a, c, g, or t
  misc_feature (3125)..(3125): n is a, c, g, or t
  misc_feature (3128)..(3128): n is a, c, g, or t
  misc_feature (3134)..(3134): n is a, c, g, or t
  misc_feature (3140)..(3140): n is a, c, g, or t
  misc_feature (3161)..(3161): n is a, c, g, or t
  misc_feature (3167)..(3167): n is a, c, g, or t
  misc_feature (3185)..(3185): n is a, c, g, or t
  misc_feature (3194)..(3195): n is a, c, g, or t
  misc_feature (3199)..(3200): n is a, c, g, or t
  misc_feature (3205)..(3205): n is a, c, g, or t
  misc_feature (3207)..(3207): n is a, c, g, or t
  misc_feature (3212)..(3212): n is a, c, g, or t
  misc_feature (3216)..(3216): n is a, c, g, or t
  misc_feature (3221)..(3221): n is a, c, g, or t
  misc_feature (3225)..(3225): n is a, c, g, or t
  misc_feature (3227)..(3228): n is a, c, g, or t
  misc_feature (3231)..(3231): n is a, c, g, or t
  misc_feature (3234)..(3234): n is a, c, g, or t
  misc_feature (3238)..(3239): n is a, c, g, or t
  misc_feature (3245)..(3246): n is a, c, g, or t
  misc_feature (3259)..(3259): n is a, c, g, or t
  misc_feature (3263)..(3263): n is a, c, g, or t
  misc_feature (3268)..(3269): n is a, c, g, or t
  misc_feature (3271)..(3273): n is a, c, g, or t
  misc_feature (3277)..(3278): n is a, c, g, or t
  misc_feature (3284)..(3285): n is a, c, g, or t
  misc_feature (3289)..(3289): n is a, c, g, or t
  misc_feature (3299)..(3300): n is a, c, g, or t
  misc_feature (3302)..(3302): n is a, c, g, or t
  misc_feature (3305)..(3306): n is a, c, g, or t
  misc_feature (3308)..(3310): n is a, c, g, or t
  misc_feature (3314)..(3314): n is a, c, g, or t
  misc_feature (3316)..(3322): n is a, c, g, or t
  misc_feature (3325)..(3325): n is a, c, g, or t
  misc_feature (3330)..(3333): n is a, c, g, or t
  misc_feature (3341)..(3341): n is a, c, g, or t
  misc_feature (3346)..(3347): n is a, c, g, or t
  misc_feature (3350)..(3352): n is a, c, g, or t
  misc_feature (3356)..(3361): n is a, c, g, or t
  misc_feature (3364)..(3367): n is a, c, g, or t
  misc_feature (3370)..(3371): n is a, c, g, or t
  misc_feature (3374)..(3375): n is a, c, g, or t
  misc_feature (3383)..(3386): n is a, c, g, or t
  misc_feature (3389)..(3389): n is a, c, g, or t
  misc_feature (3393)..(3397): n is a, c, g, or t
  misc_feature (3400)..(3400): n is a, c, g, or t
  misc_feature (3404)..(3404): n is a, c, g, or t
  misc_feature (3407)..(3408): n is a, c, g, or t
  misc_feature (3411)..(3413): n is a, c, g, or t
  misc_feature (3419)..(3421): n is a, c, g, or t
  misc_feature (3424)..(3427): n is a, c, g, or t
  misc_feature (3430)..(3430): n is a, c, g, or t
  misc_feature (3432)..(3432): n is a, c, g, or t
  misc_feature (3434)..(3434): n is a, c, g, or t
  misc_feature (3436)..(3436): n is a, c, g, or t
  misc_feature (3439)..(3441): n is a, c, g, or t
  misc_feature (3447)..(3447): n is a, c, g, or t
  misc_feature (3450)..(3451): n is a, c, g, or t
  misc_feature (3454)..(3454): n is a, c, g, or t
  misc_feature (3458)..(3463): n is a, c, g, or t
  misc_feature (3467)..(3477): n is a, c, g, or t
  misc_feature (3481)..(3482): n is a, c, g, or t
  misc_feature (3485)..(3485): n is a, c, g, or t
  misc_feature (3488)..(3489): n is a, c, g, or t
  misc_feature (3493)..(3493): n is a, c, g, or t
  misc_feature (3498)..(3499): n is a, c, g, or t
  misc_feature (3502)..(3505): n is a, c, g, or t
  misc_feature (3508)..(3509): n is a, c, g, or t
  misc_feature (3515)..(3522): n is a, c, g, or t
  misc_feature (3525)..(3526): n is a, c, g, or t
  misc_feature (3529)..(3529): n is a, c, g, or t
  misc_feature (3535)..(3541): n is a, c, g, or t
  misc_feature (3544)..(3545): n is a, c, g, or t
  misc_feature (3551)..(3552): n is a, c, g, or t
  misc_feature (3555)..(3555): n is a, c, g, or t
  misc_feature (3559)..(3562): n is a, c, g, or t
  misc_feature (3568)..(3568): n is a, c, g, or t
  misc_feature (3571)..(3571): n is a, c, g, or t
  misc_feature (3577)..(3580): n is a, c, g, or t
  misc_feature (3583)..(3590): n is a, c, g, or t
  misc_feature (3595)..(3596): n is a, c, g, or t
  misc_feature (3599)..(3605): n is a, c, g, or t
  misc_feature (3608)..(3609): n is a, c, g, or t
  misc_feature (3615)..(3625): n is a, c, g, or t
  misc_feature (3629)..(3629): n is a, c, g, or t
  misc_feature (3634)..(3636): n is a, c, g, or t
  misc_feature (3639)..(3642): n is a, c, g, or t
  misc_feature (3652)..(3655): n is a, c, g, or t
  misc_feature (3658)..(3658): n is a, c, g, or t
  misc_feature (3661)..(3667): n is a, c, g, or t
  misc_feature (3670)..(3670): n is a, c, g, or t
  misc_feature (3673)..(3674): n is a, c, g, or t
  misc_feature (3677)..(3677): n is a, c, g, or t
  misc_feature (3684)..(3690): n is a, c, g, or t
  misc_feature (3695)..(3699): n is a, c, g, or t
  misc_feature (3703)..(3705): n is a, c, g, or t
  misc_feature (3708)..(3708): n is a, c, g, or t
  misc_feature (3713)..(3713): n is a, c, g, or t
  misc_feature (3716)..(3716): n is a, c, g, or t
  misc_feature (3719)..(3727): n is a, c, g, or t
  misc_feature (3730)..(3734): n is a, c, g, or t
  misc_feature (3737)..(3738): n is a, c, g, or t
  misc_feature (3741)..(3743): n is a, c, g, or t
  misc_feature (3745)..(3749): n is a, c, g, or t
  misc_feature (3755)..(3758): n is a, c, g, or t
  misc_feature (3762)..(3764): n is a, c, g, or t
  misc_feature (3771)..(3772): n is a, c, g, or t
  misc_feature (3775)..(3776): n is a, c, g, or t
  misc_feature (3782)..(3786): n is a, c, g, or t
  misc_feature (3789)..(3794): n is a, c, g, or t
  misc_feature (3796)..(3797): n is a, c, g, or t
  misc_feature (3799)..(3806): n is a, c, g, or t
  misc_feature (3810)..(3817): n is a, c, g, or t
  misc_feature (3820)..(3820): n is a, c, g, or t
  misc_feature (3824)..(3824): n is a, c, g, or t
  misc_feature (3827)..(3828): n is a, c, g, or t
  misc_feature (3831)..(3833): n is a, c, g, or t
  misc_feature (3839)..(3839): n is a, c, g, or t
  misc_feature (3844)..(3844): n is a, c, g, or t
  misc_feature (3847)..(3852): n is a, c, g, or t
  misc_feature (3856)..(3857): n is a, c, g, or t
  misc_feature (3864)..(3867): n is a, c, g, or t
  misc_feature (3872)..(3877): n is a, c, g, or t
  misc_feature (3883)..(3885): n is a, c, g, or t
  misc_feature (3889)..(3898): n is a, c, g, or t
  misc_feature (3902)..(3906): n is a, c, g, or t
  misc_feature (3911)..(3918): n is a, c, g, or t
  misc_feature (3921)..(3921): n is a, c, g, or t
  misc_feature (3923)..(3930): n is a, c, g, or t
  misc_feature (3937)..(3938): n is a, c, g, or t
  misc_feature (3941)..(3943): n is a, c, g, or t
  misc_feature (3948)..(3949): n is a, c, g, or t
  misc_feature (3952)..(3956): n is a, c, g, or t
  misc_feature (3961)..(3963): n is a, c, g, or t
  misc_feature (3971)..(3971): n is a, c, g, or t
  misc_feature (3979)..(3979): n is a, c, g, or t
  misc_feature (3984)..(3985): n is a, c, g, or t
  misc_feature (3988)..(3996): n is a, c, g, or t
  misc_feature (4000)..(4000): n is a, c, g, or t
atcatgcgaccttgccttttgtgctggcgctggctgagcaaggggtgataggcgccttaaaaagcgatcggcatcttcgaaatggtcttgccacctaccaaggtcagttgacgtcaaaagcggttgccgaggcgcatcaattgtcttttgagcggccccaggggcttggattcgagtaacccaagcccctgggttgaaaatcgggcgactcggcgacaggatttcaggccaacgagtgacataaggcgcctgccacaaccgctccttagacaaacgcgcgtgacttggctataaacaaagtctcatccaatcaattggagcgcgccatgcccttatctgaattaaccaccatgacactgagccttgaggaacacgtggcggtcgtgactatttgccgaccggatgcacgcaatgctttgaatcgcctngcttacgccgagttagaagcggtttttcgggcgttgcaggccgacgaacaagtccgctgcattatcctgacgggtacggatccagccttttgctcgggcgatgatgtcaaggaactgatgacaggcgatgccagcgcgtcacatgccagattgcgtgccgtacgaccaggcattacgcctgccgccgccgccattttggactgtgatcgaccgattatcgccgccgttaatggcgcggcggtgggttggggtatggacctggcgctcatggcagatttcagaatcgcctcagataaagcgaaattcggagagctatttgtaaaacggggattggtctcggatgtcggcggactcacccgactcccgcatttggtcgggccgcaaaaagcggcagagttgttgtatacaggggacattattgatgcgcaggaggcgatgaaaattggcttgttgttagcgtgtgagcctcatgatggcttgctggctgcggcccataacttggcgcgaaaaatcgcggacaatccaccgctagcggtgcgctacttgaaggaaggcttgcgccggagcttttatggcgattatcacgacatggggtcctgggtttctcaaacgttaggggtgctcttccaaacggaagatcatcgcgaaggggtngcgagtttcttggaaaagcggcctgccaaatttaaagggcgctagcgtgttgcaggggctttgcagcgccgggcagtctgtagtcaacataaggatttgcaaaataagggtttgcaaaaaaagcgcctctgaatagcgccgccttcaaatgaaaagtcgggtgtaatggattaagtcgccagcgcaacactcggcaatcgttaggatctttctgctgcgtcacgaattccagaacccttgctgtctctagcaaggttgataacgtgcttttgggaatgcgcgcttttgtcgcaatatcgtgactgctcaagcagaacttgggtcggttaaaaagggatcgccatagaaccatatccgcgcgatggtattgccctgatagcttaccttcaaagggtaaatgcatcaggctatattgactcacggtgctgaacagagggtctcttactcgaaagccaaagcggtcatcggtttcggtaaacggcgcgtctgacgcgatgagaatgttgcgaatcttctcgatctggtgcgttgttggcagcagttgatcgccaacaacccgataggttccgcagcgcaggaaataagcgagcaaacgatcaatcagttttgggtcgataggaagcgtgtttttgatgtcgatgaccgtcagggactggctcttctcgaaccagtacaacatcaaaagctctttgatcacaatgccgggcaggctgcgtttggtcgttttttgaccgagatttagattcaggaaaaaccgtataaagtcatcgaattgcgtcgagtcaaaagcaggcgagccttgcgccttggatgctaacaagggcgttgccaggggatcctgatttgagcgtattgcgccttcgtgctctagcatcatattaaccttctgaaggagttaaggttctcctaaccctatctaaaaatcacgcggttggctaccgaaattgaacggttccaacgccgttcgaggttggcggcgatttaatgggatcaagtcatcggaaaagcctacaaggcgcctccgaagtccttggtttggccgcgtacggttactttgacgcggctgctgaatgaaacaattaagcggaaggcagaagctgtctcgggcgacagcctcatcggactccgactgaattcaacgcaaggatgagttcatcttgagtggcgtacaaggtcttgtcattgggtttgtatgacagcaggctgggctggcgcaatggcctgaatcattggctctagtggggctattgaaatgccgctcgggcggtcacgaccgcatagaatctactcaaattgggtagatcaaaaaagtcttggccaacatttttggcaaaccccatcacaatcgcgagcgtcatatcgggaatcgcatagcggtcccctaacaggaactgattattcgcgaggtgcgcgtccagcaacaccgcggtatctctggcagcaagngcngagacctcnccccattctttgacgcaggtttcccggtctttgtaataaccggtaaggttacgaaaaccttgtgcaaccggcatcanaaaattgagatccactcgncgngcccacatttcaatcttngcgcgctcnantgnggattcaccgaacaaattgggcgctggntagagnccttctaaatacagncagatcgcctggctttccgataggaaggtgccntcgtccagttcnantaccggtacgcgcccnaatggntttttgcgccggtattcntctgtcagnttttccccggcccttaaatcgatttcggttgtcggaatgtcgatacctttctctttcatgaaaatggcaacgcgtttgccgttgggcgaagcgctcattgtgtaaaggtgcatgggattaaccttttnnnnnngggtttnannnnnnnnnnnttttnnttnnggggnaattnnnnggnnnnnnnnaanngggttnnccnaaaannggnnaaggccnnnnnggnccggnaaagnttnnnnnnngnntnnnnnnccnnnnttctaatccggngngganagnaaatcgagngcaatcgcctcagcgactttnatnccatcnatcccngcggacaaaatgccgccggcntagccngcgccttcaccggcaggntataagccnntggnnttgangntttgntaanccttnccgngnnggnttnaaannggggannaggttcgggtttnaacnccggnnannngggnntccttnntggnaaagcctttnncntgnngnnngaangnnnnnnnggnttccnnnngggcctcnttggnnaannngggnnnnnnttnnnnaannttnnccaatttnnnnccngggnnnnnggngggnttnnccnnncccaannnggnnnnggncngntnggnnnggaaanccnnaangcgnnnnnngggnnnnnnnnnnncccnnccnccnngttnaaaannggnnnnttnnaatttnnnnnnnnggnnaancccggnnnnnnnggnnccgggnnaancccnnnngggttnaancccaannnnaannnnnnnnttggnnttnnnnnnnttnngggaannnnnnnnnnncccnttggnnnccnnnnggccgggttnnnnggnggnnnnnnnaanggnnccncccgggnnnnnnnaaaannnnnaaannnttnggccnttnttnnnnnnnnnaannnnnttnnaannngnnnnncccaannnngggnnnccctttnnttnnccaaannnnnccnnnnnnannannnnnnnngggnnnnnnnnccnaaanccnnttnnnaagggnttggnttnnnnnnaaannttttccnnnnccaannnnnnaaaggnnncccnnnnnnnnnncccnnnnnccaannnnnnnnggngnnnnnnnngggtttnnccnnnggccnnggnnnnnccggnnntttggccngggttttnggccnnggnnnnnnnnngggn

SEQ ID NO: 1456 - DNA, 4000 bp, Escherichia coli
  misc_feature (333)..(333): n is a, c, g, or t
  misc_feature (728)..(728): n is a, c, g, or t
  misc_feature (1986)..(1986): n is a, c, g, or t
  misc_feature (2540)..(2540): n is a, c, g, or t
  misc_feature (2723)..(2723): n is a, c, g, or t
  misc_feature (2750)..(2750): n is a, c, g, or t
ataggcgtaatattttttatccctttgtatttgggttttggagttgggctttcggggtcttcaattttcaggtaatgggaggagaggaagaggttgctgcataaaacggcccctgtgataaagagcatatgaaacggtggacttaactgttgttgaatgattagactaccaattccggcccctaaaaatccacctaaactaaaaaaaccatgtgccgctgacatcaaattttgtttgtcgcgctgctcaatgatcgatactacagcattcatcgatatatctgtaaagccagaaaaaacaccaattaaaaataaacttccgcaaagggaggtntaattgggggccagtaggggcaagttaaaagccagtgttaataagacaatccctacttgtgtagaacgtccttctttaatttttttattcaaaaaaggaacaacaggaatagacagaagtaaacccaaagcagaaaaaaaaagtgccgtgcccagctctgcttcattgagcactaattttgatttgacataaggcaagtacaacacccatgtgcccaccataatattcattgacgcaaagacccatgaaggcgcaaaatagtgcaaacgggtaaggataagccctaatgatttcatctaaataaaaatagaaaaaagatttactttttgcctaaatcaccttctttaactcaaaacaaaattggggggcattgggagaaattaagcttcactatnaggggtaaaaataacgagaaaatggaagttaatgataagattttcggaaaaagtaaagcattatcaattgccatttgagtatatttagtctattctgaataaaaattagagtgatgcatatgcggattggaatattgggccccataccaagggatacgatcactacccatagaggagaaaaaataaaaaaatatggaggagttatccaccctactataggactgagtaaattactcggagaagaagacgccctcgttcctgttgctcatatcaataagacagatgaagaacccattttaaatttgctcagtaattattcgaatattgaaaccacacatatttcctccaaagacgatgaaggctctatcgtagaattggtttttataaaccagaacgatagaatagaaacccaggcaggagccatgaaacccattgtttcagaagaccttagtgggatagactgttctgttcttgtatgtgtacccatcaccgattacgaaatccctttaaaaactttaaaacaaattaaatcctcctcagaagtattggtaatttttgatgcccacggaccgaccacacaggttgacaataaggggaatcgcttacgcgtccattggcttgacatgatggattggcttccttatatcgatgtgctgaaaatgaatttagaagagtcacagtattgttattttttgcctggtgaaattcaagactatgacgtaaacagaagagaccatctggatgcttttgccgaacaggtacttaaagcgggtgtgaaacacctttatataaccctggacagtgagggctgtaattggtatacaaaagttaaaggaaaaacaagcacagtttttattcctgcctatcctgtagaccatgtagtggatactacaggatgtggcgattcttttgcgggaggcttagcctatggttttggacgtcattcggacccttacctcgccgctcaatatgccaatatacttggagccatgcgtacccaaggaaaaacatttgaagtctttaaagaccttcaaactactgagcaaatgatagcgcgtttctatggctcagaaaacaaaaaaaactaaaattcaaatcagcggacctcttcattaagtaggggccttgaaaggattttattttgtagcgaatggggaagtgctgaagcgtttttcctacttcctagagataaaaaatctctagtagccttctttaactaaagaaaaacaaggttttaaaattttaaaagttaattttnccgcagattccaaaagattgaaaaacaacatgattagacaaaaccaggaacgcgtggttctttctaatatccagcctcaacttgaagaggggaattatgctgtcaagcgcattgtggggcagcagcttctcgtaactgcagacatactgtgtgacgggcatgacttcttagccgcagcattgttgtacaaacacgaatcccaacgtaattggacaagcgtaaggatgaaaccgctcgaaaacgacagtatgcaagctgcatttacagcaacaaaacaagggagctatttttataaaatagaaggatgggtagatgagcctttaaattggttatacggtatagaaaagaaaatagaagccgatcttaatgttacttctgaactccttgagggagcggtttacctaagggaaatagtgaaaaacaaggatacaaaagaaggaacaaagtggcacaaactcattcaactcctagaagatgaaaagtcctatcaaaaagccgttgaagcagtaaaggatcccgaacttaagtccttgtttacaagtcatccttcgaantttttaaaggctacctctaaagaattcccgttgtatgtagaccgtaaaaaagccctttttagtacctggtatgaattttttccacgctcagcagggacagcacccggtacgcatggaacatttaaagattgtgaaaaactgttgccccgaattgccaaaatggaattcgatacgctttatttnccccctattcaacccataggggaggtnaataggaagggaaaaaacaatgcgactgatgcaggggaaggggatgtgggatccccttggggaattggttcacaatatggaggccacaaagaccttcatcctgaattgggcaccttatccgattttaaggcattagtaaaaaaagcaaaccaactgggtattgaaatagcaatggattttgccctgcaagccgcacccgatcacccatgggtaaaagctcatccagcgtggtttaaatggcgccccgatggtagtattcagtatgctgaaaatccccctaaaaaataccaagatatactacccctttatttcgaaaccagtgattggaaaaacctttgggatgagttgttgtcctgtgcgctctattgggtagaggaagtaggaattaaaatttttagagtagacaacccgcacactaaaccttttaagttttggaattggttgattgctcaggtaaagaaaaaacacccagatgtcctctttttagcagaagcatttacgcgccctaaaattatggatcagctggcaaaagaggggtttactcagggttattcttattttacttggcgcttttctaagcaggaactcactgaatacatggaacaacttaccaagggacctcaaaaagaattttaccgacccaacttctggcccaataccccagacatcaatccctatcatttacaaggagccaatgaagcccaacacctgattcgttattttttagcggccactctcagctccaatgtaggtatttatggacctgtttttgaaatgatgcattctgaagccgtccccggaaaagaggaataccacaacagtgaaaaatacgaattcaaacagtgggattgggaagcagaaaataaaattatggttctgattaaaaaaattaatgaggcgcgaaaaatattaccttctcttcagcagaccaatcaaattgaattttgtgaaatccataacgacaagctgatagggtatctaaaaaaagacgagaataattcttgctatactttaatgattgtctctctcgattcctattatacccaagagggcagtgtaaaaattcccctttcacaaataggattgaatccgcaagccaactttactgtaacggatgtcataacaggaaatcaatatcaatggggacccgactggaattatgtcaaaatacatccctcattgccttttcatttgtttaaactttcaatctgatgcaagacaagcttaaaaaagactttcaaaaaagaccc

SEQ ID NO: 1457 - DNA, 4000 bp, Escherichia coli
  misc_feature (742)..(742): n is a, c, g, or t
  misc_feature (1595)..(1595): n is a, c, g, or t
  misc_feature (1613)..(1613): n is a, c, g, or t
  misc_feature (1985)..(1985): n is a, c, g, or t
  misc_feature (3042)..(3042): n is a, c, g, or t
aaaaatattacaatcaaattttattgctccaatagcatttaaaattggactaactctttatgatttcttgggtcaacgcaaaaaagatcaaagacatactttgatttcaaaagaagatacatttggtttatttcctaaactcaaaaaaaacaaattaacaaaaagtttcattttccaagatgcccaaaccgaagatgcaaaattagtactcacattgttgagaaatgccgtagaaataaataatgcaactgcactaaattatgtaaaaataaccgacattattagaactggtgacaggtataaagttctgttaatcgacgagataaataataaagagtatacggtcgagtccaagaagataattgctgccacaggtattcataatttaccaggaatgtacaagagtaaatcttccaaaattaaactaagtggaggagcacatttaattttagagggagaccccctagggattggtaaaaatggtgttctattacctcaaactgaagacaatagagtcatgtttgtcttaccctggacaggaaatacaatcgttggtacaactgatacagaagaattttcaggctctttagatagaccgtatgcaaactctgaagacaaagcctatttaataaggcacataaaaaaatactttaatatcgaagaagttaaatatatttcttcctggactggtttgagagctttaatagacagctctgatacaaattctaagaatatttctagnggacatttctataaagatatagatgaaaactttatacaaatttcaggaggtaagcttacaggttttagagttattgcaaaagaaagtcttgaacaactcttttctcaaaattttgagttaaacaagcaagagtttgttgacagtatcttaaatcttgaaagtcagtataagtataaggatttacagctatgccttaatcactactgtgttgttaaacctacagattatttactcagaagaactcgtatcagctggtttaaccaaaatggaggaaaatcttttttggataaagtaatggtcaattttgactcaactttatatttcgaagagacaattgaagaactgcaagatgagggtttgctttagatttagaacaatttttttagtttttattaataacagtttttaacgatactctgtcgtcattaagaaaccagcaccgatcataccaaggcctccccataaataccatctagatacagagccaggaagaagagttaggtagttcaagactattaagagaacacctaaaaccattaaagaggtcatagttacaacaaaccaccttggcgatggtcctttatctccactaagctgcgtagatatttttttagatttagttggttgagagttgttaattcttttttttgaaactggcatattgaaaattgtatcctaattatcgtttattacaataactttatttctagaaatactaattaaaccatccttcattagtgattcaacgacctcttctgtaactttgctggtcatctctaattctttactaagaagtgccatagtcacacctttttctaatagaagaatttttaaaacacgtcctcttttttgnctcatggatccttcaaanttttttgatgttttaatttcttgaacaatatattttttacacgaaagctcaagtggacaaatttcacatttaggatttcgagaagtacaaagcgttgatccaagatccattaagccttgattaaagtctctagaattaaaattctttaaaagtaagtcagtgtttttctctagaaaaatatcaacattatcagttctgaaaaatcttttaataattctttttatattggtatcaactgcaataatttttttctcatatgcaaagctgagaattgctgaatttgtgtatggtcctacaccaggaagaattgtaaagtctggatatagttcatcaaaactatattttgatagtatttttgaagactcgtgaagncggatagctctattgttgtaacccaatcctgaccataattttaaaacctcttttttactgtcttttgccatatctttaggtgttgggtattttctaataaattttttataaaattcatctgctctatctatttgagtttgctgagaaagcgtttcaattagaagtatcttccatggattacttgagtctctccattcaaaagatctacgattttttttataccaatttttgagttcttttttaaaaaaatttatattagttgtcaaagcttaattctacaaaaccttcaggatctaaaaagcttccttcttctggattttgacctgaaaccctaccgccggtgtcaccacttgccgaaggcaataatccaatttcttgaagaatattagatgcctcctggtacgtataaccaattaagtttggaacctctgcttttaaacccaatgaaacaattattgaaattatttcctccggagtaactatttcacctgcccctgggatggtgtgagaaactagtccttcgttaacgtcttcagaatattcttctaatatttcatattcaaaaccaagtgtttctaaaatttgtgtcgcatcctcaggagattttcttgagagatcacttatttcaattaagcttggcccagatgatattactaaatctacagttgatccaggactcatttttttcccagcaataggattttgggaaatcacgaatcctctaggaatattatcatcatttacttccagtttctgacctacaacaaaatcactttcttcaattacatacaccgctctatccgtttcaaggtctattacatacggaataggaaaagcttcttgtccaacagagacaataattgttaccaatgtatcaggattcgttacagtatttgctaaaggttgagttcttatgactgccccagctggaactgtaggatgtgctgaattctcaattcctactgtgaatccaagtaattgtaagtcattcaaagcctgagtctgactacttcccgttagatcaggtatctctattactgtgggagtaccaccatcnacaggaagtccagtaaatatttgtgtgagaccccatacagttccaaacacaagcccaattgacaggactagagctggtagagtaaatctaaattttattttaggatttgttaagttaacaagattttcttgagtttcttgcatttgtagatgtcttctttgctgtagtaggacggctctaagatcctctgcatttttatacctatctttggggtatttatgtaacagctttaatacagcattctctaaacccttaggtatatcttttctatagacacttaatttctttggtttttcagtaaggtgtttggttgcagtcgcaatgggggtttctccttcgaatggtggtctcccagcaataagttcatacataacagtacctagagaatataaatcagactcaacagaaaccggttttccttgggcctgttcgggagaaatgtaacttgctgttcctaaaatagatccagttttagtaatatcactatcctcattttgaatagacacaattccaaaatcagttacttttacttttccagaaggggtaatcatgatgttacccggtttaatatctctatgtacaagacctctattatgggcagcttgtagtccatcagagacttgtgcaccaataaacaaaatatcaccaatgctgattgtcttctttttagcgattattgaagttagagtgttcccttcaatatactccattacaaaaaatggctcatcctcaattccccaatcaaatatttgaacaatatttgggtgatttagattagcaaccgtttgagcctctcttttaaacctttctacgaatgtctcttgttgaacatagtttggtttaagagttttaattgcaaccatccgtttaagttgcctatcctcagctttataaacaaaggccatcccaccctcaccaaggagttcaagaattttatatcgatcttttattatttgtc

SEQ ID NO: 1458 - DNA, 4000 bp, Escherichia coli
  misc_feature (26)..(26): n is a, c, g, or t
  misc_feature (38)..(38): n is a, c, g, or t
  misc_feature (383)..(383): n is a, c, g, or t
  misc_feature (438)..(438): n is a, c, g, or t
  misc_feature (449)..(449): n is a, c, g, or t
  misc_feature (1222)..(1222): n is a, c, g, or t
  misc_feature (1285)..(1285): n is a, c, g, or t
  misc_feature (1984)..(1986): n is a, c, g, or t
  misc_feature (1992)..(1992): n is a, c, g, or t
  misc_feature (2011)..(2011): n is a, c, g, or t
  misc_feature (2025)..(2025): n is a, c, g, or t
  misc_feature (3162)..(3163): n is a, c, g, or t
  misc_feature (3295)..(3295): n is a, c, g, or t
cattcctatttattatggcagttggngtattaatcgtngcagcagttgtattcgtagaacaggcacaacgacgtattccagttcagtatgcaaagcgtcaagtaggacgtcagcaatacggtggaactagcacctatattccaatcaaggtaaaccaatctggtgttatcccggtaatttttgcttcctcacttttgtatataccttctttgatcgttaacttcagcggcagccaagctggctgggcgacttgggtttcaaagaacttagttaatggcgataacttcttctatatcggtgtttatgcattattaattgttttcttcacctacttctatgttgcaatcacatttaatccagatgaggtttctgacaacatgaancagtacggtggctttattccaggaattagagctggtaagccaacctctgattacntgcaatatgtnttatcaagaattactgcgcccggtgcgctttatctttcaattgttgccatcattccatttattgcattaattttgttccaggcttcacaaaacttcccatttggtggaactgctattttgatcgttgttggtgttggtctagatactgccaagcagattgaatctcaactacaacaacgttcttatgaggggttcttgcgctaatgcgattaatcctggttggaccaccaggtgctggtaaaggaacacaagcagttcatctagctgctcattacaaaattccacatatctccaccggtgatattttccgtgctaatttaaaaaatggcaccgaacttggtaaacaagcacaaactttcatggatcgtggggagttagtcccagattctgtgaccaatgaaatggttagagatcgacttggaaataatgatgttgccaatggctttttattagatggctttcctcgtaataccaatcaagcgcaagttctagatcaaatcttggtagaaaagaagatgccattggatgctgtactggaattaaaaattgataatgctgaaattgttaaacgattatctggccgtcgcacctgtcgtggctgtggtgcttcatcccatgttgagtttgaaaagccaaaggtggcaggagtttgtgataaatgccaaggtgagctttatcaacgtgaggatgacaaggaagaggttgttactcgccggcttgaaatctataccgatcaaactgcgccaattgttgagttttataattcaaccggnctattaaaaattatttcagcccttggtgatgtcgctgagattaccaaaaaagctatctcaacnttaggttagtaaatatggctattgaggttaaagatctatcgcatttaaagttgatgcgaaaagcaggattagtagttgctgatactttgaaattacttaagcaatctgcccaaattggcatgacaactttggagttagatgagatcgcagcaaataatttagctaaacatggcgcaacatcatcctttttgggttatcacggatttccagctgttatctgtgcttcagtaaatgaagaggtagtgcatggaattccaaataaaagaaaactagtatctggtgatattttatctattgattttggcgccatagttgatggctggcatggtgatgctgcgatctcatttggtttaggtgaaattgatctggctaatcaaaagctaatggatgtttgccaagagtcaatgtggcgaggaattgcagcaggtaaaaaaggcgcaaagctaactgatatttcagctgcaattgaaggttacataaattcacaaggcaaatatggaattttgcgtgagtatggtggccatggaattggcagtgcgatgcatcaagagccacatattctaaattttggcccagctggtaatggacctgagttagtagttggtatggcacttgcaattgaaccaatgattaccagaggtaatgagcgcactaaagttttaagtgatgattggacagttgtctcacatgattcatcannnggtgcncattttgaacatacctacncaatcactcccganggcaaaatctttgttttaaccgccgaagatggtggaaaagagcagctagccagattgggtgttgaagtctcagatttgctctagctgggcccagattttcccgcatagatttgaagcactttgagcggatttttcttttttcctcaccccgcctaaactatccctcctgcctcgcaaggggtaaacctaatttagaacagataagtaggtatcgcttggccaagaaagacggtgcaattgaaatcgaaggcactgttgctgaagcactaccgaatgcaatgttccgagttgagttaacaaatggacacaaagttttagcacatatcagtggaaagatgcgacagaactacattcgtattttgccagaagataaagtgatcgtagaacttagtccgtatgacctcaccagaggtcgaattatttatcgttacaaataaataatttttaatctttaagttgttagaaaggtaatcgtgaaggtcaaacctagcgtgaaaaagatttgcgacaagtgcaaagtcattcgtcgtaatggtcgcgtaatggtgatctgcgaaaacctacgtcataaacaacgtcagggttaaataaaaaaacgcgtgatgtaacttaattagggtcaaacttaattaagaccctcagtccgaaaggctgaggccaggtaagaaattatctggaggcattgcgaaggacctttcggataaaagaaacaggttagcgatatggcacgtcttgttggtgtcgatcttccccgcgaaaagcgtgttgaggtcgcacttacctatattttcggaatgggtcttacccgtgcgcaggcaacacttgctgccaccggtatctcaccagatatccgcgttaaagatttacaagagccagatttggcaaagcttcgtgagtttattgaagcaaattacaaaattgagggtgaccttcgtcgtgaggtcgctggcgacatccgtcgcaaagttgaaattcaaagctaccaaggatcacgtcaccgcaagggattgccagtccgcggacaacgtactcacaccaacgctcgtactcgtaagggtccacgtgttgcaatcgctggtaagaagaaggagaccaagtaatggccgccgagaagactaaaccagcaaaggaagcagnnaaggctgcacctaagaaaattaaagcacgtaagaaggataagaaaaatgttgccttcggtcatgcttacatcaagagcacattcaacaacaccattgtttcaattaccgatccagcaggtggtgtaattgcntggtcatcatctggtcaagttggatttaaaggttctcgtaaatcaactccatttgctgcacaaatggcagctgaggctgctgctcgtaaagcacaagagcatggtttaaagaaggttgatgtatttgttaagggacctggttcaggccgggaaactgcaattcgttcattacaagcagcaggtcttgaggttggagccatcgcagatgtaactccagcacctcataacggttgccgtccacgtaaaccacgtcgagtataaggaaagggagaaaactatggctcgctataccggtgcagattgcaaaagatgccgtcgcgaaaaagtaaagctcttccttaagggctctaaatgtgatggaccaaagtgtccaattgagtcacgtccatatccaccaggacaacatggtcgcgctcgctcaaaggattctgagtacttactacagatgcgtgagaagcaaaagtgcgcacgtatttacggaattctagaacgtcagttccgtggttactacgaagaggctaaccgtctgcaaggtaagactggtgaaaatcttttggtactacttgaaactcgtttagacaacgtagttttccgcgctggctttgcaaagagccgtgacatggcacgtcagttagttcgccacggtcacttcttagtaaatggcaagagcgtaaatattccatcatttcgcgtaacaccaatgga

SEQ ID NO: 1459 - DNA, 4000 bp, Escherichia coli
  misc_feature (2000)..(2000): n is a, c, g, or t
agaagcctttcaaggcatcaccaccgaacaagaagagaatcaatactaccacgaatacagtggctgaagtaatgatggtacgagataaggtattattgatcgccaagttgatcaagcgagtgtctgaacgctcacctttgttgttggtcaagaattcacgaatacggtcaaatacaattaccgtatcgttgattgagtaacccaacaaggtcaacaatgccgcaatcaaatgttggtcaaaatccgttgggaaaggaacaacaccatccaagatggcaaacatcgacaacacaaccaaaacgtcgtgaatcaatgcaattgtagcacccataccataagccacactgcggaaacggaagacaatgtataagaagataccaaccacagtaagaattaccaaaaaggcactcttatcgcgggtactggttgcaatcgctgcacctactttggatgtagacaatactggatcttctccggtcatctcaaaacctttcaaagcatccaatacatcagcgcgaacagaatctctcgctgcttgtccttctgcatcaatcatgtaagtagttactattctgaactgacccttgcttccgaaagttttcacttcgttgctagactctttcaaattgttatccaaagccgtcttaatggcttcagtttgatagtttttgtcagcatcgaactgaatcacataagaatgcccacccttgaagtcaataccggtactaattccacccttcataacgaaggcagcgatacccgcaacgataaccaaagctgaaatcatgtagtactttttacggttacccacgaagtcaatatttgaattcttcatgaaacctttgttccaaggagcatcaaatttgatttccaaccctttgtcggcacgacggtctaacaacaaacgagtgataaacaatgctgtgaacattgaactgaaaataccaatcacaaggatcactgcgaaaccgtaagctggtcctgcaccggcgaaggtcaaaatgaaacctgccaacaatgtggtaatgtttgaatcgatgatggcactcaacgcatgcttgaaaccatcggcaattgcagtcttcaaactcttaccaatttccaattcgtctttaatacgctcataaatcagtacgttggcatctaccgccatacctactgtcaagataataccagccataccaggcaaggtcaatgccgcacccaaactagccaatacacccataatcaagaatacgttacccaaaacggcaacaattgccatccaacctgcacggctgtagtaaagaatcataaataatatggtggcgataaaaccaaacagcaaagaattcaaaccattgttgatagactcttgtcccaaagaagctcctacttgctcactggcaacaatcttggcaggcgcaggcaatttaccggctttcaacacgttcgccaagtcattggcttcacggatatcaaagtttccggtgatctgactgttaccaccgctaattttctggttaactacaggggctgaataaacacgatcatccaacacaacggcaatgtatttacctatgttacgacctgtcacttgagcccactgggtacccgctttggcggtcatttccatcgatacttccaattcacctgttggtgaagtatttacacgggcatcagaaatgatgttctcttcttctgcagacaacgctgcatttccatcgcgatctaatttcaagaaatacacgaaatattcgtcagaatttgccgcttctttaccatcagcttcataatcacggggcttggcactaaaggccaatttcgcactctccaaacgcaatactgctgcgtaacgctcgtcttccatcattttggtcaacatcgcacgatctgctttctttaccacagcaactgccgaacctggtccgtcattgccgaatgaacgcaatatcttcgccaaaggacttccattggcttcgtcttttttatcttttttatctttggtgttcgtgctcgcnacttttggactatccacagcaacggggccgtcagcagttgttgttgcaggagccacagcaggcgcagtatttgcaacgacaggagcaacagatgaatcaatgacagtgctatcaacctcttctgcttttggtgccaaaggagccaatttgctcgccttgtacaatgcattcaaaatgcgacttccatctctgcgctggccatcattgccatacacttcgtaaaattccaatttcgcactcttttcaaccaattcttccatacgacgggggttgtctacaccaggcaattcaacgctgatacgaccgccgtcaattttttggatggtaggctgggtaacgtttgattggttgatacgtttttcaaccacttcatatacacgatccacagcgctgctggtttcagctctcaagaagttcactacttctgcttcactgctattggattgaattgtgcttttatttcctttgatgaacaagttggccaaattgcggttggggttgttctttttgaaatttgctacgaaggcatcaacgaaatcagaacctttatcgcgaacatccgcattggcttgctcaatcgcacgggccaaatctttgtctttggtatcgttcgacaacacgcgaacaacggcacctttatccacttcaaggattacgttcataccaccacgcaaatccaaaccgaggtttacttcgcgctgcttacattcgaaataagtgtagcccgccaagcccacgctgtaaatttcttcattaccgaggctgtcgatgtaacggcgataggcctctttggagtcgcctcctttatcggcaactttggcagcaaacgccttagcttctttttcgaatccttgggctttccaagtaaacgacaattggaacacacaggctagcgccagtacaatcgaaaatcctacgatggttttattggttttcatcactatctataactatgcaaaaataagaaccgcgaaaataagcaaaaaataacagttaactaccttcctatgagaaggcttgcaatttttgcaacaataatttgatttctgtcgctgaataatcgttcatgcagcgaaaatgccctttcggacagccatcaaaacccagttttgtgcaggggtggcatgataaattttggggcagtaaatgcagcaccttttcgttgtttttgccggccgcgaaccccaatcccggatgcgtgtttccccaaatgaccaacaatggtttcccataggccgctgccacatggctaaaacccgtatctccgccaaccaccatatttgattgagcgatgcaccgcgcagaagtaggcaaatcaaacacccccacccgatcaattaactgatcaccaaattgttgcaacaaacaaccggccaactccttttcatcgttcccaccaattaacacccattttcgagcatcacctagaaacaccttttcccaaaccacttgcggaattttcttggttgcataagtaccacccaatatagccacaccgtaaccatcgcccagtcccaaatccacggtttctgttccaccctgagcatctagcccttctgattcttcgagtgattcgtaactgggcaacccaccccggaaatcatccaatgcaatcatggataattttttatgctgcgtttcttgctgcttgccattctcacgtgaaaaccacttggacaaacccacaggattctcttcactgagcgtccgaagcaactcattcgcagcctccaagtaacgctcttgtacgtgcgaaacatgaaaccgcgaagatttcgtctttacaaacaaccaccgttgaaatcgttttttgtcatacgaggcagcaggccaatccaaatgaaaggctcgggtagcatcgaagtacaacagctgagacaatgtattcagcgagcgccaattcttgtgcaaatccaaaatgccatcgtatttttctgctttcaacttttcccaaagccccggttctccccacgtataaaatttgtcaaccgcatcaccat

SEQ ID NO: 1460 - DNA, 4000 bp, Escherichia coli
  misc_feature (1929)..(1929): n is a, c, g, or t
  misc_feature (1940)..(1941): n is a, c, g, or t
  misc_feature (1967)..(1967): n is a, c, g, or t
  misc_feature (1971)..(1971): n is a, c, g, or t
  misc_feature (1976)..(1976): n is a, c, g, or t
  misc_feature (1983)..(1983): n is a, c, g, or t
  misc_feature (1985)..(1986): n is a, c, g, or t
  misc_feature (2002)..(2002): n is a, c, g, or t
agaagagactgcgttaacagaagaactggaagcagtttttgacatgggtgaaaaagggtttgttgccacagaagaaattatccagcaagtaatggatttacgtgaatgtgacgaagatgaagcaaaacgcttcgtagctttgggagtacatttaggatgtacattcggtgatttgaatgatacatttgaagaatgttcctatggtgaacaactatactgtgcaaatggtattgattattatattggcacagaagatgaactgaccaatatagctagtgatagagtacataatgatgatgaatacgcgtatttatggcgtgaagctgtggcggctcaaagaactaccgattcgttgagtgattggttgaattcaatcataagtgaggatggttggtgctcggtacttaattcttgggatggacggtatgaagaatataagattgctgaggaatatatttgtgtttgtaggtcataaattgtcatggaatacatgcttgttacggacaaggtgaaatcagtggcaataaacgatgattaatatgggacataaaaagacgattgattattggagacacccaaccaaaagggaaatcaagttcggtgagggagctattcattggttaacagtggatattgaaaaagttcagaagccagacggaagtttgaagaaatggtttattcatacagacggactaaggtacaatcgaccatagttaaagtgatgtctgtaaagcaaaggctgttctaacaaaatagagcagccttttgtgttaaacaatggttaaagtggacaactattcacaccatataaaacaataaaatctattcacattaaaacagtaataaatatgccattgaaaattgagaatatcaagttggcaggaaccaagtttgatggtcgcgctaagttgtccccagaacaacgtcaggctattcaaattttggcccgtgaaggatatagccaaagaaggttggctgctatgttcaatgttagcaagcggcttatacaatctatactatctcctcctgttcgcaagcactctaaacaatatccaacagaatattggacagagttaaaacggaagtgtcgaaaaaagaaaattgatttatataaaaatggaaagatcaagtttaataacaagctgaaaaataaatgaaacgcaagcgtatcaagtatgtagctaacattgattttggctatcgttcaattactgatgcaaagcaatatataaaaatattcttgaaatcgcttctttcgcaaatagggttacaactaggaatagactatatcgtaacagctaatcatttgcgaattagacatgtgaaaaatattacaggaaaaataactaccacacttaaagagatattcccagtattcaatttttattggaagactccaagactattggtgtggttctagaatcaatattaataataatttacaagtatggaaaagcattctatttcggttttaggagccgacaagaaacagtatgaaatcgcagatttcagagcaagaggtatgaattatactaatgctattggcattatcgtaacaacagaatttatgagccgtattttggcgtttgacacctggcaagaacgatggggaaacaccgatagggtcttgactgaagaacagaatgaatccgttgccatgcaaactttctccggtttggacctaaccaaacgtattgtagaaggacaggctggtattgacggaatgactgctgccaaacgttgttggaactatcaaaaaggtggcttccagtggtatttgccttgtttgatggagctaggagttctttgcgcatatcgtgatgagataaacaaagcaatgaaagaaattggatgtcccgatgaatgtttacttcctacagaagattctgatgaaacttgggtttggagtagcagtgagaacagtcagtncaacagctggnncgtgtactttagtaatggcaacttcnacancagcngcaagtncnncagtggcatggtgagngcggttgcagcatttcagccttcgccgagcctgttgacaggcgaggcaaaaagtaacgattgtctgcatagtgacgaagctcttataaacatgttacgtgaacgtggttataaaggcgaattgactaagaccttgactatttaatattatcgccacccatatttgatatggtatgggtggcaaaatattctttaacagcatggaaacatttgaaaagattatagaacaatacacacaaagcgaagtgtgtatgggagaattgttagctaatatttcggcagatggcatgtctattgaagacgcttttgaattgtatataaaagctatgaattatgctgaaaaagatgaattttatcaattagctgacagagaagtgaaattattaacagctaagaatgaagatgacaaacagccattaaaacaactgttagattcgctaagcatatcttgatataattgaatatgaataaatactattttgtaaatataggtgcggaggtaatatggcatcctgtaaatagtgacgagaagaaagttatgcaagtgtgcacctctgctcctcatccggttgaaaatgacacattagtttctctaattttttctgataaaaaggggaacgtaaaagtaaaggccgtcgaattaactccaaaattgactgacttcaatcaagggtactggtgtgcacttcaagatgcagtaagtaatggtgcctctgatacggttattcaggaaatgctacgcagtgccggatttacatactgggaatgttactggcatatacaaaattctgattttcagtcagaaaaaatatggtcgattattcgtggaatgttttgccaaaatccagattatattgattggaatggtgctgattatccaataaaaacggtagtaatctttgaaaatactcctgatgaagaaaaggtgactgtatctatcgagcgattagcgcgacaattattagatgatatgggtaattggagtacacgagaagcagaatctgtagatgaacagatttatttctatctggatgaagagacctttaacatgcctgatgaagatattgtagaatacttgaaaaaacaatgaaattactttatatagatttattttgtggtgccggtggaaccagcacaggggtagaaaaagcccgtttagagaacgaacaatgcgctaaggtaatagcatgtgtaaatcatgataaaaatgcgattgcaagtcatgctgctaatcatccggacgctcttcattttacagaagatattcgtacactaaatttatctcctttagtttcccacctacaaaaatgcagagctgaatatcctgaagcattgatagttttatgggcttcgttggaatgtactaacttctcgaaggctaaaggtggtcaaccacgagatgcagatagtagaacacttgcagagcacttgtttcggtatattgaggctattaacccagactatattcaaattgagaatgtagaagagtttatgtcatggggagatttggatgagtatggtaaacccattagtcgtgataaaggtaaatcttatttgagatggttggataacgtaaggtcttatggctacaaatttgaatataaaatattaaattcagcagactatggagcttacacttccaggaagagatttttcggaatatttgcgaaagggagtttacctattgtttttccggagcaaacccattctaaaaagccagaccaaaaattaaagaactggaaggcagtacgagatgtgttagactttgatgatgaaggaaaaagtatttttggtcgcaaaacacctttagtagattcttctttattaagaatttatgcaggacttattaagtttgtagcaggtggaaaagatgccttcatggttaagtataactcaatgagtaaagctggaaagtacaatgctccgggagttgatgatccatgtccagtaatatctactcaaaatcgacttggggttgcttgcataaatcgtttaaata

SEQ ID NO: 1461 - DNA, 4000 bp, Escherichia coli
  misc_feature (142)..(142): n is a, c, g, or t
  misc_feature (145)..(146): n is a, c, g, or t
  misc_feature (148)..(148): n is a, c, g, or t
  misc_feature (150)..(151): n is a, c, g, or t
  misc_feature (154)..(154): n is a, c, g, or t
  misc_feature (156)..(156): n is a, c, g, or t
  misc_feature (158)..(159): n is a, c, g, or t
  misc_feature (161)..(161): n is a, c, g, or t
  misc_feature (164)..(164): n is a, c, g, or t
  misc_feature (166)..(167): n is a, c, g, or t
  misc_feature (172)..(172): n is a, c, g, or t
  misc_feature (174)..(174): n is a, c, g, or t
  misc_feature (177)..(177): n is a, c, g, or t
  misc_feature (180)..(181): n is a, c, g, or t
  misc_feature (183)..(188): n is a, c, g, or t
  misc_feature (191)..(195): n is a, c, g, or t
  misc_feature (198)..(201): n is a, c, g, or t
  misc_feature (205)..(206): n is a, c, g, or t
  misc_feature (208)..(208): n is a, c, g, or t
  misc_feature (210)..(210): n is a, c, g, or t
  misc_feature (213)..(218): n is a, c, g, or t
  misc_feature (220)..(221): n is a, c, g, or t
  misc_feature (223)..(223): n is a, c, g, or t
  misc_feature (227)..(227): n is a, c, g, or t
  misc_feature (232)..(233): n is a, c, g, or t
  misc_feature (235)..(236): n is a, c, g, or t
  misc_feature (238)..(240): n is a, c, g, or t
  misc_feature (242)..(242): n is a, c, g, or t
  misc_feature (245)..(245): n is a, c, g, or t
  misc_feature (248)..(248): n is a, c, g, or t
  misc_feature (251)..(251): n is a, c, g, or t
  misc_feature (258)..(258): n is a, c, g, or t
  misc_feature (261)..(261): n is a, c, g, or t
  misc_feature (266)..(266): n is a, c, g, or t
  misc_feature (268)..(268): n is a, c, g, or t
  misc_feature (270)..(270): n is a, c, g, or t
  misc_feature (278)..(282): n is a, c, g, or t
  misc_feature (285)..(285): n is a, c, g, or t
  misc_feature (289)..(296): n is a, c, g, or t
  misc_feature (300)..(300): n is a, c, g, or t
  misc_feature (326)..(326): n is a, c, g, or t
  misc_feature (395)..(395): n is a, c, g, or t
  misc_feature (2066)..(2066): n is a, c, g, or t
  misc_feature (2726)..(2726): n is a, c, g, or t
  misc_feature (2729)..(2729): n is a, c, g, or t
  misc_feature (2733)..(2733): n is a, c, g, or t
  misc_feature (2735)..(2735): n is a, c, g, or t
  misc_feature (2771)..(2771): n is a, c, g, or t
  misc_feature (2786)..(2786): n is a, c, g, or t
  misc_feature (2801)..(2801): n is a, c, g, or t
  misc_feature (2816)..(2816): n is a, c, g, or t
  misc_feature (2825)..(2825): n is a, c, g, or t
  misc_feature (2834)..(2834): n is a, c, g, or t
  misc_feature (2854)..(2854): n is a, c, g, or t
  misc_feature (2867)..(2867): n is a, c, g, or t
  misc_feature (2883)..(2883): n is a, c, g, or t
  misc_feature (2897)..(2897): n is a, c, g, or t
  misc_feature (2903)..(2903): n is a, c, g, or t
  misc_feature (2912)..(2912): n is a, c, g, or t
  misc_feature (2942)..(2942): n is a, c, g, or t
  misc_feature (2990)..(2990): n is a, c, g, or t
  misc_feature (2993)..(2993): n is a, c, g, or t
  misc_feature (3011)..(3011): n is a, c, g, or t
  misc_feature (3030)..(3030): n is a, c, g, or t
  misc_feature (3041)..(3042): n is a, c, g, or t
  misc_feature (3044)..(3046): n is a, c, g, or t
  misc_feature (3050)..(3053): n is a, c, g, or t
  misc_feature (3057)..(3058): n is a, c, g, or t
  misc_feature (3062)..(3063): n is a, c, g, or t
  misc_feature (3067)..(3069): n is a, c, g, or t
  misc_feature (3071)..(3071): n is a, c, g, or t
  misc_feature (3073)..(3074): n is a, c, g, or t
  misc_feature (3076)..(3076): n is a, c, g, or t
  misc_feature (3078)..(3079): n is a, c, g, or t
  misc_feature (3081)..(3084): n is a, c, g, or t
  misc_feature (3088)..(3088): n is a, c, g, or t
  misc_feature (3092)..(3092): n is a, c, g, or t
  misc_feature (3097)..(3098): n is a, c, g, or t
  misc_feature (3102)..(3111): n is a, c, g, or t
  misc_feature (3113)..(3113): n is a, c, g, or t
  misc_feature (3115)..(3122): n is a, c, g, or t
  misc_feature (3124)..(3125): n is a, c, g, or t
  misc_feature (3127)..(3127): n is a, c, g, or t
  misc_feature (3129)..(3130): n is a, c, g, or t
  misc_feature (3132)..(3132): n is a, c, g, or t
  misc_feature (3134)..(3134): n is a, c, g, or t
  misc_feature (3136)..(3136): n is a, c, g, or t
  misc_feature (3139)..(3139): n is a, c, g, or t
  misc_feature (3142)..(3146): n is a, c, g, or t
  misc_feature (3148)..(3148): n is a, c, g, or t
  misc_feature (3150)..(3150): n is a, c, g, or t
  misc_feature (3152)..(3153): n is a, c, g, or t
  misc_feature (3155)..(3155): n is a, c, g, or t
  misc_feature (3158)..(3162): n is a, c, g, or t
  misc_feature (3164)..(3164): n is a, c, g, or t
  misc_feature (3168)..(3170): n is a, c, g, or t
  misc_feature (3172)..(3172): n is a, c, g, or t
  misc_feature (3174)..(3174): n is a, c, g, or t
  misc_feature (3176)..(3179): n is a, c, g, or t
  misc_feature (3181)..(3181): n is a, c, g, or t
  misc_feature (3184)..(3186): n is a, c, g, or t
  misc_feature (3188)..(3191): n is a, c, g, or t
  misc_feature (3195)..(3196): n is a, c, g, or t
  misc_feature (3198)..(3199): n is a, c, g, or t
  misc_feature (3202)..(3202): n is a, c, g, or t
  misc_feature (3207)..(3207): n is a, c, g, or t
  misc_feature (3209)..(3209): n is a, c, g, or t
  misc_feature (3213)..(3213): n is a, c, g, or t
  misc_feature (3215)..(3215): n is a, c, g, or t
  misc_feature (3218)..(3219): n is a, c, g, or t
  misc_feature (3221)..(3222): n is a, c, g, or t
  misc_feature (3224)..(3224): n is a, c, g, or t
  misc_feature (3230)..(3231): n is a, c, g, or t
  misc_feature (3234)..(3234): n is a, c, g, or t
  misc_feature (3237)..(3238): n is a, c, g, or t
  misc_feature (3242)..(3244): n is a, c, g, or t
  misc_feature (3246)..(3247): n is a, c, g, or t
  misc_feature (3249)..(3250): n is a, c, g, or t
  misc_feature (3252)..(3252): n is a, c, g, or t
  misc_feature (3256)..(3256): n is a, c, g, or t
  misc_feature (3258)..(3258): n is a, c, g, or t
  misc_feature (3261)..(3263): n is a, c, g, or t
  misc_feature (3270)..(3270): n is a, c, g, or t
  misc_feature (3273)..(3274): n is a, c, g, or t
  misc_feature (3279)..(3279): n is a, c, g, or t
  misc_feature (3281)..(3281): n is a, c, g, or t
  misc_feature (3289)..(3289): n is a, c, g, or t
  misc_feature (3299)..(3299): n is a, c, g, or t
  misc_feature (3303)..(3303): n is a, c, g, or t
  misc_feature (3307)..(3307): n is a, c, g, or t
  misc_feature (3310)..(3311): n is a, c, g, or t
  misc_feature (3313)..(3314): n is a, c, g, or t
  misc_feature (3318)..(3319): n is a, c, g, or t
  misc_feature (3328)..(3330): n is a, c, g, or t
  misc_feature (3332)..(3333): n is a, c, g, or t
  misc_feature (3335)..(3335): n is a, c, g, or t
  misc_feature (3340)..(3340): n is a, c, g, or t
  misc_feature (3344)..(3344): n is a, c, g, or t
  misc_feature (3346)..(3346): n is a, c, g, or t
  misc_feature (3348)..(3348): n is a, c, g, or t
  misc_feature (3351)..(3351): n is a, c, g, or t
  misc_feature (3353)..(3353): n is a, c, g, or t
  misc_feature (3359)..(3359): n is a, c, g, or t
  misc_feature (3364)..(3364): n is a, c, g, or t
  misc_feature (3366)..(3366): n is a, c, g, or t
  misc_feature (3368)..(3368): n is a, c, g, or t
  misc_feature (3374)..(3374): n is a, c, g, or t
  misc_feature (3379)..(3380): n is a, c, g, or t
  misc_feature (3382)..(3382): n is a, c, g, or t
  misc_feature (3385)..(3386): n is a, c, g, or t
  misc_feature (3388)..(3388): n is a, c, g, or t
  misc_feature (3390)..(3391): n is a, c, g, or t
  misc_feature (3393)..(3394): n is a, c, g, or t
  misc_feature (3399)..(3399): n is a, c, g, or t
  misc_feature (3401)..(3402): n is a, c, g, or t
  misc_feature (3404)..(3405): n is a, c, g, or t
  misc_feature (3407)..(3409): n is a, c, g, or t
  misc_feature (3411)..(3411): n is a, c, g, or t
  misc_feature (3413)..(3415): n is a, c, g, or t
  misc_feature (3417)..(3419): n is a, c, g, or t
  misc_feature (3425)..(3427): n is a, c, g, or t
  misc_feature (3429)..(3430): n is a, c, g, or t
  misc_feature (3435)..(3436): n is a, c, g, or t
  misc_feature (3438)..(3438): n is a, c, g, or t
  misc_feature (3442)..(3443): n is a, c, g, or t
  misc_feature (3445)..(3445): n is a, c, g, or t
  misc_feature (3448)..(3448): n is a, c, g, or t
  misc_feature (3453)..(3453): n is a, c, g, or t
  misc_feature (3457)..(3457): n is a, c, g, or t
  misc_feature (3469)..(3469): n is a, c, g, or t
  misc_feature (3472)..(3473): n is a, c, g, or t
  misc_feature (3476)..(3476): n is a, c, g, or t
  misc_feature (3482)..(3483): n is a, c, g, or t
  misc_feature (3487)..(3488): n is a, c, g, or t
  misc_feature (3490)..(3490): n is a, c, g, or t
  misc_feature (3492)..(3492): n is a, c, g, or t
  misc_feature (3495)..(3495): n is a, c, g, or t
  misc_feature (3497)..(3498): n is a, c, g, or t
  misc_feature (3500)..(3500): n is a, c, g, or t
  misc_feature (3505)..(3507): n is a, c, g, or t
  misc_feature (3509)..(3509): n is a, c, g, or t
  misc_feature (3511)..(3511): n is a, c, g, or t
  misc_feature (3515)..(3515): n is a, c, g, or t
  misc_feature (3519)..(3519): n is a, c, g, or t
  misc_feature (3521)..(3522): n is a, c, g, or t
  misc_feature (3528)..(3528): n is a, c, g, or t
  misc_feature (3534)..(3534): n is a, c, g, or t
  misc_feature (3536)..(3536): n is a, c, g, or t
  misc_feature (3538)..(3538): n is a, c, g, or t
  misc_feature (3541)..(3541): n is a, c, g, or t
  misc_feature (3548)..(3548): n is a, c, g, or t
  misc_feature (3551)..(3551): n is a, c, g, or t
  misc_feature (3556)..(3556): n is a, c, g, or t
  misc_feature (3558)..(3564): n is a, c, g, or t
  misc_feature (3568)..(3568): n is a, c, g, or t
  misc_feature (3570)..(3570): n is a, c, g, or t
  misc_feature (3572)..(3574): n is a, c, g, or t
  misc_feature (3576)..(3576): n is a, c, g, or t
  misc_feature (3578)..(3580): n is a, c, g, or t
  misc_feature (3584)..(3585): n is a, c, g, or t
  misc_feature (3590)..(3590): n is a, c, g, or t
  misc_feature (3607)..(3607): n is a, c, g, or t
  misc_feature (3610)..(3616): n is a, c, g, or t
  misc_feature (3620)..(3620): n is a, c, g, or t
  misc_feature (3622)..(3623): n is a, c, g, or t
  misc_feature (3632)..(3633): n is a, c, g, or t
  misc_feature (3636)..(3637): n is a, c, g, or t
  misc_feature (3642)..(3642): n is a, c, g, or t
  misc_feature (3647)..(3647): n is a, c, g, or t
  misc_feature (3649)..(3650): n is a, c, g, or t
  misc_feature (3652)..(3652): n is a, c, g, or t
  misc_feature (3660)..(3660): n is a, c, g, or t
  misc_feature (3662)..(3663): n is a, c, g, or t
  misc_feature (3667)..(3671): n is a, c, g, or t
  misc_feature (3675)..(3675): n is a, c, g, or t
  misc_feature (3678)..(3678): n is a, c, g, or t
  misc_feature (3681)..(3681): n is a, c, g, or t
  misc_feature (3684)..(3685): n is a, c, g, or t
  misc_feature (3688)..(3688): n is a, c, g, or t
  misc_feature (3694)..(3696): n is a, c, g, or t
  misc_feature (3700)..(3700): n is a, c, g, or t
  misc_feature (3705)..(3708): n is a, c, g, or t
  misc_feature (3710)..(3710): n is a, c, g, or t
  misc_feature (3716)..(3716): n is a, c, g, or t
  misc_feature (3722)..(3723): n is a, c, g, or t
  misc_feature (3726)..(3728): n is a, c, g, or t
  misc_feature (3731)..(3731): n is a, c, g, or t
  misc_feature (3734)..(3735): n is a, c, g, or t
  misc_feature (3737)..(3743): n is a, c, g, or t
  misc_feature (3747)..(3749): n is a, c, g, or t
  misc_feature (3753)..(3753): n is a, c, g, or t
  misc_feature (3755)..(3755): n is a, c, g, or t
  misc_feature (3757)..(3758): n is a, c, g, or t
  misc_feature (3760)..(3760): n is a, c, g, or t
  misc_feature (3764)..(3764): n is a, c, g, or t
  misc_feature (3766)..(3766): n is a, c, g, or t
  misc_feature (3768)..(3768): n is a, c, g, or t
  misc_feature (3774)..(3777): n is a, c, g, or t
  misc_feature (3780)..(3786): n is a, c, g, or t
  misc_feature (3788)..(3789): n is a, c, g, or t
  misc_feature (3791)..(3792): n is a, c, g, or t
  misc_feature (3794)..(3794): n is a, c, g, or t
  misc_feature (3796)..(3796): n is a, c, g, or t
  misc_feature (3798)..(3798): n is a, c, g, or t
  misc_feature (3801)..(3802): n is a, c, g, or t
  misc_feature (3807)..(3807): n is a, c, g, or t
  misc_feature (3809)..(3809): n is a, c, g, or t
  misc_feature (3818)..(3818): n is a, c, g, or t
  misc_feature (3820)..(3823): n is a, c, g, or t
  misc_feature (3829)..(3830): n is a, c, g, or t
  misc_feature (3832)..(3832): n is a, c, g, or t
  misc_feature (3834)..(3834): n is a, c, g, or t
  misc_feature (3837)..(3839): n is a, c, g, or t
  misc_feature (3843)..(3843): n is a, c, g, or t
  misc_feature (3845)..(3850): n is a, c, g, or t
  misc_feature (3852)..(3852): n is a, c, g, or t
  misc_feature (3856)..(3858): n is a, c, g, or t
  misc_feature (3860)..(3860): n is a, c, g, or t
  misc_feature (3863)..(3863): n is a, c, g, or t
  misc_feature (3866)..(3866): n is a, c, g, or t
  misc_feature (3868)..(3868): n is a, c, g, or t
  misc_feature (3871)..(3877): n is a, c, g, or t
  misc_feature (3879)..(3879): n is a, c, g, or t
  misc_feature (3882)..(3882): n is a, c, g, or t
  misc_feature (3885)..(3898): n is a, c, g, or t
  misc_feature (3901)..(3902): n is a, c, g, or t
  misc_feature (3905)..(3909): n is a, c, g, or t
  misc_feature (3912)..(3912): n is a, c, g, or t
  misc_feature (3914)..(3919): n is a, c, g, or t
  misc_feature (3921)..(3923): n is a, c, g, or t
  misc_feature (3929)..(3930): n is a, c, g, or t
  misc_feature (3932)..(3934): n is a, c, g, or t
  misc_feature (3936)..(3936): n is a, c, g, or t
  misc_feature (3940)..(3960): n is a, c, g, or t
  misc_feature (3962)..(3964): n is a, c, g, or t
  misc_feature (3966)..(3968): n is a, c, g, or t
  misc_feature (3970)..(3974): n is a, c, g, or t
  misc_feature (3976)..(3977): n is a, c, g, or t
  misc_feature (3979)..(3979): n is a, c, g, or t
  misc_feature (3981)..(3981): n is a, c, g, or t
  misc_feature (3983)..(3993): n is a, c, g, or t
  misc_feature (3995)..(3995): n is a, c, g, or t
  misc_feature (3997)..(3998): n is a, c, g, or t
  misc_feature (4000)..(4000): n is a, c, g, or t
acgggatcatcttacctcaggttggcaggatgaaaccatcacagacttagaggtaaggttcctgtttgaaggcacacctgaagtttcgggttaagggaaccgttaaagggacaaagtgctataaggaatatataggaacctntcnntntnnggntnannangcncnntatantngcncgnnannnnnnagnnnnngtnnnnacanntntntgnnnnnncnntngcanacacnnannannntnacnctngcncccccantgncccanancncaccctgnnnnngcnatannnnnnnntttngcgggattatcgacaagagactgtancgtaagcatagagaacttctgatcgatctaggatgaacatgctgccgacacccactccgaacatgaaanccgtcaagttaaacatcggtgctcgtctacggcaattcatttataaccgcgatcgcccactcaatgtaatttaatcgccgttctagcgaccaattagcagggggtgactttgctaaagtacccacatttgatgacttgtctgttagcttcaccagagcggcttcaggggacttcttgcactcattttctaactgaagctctttgcgccgttgttttggtagtgacttgtcgtcagttagtttgctaacaaatcctgtgatgcggttgccgaataattcagcaataactgttaagttggttgggtggcagtcttcaaccacatcgtgtagccatgcagctgctattgcttcttctgatttatcccattttgcaacaagggatgaaacttcttccaggtgcatagtatatggttctttggcagcacctttacggcactgaccagcgtgacgcacacgagcaaaccgcgcggcgcgattatccccaaaacttcgggcagtagatggatcacaggtagacaccaacatatgctgtgttttcatccaatccttggccgcaggggtatcgtttgtccgatacgtggagggagatataaatagattggcgggcccaaaaggggtgtcggttttgacatatttgggtttgctctgaacaatcagtgcggactagggttttaaaaacggatccacctgcatgctgtctgggatgggtgcctgcatcagcgataatatcgtcggcgcaagggacaattgatccaaggtgtcaagcggcccacaataggttgcatcgccaaagtaatacaaagcgaattcgcgttgtagcgggtcgtcaccaccgtgatggccccgtccgtcttggccgtgatcggcggtgataatgatgtcatatcccatttgacgccattgcctgatccagggggccaacatttcatccatcacaaagcaggcattatccatttctgggcaatcatgatgaaaacgatgccccatactgtccaatgtgcaggtatgcaaaattccatagtccagcaaaaatcgttggcaaagcatggttaaggttgcgaataaatcggcatccgagggcgtcatttgatttatcaagccatagcctgacatggtgtgaaaccggccgtggttaattgttgcgctttctggttcgtcgtattcaatatcacgcaaaggatcaaatgggctgcggttaaaaaattccgaccaaaaactatgcgtgacggcgccggtgacatagttgactgcgcgcagttgcgaaaacacatctggctggttcagcctaaatacggtgttgtttcccgttgcgccatggatttgaggtctgacccctgtgtggattgaggcgtagcaactggccgaagtactgggcagcacagaccgcatcacccagcggcgggcgtcgcctgaatgcacccagccttctaaattgccaaataatctggtccaattgcgcagtggcactccgtcaataatgacgaccaataacttgcctgccattttcacaatccattctgcgaatttcactagcctgattagacatcggaaccaaaaattggtcaacaccttgaagagctagcttaaaaatctattctcgttgatagtgagtttttagacttgcatttagtaaaagcgatatgtttaaactgatctcaaacggagactgatnatgttgaaaaaaaccacatttaagatcgttgcggctagcgcatgtatatttcctttcgccctgaacgctgaagatggcttctttactgataaacttccatccattgtgaaaaatatcgcggaagggattgaggttggtaaaggcggacaggcaacacgctctgaggtgcagaagtattctcttggtgttgcaaacgacgcaatagatagaaccgaacagcgtatattatcaaacaccaactttactcatttcgatcttacattgggttcggacgtgatgggcattgatggcgcagacgcgaagactaagacagaagcgatgacggtctaccgtctccatgaagataagaatatgttcctgttcaatcaggcgtctatcgttggctttgatggaagaaccaccttgaaccttggtcttggggttcggcacatcaatgatgctgagacagtcattatgggcgcaaacgcattttacgattatgaactagacagcgaacacaagcgcagtggtttcggtgttgagttgctgacatccatgcttgagttccgtgcaaataagtacaacgcaatatctggcacgattaactacaagggtatcgatgagacagcacttgatggtcacgacataaagttgtctgcaaacatgccctacttctactcntcnaacntntacttcaagcaaagtgagttcaaggacaatgcaggntacagcaccaaagcngatgagtggggtgtncaagctgaagtcgcncctaacttngttcttggngttgcttcacagaagaaganaggtagctcagcncaaacggttgcctccntcagctacagtatnccactnggtggacgngcacagccagcaaagcaaatgcaagacggngtgtggtcaaccaagctaaagccgatccgcgaaaagctgtatcaaccngtncagcgtgaaaaccgtatnatgaaaaaagccatcaaanttggcgtaacnntnnntggnnnntaannatgnncaannnantnncncnntnnnntatnattntttgnngcannnnnnnnnnancnnnnnnnngnntnanntntncntcngannnnntnantnntnctnnnnncncgannncngnannnnantcnnntnnnnttanncnngangcaantnaagntnaanntnntnatttanntgnatnnacgnnngnncnnancgtnantcnnnattttangannaattntncgagctgngtgtctttantttngganagnncnngcanntctgttacnnngnncnatggnatgnangnttntntcaatnaagangntncacttnaaganncnacnnananncnngggtncnncnnannngngnnnannnttgcannnannactanntntacnntnaantacantgtngctaccgaaganaannctntaaacnnaggnncngntananntngttannnananggcngcancnntgatgntggggncncnagnaatttancangttcnannnnnnntggncntnnngngnnngctnnctcancagagtctttacttganttnnnnnnnaacnanncaggttcannggnnactancaacnannanccgaacgncnntgcnnnnntagntgnaantannganaccttnnncctntttgnnnntnatagcnccaaannaannnatnccnntnnnnnnnatannnctgntnanngnccananangcttgnnnnacnnnnnnntnntnntncnanganngtttnanccaatacancnnnnattganncncntannncttnannnnnngncgtnnngntangcntngcnnnnnnngnatnagnnnnnnnnnnnnnngannttnnnnntanannnnnngnnngttgtnntnnngntgcnnnnnnnnnnnnnnnnnnnnntnnntnnntnnnnnannancnannnnnnnnnnncntnnan

SEQ ID NO: 1462 - DNA, 4000 bp, Escherichia coli
  misc_feature (1324)..(1324): n is a, c, g, or t
  misc_feature (1974)..(1974): n is a, c, g, or t
  misc_feature (1985)..(1985): n is a, c, g, or t
  misc_feature (2895)..(2895): n is a, c, g, or t
  misc_feature (2986)..(2986): n is a, c, g, or t
  misc_feature (2989)..(2990): n is a, c, g, or t
  misc_feature (3175)..(3175): n is a, c, g, or t
ccatgacaattgcagggtgacattctaccaagtcagcaatggtatcaatgacgctcccagaaatatatccttcctgcgcctgcgctaaatgcagtagagataatgtggctgatttcttatccggatattgggaaaatattctatccactttatccggattggcaaaaataaacttttcttggggagtggccatggtgttcaacgatccaattctcctgcgataacgttcgtgctcccgataattgccggtgcatcggatagcatatgtccctcaatcagtttgggaaaaattgaataattcatcagtgacggcggacgtgtgcggaccctgtagggcaccctgcctccatcggaaacaatgtaaaaaccaagctctccattgggagattccgtagctacataggcctctccaatgggtggtgtcattcctctattacgcatagtaatctcaaaatgatatatcaatccttctattgaattataaacctcatcttttgggggaagactaaaacctaaatccggatcaaccataacatcgcctgcaggcattttatccaaagcttggcggcagattttcacagattgacgcatttcctccattctaaccaaatatctgtcaaatacatctccatttaatgcaatggccacatcaaaatcgaattcctcatacctggaatatggctcttgcacacgaatatcccaatcaatacccgatgcccgtgccatgggtcccgagagtccgtaagatatggcatcttcttttgatattattccgatatccttggtccgatcctgccagatacgatttttatttaaaagggtctcaatatcccgggcaaccacatccacattatcaagaactttgataacggcttcatcaaatttgtccggaatatcccgcattaaacctccaaccaaagtatagctggttgtaagccgcgtacctgttgctatctcaaacaggtcataaatatcttccctgagccgaaatccgtacagaaaagcagtcagggctcccaagtccactgccagcattcccacattcaaaatatgatcagcaattctgctcagttcgcacattagtacacgaatatattctgtacgtttagaaacttcaagccccatgagtttttctgctgtcaaagcataagctacattgttacagagcggggacagataattcatgcggtctgtaatagttatgtattggttataatcaaggtattcgcccagtttttcaaatccggaatggagataaccaatttcgggggtgcccttgataacagtttccccttccagttccataataatacgcagagtaccntgagtagatggatgctgggggccaaagttgagaaccatccgctcggtatccattggctgatctgctccctgcaccattattgtgcagcctctttatttattccacgtttaaccaccggaaaatcatctctttctttccttcccaaacgcggataatcttttcgtaatggatggccttgaaaatcgtccgggttcatgatgcggattagattgggatggcctttaaatgatatcccaaaaaggtcatatatttctctttcctgccaatcggcagttttccatagagattctgcggatggtaattcgggttgatcttcaggcacgtatgcttttatggttactctttctgcagtttcgtgtgacagcaggtggtaaacaacagcaaagcgctcaaaaccgcccagcgttaaattatctatagcggtaatatcagccaggaagttaaatccattgtccctgaacaattttagaacatctaagttataggacccttgaatatgaatgatatcttcccctgcaaactgggtggtatcaagggtgacactcgggaacttatcatggaccttggtaataatttttgaaaggagcatttatttcccccgagtagtcgaataatcagaaaatttttctgtttccactaatttctgcagnttaattaaacnctccactactccttcgggacgtggagggcagccggggacataaacatcgactggtataaatttgtctacaccctgaatgacactataggtatcaaatacaccgccagttgatgcgcaagcgcccatagcaataacccattttggttcgggtatctgttcataaattcgaatcagaaccggcatcatttttattgaaattctaccagcaacaatcagtaaatcggactgccgcggcgaaaaacgtatggcttcggcgccaaacctagctatatctgtacgggcagctaataccgccatgaattctatcccacagcaggcagtaccaaaaggcataggccaaagggaatgttttctgccccaattgacagcgctttccagtgtggtggttaaaatgtttgatttaatatcatccggctgcatatcttgtctccgttatttatgtctgtacagtttaatgtgtgtccatacacatgttattcaaatgtcttaatctgccttataagaataagcttaaatttaggtaggttaatcccaatcaagcgctccctttttccagacataaacgtagccaaatgtgaggatagcaagaaatacaaccatttcaataaaaataaattttccaaatggcaggaaatcacggtaaacaaccgcccaggggaaaagaaatactatctcaatatcgaagattataaatatcagcgcaatcagaaaatatttaatggatatgcggactcttgtttttcccactaaatcaacaccggattcatagggcatatctttgacaatatttttcactctggggccaaaataatgggaggcaagcagagatataaacacaaatccaaaagctagaatgaacaccaccagtatagggaaataattttcaatcatattataattttactcttanaactcatttattatcttttctcaatctccgtttacgctcttcatggcgtaccctaccttcctcaaagcgctgtttttccacatctgtttcnggnnttaccattggaactccctggggtttgccattgtcatttaaggaaacaaaggtcaggtaggcagaagaagtgtggtagatagcgccggttttcggattttcagattcaatccgcacccccacttccatagaagatttaccggtataattcaccgaggattttaatatcatgatatcacccattttnaccggggccagaaaatccaattgatctacactggcggtgacaactgcggtacgggcatgtttgtaggcagacatggcggcacacatatccataagatgcataaccctgccacccagtacattacctaataaattggtatcattagggagaaccaactcatgcataatgacttgggtatccttgagagcttttgtttccattcagagattatcctttccagagatttatagatttttcaataaagccaataagaggttcccaataaataaagaagagaatgttctgggcagaaaataatataatagaccaatttacaaccgggtgagcttcaattttatttacctcaccttctacatcgactaggtacatacttttgacaattttaaaataatagtacagcgagaccactgaatttaaaatggcaaccacagccagccagtagaattgttgatgtttaaataactcagcaaagatataaaattttcctacaaacccagccgttggcggcaaaccggtaagggaaatgagtgtcagcgccatgaaggcacatagaaccgggtttttcctactcagcccatcccaatcgttaatatgatgggcattaagtttattggaggcaaatatagccatgtaaaaggcggcgagattcataaagaggtaaataaaaaggtacagcatgatagcgcgtactgcgtcagggctgattatggcaaatgccatcaacataaagcctacatgtgaaatagtggaatacgccagcaatctctttacatcttcctgctgaactgccagcaggttgcccagggtcatggttatggctgaggc

SEQ ID NO: 1463 - DNA, 4000 bp, Escherichia coli
  misc_feature (1)..(5): n is a, c, g, or t
  misc_feature (7)..(12): n is a, c, g, or t
  misc_feature (14)..(16): n is a, c, g, or t
  misc_feature (18)..(21): n is a, c, g, or t
  misc_feature (23)..(23): n is a, c, g, or t
  misc_feature (25)..(25): n is a, c, g, or t
  misc_feature (27)..(27): n is a, c, g, or t
  misc_feature (32)..(48): n is a, c, g, or t
  misc_feature (50)..(52): n is a, c, g, or t
  misc_feature (54)..(93): n is a, c, g, or t
  misc_feature (95)..(98): n is a, c, g, or t
  misc_feature (100)..(114): n is a, c, g, or t
  misc_feature (116)..(118): n is a, c, g, or t
  misc_feature (120)..(125): n is a, c, g, or t
  misc_feature (129)..(139): n is a, c, g, or t
  misc_feature (141)..(144): n is a, c, g, or t
  misc_feature (146)..(162): n is a, c, g, or t
  misc_feature (165)..(186): n is a, c, g, or t
  misc_feature (188)..(191): n is a, c, g, or t
  misc_feature (194)..(195): n is a, c, g, or t
  misc_feature (197)..(198): n is a, c, g, or t
  misc_feature (200)..(201): n is a, c, g, or t
  misc_feature (203)..(209): n is a, c, g, or t
  misc_feature (211)..(222): n is a, c, g, or t
  misc_feature (224)..(231): n is a, c, g, or t
  misc_feature (233)..(238): n is a, c, g, or t
  misc_feature (240)..(240): n is a, c, g, or t
  misc_feature (242)..(257): n is a, c, g, or t
  misc_feature (259)..(269): n is a, c, g, or t
  misc_feature (272)..(273): n is a, c, g, or t
  misc_feature (275)..(282): n is a, c, g, or t
  misc_feature (284)..(289): n is a, c, g, or t
  misc_feature (292)..(321): n is a, c, g, or t
  misc_feature (323)..(334): n is a, c, g, or t
  misc_feature (336)..(337): n is a, c, g, or t
  misc_feature (339)..(340): n is a, c, g, or t
  misc_feature (342)..(356): n is a, c, g, or t
  misc_feature (358)..(362): n is a, c, g, or t
  misc_feature (364)..(364): n is a, c, g, or t
  misc_feature (366)..(372): n is a, c, g, or t
  misc_feature (374)..(379): n is a, c, g, or t
  misc_feature (381)..(385): n is a, c, g, or t
  misc_feature (387)..(389): n is a, c, g, or t
  misc_feature (391)..(397): n is a, c, g, or t
  misc_feature (399)..(405): n is a, c, g, or t
  misc_feature (407)..(408): n is a, c, g, or t
  misc_feature (411)..(427): n is a, c, g, or t
  misc_feature (429)..(431): n is a, c, g, or t
  misc_feature (433)..(437): n is a, c, g, or t
  misc_feature (439)..(459): n is a, c, g, or t
  misc_feature (461)..(462): n is a, c, g, or t
  misc_feature (464)..(467): n is a, c, g, or t
  misc_feature (469)..(486): n is a, c, g, or t
  misc_feature (488)..(495): n is a, c, g, or t
  misc_feature (497)..(508): n is a, c, g, or t
  misc_feature (510)..(517): n is a, c, g, or t
  misc_feature (519)..(522): n is a, c, g, or t
  misc_feature (524)..(524): n is a, c, g, or t
  misc_feature (526)..(530): n is a, c, g, or t
  misc_feature (532)..(533): n is a, c, g, or t
  misc_feature (535)..(548): n is a, c, g, or t
  misc_feature (550)..(558): n is a, c, g, or t
  misc_feature (560)..(560): n is a, c, g, or t
  misc_feature (562)..(572): n is a, c, g, or t
  misc_feature (574)..(576): n is a, c, g, or t
  misc_feature (580)..(580): n is a, c, g, or t
  misc_feature (583)..(584): n is a, c, g, or t
  misc_feature (586)..(594): n is a, c, g, or t
  misc_feature (596)..(608): n is a, c, g, or t
  misc_feature (610)..(612): n is a, c, g, or t
  misc_feature (614)..(619): n is a, c, g, or t
  misc_feature (621)..(622): n is a, c, g, or t
  misc_feature (624)..(629): n is a, c, g, or t
  misc_feature (632)..(633): n is a, c, g, or t
  misc_feature (635)..(639): n is a, c, g, or t
  misc_feature (642)..(645): n is a, c, g, or t
  misc_feature (647)..(649): n is a, c, g, or t
  misc_feature (651)..(656): n is a, c, g, or t
  misc_feature (658)..(659): n is a, c, g, or t
  misc_feature (661)..(664): n is a, c, g, or t
  misc_feature (666)..(666): n is a, c, g, or t
  misc_feature (668)..(670): n is a, c, g, or t
  misc_feature (672)..(674): n is a, c, g, or t
  misc_feature (677)..(687): n is a, c, g, or t
  misc_feature (689)..(698): n is a, c, g, or t
  misc_feature (701)..(702): n is a, c, g, or t
  misc_feature (704)..(708): n is a, c, g, or t
  misc_feature (710)..(712): n is a, c, g, or t
  misc_feature (714)..(716): n is a, c, g, or t
  misc_feature (718)..(719): n is a, c, g, or t
  misc_feature (721)..(723): n is a, c, g, or t
  misc_feature (726)..(728): n is a, c, g, or t
  misc_feature (730)..(737): n is a, c, g, or t
  misc_feature (740)..(753): n is a, c, g, or t
  misc_feature (756)..(763): n is a, c, g, or t
  misc_feature (765)..(767): n is a, c, g, or t
  misc_feature (769)..(772): n is a, c, g, or t
  misc_feature (774)..(776): n is a, c, g, or t
  misc_feature (778)..(780): n is a, c, g, or t
  misc_feature (783)..(788): n is a, c, g, or t
  misc_feature (790)..(793): n is a, c, g, or t
  misc_feature (795)..(798): n is a, c, g, or t
  misc_feature (800)..(808): n is a, c, g, or t
  misc_feature (810)..(818): n is a, c, g, or t
  misc_feature (820)..(824): n is a, c, g, or t
  misc_feature (827)..(829): n is a, c, g, or t
  misc_feature (831)..(834): n is a, c, g, or t
  misc_feature (839)..(840): n is a, c, g, or t
  misc_feature (842)..(845): n is a, c, g, or t
  misc_feature (847)..(847): n is a, c, g, or t
  misc_feature (849)..(849): n is a, c, g, or t
  misc_feature (851)..(852): n is a, c, g, or t
  misc_feature (854)..(863): n is a, c, g, or t
  misc_feature (865)..(870): n is a, c, g, or t
  misc_feature (872)..(878): n is a, c, g, or t
  misc_feature (880)..(885): n is a, c, g, or t
  misc_feature (887)..(887): n is a, c, g, or t
  misc_feature (889)..(893): n is a, c, g, or t
  misc_feature (895)..(896): n is a, c, g, or t
  misc_feature (898)..(898): n is a, c, g, or t
  misc_feature (900)..(906): n is a, c, g, or t
  misc_feature (909)..(913): n is a, c, g, or t
  misc_feature (915)..(915): n is a, c, g, or t
  misc_feature (918)..(926): n is a, c, g, or t
  misc_feature (928)..(933): n is a, c, g, or t
  misc_feature (935)..(935): n is a, c, g, or t
  misc_feature (937)..(942): n is a, c, g, or t
  misc_feature (944)..(944): n is a, c, g, or t
  misc_feature (946)..(948): n is a, c, g, or t
  misc_feature (951)..(952): n is a, c, g, or t
  misc_feature (954)..(955): n is a, c, g, or t
  misc_feature (957)..(957): n is a, c, g, or t
  misc_feature (959)..(960): n is a, c, g, or t
  misc_feature (962)..(963): n is a, c, g, or t
  misc_feature (965)..(968): n is a, c, g, or t
  misc_feature (971)..(978): n is a, c, g, or t
  misc_feature (980)..(983): n is a, c, g, or t
  misc_feature (985)..(996): n is a, c, g, or t
  misc_feature (998)..(998): n is a, c, g, or t
  misc_feature (1001)..(1002): n is a, c, g, or t
  misc_feature (1005)..(1005): n is a, c, g, or t
  misc_feature (1013)..(1013): n is a, c, g, or t
  misc_feature (1015)..(1026): n is a, c, g, or t
  misc_feature (1029)..(1029): n is a, c, g, or t
  misc_feature (1032)..(1033): n is a, c, g, or t
  misc_feature (1035)..(1036): n is a, c, g, or t
  misc_feature (1038)..(1052): n is a, c, g, or t
  misc_feature (1054)..(1061): n is a, c, g, or t
  misc_feature (1063)..(1072): n is a, c, g, or t
  misc_feature (1074)..(1075): n is a, c, g, or t
  misc_feature (1077)..(1077): n is a, c, g, or t
  misc_feature (1079)..(1083): n is a, c, g, or t
  misc_feature (1086)..(1088): n is a, c, g, or t
  misc_feature (1090)..(1091): n is a, c, g, or t
  misc_feature (1096)..(1096): n is a, c, g, or t
  misc_feature (1098)..(1099): n is a, c, g, or t
  misc_feature (1102)..(1108): n is a, c, g, or t
  misc_feature (1110)..(1116): n is a, c, g, or t
  misc_feature (1118)..(1122): n is a, c, g, or t
  misc_feature (1124)..(1137): n is a, c, g, or t
  misc_feature (1139)..(1144): n is a, c, g, or t
  misc_feature (1146)..(1154): n is a, c, g, or t
  misc_feature (1157)..(1160): n is a, c, g, or t
  misc_feature (1162)..(1165): n is a, c, g, or t
  misc_feature (1167)..(1172): n is a, c, g, or t
  misc_feature (1175)..(1175): n is a, c, g, or t
  misc_feature (1177)..(1180): n is a, c, g, or t
  misc_feature (1184)..(1184): n is a, c, g, or t
  misc_feature (1186)..(1187): n is a, c, g, or t
  misc_feature (1190)..(1196): n is a, c, g, or t
  misc_feature (1198)..(1198): n is a, c, g, or t
  misc_feature (1201)..(1202): n is a, c, g, or t
  misc_feature (1204)..(1208): n is a, c, g, or t
  misc_feature (1215)..(1217): n is a, c, g, or t
  misc_feature (1219)..(1228): n is a, c, g, or t
  misc_feature (1230)..(1230): n is a, c, g, or t
  misc_feature (1233)..(1233): n is a, c, g, or t
  misc_feature (1237)..(1237): n is a, c, g, or t
  misc_feature (1239)..(1240): n is a, c, g, or t
  misc_feature (1242)..(1246): n is a, c, g, or t
  misc_feature (1248)..(1248): n is a, c, g, or t
  misc_feature (1250)..(1256): n is a, c, g, or t
  misc_feature (1261)..(1265): n is a, c, g, or t
  misc_feature (1268)..(1272): n is a, c, g, or t
  misc_feature (1274)..(1274): n is a, c, g, or t
  misc_feature (1277)..(1282): n is a, c, g, or t
  misc_feature (1285)..(1285): n is a, c, g, or t
  misc_feature (1288)..(1295): n is a, c, g, or t
  misc_feature (1299)..(1299): n is a, c, g, or t
  misc_feature (1302)..(1302): n is a, c, g, or t
  misc_feature (1305)..(1307): n is a, c, g, or t
  misc_feature (1310)..(1310): n is a, c, g, or t
  misc_feature (1314)..(1318): n is a, c, g, or t
  misc_feature (1320)..(1322): n is a, c, g, or t
  misc_feature (1326)..(1326): n is a, c, g, or t
  misc_feature (1329)..(1338): n is a, c, g, or t
  misc_feature (1341)..(1341): n is a, c, g, or t
  misc_feature (1839)..(1839): n is a, c, g, or t
  misc_feature (1848)..(1848): n is a, c, g, or t
  misc_feature (2427)..(2427): n is a, c, g, or t
  misc_feature (2433)..(2433): n is a, c, g, or t
  misc_feature (2436)..(2436): n is a, c, g, or t
  misc_feature (2442)..(2442): n is a, c, g, or t
  misc_feature (2472)..(2472): n is a, c, g, or t
  misc_feature (2544)..(2544): n is a, c, g, or t
  misc_feature (2550)..(2550): n is a, c, g, or t
  misc_feature (2595)..(2595): n is a, c, g, or t
  misc_feature (2685)..(2685): n is a, c, g, or t
  misc_feature (2688)..(2688): n is a, c, g, or t
  misc_feature (2881)..(2881): n is a, c, g, or t
  misc_feature (2899)..(2899): n is a, c, g, or t
  misc_feature (3052)..(3052): n is a, c, g, or t
  misc_feature (3058)..(3058): n is a, c, g, or t
  misc_feature (3214)..(3214): n is a, c, g, or t
  misc_feature (3580)..(3580): n is a, c, g, or t
  misc_feature (3601)..(3601): n is a, c, g, or t
  misc_feature (3619)..(3619): n is a, c, g, or t
  misc_feature (3640)..(3640): n is a, c, g, or t
  misc_feature (3649)..(3649): n is a, c, g, or t
  misc_feature (3652)..(3652): n is a, c, g, or t
  misc_feature (3655)..(3655): n is a, c, g, or t
  misc_feature (3706)..(3706): n is a, c, g, or t
  misc_feature (3709)..(3709): n is a, c, g, or t
  misc_feature (3715)..(3715): n is a, c, g, or t
  misc_feature (3805)..(3805): n is a, c, g, or t
  misc_feature (3823)..(3823): n is a, c, g, or t
  misc_feature (3825)..(3825): n is a, c, g, or t
  misc_feature (3998)..(3998): n is a, c, g, or t
nnnnnannnnnnannnannnnanananaaaannnnnnnnnnnnnnnnntnnnannnnnnnnnnnnnnnnnnnnnnnnnnnnnnnnnnnnnnnncnnnngnnnnnnnnnnnnnnntnnntnnnnnntttnnnnnnnnnnnannnntnnnnnnnnnnnnnnnnnaannnnnnnnnnnnnnnnnnnnnnannnnttnntnntnntnnnnnnngnnnnnnnnnnnntnnnnnnnntnnnnnntntnnnnnnnnnnnnnnnntnnnnnnnnnnnaanntnnnnnnnntnnnnnnttnnnnnnnnnnnnnnnnnnnnnnnnnnnnnntnnnnnnnnnnnngnnannannnnnnnnnnnnnnncnnnnnanannnnnnntnnnnnntnnnnntnnntnnnnnnntnnnnnnntnnttnnnnnnnnnnnnnnnnnannngnnnnngnnnnnnnnnnnnnnnnnnnnntnntnnnntnnnnnnnnnnnnnnnnnntnnnnnnnntnnnnnnnnnnnntnnnnnnnntnnnncntnnnnntnnannnnnnnnnnnnnnannnnnnnnnanannnnnnnnnnntnnnaaanatnngnnnnnnnnntnnnnnnnnnnnnngnnntnnnnnnanntnnnnnnttnncnnnnntcnnnnannntnnnnnntnnannnntnannnannntannnnnnnnnnntnnnnnnnnnnttnngnnnnntnnntnnntnnannntannnannnnnnnnacnnnnnnnnnnnnnnttnnnnnnnntnnntnnnntnnntnnnttnnnnnntnnnnannnngnnnnnnnnntnnnnnnnnnannnnnaannntnnnnaaaannannnntnananntnnnnnnnnnntnnnnnncnnnnnnntnnnnnntnannnnnannantnnnnnnnttnnnnntntcnnnnnnnnntnnnnnntntnnnnnntntnnnaannannananntnntnnnnccnnnnnnnncnnnnannnnnnnnnnnntntcnnttnccccttgncnnnnnnnnnnnntanaanntnncnnnnnnnnnnnnnnntnnnnnnnnannnnnnnnnngnnantnnnnnaannnannaaaanannaannnnnnntnnnnnnntnnnnnannnnnnnnnnnnnnannnnnnannnnnnnnnaannnnannnnannnnnnttntnnnnttancnnttnnnnnnngnttnngnnnnngaaggannnannnnnnnnnncnttntccngnntnnnnntntnnnnnnncaatnnnnnatnnnnnanaannnnnnttntcnnnnnnnnactnctnctnnntanaccnnnnncnnngccnttnnnnnnnnnnttnaacgcacaaaaaaactctctcgaagtgagagagtttgtaaagttcttatttgagaccgtattttttgttgaaacgatccacacgtccgtctgcttgagtgaatttttgacgacctgtgtagaatgggtgagaatcagaagtgatttccacacgtagtaatgggtattcgtttccgtcttcccatacaactgtttcacttgaagtctttgttgaacctgataagaatttgaatcctgtagttgtatccatgaaaactactggacgatattctgggtgaattccttgtttcatttctattcctcctgccctgaattatttgctaatccagagttatttattttcgcatgcataatgcaacacgaatataataacatgctcaaattgaatttgcaatagttttattcatcccctaattcaagtccgggaattgcgtttaaatccatatttgcaaagtctttttgcatgtattttgtataggctgcagcaccaatcatcgcngcattatcnccgcaaagtgataatggcgggatggaaaatgtgactgctgggtagtgttcttccatcatctgcgtcatcgctgtacgaagacccttattagctgccactcctcctgctaacacgaattgttttacaggataggcttcaagagcgcgtcttgttttttcgacaagaacttctacgacactggcttggaaacttgcggctaaatcttcagggacaatctcttcgcctttttgtttggcgttatgcacacgattgatgaccgctgatttcaatccactaaaactgaaatcgaagtggtcttcatgaatcatcgcacgtgggaagtcataagtatccgttccaagatgagctagttcgtccattttctttccaccaggatatggcaagttcagaatacgaccaatcttatcgtaagcttcccctgcagcatcatctcttgtttctccgataatttggaactcgccatcttctggcatatacacaagttccgtatgtccaccacttactacaagcgccattagtggaaattgcaaaggttccacgagttggttggcgtaaatgtgtcctgccatgtggttcacngcaatnagnggtttnccactcgctaaagctaaagccttcgctgcngaaatcccaatgagaagggctccgacaagtcctggaccatacgtcaccgcgatggcgtccatgtcatccaangttttncctgcttttgcaagagcttcgtcaatgacttgtgtaatttgttcnacgtgatggcggctagcaatctctggcacaaccccaccaaaacgcatatgacttttaatttgagaggctacaatatttgaaaggatggtnttnccgttttgaatcacggctgcacttgtctcatcacaactactttcaattgctagaatcaatgtttctttcatattgctcctcctatctttgttctatttctaagcgatattcaatcgcatcttcaactgggtcactgtaataatcacttctcgtatggaaggcttcgaaccctagaatttcatataaatattgngcacgcttgttgctttcncgcacttctaggaaaacaactttcacgtctttttgcttcaaatcgtataaggccatttgccataaacgttgcgcgagacctttaccttgatagtctttcgcaatcacgatattcgtaatcgttgcctcgtccaatacgctttggactccaagnaatccnactagttggcgttgcatccatactccgtaatacgtgtttgttggattttctaaatcggcaaggaaactctcggcactccaattatttggatgctcgtagttttcttgcactaatgtgactaatgcctccgccatcgctaaatcagctggatgtaancttgtaaatgaatactctgatgaatggaatgaagacggtgtttttggcggtaatgcatagagcatttccacggcatcttcattttcaggagtgtagtaattttcctttgtaccaacaacttcgtatccatttttacgatagagcttaatggcttttgtattcgacacgcgggcttcgagcgtaatttctttcttgtcgagcgcgcgggcgattttttctaatgctttcaataataaagttgcgacattcaagaagcgataatcgtgtagtacagcaacattcgtgatatgtaaatctgttccctctgtcgttctcgctccgatgaaaccaacgatttcctcttccacttccagcacaatataaatngcagctggattatgtgcgacntctttttcaagaacatcntttgcccatggagactctccntcataagcngcnttntccacttcaaaaatgcgagtggcatcttctggaagaccgattctgattttngcntgcgcnccgtttccaagaatcactcttttttcaaagttctcaaactggtcgcgaatcggatccatctgttgcgcttcttctaaaaacagtgctttnattttttcaaaccactgnangaagcgttctttaaactcgttccacatacactgaccccttttctaaaggatgctcagcttgccaattttcttctgcttctgccagtttcaagtacattgggacgaagacgtccgcgtcaacagcttccttatttcttcctaattcgataagcgatgttgcgtgaggaatcgcntc

SEQ ID NO: 1464 - DNA, 4000 bp, Escherichia coli
  misc_feature (2351)..(2352): n is a, c, g, or t
  misc_feature (2354)..(2355): n is a, c, g, or t
  misc_feature (2358)..(2359): n is a, c, g, or t
  misc_feature (2364)..(2365): n is a, c, g, or t
  misc_feature (2367)..(2369): n is a, c, g, or t
  misc_feature (2371)..(2374): n is a, c, g, or t
  misc_feature (2376)..(2377): n is a, c, g, or t
  misc_feature (2380)..(2381): n is a, c, g, or t
  misc_feature (2384)..(2384): n is a, c, g, or t
  misc_feature (2386)..(2390): n is a, c, g, or t
  misc_feature (2392)..(2396): n is a, c, g, or t
  misc_feature (2398)..(2423): n is a, c, g, or t
  misc_feature (2425)..(2437): n is a, c, g, or t
  misc_feature (2439)..(2454): n is a, c, g, or t
  misc_feature (2456)..(2460): n is a, c, g, or t
  misc_feature (2462)..(2476): n is a, c, g, or t
  misc_feature (2478)..(2494): n is a, c, g, or t
  misc_feature (2496)..(2496): n is a, c, g, or t
  misc_feature (2499)..(2503): n is a, c, g, or t
  misc_feature (2505)..(2506): n is a, c, g, or t
  misc_feature (2508)..(2511): n is a, c, g, or t
  misc_feature (2513)..(2514): n is a, c, g, or t
  misc_feature (2517)..(2518): n is a, c, g, or t
  misc_feature (2521)..(2521): n is a, c, g, or t
  misc_feature (2523)..(2526): n is a, c, g, or t
  misc_feature (2529)..(2529): n is a, c, g, or t
  misc_feature (2531)..(2532): n is a, c, g, or t
  misc_feature (2534)..(2534): n is a, c, g, or t
  misc_feature (2536)..(2537): n is a, c, g, or t
  misc_feature (2541)..(2542): n is a, c, g, or t
  misc_feature (2544)..(2545): n is a, c, g, or t
  misc_feature (2547)..(2554): n is a, c, g, or t
  misc_feature (2556)..(2558): n is a, c, g, or t
  misc_feature (2561)..(2572): n is a, c, g, or t
  misc_feature (2574)..(2578): n is a, c, g, or t
  misc_feature (2580)..(2592): n is a, c, g, or t
  misc_feature (2594)..(2596): n is a, c, g, or t
  misc_feature (2598)..(2600): n is a, c, g, or t
  misc_feature (2602)..(2602): n is a, c, g, or t
  misc_feature (2604)..(2605): n is a, c, g, or t
  misc_feature (2607)..(2609): n is a, c, g, or t
  misc_feature (2611)..(2611): n is a, c, g, or t
  misc_feature (2613)..(2614): n is a, c, g, or t
  misc_feature (2619)..(2620): n is a, c, g, or t
  misc_feature (2623)..(2623): n is a, c, g, or t
  misc_feature (2625)..(2626): n is a, c, g, or t
  misc_feature (2629)..(2629): n is a, c, g, or t
  misc_feature (2631)..(2632): n is a, c, g, or t
  misc_feature (2634)..(2635): n is a, c, g, or t
  misc_feature (2637)..(2643): n is a, c, g, or t
  misc_feature (2646)..(2656): n is a, c, g, or t
  misc_feature (2658)..(2683): n is a, c, g, or t
  misc_feature (2685)..(2692): n is a, c, g, or t
  misc_feature (2694)..(2694): n is a, c, g, or t
  misc_feature (2696)..(2696): n is a, c, g, or t
  misc_feature (2698)..(2704): n is a, c, g, or t
  misc_feature (2706)..(2706): n is a, c, g, or t
  misc_feature (2709)..(2713): n is a, c, g, or t
  misc_feature (2715)..(2715): n is a, c, g, or t
  misc_feature (2717)..(2727): n is a, c, g, or t
  misc_feature (2729)..(2731): n is a, c, g, or t
  misc_feature (2733)..(2741): n is a, c, g, or t
  misc_feature (2743)..(2750): n is a, c, g, or t
  misc_feature (2752)..(2757): n is a, c, g, or t
  misc_feature (2759)..(2767): n is a, c, g, or t
  misc_feature (2770)..(2770): n is a, c, g, or t
  misc_feature (2772)..(2772): n is a, c, g, or t
  misc_feature (2774)..(2775): n is a, c, g, or t
  misc_feature (2777)..(2777): n is a, c, g, or t
  misc_feature (2780)..(2784): n is a, c, g, or t
  misc_feature (2786)..(2790): n is a, c, g, or t
  misc_feature (2792)..(2798): n is a, c, g, or t
  misc_feature (2800)..(2800): n is a, c, g, or t
  misc_feature (2802)..(2809): n is a, c, g, or t
  misc_feature (2812)..(2813): n is a, c, g, or t
  misc_feature (2815)..(2815): n is a, c, g, or t
  misc_feature (2817)..(2818): n is a, c, g, or t
  misc_feature (2821)..(2821): n is a, c, g, or t
  misc_feature (2823)..(2824): n is a, c, g, or t
  misc_feature (2827)..(2827): n is a, c, g, or t
  misc_feature (2829)..(2830): n is a, c, g, or t
  misc_feature (2832)..(2833): n is a, c, g, or t
  misc_feature (2835)..(2839): n is a, c, g, or t
  misc_feature (2841)..(2841): n is a, c, g, or t
  misc_feature (2843)..(2845): n is a, c, g, or t
  misc_feature (2847)..(2848): n is a, c, g, or t
  misc_feature (2851)..(2852): n is a, c, g, or t
  misc_feature (2854)..(2857): n is a, c, g, or t
  misc_feature (2859)..(2861): n is a, c, g, or t
  misc_feature (2863)..(2863): n is a, c, g, or t
  misc_feature (2865)..(2869): n is a, c, g, or t
  misc_feature (2871)..(2885): n is a, c, g, or t
  misc_feature (2887)..(2891): n is a, c, g, or t
  misc_feature (2896)..(2896): n is a, c, g, or t
  misc_feature (2898)..(2902): n is a, c, g, or t
  misc_feature (2904)..(2905): n is a, c, g, or t
  misc_feature (2907)..(2908): n is a, c, g, or t
  misc_feature (2910)..(2913): n is a, c, g, or t
  misc_feature (2915)..(2916): n is a, c, g, or t
  misc_feature (2919)..(2920): n is a, c, g, or t
  misc_feature (2922)..(2925): n is a, c, g, or t
  misc_feature (2928)..(2935): n is a, c, g, or t
  misc_feature (2937)..(2939): n is a, c, g, or t
  misc_feature (2941)..(2945): n is a, c, g, or t
  misc_feature (2947)..(2950): n is a, c, g, or t
  misc_feature (2952)..(2953): n is a, c, g, or t
  misc_feature (2955)..(2997): n is a, c, g, or t
  misc_feature (2999)..(3006): n is a, c, g, or t
  misc_feature (3008)..(3010): n is a, c, g, or t
  misc_feature (3012)..(3025): n is a, c, g, or t
  misc_feature (3027)..(3031): n is a, c, g, or t
  misc_feature (3033)..(3034): n is a, c, g, or t
  misc_feature (3036)..(3051): n is a, c, g, or t
  misc_feature (3053)..(3090): n is a, c, g, or t
  misc_feature (3092)..(3094): n is a, c, g, or t
  misc_feature (3096)..(3097): n is a, c, g, or t
  misc_feature (3099)..(3103): n is a, c, g, or t
  misc_feature (3105)..(3106): n is a, c, g, or t
  misc_feature (3108)..(3109): n is a, c, g, or t
  misc_feature (3111)..(3123): n is a, c, g, or t
  misc_feature (3126)..(3129): n is a, c, g, or t
  misc_feature (3131)..(3144): n is a, c, g, or t
  misc_feature (3146)..(3156): n is a, c, g, or t
  misc_feature (3158)..(3159): n is a, c, g, or t
  misc_feature (3161)..(3170): n is a, c, g, or t
  misc_feature (3172)..(3175): n is a, c, g, or t
  misc_feature (3177)..(3190): n is a, c, g, or t
  misc_feature (3192)..(3193): n is a, c, g, or t
  misc_feature (3195)..(3198): n is a, c, g, or t
  misc_feature (3200)..(3202): n is a, c, g, or t
  misc_feature (3204)..(3211): n is a, c, g, or t
  misc_feature (3213)..(3264): n is a, c, g, or t
  misc_feature (3266)..(3315): n is a, c, g, or t
  misc_feature (3317)..(3322): n is a, c, g, or t
  misc_feature (3324)..(3328): n is a, c, g, or t
  misc_feature (3330)..(3343): n is a, c, g, or t
  misc_feature (3345)..(3348): n is a, c, g, or t
  misc_feature (3350)..(3400): n is a, c, g, or t
  misc_feature (3402)..(3405): n is a, c, g, or t
  misc_feature (3407)..(3433): n is a, c, g, or t
  misc_feature (3436)..(3437): n is a, c, g, or t
  misc_feature (3440)..(3446): n is a, c, g, or t
  misc_feature (3448)..(3451): n is a, c, g, or t
  misc_feature (3453)..(3454): n is a, c, g, or t
  misc_feature (3456)..(3459): n is a, c, g, or t
  misc_feature (3461)..(3463): n is a, c, g, or t
  misc_feature (3465)..(3477): n is a, c, g, or t
  misc_feature (3479)..(3530): n is a, c, g, or t
  misc_feature (3532)..(3533): n is a, c, g, or t
  misc_feature (3535)..(3538): n is a, c, g, or t
  misc_feature (3540)..(3541): n is a, c, g, or t
  misc_feature (3543)..(3546): n is a, c, g, or t
  misc_feature (3548)..(3548): n is a, c, g, or t
  misc_feature (3552)..(3552): n is a, c, g, or t
  misc_feature (3556)..(3558): n is a, c, g, or t
  misc_feature (3560)..(3560): n is a, c, g, or t
  misc_feature (3562)..(3562): n is a, c, g, or t
  misc_feature (3564)..(3566): n is a, c, g, or t
  misc_feature (3568)..(3570): n is a, c, g, or t
  misc_feature (3575)..(3578): n is a, c, g, or t
  misc_feature (3581)..(3582): n is a, c, g, or t
  misc_feature (3584)..(3588): n is a, c, g, or t
  misc_feature (3590)..(3590): n is a, c, g, or t
  misc_feature (3592)..(3596): n is a, c, g, or t
  misc_feature (3598)..(3614): n is a, c, g, or t
  misc_feature (3616)..(3618): n is a, c, g, or t
  misc_feature (3620)..(3622): n is a, c, g, or t
  misc_feature (3624)..(3625): n is a, c, g, or t
  misc_feature (3627)..(3627): n is a, c, g, or t
  misc_feature (3629)..(3632): n is a, c, g, or t
  misc_feature (3634)..(3637): n is a, c, g, or t
  misc_feature (3642)..(3644): n is a, c, g, or t
  misc_feature (3646)..(3647): n is a, c, g, or t
  misc_feature (3649)..(3659): n is a, c, g, or t
  misc_feature (3661)..(3676): n is a, c, g, or t
  misc_feature (3678)..(3681): n is a, c, g, or t
  misc_feature (3685)..(3685): n is a, c, g, or t
  misc_feature (3689)..(3696): n is a, c, g, or t
  misc_feature (3698)..(3702): n is a, c, g, or t
  misc_feature (3704)..(3712): n is a, c, g, or t
  misc_feature (3714)..(3714): n is a, c, g, or t
  misc_feature (3716)..(3722): n is a, c, g, or t
  misc_feature (3724)..(3727): n is a, c, g, or t
  misc_feature (3729)..(3733): n is a, c, g, or t
  misc_feature (3735)..(3736): n is a, c, g, or t
  misc_feature (3738)..(3739): n is a, c, g, or t
  misc_feature (3741)..(3750): n is a, c, g, or t
  misc_feature (3752)..(3753): n is a, c, g, or t
  misc_feature (3755)..(3755): n is a, c, g, or t
  misc_feature (3757)..(3764): n is a, c, g, or t
  misc_feature (3767)..(3767): n is a, c, g, or t
  misc_feature (3769)..(3771): n is a, c, g, or t
  misc_feature (3773)..(3776): n is a, c, g, or t
  misc_feature (3778)..(3778): n is a, c, g, or t
  misc_feature (3781)..(3782): n is a, c, g, or t
  misc_feature (3784)..(3786): n is a, c, g, or t
  misc_feature (3789)..(3790): n is a, c, g, or t
  misc_feature (3792)..(3799): n is a, c, g, or t
  misc_feature (3801)..(3802): n is a, c, g, or t
  misc_feature (3804)..(3804): n is a, c, g, or t
  misc_feature (3806)..(3810): n is a, c, g, or t
  misc_feature (3812)..(3813): n is a, c, g, or t
  misc_feature (3816)..(3818): n is a, c, g, or t
  misc_feature (3822)..(3822): n is a, c, g, or t
  misc_feature (3824)..(3825): n is a, c, g, or t
  misc_feature (3827)..(3829): n is a, c, g, or t
  misc_feature (3831)..(3836): n is a, c, g, or t
  misc_feature (3838)..(3844): n is a, c, g, or t
  misc_feature (3846)..(3853): n is a, c, g, or t
  misc_feature (3855)..(3859): n is a, c, g, or t
  misc_feature (3861)..(3861): n is a, c, g, or t
  misc_feature (3863)..(3863): n is a, c, g, or t
  misc_feature (3865)..(3871): n is a, c, g, or t
  misc_feature (3873)..(3874): n is a, c, g, or t
  misc_feature (3876)..(3886): n is a, c, g, or t
  misc_feature (3888)..(3889): n is a, c, g, or t
  misc_feature (3891)..(3893): n is a, c, g, or t
  misc_feature (3896)..(3903): n is a, c, g, or t
  misc_feature (3905)..(3912): n is a, c, g, or t
  misc_feature (3914)..(3919): n is a, c, g, or t
  misc_feature (3921)..(3922): n is a, c, g, or t
  misc_feature (3924)..(3927): n is a, c, g, or t
  misc_feature (3932)..(3932): n is a, c, g, or t
  misc_feature (3934)..(3934): n is a, c, g, or t
  misc_feature (3936)..(3936): n is a, c, g, or t
  misc_feature (3939)..(3943): n is a, c, g, or t
  misc_feature (3945)..(3945): n is a, c, g, or t
  misc_feature (3947)..(3950): n is a, c, g, or t
  misc_feature (3952)..(3952): n is a, c, g, or t
  misc_feature (3954)..(3954): n is a, c, g, or t
  misc_feature (3957)..(3960): n is a, c, g, or t
  misc_feature (3963)..(3998): n is a, c, g, or t
ccgcggccgccagggcgccgatgcggcgcgcgcacgactgaaaagatgcaaatttccttttcgcgtccctgaaagccgtcaatcgtattgacatcaatcattttcgcgcggctgcctagcttttcttcgagtcgttttcgaatgtttctcacttgagccttgtatggagatataacagccacgttttcgtcttcggcaatttctgggaaatgtttaaacaactgttgaataaggcacacggcgaaatccgcttcgtcgtcgttggcccacgaatgcccagcggtttcgtattccttgcctttgatgtcaaagaacacgaatggtctgaacggtctaaacttgtgccacggtcgcgacgtgagcttcaacattccagggccatcgacgagttcgtcttcgtaaaaggtttccgaaggaaattgacgaattgctgggtgcatgcggtattgcgttttgagcatgtgcaccggatacgcgctcatttgcaagcgcttgaacatcgacatgtcgtacttgtggtcaaccgcggtcgagctaagtaccgtggcgggcaactgtcgcggatctccaactaaaaatacctgcttcgcaccgtagcacaaaggcacgagcgtcgagggttcaaccgcttgtgcggcttcgtcgataatcacggcgtcaaacggtttgctcatgcgcgcaaacattccagacccggaaaatgacaaagtactacacaccaccgttgcttcttctaatatcgcttgcttcaatcgatcgcgttcaattgcagcctcaaattttcgaacggcgtcgccgtgcgcgcccatttcgccgacgcgctgctgcacgagttcttccatggacactgattgcacagaatggtgcacgctcacaccgacacgaacgatagtgggcgaatatgtcgaccctgagccatcgatgaggccattttgaatgattctcaacacaatttcgtcaagggctgaattcgatggcgcgcaaaccaaaattttcaatcgtttgtacgcgtcagatcccaggaggtgcgcctgctgcgtctgtggcgccgccggcactctcgcgctcgtgatactttcactgctcggacgatcgccgtgcgtttcatggaatgtcttattctgtgcaactaacggtggtgcatcgcgaggatttgacacaccagcgagccaaggtgacgcgcgcgcccattctgtctttttctcctccaacgtaagatgcgtcgacgcggctcgcattctcgcgtacgattcaaaatccacgtgcgttctcgagcccgagctcggtgtggaatgtaacaacaccgataatagcgacaaaatcgtacgcgttttccctgtaccaggtggaccttgaatcagcacgagagggtcgcgattcagcgccgcgcccaaagccttcacttgcgagtcgttgtacgcgtgctcgatttctctcttcaagccgtctggcattgtccacgcattcttggacgttgccgcttccaccgcttccgtgggcttggctttgagaatcgtcgacgcgtacggaagagctggaaaagcgtgaatagcgagccattcgcgcgtcacggtggagaggttggccaaatttttcaagtaccatcgttgccctttaacggcggttaaagcgttacgcacagttctgaaacgcttatagtcgtgctcgctgtgctttcccgatttcgcgttggcgtcatccgattttgctcgcttcgccgaatcacgtcgcgcttctgcactcgacgcgtccggcaaatgtaatcgtacgatgagcacgtttttcgcgtctcgcccttcaaccaccccgagcgcgtgcgcctctctcgccttttcatacgccgcctcgtcgttcgcgtcatccacgcacgcgcgtgaaagcaaaacaagatcattatcatggaattcactcgcatccgtgtctacgagagcaaatttggcgctatgaaactcctccgcgcgcgaggcggtaaccacgccgcagactcggctccttcgctctttgtcatcatcctcacctcgacgaacgatcgccgcggcttcttccaataataacggttcatacgtttccacgtattccctcgccgacgtaaacgtcagcggtacgtccacgcatcgcacgtgatgtgccgtagacgacgtcgcatctctggtggcggcggtcgccgcgtccccatcgtcatcctcgcgttcaccctccccggcgccgcgtatggcaaagtaatcccacgccaacacccggcgctggagcgaacttaaatgactttccacgtgattcatcaataaatcgctcgcgacgcgggatcccacaccgcggcgcactgtgtggtggtggtggtcgtggtatccaannanncanncacgnncnnncnnnncnnccnnccncnnnnncnnnnncnnnnnnnnnnnnnnnnnnnnnnnnnncnnnnnnnnnnnnnannnnnnnnnnnnnnnnannnnngnnnnnnnnnnnnnnngnnnnnnnnnnnnnnnnngncgnnnnngnngnnnncnncgnnggngnnnncgncnncncnngcgnngnngnnnnnnnngnnngcnnnnnnnnnnnngnnnnngnnnnnnnnnnnnngnnngnnngngnngnnngngnnggcgnnggngnnggngnngnngnnnnnnncgnnnnnnnnnnnannnnnnnnnnnnnnnnnnnnnnnnnngnnnnnnnngntngnnnnnnngncgnnnnngngnnnnnnnnnnngnnngnnnnnnnnnannnnnnnnannnnnngnnnnnnnnncgngngnngnggnnnnngnnnnngnnnnnnngngnnnnnnnnganngngnngangnnggngnngnngnnnnngngnnngnnggnnannnngnnngngnnnnngnnnnnnnnnnnnnnngnnnnngtggngnnnnngnngnngnnnngnnggnnannnngannnnnnnncnnnannnnnannnngnngnnnnnnnnnnnnnnnnnnnnnnnnnnnnnnnnnnnnnnnnnnntnnnnnnnnannngnnnnnnnnnnnnnngnnnnngnngnnnnnnnnnnnnnnnngnnnnnnnnnnnnnnnnnnnnnnnnnnnnnnnnnnnnnncnnngnngnnnnngnngnngnnnnnnnnnnnnncgnnnncnnnnnnnnnnnnnncnnnnnnnnnnncnncnnnnnnnnnntnnnncnnnnnnnnnnnnnngnngnnnngnnnannnnnnnnannnnnnnnnnnnnnnnnnnnnnnnnnnnnnnnnnnnnnnnnnnnnnnnnnnncnnnnnnnnnnnnnnnnnnnnnnnnnnnnnnnnnnnnnnnnnnnnnnnnnncnnnnnngnnnnngnnnnnnnnnnnnnngnnnncnnnnnnnnnnnnnnnnnnnnnnnnnnnnnnnnnnnnnnnnnnnnnnnnnnngnnnncnnnnnnnnnnnnnnnnnnnnnnnnnnntgnnttnnnnnnntnnnntnntnnnntnnntnnnnnnnnnnnnntnnnnnnnnnnnnnnnnnnnnnnnnnnnnnnnnnnnnnnnnnnnnnnnnnnnncnncnnnncnntnnnncnctcnctcnnncncncnnncnnncaccnnnncanncnnnnncncnnnnncnnnnnnnnnnnnnnnnncnnncnnncnnangnnnngnnnnagacnnngnnannnnnnnnnnncnnnnnnnnnnnnnnnngnnnngcgngcgnnnnnnnngnnnnngnnnnnnnnngngnnnnnnngnnnngnnnnngnngnngnnnnnnnnnncnngncnnnnnnnncgncnnngnnnngngcnncnnncgnngnnnnnnnngnngngnnnnngnnggnnncggngnngnnngnnnnnngnnnnnnngnnnnnnnngnnnnngngngnnnnnnnanngnnnnnnnnnnnannannncgnnnnnnnncnnnnnnnncnnnnnngnngnnnnggagngngnggnnnnngngnnnngngngannnncgnnnnnnnnnnnnnnnnnnnnnnnnnnnnnnnnnnnnaa

SEQ ID NO: 1465 - DNA, 4000 bp, Escherichia coli
  misc_feature (1467)..(1467): n is a, c, g, or t
  misc_feature (1992)..(1992): n is a, c, g, or t
  misc_feature (2370)..(2370): n is a, c, g, or t
  misc_feature (3245)..(3246): n is a, c, g, or t
  misc_feature (3249)..(3255): n is a, c, g, or t
  misc_feature (3257)..(3259): n is a, c, g, or t
  misc_feature (3261)..(3261): n is a, c, g, or t
  misc_feature (3264)..(3264): n is a, c, g, or t
  misc_feature (3269)..(3269): n is a, c, g, or t
  misc_feature (3272)..(3272): n is a, c, g, or t
  misc_feature (3275)..(3284): n is a, c, g, or t
  misc_feature (3290)..(3290): n is a, c, g, or t
  misc_feature (3292)..(3297): n is a, c, g, or t
  misc_feature (3299)..(3299): n is a, c, g, or t
  misc_feature (3301)..(3307): n is a, c, g, or t
  misc_feature (3309)..(3312): n is a, c, g, or t
  misc_feature (3314)..(3333): n is a, c, g, or t
  misc_feature (3335)..(3337): n is a, c, g, or t
  misc_feature (3339)..(3340): n is a, c, g, or t
  misc_feature (3342)..(3345): n is a, c, g, or t
  misc_feature (3347)..(3347): n is a, c, g, or t
  misc_feature (3349)..(3352): n is a, c, g, or t
  misc_feature (3355)..(3355): n is a, c, g, or t
  misc_feature (3357)..(3357): n is a, c, g, or t
  misc_feature (3359)..(3363): n is a, c, g, or t
  misc_feature (3365)..(3365): n is a, c, g, or t
  misc_feature (3367)..(3368): n is a, c, g, or t
  misc_feature (3373)..(3373): n is a, c, g, or t
  misc_feature (3375)..(3376): n is a, c, g, or t
  misc_feature (3378)..(3379): n is a, c, g, or t
  misc_feature (3382)..(3383): n is a, c, g, or t
  misc_feature (3386)..(3390): n is a, c, g, or t
  misc_feature (3392)..(3400): n is a, c, g, or t
  misc_feature (3402)..(3418): n is a, c, g, or t
  misc_feature (3420)..(3421): n is a, c, g, or t
  misc_feature (3423)..(3423): n is a, c, g, or t
  misc_feature (3425)..(3426): n is a, c, g, or t
  misc_feature (3431)..(3431): n is a, c, g, or t
  misc_feature (3433)..(3446): n is a, c, g, or t
  misc_feature (3448)..(3448): n is a, c, g, or t
  misc_feature (3452)..(3454): n is a, c, g, or t
  misc_feature (3456)..(3457): n is a, c, g, or t
  misc_feature (3460)..(3463): n is a, c, g, or t
  misc_feature (3465)..(3469): n is a, c, g, or t
  misc_feature (3471)..(3475): n is a, c, g, or t
  misc_feature (3477)..(3484): n is a, c, g, or t
  misc_feature (3486)..(3491): n is a, c, g, or t
  misc_feature (3493)..(3494): n is a, c, g, or t
  misc_feature (3497)..(3500): n is a, c, g, or t
  misc_feature (3502)..(3504): n is a, c, g, or t
  misc_feature (3506)..(3510): n is a, c, g, or t
  misc_feature (3514)..(3526): n is a, c, g, or t
  misc_feature (3528)..(3530): n is a, c, g, or t
  misc_feature (3533)..(3539): n is a, c, g, or t
  misc_feature (3541)..(3543): n is a, c, g, or t
  misc_feature (3545)..(3546): n is a, c, g, or t
  misc_feature (3548)..(3548): n is a, c, g, or t
  misc_feature (3550)..(3550): n is a, c, g, or t
  misc_feature (3552)..(3573): n is a, c, g, or t
  misc_feature (3575)..(3577): n is a, c, g, or t
  misc_feature (3579)..(3582): n is a, c, g, or t
  misc_feature (3584)..(3584): n is a, c, g, or t
  misc_feature (3586)..(3589): n is a, c, g, or t
  misc_feature (3592)..(3593): n is a, c, g, or t
  misc_feature (3595)..(3596): n is a, c, g, or t
  misc_feature (3598)..(3602): n is a, c, g, or t
  misc_feature (3604)..(3604): n is a, c, g, or t
  misc_feature (3610)..(3610): n is a, c, g, or t
  misc_feature (3612)..(3614): n is a, c, g, or t
  misc_feature (3616)..(3631): n is a, c, g, or t
  misc_feature (3633)..(3634): n is a, c, g, or t
  misc_feature (3636)..(3638): n is a, c, g, or t
  misc_feature (3640)..(3642): n is a, c, g, or t
  misc_feature (3644)..(3649): n is a, c, g, or t
  misc_feature (3653)..(3653): n is a, c, g, or t
  misc_feature (3656)..(3656): n is a, c, g, or t
  misc_feature (3658)..(3660): n is a, c, g, or t
  misc_feature (3663)..(3667): n is a, c, g, or t
  misc_feature (3669)..(3670): n is a, c, g, or t
  misc_feature (3672)..(3673): n is a, c, g, or t
  misc_feature (3676)..(3678): n is a, c, g, or t
  misc_feature (3680)..(3681): n is a, c, g, or t
  misc_feature (3683)..(3683): n is a, c, g, or t
  misc_feature (3685)..(3685): n is a, c, g, or t
  misc_feature (3687)..(3688): n is a, c, g, or t
  misc_feature (3691)..(3691): n is a, c, g, or t
  misc_feature (3693)..(3698): n is a, c, g, or t
  misc_feature (3700)..(3701): n is a, c, g, or t
  misc_feature (3703)..(3719): n is a, c, g, or t
  misc_feature (3721)..(3723): n is a, c, g, or t
  misc_feature (3725)..(3730): n is a, c, g, or t
  misc_feature (3733)..(3734): n is a, c, g, or t
  misc_feature (3736)..(3736): n is a, c, g, or t
  misc_feature (3739)..(3740): n is a, c, g, or t
  misc_feature (3745)..(3745): n is a, c, g, or t
  misc_feature (3747)..(3748): n is a, c, g, or t
  misc_feature (3750)..(3758): n is a, c, g, or t
  misc_feature (3761)..(3764): n is a, c, g, or t
  misc_feature (3770)..(3771): n is a, c, g, or t
  misc_feature (3773)..(3773): n is a, c, g, or t
  misc_feature (3775)..(3776): n is a, c, g, or t
  misc_feature (3778)..(3778): n is a, c, g, or t
  misc_feature (3781)..(3781): n is a, c, g, or t
  misc_feature (3783)..(3785): n is a, c, g, or t
  misc_feature (3788)..(3789): n is a, c, g, or t
  misc_feature (3791)..(3797): n is a, c, g, or t
  misc_feature (3799)..(3799): n is a, c, g, or t
  misc_feature (3803)..(3803): n is a, c, g, or t
  misc_feature (3805)..(3811): n is a, c, g, or t
  misc_feature (3814)..(3814): n is a, c, g, or t
  misc_feature (3816)..(3820): n is a, c, g, or t
  misc_feature (3822)..(3832): n is a, c, g, or t
  misc_feature (3834)..(3840): n is a, c, g, or t
  misc_feature (3842)..(3852): n is a, c, g, or t
  misc_feature (3855)..(3856): n is a, c, g, or t
  misc_feature (3859)..(3872): n is a, c, g, or t
  misc_feature (3874)..(3876): n is a, c, g, or t
  misc_feature (3881)..(3891): n is a, c, g, or t
  misc_feature (3893)..(3893): n is a, c, g, or t
  misc_feature (3895)..(3896): n is a, c, g, or t
  misc_feature (3898)..(3899): n is a, c, g, or t
  misc_feature (3901)..(3902): n is a, c, g, or t
  misc_feature (3904)..(3904): n is a, c, g, or t
  misc_feature (3906)..(3910): n is a, c, g, or t
  misc_feature (3912)..(3918): n is a, c, g, or t
  misc_feature (3920)..(3920): n is a, c, g, or t
  misc_feature (3923)..(3929): n is a, c, g, or t
  misc_feature (3931)..(3931): n is a, c, g, or t
  misc_feature (3933)..(3939): n is a, c, g, or t
  misc_feature (3941)..(3941): n is a, c, g, or t
  misc_feature (3943)..(3952): n is a, c, g, or t
  misc_feature (3954)..(3955): n is a, c, g, or t
  misc_feature (3957)..(3962): n is a, c, g, or t
  misc_feature (3964)..(3964): n is a, c, g, or t
  misc_feature (3966)..(3966): n is a, c, g, or t
  misc_feature (3968)..(3970): n is a, c, g, or t
  misc_feature (3972)..(3972): n is a, c, g, or t
  misc_feature (3975)..(3976): n is a, c, g, or t
  misc_feature (3978)..(3984): n is a, c, g, or t
  misc_feature (3986)..(3993): n is a, c, g, or t
  misc_feature (3995)..(3996): n is a, c, g, or t
  misc_feature (3998)..(4000): n is a, c, g, or t
gcaagtgttaccgtcgatattgcaaaacgtcctcgacgaagctacggacgctttggaggacatcgccaacggcctcgaaaataaactccgcaacttggtggaacatgtctggggtacggttgcgagctcgtcgtccgaagtcgtatcgttcatcgaaaataacgtcaagggttcaatatgcgcatcgtcgagttccacggcatcgctcggagccgcgcgcgaagagcgacgactcgccctcgtaaatgacattcatcgcggcgtgcgcgctgcgttccggggcgactcgactccgacgcactcagcgcgtccaatcgttcctaatctaggcgctgggcagtgttgctatcacatcccgttcgcgtgtagcagcgaggtggatttcccaatgccttggccgaaggccttggagaatatatcggactcaccgggtgccgtcgttgtgaacatgccgggcctggaattcaacatctgtggcgagatcacgcagtttaaggtggacgagaaagttgcgacgaaactggtgaatgcttttggtgatatgttcgaagcgctctttgcagcactttacgaagagagcggactgaaaaaagtcgtggatgacgtgaaagatctgacaaaggacatgtttgggtcgtcggcggcgctcggatcgtatgatcgaccgtctttctccaccgacgaccgcaaacatctgttgaggaaatacgtcgaagtcaaaaaccggatggcagagacggagacaatcgttctggaggaacttttgaaaatatctgacaccattcattcgcccgaatacttgacgcatacaacacggacgccgtcgcgcgatgacgtgccgtctctgggcggcgagaacttgttcgaaaaggtcctgaatgatttcgccgacgatttgcagacggctcttaaatctatggcagacacgacagtcgtgaaggcggatatgtcaatcaacgtgaaaggagacacgtccatcaatgcgaaggcgagcgtctacaagatcggcgacatcatcgacaagctcgatattccaaatagctttgcgggcgtccacgtcgcccctctgtttcccggtttaaccgcggcgcttcaatacgacgtgttgctttcgatgccatattacgtcaacatcgacatggaggcatcttttgccttgggtctcgatatcgatatcccgatatctctcgaactttcgaatacaccaaacttcgccatgggctcgcccgccgtgaacttggttccgacgtacaccgcagccggtaagtcgagcgcgcaggtaggcgcgagtgttgagataaagaaaggctggatagcgctgtgcgcggggactcactgcgtcggcccatggatcaaagcgcgccaagacgtctacgtcggggtcgacacctgggctttcgccaactgcgactcgggatatggcgagctcgtgccaaaatggaccgacggattctcttattcgagcanaaatcaagcagcatgcgcaggttcactcgcaggcgctggtggctacgcgcaagtgccgaagacgggcaatattctcgctcaggtactgttcgcccccatgccgatcatgccctcgggcgcgagcgccgcctcgcaatccgcggcgcgtctcggcgacgacgacgacgagtgcgaggctcagccaatgggtatgatactggccgattacaccaacaccgtgcataacgccgtcatggcgggcggcgataactggtacacgacggatttgtttgccgagtgcccgtccgcgggcaagtgccccgcgccgtcaccgccgcaaccgtacacgccaacggcgaacacaaagcttgccaagtacaacgcccggtgctgcggcaactccggcgattcgcgctgcgccgcagcgatcgaaggtacgtacgaaacgctctgcgcccagctctgcgacgcctgcgcgggttgtgtcgccttcgactaccaagccagcacgaacaaatgcggcttcagcaaaagcgatagcacggnggaccgggagggattcacgcacttcggtcacggcgcgacgcccgcgtccaaatcttccctcggctctcgcatgcgtttcagcgcgcgcgcgtcgtcgccaacgtcaccatccgcgctcaccgccgtcttcgtcgtcgccttcgccgccgccttcgcctcggccgcgtttcgccgccgccgcctcgacgacgctcgccgcgcgcgcgtcgacgattacggcgcgttcgactgatcgacgcgtccctccggcgcgtctcgcgctcgagcgttcgagtcgatcatcgctccactcatccgtgtattttctcatatttcctcacattttctccatcgcgcgcctccccgccgtctcgcgcgtcgcgctcggcccggttcgcngggcgcggtcgccgccggcgcgattctggattttggattctcgtttcgccgcactcgtcgtcgcgctttgccgcgcgcaccgacgcgcgcgcccgagaacgagcgcggctcgagaacgcggacgcgcaccgacgccgtcgcgcgaacgtcgcgcgcgcggcgcgcgtcgacgacgctcgaaggcgacgcgacgccatgaagctcgtgcggtttttgcagaaactctccaacgaaagcgtgacgatagagctcaagaacggcaccacggcgcacgggacgatcatgggtgcgtgcacgatgacgacgacggcgcgcgacgcgcgaggacgacgcgcgaggacgaacgagagaagcgcgaatgcgaaacgcgggaaacgcggcgacgatcgggacgcggcgagaagactcgacgggagacgagacgcgagagggacgagacgcagggcgagcgacgcgagcgaagactgacgagcgcgaaaatcacggcgtcgcgcgcgatcgacaggcgtggacgtgagcatgaacacgcacctgaagcaggtgaagctcacgctcaagggtaaaaacccgacggcggtcgaacacctgagcgttcgagggaacacgattcggtattacatccttccggactctttgaatctggacactttgttagtagacgacacgcccaagcaagggaaaccgcgcgcgaaggcggcggcgagcgccggtcgagggcgcggtcgcggtcgagggcgcgggcgcgcgcggccgacgtagtcggtccgccgtcggcgtccgagcgcgtagtcgccgcgtcgcgcgcgattcgacgtcgagcgcgccgtcgcgccgcagttgtttgttttatacgatatccagcgattagatctccnncgnnnnnnngnnngncgncgcgncgnccnnnnnnnnnncgtcgncnnnnnntntnnnnnnnannnnannnnnnnnnnnnnnnnnnnngnnncnncnnnncncnnnnccncncnnnnncncnngcgcncnngnncgnncgnnnnncnnnnnnnnncnnnnnnnnnnnnnnnnncnncncnnccgcncnnnnnnnnnnnnnngncgcnnngnngcnnnncnnnnncnnnnncnnnnnnnncnnnnnngnngcnnnngnnngnnnnngaannnnnnnnnnnnncnnncgnnnnnnngnnnannangngnnnnnnnnnnnnnnnnnnnnnntnnntnnnncncnnnncgnngnngnnnnngngggggngnnngnnnnnnnnnnnnnnnngnngnnnannngnnnnnncgcnggngnnngcnnnnncnncnncgnnncnncngngnncgngnnnnnngnngnnnnnnnnnnnnnnnnncnnngnnnnnncgnngncgnnggggngnngnnnnnnnnngcnnnncggcgnngngnngncgngnnnggnngnnnnnnngngggngnnnnnnnggngnnnnngnnnnnnnnnnngnnnnnnngnnnnnnnnnnnacnncgnnnnnnnnnnnnnngnnnccgcnnnnnnnnnnngngnngnnanngngnnnnnannnnnnnangannnnnnnanannnnnnnanannnnnnnnnngnngnnnnnngncncnnngnggnngnnnnnnnannnnnnnnannannn

SEQ ID NO: 1466 - DNA, 4000 bp, Escherichia coli
  misc_feature (33)..(33): n is a, c, g, or t
  misc_feature (48)..(48): n is a, c, g, or t
  misc_feature (219)..(219): n is a, c, g, or t
  misc_feature (236)..(236): n is a, c, g, or t
  misc_feature (663)..(663): n is a, c, g, or t
  misc_feature (797)..(797): n is a, c, g, or t
  misc_feature (978)..(978): n is a, c, g, or t
  misc_feature (1506)..(1506): n is a, c, g, or t
  misc_feature (2619)..(2619): n is a, c, g, or t
  misc_feature (2961)..(2961): n is a, c, g, or t
  misc_feature (3018)..(3018): n is a, c, g, or t
  misc_feature (3378)..(3378): n is a, c, g, or t
  misc_feature (3644)..(3644): n is a, c, g, or t
  misc_feature (3675)..(3675): n is a, c, g, or t
  misc_feature (3795)..(3795): n is a, c, g, or t
  misc_feature (3804)..(3804): n is a, c, g, or t
  misc_feature (3966)..(3966): n is a, c, g, or t
gcgacgtcgccaagcatggtttccacgcgggtngtggccaccacaacntggggttcgttgtcgtctagggagccgtagcggatggacaccagttcgccttcgacgtccttgtacaccacctcgatgtcggagacggcggtttccagcaccggcgaccagttgaccaggcggtgcgcgcggtagatcatgcctcggtcaaaaagttccttaaagatggtntgcaccgcgcgcgacancccctcatccagggtaaaacgctcgcgggaccagtcgacggaatccccgatggcgcgcatctgctcgccgattttgcccccgtattcgttcttccactcccagaccttggcgacgaactcatcgcgatcgtaatcgtagcgatccttcccctccgtcttcttcagcatcgcctcgactttggtctgcgtcgcgatgcccgcgtgatccatccccggaagccacagcacctcaaacccctgcatgcgcttcctcctcgccaacgcatccatgagcgtatggtccagcgcatgccccatatgaagctgccccgtcacgttcggcgggggcagcacaatcgaaaagggcggcttctccgacgtcacgtcggcggtgaagtagccacgatcaagccactgctggtacaacgcagcctcaacggccttcggntcccagcttttcggcagggcgtcggcacggcttgtggaatggttcggggtgtttttgtcagtcacccttgccataatagcttgtgcccacctcgccgaactgccactgaggggcttatcgacgccgcgggcacncgcaccgcgccaactgcaggtttacagcaggccgagggaggcaacggcgtcgcgttcctcctgcagttccgcgatgttggcggcaatgcgctccttctggaagtcgctgagttccaggccctgcacgatctcccacgcaccattgcgggataccgtggggaagccgaagatcaggccctcnggcacaccgtaggagccgtccgacggaatggctgcggatgcccacttctcggtgccctgaacccagtcgcgcatgtgatcaatcgcggaggaggcagcggaggctgcggaggacttaccacgcacctcaatgatctcagcgccgcgcttagccacgcgcggaatgaactcattcacgtaccaatcctggtccaccagatcggacaccttgtcgccaccaacggtggcgtaggtgatgtcggggaactgcgtggccgagtggttgccccagattgccacctgttcaaaatcggtggaatccttgcccagcttctcggccagttgggaaaggctgcggttgtggtccagacgcatcatggcgttgaaacgttccgccggaatgtccttggcgtgagcctgggcaatcagggcgttggtgttggctgggttgcccaccacaagcacgcgaatatcgtcggccgcatgatcgttgagggcagtgccctgggggccaaagatcttgccgttggcggcgagcaggtcagagcgntcctcacccttgccacgtggcttggcgccaaccaggaaggcggcgttggcaccgtcaaatgccttgttggcatcgtcggtgacggtgatcttcttgaccaatgggaacgcggaatccagcagttccatggccacaccctctgtcgcaccaagcgcgggggtgatttccaaaagattcagctcgataggagtgtcctgcccgtacacatcaccgttggcgatgcgccacagcagggagtaggcgatctggccggcagctccagtcacagcaatctttttcggggcggcagtcatagtcgagacaatccttactttttagcgaacacggggcgtgagacggcccactatcccaggaaattcgagcatgccgtcacacactgctttctacactagcgggtgttttaccatcacgtcactgatcgcgcgcgaaaagcttgcgatgaacatgcacttagttgatatgtcatctcgcgtcaacggactgctgataccacattttgcgcatgcccgctactccacgtcacagcgatatcccacatcgatacccctttcggactgtccggttttttctgaacagacacccacaacaaacaccaccaaaaatttttatcggaaagatttcccgattcgggtgtgattttatagacaagagggtatttttcaccccggccagtgaagtcactgcatgtgattattattaccttgcagctcaggcgtgtattgaatcggttcattactaaaacgtcggcatatatttaacagtttcgcggaaccccctagacaccccaaaatattgcgagaaaatgatgccggtttagctcgcgaaaacatcatacatgtgccataattttatggtctagttacaaaatcacccccgttacacccacacggtcacccgtcacaacctgcggtttttccgaaatcagaaatcgatttcccactgaacaataaattcaggcacgattaacttagctggtaaaaccagcatgcctccaggaaaggaacaatcatgaaccgcccagcagcggaccaagatacaaccacgtcaaacatagacaaggtcgtcgaggtcgcgctggaaacattcgcccgtcaggggttcgaggacacacgnttggaaaacatcgcccacgattcgggcatgtccaagcgcatgatccactatcactttggtgacaagcggggtctgtatattcgcgctctacggttagcaatctcacagctccgcccggaaccccaggcgctggagttggattcaaccgtgcctgtcgacggtgtgcgcaaagtagtggaagccatcttccgccaaatggccgcacacccgaacgctatccgtctcctccttctagagaacctttttggccaagctgatatggccaattccaacccattagccgaccaatccagcgtcctcctgcaaatggacaaactacttatgatgggtcaggacgccggngccttccgccccggcatttctgcgctggatgtgtataccatcatctcctccatgtgngtgttcaggatcgcttacccagcggccttcaagaacttgtaccacatcaacttgaaggacgaggaaaacaatgtgggtatgcagcgacttgttgtcgatgccgtcctcgctttcctcacctcaaacatgcgcaactcgggcgggatgagttacctgactgtcgaaacctcgaatgacttcaacggccacgacggcaacggcagcggcaacatctacaacgaactcgacgacgccaccagcttcatcgaataacgctgtagagaacaacacacgtggccccgcacgctttcacaacgtgcggggccacgtgcttattggttttaggccgtcttttctgacgacgccgcgaccagctccggngcacccaacttccgcgccgccccctcggtgataatcacctcgccaatatcttcacgatccggcaggtcatacatgatgggtacaagcacttcctccatgatggctcgcagaccacgagcgccggtattgcgctccaacgcctgatctgcaatggcctccagtgcttctggggtgaaggtcagtttcacgccatccatctcaaaaagcttctcgtactgccgcaccaaggaattcttcggctcggtgagcacgcgcaccaacgatgntcgatccaggttggtcaccgtagccaccacnggcagacgaccaatgaactcggggatcagaccgaacttcaccagatcctccggcagcacgtccttaaacacgttcaccgtatcgacgtccgtgactgaccgcacctctgcaccaaagccnaggcccttnttgcccacgcgatcctggatcaccttctccaggccagcaaacgcgccagccaccacaaacagaatgttggaggtatccagctgaataaaatcctggttcgggtgtttacgccctccctgcggcggcaccgaggcggttgtgccttccagaatcttcaacaangcctgctgaacaccctcgccggagacatcgcgag

SEQ ID NO: 1467 - DNA, 4000 bp, Escherichia coli
  misc_feature (703)..(703): n is a, c, g, or t
  misc_feature (1177)..(1177): n is a, c, g, or t
  misc_feature (1189)..(1189): n is a, c, g, or t
  misc_feature (1378)..(1378): n is a, c, g, or t
  misc_feature (1457)..(1457): n is a, c, g, or t
  misc_feature (1484)..(1484): n is a, c, g, or t
  misc_feature (1517)..(1517): n is a, c, g, or t
  misc_feature (1564)..(1564): n is a, c, g, or t
  misc_feature (1807)..(1807): n is a, c, g, or t
ttgtctcaaaattacttgcatgattatagttaaaaccatcaatatttaattttaaacaaaaagatcattaatggaataagagataattaattagatggaagaagattctcaagaaggtattatttcattagtgaattcaatttttaatgtaggagaatttacaaaaacggaattcactttagaatttaaaattacagatgttaaatttaaaacaaaatttgaagatttagcaagagctttagaaagtaggaattatgtttgtaaattattaaaaaaagatgatggaatttatattgaaattcaaaaatttacaataaaaaaatccagaaagtggctaaatgcaacttggacaccgagattattgtttgcaattgttatttcatttgtaatgattgatggttactatagaacatctggaacaaatgcaattattgaaattggagatccattccaaatggcaattgtttatacgcttgctcttttaggaattttaggaacacatgagcttggacatatcgttgcagcaaaagcacatagattaaaaacaagttggccatactttatcccaggtttaccaatactaggaattccaacatttggtgcatttattcaatcaaaaggattaacaattaatcgaagtattttatttgacgtagctattgcagggccaattgcaggacttgtaattacaataattgtttcnctatatggggcatatactgcaccaattttagatcaaggaatagctgaaggattatttgcagaacaaattctagtagagtgggaacagggggagccattactaatgactgcaagtttggcagtatttggtaaaggaggaccaggtcacgaagtgatcatgacacctgtaatgtttgcggcatggattggatttttaattacgtttttgaatttacttccagcatggcaacttgatggtggacatatggcaagaacattgttaggtcaaaaaatccacaggtatgcaacttatggaagtatgttagtacttgttttgctaaattattggttaatggcaatcttaattttagtaatgtcaaccaagaatccgagtgcaactccacttgatgacatatctccacttacaaaaaatagaaaacttgcatatattggaattataatattagcagttctatgtgcaccattaccatcaggnttattttcaggnattctaccttagaaaaagtcttgcaccatcagttacaactgcaactttttgtctagcaccttgtgtttttaaaatataatccatagaatatttaattccaggtaaagaaatcatatcaagtttttttgcataaaattcaggtaaaatagatatcaaaccaatttgaaagtttttttgtatttctgaaanaaatagtaagttttccattccatcaacatattttgtaggattttttaattgttccaaagttaatctgtcttcaatatantgttgaattgcatcagaacctaaaccncttttacattcagcaactaaaattgcgagaccntcttttttgatagcatttgagcagttccaaagtgaagataaagaatntcctaaagtatcattacttgcatccttaccagtactcattatcatagttttatgttcaccaacatctttaatcgaatttgattctaaaattttagttgtggaaagtgttttagaaggatgatcaatagtaaaatcaagtattccttcagagtttgaaataatttcaattgcttgaatttcaaaattatcagcaaacttttttgcttcagttaaactttcagtgtattgtccaggtgttggaanattactttgtctttttgcatatgcagaaagcatagattcagtaccaaattttttgataagacgagttgcaacagtttcataaccaaatagaccatcaaatcccatctctcccataaatacaagatttgaattggaaatatcaacatcatcaaattcattaattgaacttccttcaggtaatccggatttaactaaatttagaatttttttctcagctaatatttttgggaatggttttgatttttgttcacataatgtaaataaagatgaaataattttcagaattgatttagagttatgtaatactactaattccattggtttggataaatctaaagaattgagtttttcagaaatggcagaatcatccataattttaccatcagaatcaattttttgctctaaattttcagcctttatatctaaaaccacgtctgtgatcccataattcaaccaaatttcaggcataatagatactaaatacaaaccaaaataaatccaatgtagtgaaatatgatatggaatttgtgaaagaatttgtgacctttttacatcaaaaagagataataaaatttggagattttacactagccagtggaaaaagtagttcatattatgtggatttaagattagttccaagttatcctcaagaatttagaatgatggtaaagtatctagaaaatcaaattacagaagatattggattagagaattttgaaagtattgtttcagttcccacaggaggattagttattgcatcagcattagcaattgaaacagtaaaaccactaatctatgttagaagcaaaccaaaggattatggtacttcaaaatcggttgaaggaaaaattcatgatggaatgaaagttgtaatgatagatgatgttgcaactacaggtggttcagttctaaatgcaacaaaatcattaacagaagtaaatgttccagtaaaagatgcatatgtaattgtagacagaatggaaggggctacagaagctttacaagagcttggagtaaaaatgcattcaattttaaacatattacaaattgccgaagtattgtatgaacaaaaattaattggtgtagatattctagataaagtaaaacagcaaattagtaaatgagtttgggcagctcagacaaatgccttccaatcatcaatttcagatataactctgattcttcattgcagccaataatttgtgtatagactcattttaaaactaattgaaaataatgggcccgaagggctttgatcccttggctcaccggttatgagccggttactctaccaggctgagttacgggccctaaagtcataaattttttttgaggtataaaatgttatgaggttaacagtattcttcataacaactgtcaagtaacaggttttgtgctgaaacagatttttcagcaatttcaattagattacttgtatcagcatttgatttttctaagatatttctccaagatgcagtatgtctaatgtcagcttcagtgtggagtttaaagtattcagttgcattatcatttgttatttgataaaattcagataaaccatctaattttgtttgactaatttttggaatttctttttcaaatgcatacattgcacatgcaccaccatcaaaagtagtcattaattcagataagtcagatactgcttttttggttttatctaatcctgaatatgaaattaattcatcattagagataccaagttctcctgcaaagctaatccaaggttttatgtgatcagattcttcttgttgattttcagttaattcagtgattacagaatttggtgctttttcaataatcggagtcataaattcaggaactgcttttacaagttgaaagtattcctttgaatatcctgctaaagattcttgagttaattttccatcagaccacatttcataaaatgggtgttttagtaggcttctttcttcaataatttgatcaattttctgaattaggttcataattcaacaataattctgccaatacaaaaatctttgttgtgtaccaaaagattttatgatctaagagaagaattttcatgggttccagtggtgtagaccggtcaagcatactgccctttcaaggcagtgatcccgggttcaaatcccggctggagcaccatctctttagtaaaaatccctacaaaagcaccaagatttaattagtaat

SEQ ID NO: 1468 - DNA, 4000 bp, Escherichia coli
  misc_feature (27)..(27): n is a, c, g, or t
  misc_feature (51)..(51): n is a, c, g, or t
  misc_feature (99)..(99): n is a, c, g, or t
  misc_feature (105)..(105): n is a, c, g, or t
  misc_feature (174)..(174): n is a, c, g, or t
  misc_feature (234)..(234): n is a, c, g, or t
  misc_feature (243)..(243): n is a, c, g, or t
  misc_feature (297)..(297): n is a, c, g, or t
  misc_feature (332)..(332): n is a, c, g, or t
  misc_feature (334)..(334): n is a, c, g, or t
  misc_feature (435)..(435): n is a, c, g, or t
  misc_feature (797)..(797): n is a, c, g, or t
  misc_feature (848)..(848): n is a, c, g, or t
  misc_feature (881)..(881): n is a, c, g, or t
  misc_feature (1013)..(1013): n is a, c, g, or t
  misc_feature (1019)..(1019): n is a, c, g, or t
  misc_feature (1055)..(1055): n is a, c, g, or t
  misc_feature (1161)..(1161): n is a, c, g, or t
  misc_feature (1166)..(1166): n is a, c, g, or t
  misc_feature (1173)..(1173): n is a, c, g, or t
  misc_feature (1175)..(1175): n is a, c, g, or t
  misc_feature (1193)..(1193): n is a, c, g, or t
  misc_feature (1196)..(1196): n is a, c, g, or t
  misc_feature (1205)..(1205): n is a, c, g, or t
  misc_feature (1211)..(1211): n is a, c, g, or t
  misc_feature (1244)..(1244): n is a, c, g, or t
  misc_feature (1252)..(1253): n is a, c, g, or t
  misc_feature (1267)..(1267): n is a, c, g, or t
  misc_feature (1304)..(1304): n is a, c, g, or t
  misc_feature (1325)..(1325): n is a, c, g, or t
  misc_feature (1367)..(1367): n is a, c, g, or t
  misc_feature (1450)..(1450): n is a, c, g, or t
  misc_feature (1517)..(1517): n is a, c, g, or t
  misc_feature (1601)..(1601): n is a, c, g, or t
  misc_feature (1728)..(1728): n is a, c, g, or t
  misc_feature (1787)..(1787): n is a, c, g, or t
  misc_feature (2236)..(2236): n is a, c, g, or t
  misc_feature (2270)..(2270): n is a, c, g, or t
  misc_feature (3355)..(3355): n is a, c, g, or t
ggtttgtagttcgcaagaagggcattnagctttggaaaattaaattgcggngcatctaaacgaaggtttacataaataaagccattccaaagttgaacnttgtgntgatgaagatgacaatttttagaatcaaacccggcgttcttcatacgggcagctcgtattaaagaaccntcaagatcataggcccaagcgtgataagagcagacaaagcgatgcacgtttcctcttccntcagcaagnggcataccacggtgtcggcacacatttgcaagaatacctatgtcaccatccgcntggcgaacaataagaagaggctcgttcaaaagatntncagtgaaaaaatcgcctgaattagggatctcatcttggcggccaaggcagtgccatccagagttaagaacggtagacacctcatgctcgaaacgattttgngatgtgtaaaaggcaccgggcatgctcatcggccgatcaggtggaagcttggctatctcttgcaacttaatggagaggtcttgcatgtttagcttacttttgtaaacggctggaaatccggatccattcggctcatcagatattgagcaaaatcaaaatttggacgctcaaggtgagatagatgccccggttctgcaccatcagctgagagaccacgaaagactttttccgtgcacccacgatcctcaacgtttacttcatctagtagtgtttttaactccaatagattctgttgggcgtctgcatcatccttataatcatcagacatccctccaccgaattggatatggactttacctggncctttgggatgtaagctaagataccagaagtagcccggcgtaagtgtgatnaataggctagggtatatggccaaaaggtatgtngttcttctttcatcgccgtgaagacgattatttttcggatgtgccatggctatgcgcaaactgtcatcttttaagattgtatggtaattgaaagctttttcgcctggtggacatatcatttcgtcaagtttngaaagnccaccgatcgtaccagcatgacaaacaggaagatgntaactttccataaagttttctgccaatactttccaattagtatcccagagatgctcttcaaagaaagtttcggagtagtctgtcatgttgtaaccttcaactaatngctcnactcctntnagttcttcggaaatgttnctnggagatggnttaagngtaatgaacacccagccgagccattcctcgcangcaattannggtaaactataacnatctttgcaaaaagctgtgttgccattcattgcgggngcgcctcttagagaaccatcnagattataggtccaggcatggtaagggcagacaatacttttngtcttaccgcgcccctcaagaagcgtagacattcgatggcggcagacattagaaaaagcacgtatagagttcttctgatctcntaatacgattattggctggtcagctagctcacaggtaacataatcaccaggttctgccagtgcgctngcccgacccacacaaaaccaatcttttttaaaaatatttttcaactctgattcaagaaaagactctgaggtatatacctctggnggcattgcgtgcgcttgttcaaaaggtaaagacacattagcacgtagggattcaataggatccgataaagctttcttgggagtcgacatgatttggttaccttgcaaaactgtatgaatagataatnatggttataacgccttcaatctagctaatttgcgacatgcctttatttcaaacagtatnttaatccttggccagattgtatttgctaacatattaaaagttagacttaaagttcgaatcaataagcttagtatatctagaaattattaagtaatatcggtaactttgtgcacttatgtgtggataataatgctttcgttgtggataaccttgttagttacttttttttgcttggatactgataagatttggtcaaaagtaagagcaagctggttggggggaacgtaattcattttactgccacaatcgaaacataagctggtaagggcttgaaagttatctttcattttccgctaaggcttgggcgaattatatgacgcaagttatttaatttgcagatttgtagggcaacctattatgaggttttgataatcccgattggtttgcataggcgtctctagatttatctagaggcgcctatgtattttttaccttaatgatattcaacntaagaatttgttacttccttcctctattttatgngaaagtaacagttactgttaaattgctttagttctctgcaccaattttaatccttggaccccaagtagtgcctagtatcattaacagtattacaagggtaagaagtaccgaaggaatatccgcaaacatgggtggctccattaaatagtcaccactagtaacgcccgaattatttaaccatgctttaccctgaatcgatagttccactcccgattcttgtagttctgctagcctcgccgcagtatttgtatcaaatagaactctccatcctgcaagctgaaggctaaaaaatgctacaaacacgccaaaaatagatgttaatatttttgctgctatgtttcctccagattcgtttgtaaccctagccgcccgcagggcaatgaaaattaatatagctaaagcaaccatatacatcccattattgatgtaattaaggctattatgctctaaaatttcaaattcactcatatttaaatccttacttttatgattttggaatagtgtacgaaacttctttcatttttttggacgaaattaccaactctgggcctgtccagcaggtcaccgttttgatttcactaactgctcccccgaggtatgctgacatcacaagagccatgtaatcggtttgtttttcaaagtcgcttattactacaacctcatagtcctgaccgatcaagccgtaaaatcctaaaaacttacctccagcactttctacagctgctttcaaactggcggttcgatcttcgccatttctcatcatactcatggcgacatcttctttgtaattcacataagttaatcgtactgtcattttatattcccaatttttgtaaatatataactgacaacacaaacaaatatttgctcaagtacactaactgtactttgtgtgggctaagcttgtgcaaaagactttttaagtcgcttcttgagttctcttgttggagaaaaagtaaattaaggccaaaataacgatgatgccccctataattgtgagaaattggggactttcagttgtaaatgtccatacccacaatggtcccaatatagtttctaaaagcataataatactgacatttgangccggtgtcattcgcgaggctcttgatagaagtatgaatgataatggaagaattaataagccagttattgatatataaaacatgcctttcagattaatttctgatgcgcttggccaaaaataaaacgccaataatccgcataaaattcccccagtcccgagtgccagtgggaatgcaacttccttatcttttcttataattacgaaattacaagcaaggctgaaggctactacaaggccgcataggccacctaatatggaggataggttaaatatatcatacgagttgatatcacctattacagatagagttacacctaaaaagactatgacaactatagcccaagttctcatatcaaccgcttcttttaatactactgcacccaagataattgagaaaacgggaacagtagctactgcgattaaaacgatcgctacgggagcaaggtagatgccatatgcaaaacaaaaaacgtttgccatttgaacaaagacaagggcaacaaagcttttacgccatatttttggctttaccccacttcttgataaaataaatgggcaaagccctattataaaaaagatacttccagcttgggttgcccgccaagcgaccatttgaccaccagacagttctgataacctcatc

SEQ ID NO: 1469 - DNA, 4000 bp, Escherichia coli
  misc_feature (2004)..(2004): n is a, c, g, or t
  misc_feature (3131)..(3131): n is a, c, g, or t
catctcaatcaatataaacccaaatttggaacatttttccgggatcattccgtgtggagaagcagacttcggcgttacaagtattaatgagttgggcgtctcagtaactatggatgactttgaccgagcactaaaaaataacttttttagactttgcaaataatctcgcatgcggcaattacgaacattgtgaattactcataatttgattaaacaaagataaatgattcaaaagggacaaagcagaaaagttttctgctgaatttgaggagaataccatggcagacgcagccattcaaggagccgaacacaacgacgatagagggttttttactcgctggtttatgtcaacgaaccacaaagacatcggcatactatatctagtagtttctgcttttgtgggttttatagctgttgctttcactgtttatatgcggctggaacttatgaatcctggcgttcaatatatgtgtttggagggcgcgcgattaactgcagctgccgtaggtgactgtacaccgaatggtcatttgtggaacgtattaattactggtcacggtattcttatgatgttctttgtagttatccccgccttatttggtggttttggaaactattttatgccgctacaaatcggttctccggatatggcgttcccaagaatgaacaacttgtcattttggctgtatgttaccggcacgtcactggcaatttgttcggtattatctccaggaggtaacggacaattgggttctggtgtaggatgggtattatatccgccgttatcagtaaacgagagtggtatgtctatggatctggccatattcgctgtccacgtatctggagcgtcttcgatccttggcgcgataaatatgataaccacattcctaaatatgcgcgcaccaggaatgactttatttaaagttcctctgttttcatggtcaatctttgtaaccgcatggcttatcctacttgccttaccagtcctcgctggagcgattacaatgcttctgactgacagaaatttcggaactacattcttcgatcctgcaggcggaggtgatccgatactttaccaacatattttatggttctttggacatcctgaagtttacatcataattctcccaggttttggaatcattagtcacgtcatagctacatttgctagaaagcctgtttttggttacctaccgatggtatgggccataatagcaattggagcattgggtttcgttgtatgggcacaccatatgtatacggtgggaatgtccttaacgcagcagtcctactttatgttagctacaatggtcatagccgttcctacgggcgttaaagttttttcttggattgctacaatgtggggtggctctatagaatttaaaacccctatgctttgggcatttggatttttatttcttttcaccgtaggtggtgtaaccggaattgtattagcccaggccggtgtcgatcgcgcatatcatgatacatattacgttgtggctcattttcattacgtaatgtcgctcggtgctgtctttgcaatatttgcaggtatctacttttacttttcaaaaatgacagggcgcgcttatcccgaatgggcgggtaaattacacttttggatgatgtttattgggtctaatttgacattcttccctcagcacttcttagggcgtcaaggtatgccgagaagatacatcgactatcctgaagcatttgcttactggaacgtaatatcttcatacggagcatttcttgctttcgcttcatttctattctttttcggtataatattttattcattgtttttcggcgcccgacaaaatgctgcaaacccatggaatgaatacgctgatactttagaatggactttaccgtccccaccaccggagcatactttcgaaattttgcctgagcaaaaagattgggataagtcagaagctcactaaactgcacctttgtctcttttagtaacttgagacaaaggccctcttaagagcngctacaaaaaacattgatacttttgtaattgtaaaatgccttacgtttggagttgtaaagaagagcctgagtattgtttagagctttggccccatagctcgcttcctaataaaggatttgctatattcattataattacatttataatgctgaatttcccgctatatggccttcttggcactaaatacttttgggtcatattcaccttcctattcgttatgctggcttctgtttggtatgcattaagaagaaattataaagaccgaagaatcttggaaaagttaacgatcacatcagaactttgccggctccttagacaaaacccgaccggtgaacaccaaagttgggaatgtaacagatattggactaaaatttcactacatgagacaggtgggcccgtaccaaattatatcaccttgtccggcggtggccgtgtcgttgaaataggatcttttttatcagaaccagaaagaaaagacctttatttggaattaataaaggtgattaagaaatttaagtaataattaatttgatagtttccgtttgactattggaccaacacttccaaagtccatctgccctgtaaatcgttcttttaggcacgccattacgcgacccatatctctaatagaggaagcaccctgctcatctattactttggttacctctatctcaatctcttcactattaagttgccgaggcaaaaaatactcaattacttgtatttctgataactctcgttcggataaatccaacctaccagcttcctcataggttttagcgctttcctggcgttgacgggtcattttcccaagaattccaagtatttctgagtcgtcaaccccttcttcaacaccctccgctctagccgatatatctcgatctttgatcgcggcggttatcaaccgcaatgtagacaatcgtaattgagccttttccttcatagcttctttcagtgcggaatttatttcatttcgaagcgacatagtaccctccagaaaaggtaaaaacgtttttcttttttcattacatcatatcatcaacatccacatcaataaattaacatcaatctaaactcaagcttgaccattacaatgtctgagaatacggtctcgacgatttacatnttggagaatcaaggatgaaagattcttatgggaccaagcctactgcttgtctcgcactgtctgatggaacagttttttatggtgaaggctttggctcaactggacaaaaaaccgccgaattatgttttaacacatctatgactggatatcaggaaattttgaccgacccttcttatgctggccaaattgtgacttttacttttccgcatatcggaaacgtgggggtcaatctagaagataatgaagccaacatgccgttcgcttctgggatggtagtaaaatggcgcccaactttagcttcaaattggagatcacaacaaaatctaattgaatggttagaaaacaatgagcttatcgctattggtggaattgatacaagaagactaactaggataataagaaaacaaggagctccacatgttgcgatagagcacaatacagatggtgattttgatactgatagccttatcaatgatgctagaaacttcgcggggctttcaggcctcgatcttgcaaagaatgttacctcaagcaagacatatagttggagtcaagaccgctggagatggtctggagggtacagtaacattgaaaaaagcaaagcacgggttgtcgccatagactttggagttaaagaaaatatacttaggtgtttaacagcaattaaatgtgaagtaattgttctaccagccactgcaaccgctgaagaagttctagcttacgatccagatggtgtatttttatctaacggccctggggatccggaagcgacaggtaagtattctataaatatgattaaagaattattaaagcttcctgagttaccaatatttggtatttgccttgggcatcaaatgctcgcgttggct

SEQ ID NO: 1470 - DNA, 4000 bp, Escherichia coli
  misc_feature (229)..(229): n is a, c, g, or t
  misc_feature (274)..(274): n is a, c, g, or t
  misc_feature (367)..(367): n is a, c, g, or t
  misc_feature (370)..(370): n is a, c, g, or t
  misc_feature (379)..(379): n is a, c, g, or t
  misc_feature (807)..(807): n is a, c, g, or t
  misc_feature (881)..(881): n is a, c, g, or t
  misc_feature (1431)..(1431): n is a, c, g, or t
  misc_feature (1505)..(1505): n is a, c, g, or t
  misc_feature (1700)..(1700): n is a, c, g, or t
  misc_feature (1724)..(1724): n is a, c, g, or t
  misc_feature (1733)..(1733): n is a, c, g, or t
  misc_feature (1775)..(1775): n is a, c, g, or t
  misc_feature (2475)..(2475): n is a, c, g, or t
  misc_feature (2487)..(2487): n is a, c, g, or t
gagagccattggtatggcagagcgagcgctgcagttaatgattaaacgcagccttactagatctccctttggaaaagagctagcacgccaaggagtgattcaagagtggattgcaaaggcgcgtattgatatcgagcaggctcgcctactggtcttaaaaacagcgtggatcattgataatcaaggggcaaaggctgcgcgcaaagaaattgctgctattaaagtagtngttcctagaatggcagaggagataatcaataacgccattcaagcncatggcggagcaggtgttagccaagatactccccttgcagctatgtatgcaggagttcgaactttaagaattgttgatgggccagatgaagtncanatccgcganattgcaaggttagagctcaagtcctatctgccatgagtgatctcactccagttagagatgaagatgcatttgatatcggcaaagttcacacctggcttgcgccatatatagctcagagtgatataccagaagttttccaatttagatctggcgcatcaaatctgacctacttacttaaatatcctgatcgcaagttagttcttcgtcgtcccccagttggaacaaaagcagtttctgcccatgatatgaagcgagaatttctaattcaatctcgtctcaagtcggtatttgacttagttccgaatgtaattgcgctctgcgatgatcagagcattcttggttctgatttctatgtgatggaggcagttcaaggcgagatatttcgcagagatgttccagagacgttaacaaaagtagatatctccgtnatggctgactcgttagtttcgggtcttgccaggcttcacttagttgatgcctctgtattggcagaacttaatanagggcaaggctatgtagctcgccaagtagagggttggtcaagaagatatcgaaacgcactaactgatgatgtttatgatggcgaagatgtaatggcctggcttgatgctaataaaccagatgatgttggttcatgcatcattcacggtgattggcggatagataacatggtctttgatctaggcaagaaaaagctagtcggagtgctggattgggagctagccacagtcggtgatccgcttatggatctaggctccgcccttgcttattgggtcgatagagatgatgagccaatgtttgcctcacttcgccgtcaacctagccatcttgaggcaatgccgacacgaaaagaattcattgcaaagtaccttgagctaagtgatagaaagtgtgatgacttcacattctatgaagtctttggattatttagattaaccgtaattatccaacaaatctgggctcgatataaagcaggtcagaccacaaatcctgcctttaaaggattcggcatgggagttaacattttgattaatcgtgcgcaaggattgatntcatgaaagctggacggataacaatctcaactagaaagtttgaagttaaagaagttccaactcccaccgctggnattggagaggttcgcatcaaagtaggcgcagctggagtctgtctctctgatgttcacttacttgatggcactctctcccctggttatctaaaaggtgatgaagtaactattggccatgaggtggcaggaaccattgatcaaatcggtgctgaagtctctgaatgcaaagtaggagatcgagtaattgttatcgcnggacagcgaaatgttgcaaatcanattacaacncttggttttgattacgatggtggttatgccgagtatgtaatnactaaagcctcgctaaccgtcaagattcctgactcactcccctttgaagaagctgcaatcatccccgatgcagtatcgactccctgggctgcgatttcatcaactgcgaagatgcgagcaggtgagagcgctgcagtatttggaattggcggccttggaattcacgcagtccagctccttaaaatcattggctgcagcaaaataattgccattgatcctcgccgagaagcccgtgaaaaagccataaaattaggggcccactttgcctttgacccaagtgatgaagagctaaaaaagcatagggggctaaacgctgtctttgattttgcaggagtcacatcggtaagaaagcagggactttcactacttggcgagctgggcagattggtaattattggaatagctaatgaagcgatcactattccaaatgatatggcctttacctatatgagaacccaactccttggacattatggatctgagcgccatcacaccgaagaacttgtcgagatggttagggatggaagattaaagctatctgactcagttactcaaattctctcacttgatcaagcagctcttgcgctagaaacacttgagaagaaaatcggtaatccaatccgcatagttctaaaaccataaaaaatcctagccaaaaattacttggaagttttttagagcttaccgactaaaagttctnctagtatgatcnaaatatcacttgatgcaatctttactggctagattcgtactggcaagctaaggataacatttcgatcagagcgctctccctcattattttcaattgcaaaaattccgccgcgcctttgccaatcattaagcgagagaattcttgatagaccggagagttcatttacctcatcaagccttagatgttcatagtcaggaagtatcgagccgtggtgattaaagacagtactggcaatacagatctcatctctatcgtttatgaaaatctcaataattcgcccctgctgcggccaatcaatcagcgatgaagtttcgatttgataaaaaccattctgactattcggaccaaagtaggcgatacgatgacggtgagtatggccacagatccatgcaatgacagcaggattggaaattaggtagctctcaatttcgggccctaaaacacgttttcccgatggactgtacccgttatagatatcttgaattggatgatggctagtaattacgatatatcgatcttttatttgctctacttgctctttgagccaaataaattgtgcttcatcaattgagccttgccaaccgccaaatggatttactgtatctaaggcaaggatggttactgattcatagtcttttctccaatactttatgtcactgcctaaatactcacttgaaattccattatcttcatcttcacgataaaaattgatgttccatgcacttggagtgagaaaatctctagaatcatcagcgcttactttcaaaatctttggagcgattggagagggataagcagcaggtccttgttccgatactttagaaagcgctcctagcgcttcttcatctggtagctcaaaaatcttctcctctgacttcactgattgccgcagctcttcatttggggcgacagtgccttgaagaagtgcgtcatgatttccatgtactgctaggaatggatatttaagccctgaggagtgaaagggttgagagacagcatttaatagctctgggattgtgggaaagccatatagatccctagggaaatcatctctttcgccttttggtgttccatgtggattccagaaaaacggagagtaaaaatctcctcccaccccctgccatttatcttttgctccactatctgctcgaagttttccaccaactaataaagtagtgagccaatctaattcattggattgcgcattatcggttaagtctcctgtaattactacagcgctaatggctgtttttgttataggtgctaaatcaattcgatttattgcctgcactgcgctctctagtacttgtgtggtcaatatttcgtgagcccgataagttccaattaaggttccaatgacacttgatgctgggtgatgtgggtctgcataacgatctaggtattcaactctggcaggtgattgagcatcgcagatatgtgtatcagtaatgtgaatcaaatttattagggacttcttcacggcgcctaatggttgtccaagatgattatctac

SEQ ID NO: 1471 - DNA, 4000 bp, Escherichia coli
  misc_feature (1)..(8): n is a, c, g, or t
  misc_feature (11)..(11): n is a, c, g, or t
  misc_feature (13)..(13): n is a, c, g, or t
  misc_feature (15)..(18): n is a, c, g, or t
  misc_feature (21)..(25): n is a, c, g, or t
  misc_feature (27)..(32): n is a, c, g, or t
  misc_feature (35)..(43): n is a, c, g, or t
  misc_feature (45)..(46): n is a, c, g, or t
  misc_feature (48)..(48): n is a, c, g, or t
  misc_feature (52)..(53): n is a, c, g, or t
  misc_feature (55)..(58): n is a, c, g, or t
  misc_feature (60)..(62): n is a, c, g, or t
  misc_feature (65)..(66): n is a, c, g, or t
  misc_feature (68)..(74): n is a, c, g, or t
  misc_feature (76)..(76): n is a, c, g, or t
  misc_feature (78)..(82): n is a, c, g, or t
  misc_feature (84)..(84): n is a, c, g, or t
  misc_feature (87)..(91): n is a, c, g, or t
  misc_feature (93)..(95): n is a, c, g, or t
  misc_feature (97)..(100): n is a, c, g, or t
  misc_feature (102)..(102): n is a, c, g, or t
  misc_feature (105)..(109): n is a, c, g, or t
  misc_feature (111)..(111): n is a, c, g, or t
  misc_feature (113)..(118): n is a, c, g, or t
  misc_feature (120)..(123): n is a, c, g, or t
  misc_feature (125)..(125): n is a, c, g, or t
  misc_feature (127)..(129): n is a, c, g, or t
  misc_feature (131)..(137): n is a, c, g, or t
  misc_feature (140)..(140): n is a, c, g, or t
  misc_feature (142)..(143): n is a, c, g, or t
  misc_feature (145)..(146): n is a, c, g, or t
  misc_feature (148)..(149): n is a, c, g, or t
  misc_feature (151)..(156): n is a, c, g, or t
  misc_feature (158)..(158): n is a, c, g, or t
  misc_feature (160)..(160): n is a, c, g, or t
  misc_feature (162)..(162): n is a, c, g, or t
  misc_feature (164)..(167): n is a, c, g, or t
  misc_feature (169)..(170): n is a, c, g, or t
  misc_feature (172)..(174): n is a, c, g, or t
  misc_feature (177)..(186): n is a, c, g, or t
  misc_feature (189)..(189): n is a, c, g, or t
  misc_feature (192)..(193): n is a, c, g, or t
  misc_feature (195)..(196): n is a, c, g, or t
  misc_feature (199)..(200): n is a, c, g, or t
  misc_feature (203)..(203): n is a, c, g, or t
  misc_feature (206)..(211): n is a, c, g, or t
  misc_feature (213)..(215): n is a, c, g, or t
  misc_feature (218)..(218): n is a, c, g, or t
  misc_feature (222)..(223): n is a, c, g, or t
  misc_feature (225)..(228): n is a, c, g, or t
  misc_feature (231)..(234): n is a, c, g, or t
  misc_feature (236)..(236): n is a, c, g, or t
  misc_feature (238)..(238): n is a, c, g, or t
  misc_feature (241)..(241): n is a, c, g, or t
  misc_feature (246)..(246): n is a, c, g, or t
  misc_feature (249)..(265): n is a, c, g, or t
  misc_feature (267)..(272): n is a, c, g, or t
  misc_feature (274)..(275): n is a, c, g, or t
  misc_feature (277)..(279): n is a, c, g, or t
  misc_feature (283)..(283): n is a, c, g, or t
  misc_feature (288)..(289): n is a, c, g, or t
  misc_feature (291)..(292): n is a, c, g, or t
  misc_feature (294)..(294): n is a, c, g, or t
  misc_feature (297)..(301): n is a, c, g, or t
  misc_feature (303)..(305): n is a, c, g, or t
  misc_feature (308)..(313): n is a, c, g, or t
  misc_feature (315)..(315): n is a, c, g, or t
  misc_feature (317)..(319): n is a, c, g, or t
  misc_feature (321)..(321): n is a, c, g, or t
  misc_feature (324)..(325): n is a, c, g, or t
  misc_feature (327)..(330): n is a, c, g, or t
  misc_feature (332)..(334): n is a, c, g, or t
  misc_feature (339)..(339): n is a, c, g, or t
  misc_feature (341)..(343): n is a, c, g, or t
  misc_feature (346)..(357): n is a, c, g, or t
  misc_feature (360)..(361): n is a, c, g, or t
  misc_feature (363)..(365): n is a, c, g, or t
  misc_feature (367)..(368): n is a, c, g, or t
  misc_feature (370)..(370): n is a, c, g, or t
  misc_feature (372)..(378): n is a, c, g, or t
  misc_feature (380)..(381): n is a, c, g, or t
  misc_feature (383)..(385): n is a, c, g, or t
  misc_feature (390)..(390): n is a, c, g, or t
  misc_feature (392)..(392): n is a, c, g, or t
  misc_feature (394)..(395): n is a, c, g, or t
  misc_feature (397)..(399): n is a, c, g, or t
  misc_feature (401)..(403): n is a, c, g, or t
  misc_feature (405)..(405): n is a, c, g, or t
  misc_feature (408)..(410): n is a, c, g, or t
  misc_feature (414)..(414): n is a, c, g, or t
  misc_feature (416)..(420): n is a, c, g, or t
  misc_feature (422)..(424): n is a, c, g, or t
  misc_feature (426)..(426): n is a, c, g, or t
  misc_feature (428)..(430): n is a, c, g, or t
  misc_feature (436)..(441): n is a, c, g, or t
  misc_feature (443)..(443): n is a, c, g, or t
  misc_feature (445)..(446): n is a, c, g, or t
  misc_feature (450)..(452): n is a, c, g, or t
  misc_feature (454)..(456): n is a, c, g, or t
  misc_feature (460)..(464): n is a, c, g, or t
  misc_feature (466)..(466): n is a, c, g, or t
  misc_feature (468)..(470): n is a, c, g, or t
  misc_feature (472)..(476): n is a, c, g, or t
  misc_feature (479)..(480): n is a, c, g, or t
  misc_feature (482)..(482): n is a, c, g, or t
  misc_feature (484)..(486): n is a, c, g, or t
  misc_feature (488)..(488): n is a, c, g, or t
  misc_feature (490)..(491): n is a, c, g, or t
  misc_feature (493)..(493): n is a, c, g, or t
  misc_feature (495)..(496): n is a, c, g, or t
  misc_feature (499)..(499): n is a, c, g, or t
  misc_feature (501)..(501): n is a, c, g, or t
  misc_feature (503)..(508): n is a, c, g, or t
  misc_feature (513)..(515): n is a, c, g, or t
  misc_feature (518)..(519): n is a, c, g, or t
  misc_feature (521)..(521): n is a, c, g, or t
  misc_feature (524)..(533): n is a, c, g, or t
  misc_feature (535)..(537): n is a, c, g, or t
  misc_feature (542)..(542): n is a, c, g, or t
  misc_feature (544)..(544): n is a, c, g, or t
  misc_feature (547)..(550): n is a, c, g, or t
  misc_feature (553)..(558): n is a, c, g, or t
  misc_feature (560)..(567): n is a, c, g, or t
  misc_feature (569)..(570): n is a, c, g, or t
  misc_feature (574)..(575): n is a, c, g, or t
  misc_feature (577)..(580): n is a, c, g, or t
  misc_feature (582)..(584): n is a, c, g, or t
  misc_feature (588)..(591): n is a, c, g, or t
  misc_feature (593)..(596): n is a, c, g, or t
  misc_feature (598)..(599): n is a, c, g, or t
  misc_feature (601)..(608): n is a, c, g, or t
  misc_feature (610)..(611): n is a, c, g, or t
  misc_feature (613)..(614): n is a, c, g, or t
  misc_feature (616)..(622): n is a, c, g, or t
  misc_feature (624)..(627): n is a, c, g, or t
  misc_feature (629)..(632): n is a, c, g, or t
  misc_feature (634)..(634): n is a, c, g, or t
  misc_feature (636)..(636): n is a, c, g, or t
  misc_feature (638)..(639): n is a, c, g, or t
  misc_feature (641)..(642): n is a, c, g, or t
  misc_feature (644)..(647): n is a, c, g, or t
  misc_feature (650)..(651): n is a, c, g, or t
  misc_feature (654)..(656): n is a, c, g, or t
  misc_feature (659)..(663): n is a, c, g, or t
  misc_feature (665)..(669): n is a, c, g, or t
  misc_feature (671)..(672): n is a, c, g, or t
  misc_feature (674)..(678): n is a, c, g, or t
  misc_feature (682)..(682): n is a, c, g, or t
  misc_feature (685)..(686): n is a, c, g, or t
  misc_feature (688)..(690): n is a, c, g, or t
  misc_feature (692)..(692): n is a, c, g, or t
  misc_feature (694)..(694): n is a, c, g, or t
  misc_feature (697)..(697): n is a, c, g, or t
  misc_feature (701)..(705): n is a, c, g, or t
  misc_feature (707)..(708): n is a, c, g, or t
  misc_feature (710)..(716): n is a, c, g, or t
  misc_feature (720)..(721): n is a, c, g, or t
  misc_feature (723)..(727): n is a, c, g, or t
  misc_feature (730)..(731): n is a, c, g, or t
  misc_feature (733)..(733): n is a, c, g, or t
  misc_feature (736)..(736): n is a, c, g, or t
  misc_feature (741)..(741): n is a, c, g, or t
  misc_feature (745)..(749): n is a, c, g, or t
  misc_feature (751)..(752): n is a, c, g, or t
  misc_feature (754)..(755): n is a, c, g, or t
  misc_feature (758)..(759): n is a, c, g, or t
  misc_feature (761)..(764): n is a, c, g, or t
  misc_feature (766)..(768): n is a, c, g, or t
  misc_feature (770)..(772): n is a, c, g, or t
  misc_feature (774)..(780): n is a, c, g, or t
  misc_feature (782)..(783): n is a, c, g, or t
  misc_feature (788)..(790): n is a, c, g, or t
  misc_feature (792)..(797): n is a, c, g, or t
  misc_feature (799)..(813): n is a, c, g, or t
  misc_feature (817)..(819): n is a, c, g, or t
  misc_feature (822)..(822): n is a, c, g, or t
  misc_feature (824)..(824): n is a, c, g, or t
  misc_feature (826)..(827): n is a, c, g, or t
  misc_feature (830)..(830): n is a, c, g, or t
  misc_feature (832)..(833): n is a, c, g, or t
  misc_feature (835)..(835): n is a, c, g, or t
  misc_feature (838)..(846): n is a, c, g, or t
  misc_feature (848)..(849): n is a, c, g, or t
  misc_feature (851)..(853): n is a, c, g, or t
  misc_feature (856)..(856): n is a, c, g, or t
  misc_feature (858)..(862): n is a, c, g, or t
  misc_feature (865)..(865): n is a, c, g, or t
  misc_feature (868)..(868): n is a, c, g, or t
  misc_feature (870)..(870): n is a, c, g, or t
  misc_feature (874)..(877): n is a, c, g, or t
  misc_feature (880)..(882): n is a, c, g, or t
  misc_feature (884)..(884): n is a, c, g, or t
  misc_feature (892)..(892): n is a, c, g, or t
  misc_feature (894)..(894): n is a, c, g, or t
  misc_feature (896)..(897): n is a, c, g, or t
  misc_feature (900)..(901): n is a, c, g, or t
  misc_feature (904)..(907): n is a, c, g, or t
  misc_feature (910)..(910): n is a, c, g, or t
  misc_feature (912)..(913): n is a, c, g, or t
  misc_feature (918)..(919): n is a, c, g, or t
  misc_feature (921)..(923): n is a, c, g, or t
  misc_feature (926)..(929): n is a, c, g, or t
  misc_feature (931)..(937): n is a, c, g, or t
  misc_feature (940)..(949): n is a, c, g, or t
  misc_feature (952)..(953): n is a, c, g, or t
  misc_feature (955)..(955): n is a, c, g, or t
  misc_feature (959)..(961): n is a, c, g, or t
  misc_feature (963)..(964): n is a, c, g, or t
  misc_feature (968)..(968): n is a, c, g, or t
  misc_feature (972)..(974): n is a, c, g, or t
  misc_feature (978)..(978): n is a, c, g, or t
  misc_feature (980)..(980): n is a, c, g, or t
  misc_feature (983)..(983): n is a, c, g, or t
  misc_feature (985)..(985): n is a, c, g, or t
  misc_feature (992)..(993): n is a, c, g, or t
  misc_feature (995)..(995): n is a, c, g, or t
  misc_feature (997)..(999): n is a, c, g, or t
  misc_feature (1001)..(1001): n is a, c, g, or t
  misc_feature (1003)..(1004): n is a, c, g, or t
  misc_feature (1006)..(1007): n is a, c, g, or t
  misc_feature (1012)..(1013): n is a, c, g, or t
  misc_feature (1015)..(1016): n is a, c, g, or t
  misc_feature (1019)..(1022): n is a, c, g, or t
  misc_feature (1024)..(1024): n is a, c, g, or t
  misc_feature (1027)..(1027): n is a, c, g, or t
  misc_feature (1032)..(1032): n is a, c, g, or t
  misc_feature (1034)..(1036): n is a, c, g, or t
  misc_feature (1039)..(1040): n is a, c, g, or t
  misc_feature (1042)..(1042): n is a, c, g, or t
  misc_feature (1046)..(1047): n is a, c, g, or t
  misc_feature (1049)..(1049): n is a, c, g, or t
  misc_feature (1051)..(1051): n is a, c, g, or t
  misc_feature (1055)..(1058): n is a, c, g, or t
  misc_feature (1061)..(1061): n is a, c, g, or t
  misc_feature (1063)..(1065): n is a, c, g, or t
  misc_feature (1067)..(1067): n is a, c, g, or t
  misc_feature (1070)..(1074): n is a, c, g, or t
  misc_feature (1077)..(1077): n is a, c, g, or t
  misc_feature (1082)..(1083): n is a, c, g, or t
  misc_feature (1085)..(1085): n is a, c, g, or t
  misc_feature (1091)..(1092): n is a, c, g, or t
  misc_feature (1096)..(1097): n is a, c, g, or t
  misc_feature (1101)..(1103): n is a, c, g, or t
  misc_feature (1110)..(1110): n is a, c, g, or t
  misc_feature (1114)..(1114): n is a, c, g, or t
  misc_feature (1117)..(1119): n is a, c, g, or t
  misc_feature (1129)..(1129): n is a, c, g, or t
  misc_feature (1135)..(1135): n is a, c, g, or t
  misc_feature (1157)..(1157): n is a, c, g, or t
  misc_feature (1166)..(1166): n is a, c, g, or t
  misc_feature (1180)..(1180): n is a, c, g, or t
  misc_feature (1189)..(1189): n is a, c, g, or t
  misc_feature (1195)..(1198): n is a, c, g, or t
  misc_feature (1204)..(1206): n is a, c, g, or t
  misc_feature (1213)..(1213): n is a, c, g, or t
  misc_feature (1219)..(1219): n is a, c, g, or t
  misc_feature (1221)..(1221): n is a, c, g, or t
  misc_feature (1240)..(1240): n is a, c, g, or t
  misc_feature (1243)..(1243): n is a, c, g, or t
  misc_feature (1249)..(1249): n is a, c, g, or t
  misc_feature (1255)..(1255): n is a, c, g, or t
  misc_feature (1260)..(1260): n is a, c, g, or t
  misc_feature (1321)..(1321): n is a, c, g, or t
  misc_feature (1348)..(1348): n is a, c, g, or t
  misc_feature (1375)..(1375): n is a, c, g, or t
  misc_feature (1411)..(1411): n is a, c, g, or t
  misc_feature (1564)..(1564): n is a, c, g, or t
  misc_feature (1567)..(1568): n is a, c, g, or t
  misc_feature (1570)..(1570): n is a, c, g, or t
  misc_feature (1585)..(1586): n is a, c, g, or t
  misc_feature (1594)..(1594): n is a, c, g, or t
  misc_feature (1645)..(1645): n is a, c, g, or t
  misc_feature (1666)..(1666): n is a, c, g, or t
  misc_feature (1729)..(1729): n is a, c, g, or t
  misc_feature (1735)..(1735): n is a, c, g, or t
  misc_feature (1738)..(1738): n is a, c, g, or t
  misc_feature (1885)..(1885): n is a, c, g, or t
  misc_feature (1985)..(1985): n is a, c, g, or t
  misc_feature (1991)..(1991): n is a, c, g, or t
  misc_feature (2001)..(2001): n is a, c, g, or t
  misc_feature (2464)..(2464): n is a, c, g, or t
  misc_feature (3004)..(3004): n is a, c, g, or t
  misc_feature (3016)..(3016): n is a, c, g, or t
  misc_feature (3019)..(3019): n is a, c, g, or t
  misc_feature (3038)..(3041): n is a, c, g, or t
  misc_feature (3045)..(3045): n is a, c, g, or t
  misc_feature (3048)..(3049): n is a, c, g, or t
  misc_feature (3051)..(3051): n is a, c, g, or t
  misc_feature (3054)..(3054): n is a, c, g, or t
  misc_feature (3059)..(3062): n is a, c, g, or t
  misc_feature (3065)..(3065): n is a, c, g, or t
  misc_feature (3068)..(3076): n is a, c, g, or t
  misc_feature (3078)..(3079): n is a, c, g, or t
  misc_feature (3082)..(3082): n is a, c, g, or t
  misc_feature (3086)..(3086): n is a, c, g, or t
  misc_feature (3088)..(3088): n is a, c, g, or t
  misc_feature (3090)..(3090): n is a, c, g, or t
  misc_feature (3093)..(3095): n is a, c, g, or t
  misc_feature (3099)..(3099): n is a, c, g, or t
  misc_feature (3102)..(3102): n is a, c, g, or t
  misc_feature (3104)..(3109): n is a, c, g, or t
  misc_feature (3111)..(3114): n is a, c, g, or t
  misc_feature (3116)..(3119): n is a, c, g, or t
  misc_feature (3121)..(3121): n is a, c, g, or t
  misc_feature (3123)..(3123): n is a, c, g, or t
  misc_feature (3125)..(3126): n is a, c, g, or t
  misc_feature (3130)..(3130): n is a, c, g, or t
  misc_feature (3133)..(3136): n is a, c, g, or t
  misc_feature (3138)..(3139): n is a, c, g, or t
  misc_feature (3141)..(3145): n is a, c, g, or t
  misc_feature (3147)..(3147): n is a, c, g, or t
  misc_feature (3150)..(3152): n is a, c, g, or t
  misc_feature (3154)..(3160): n is a, c, g, or t
  misc_feature (3162)..(3174): n is a, c, g, or t
  misc_feature (3177)..(3178): n is a, c, g, or t
  misc_feature (3180)..(3180): n is a, c, g, or t
  misc_feature (3184)..(3190): n is a, c, g, or t
  misc_feature (3193)..(3194): n is a, c, g, or t
  misc_feature (3197)..(3204): n is a, c, g, or t
  misc_feature (3207)..(3210): n is a, c, g, or t
  misc_feature (3212)..(3216): n is a, c, g, or t
  misc_feature (3218)..(3218): n is a, c, g, or t
  misc_feature (3222)..(3222): n is a, c, g, or t
  misc_feature (3224)..(3226): n is a, c, g, or t
  misc_feature (3228)..(3229): n is a, c, g, or t
  misc_feature (3231)..(3240): n is a, c, g, or t
  misc_feature (3242)..(3252): n is a, c, g, or t
  misc_feature (3258)..(3261): n is a, c, g, or t
  misc_feature (3263)..(3265): n is a, c, g, or t
  misc_feature (3271)..(3272): n is a, c, g, or t
  misc_feature (3274)..(3274): n is a, c, g, or t
  misc_feature (3277)..(3277): n is a, c, g, or t
  misc_feature (3279)..(3282): n is a, c, g, or t
  misc_feature (3284)..(3284): n is a, c, g, or t
  misc_feature (3286)..(3292): n is a, c, g, or t
  misc_feature (3294)..(3295): n is a, c, g, or t
  misc_feature (3298)..(3298): n is a, c, g, or t
  misc_feature (3300)..(3303): n is a, c, g, or t
  misc_feature (3305)..(3305): n is a, c, g, or t
  misc_feature (3308)..(3308): n is a, c, g, or t
  misc_feature (3311)..(3314): n is a, c, g, or t
  misc_feature (3316)..(3316): n is a, c, g, or t
  misc_feature (3321)..(3321): n is a, c, g, or t
  misc_feature (3324)..(3329): n is a, c, g, or t
  misc_feature (3332)..(3334): n is a, c, g, or t
  misc_feature (3336)..(3337): n is a, c, g, or t
  misc_feature (3341)..(3341): n is a, c, g, or t
  misc_feature (3344)..(3344): n is a, c, g, or t
  misc_feature (3346)..(3346): n is a, c, g, or t
  misc_feature (3348)..(3349): n is a, c, g, or t
  misc_feature (3351)..(3351): n is a, c, g, or t
  misc_feature (3353)..(3355): n is a, c, g, or t
  misc_feature (3359)..(3361): n is a, c, g, or t
  misc_feature (3363)..(3363): n is a, c, g, or t
  misc_feature (3365)..(3368): n is a, c, g, or t
  misc_feature (3370)..(3370): n is a, c, g, or t
  misc_feature (3372)..(3375): n is a, c, g, or t
  misc_feature (3377)..(3379): n is a, c, g, or t
  misc_feature (3381)..(3385): n is a, c, g, or t
  misc_feature (3387)..(3387): n is a, c, g, or t
  misc_feature (3389)..(3392): n is a, c, g, or t
  misc_feature (3394)..(3395): n is a, c, g, or t
  misc_feature (3397)..(3398): n is a, c, g, or t
  misc_feature (3400)..(3401): n is a, c, g, or t
  misc_feature (3403)..(3404): n is a, c, g, or t
  misc_feature (3406)..(3408): n is a, c, g, or t
  misc_feature (3410)..(3415): n is a, c, g, or t
  misc_feature (3417)..(3419): n is a, c, g, or t
  misc_feature (3421)..(3436): n is a, c, g, or t
  misc_feature (3439)..(3440): n is a, c, g, or t
  misc_feature (3442)..(3443): n is a, c, g, or t
  misc_feature (3445)..(3445): n is a, c, g, or t
  misc_feature (3447)..(3448): n is a, c, g, or t
  misc_feature (3450)..(3453): n is a, c, g, or t
  misc_feature (3456)..(3459): n is a, c, g, or t
  misc_feature (3461)..(3464): n is a, c, g, or t
  misc_feature (3466)..(3468): n is a, c, g, or t
  misc_feature (3473)..(3476): n is a, c, g, or t
  misc_feature (3478)..(3481): n is a, c, g, or t
  misc_feature (3483)..(3490): n is a, c, g, or t
  misc_feature (3493)..(3493): n is a, c, g, or t
  misc_feature (3495)..(3495): n is a, c, g, or t
  misc_feature (3497)..(3502): n is a, c, g, or t
  misc_feature (3504)..(3507): n is a, c, g, or t
  misc_feature (3509)..(3509): n is a, c, g, or t
  misc_feature (3511)..(3512): n is a, c, g, or t
  misc_feature (3514)..(3516): n is a, c, g, or t
  misc_feature (3518)..(3520): n is a, c, g, or t
  misc_feature (3522)..(3523): n is a, c, g, or t
  misc_feature (3525)..(3525): n is a, c, g, or t
  misc_feature (3527)..(3527): n is a, c, g, or t
  misc_feature (3531)..(3531): n is a, c, g, or t
  misc_feature (3534)..(3534): n is a, c, g, or t
  misc_feature (3536)..(3536): n is a, c, g, or t
  misc_feature (3538)..(3538): n is a, c, g, or t
  misc_feature (3540)..(3542): n is a, c, g, or t
  misc_feature (3545)..(3548): n is a, c, g, or t
  misc_feature (3550)..(3552): n is a, c, g, or t
  misc_feature (3558)..(3559): n is a, c, g, or t
  misc_feature (3562)..(3566): n is a, c, g, or t
  misc_feature (3569)..(3569): n is a, c, g, or t
  misc_feature (3572)..(3572): n is a, c, g, or t
  misc_feature (3574)..(3576): n is a, c, g, or t
  misc_feature (3581)..(3581): n is a, c, g, or t
  misc_feature (3583)..(3583): n is a, c, g, or t
  misc_feature (3586)..(3586): n is a, c, g, or t
  misc_feature (3588)..(3588): n is a, c, g, or t
  misc_feature (3590)..(3591): n is a, c, g, or t
  misc_feature (3593)..(3596): n is a, c, g, or t
  misc_feature (3599)..(3602): n is a, c, g, or t
  misc_feature (3604)..(3607): n is a, c, g, or t
  misc_feature (3611)..(3611): n is a, c, g, or t
  misc_feature (3613)..(3614): n is a, c, g, or t
  misc_feature (3617)..(3617): n is a, c, g, or t
  misc_feature (3624)..(3625): n is a, c, g, or t
  misc_feature (3627)..(3627): n is a, c, g, or t
  misc_feature (3630)..(3630): n is a, c, g, or t
  misc_feature (3633)..(3634): n is a, c, g, or t
  misc_feature (3637)..(3639): n is a, c, g, or t
  misc_feature (3641)..(3641): n is a, c, g, or t
  misc_feature (3643)..(3646): n is a, c, g, or t
  misc_feature (3648)..(3650): n is a, c, g, or t
  misc_feature (3653)..(3656): n is a, c, g, or t
  misc_feature (3659)..(3670): n is a, c, g, or t
  misc_feature (3672)..(3672): n is a, c, g, or t
  misc_feature (3674)..(3675): n is a, c, g, or t
  misc_feature (3678)..(3679): n is a, c, g, or t
  misc_feature (3681)..(3683): n is a, c, g, or t
  misc_feature (3685)..(3686): n is a, c, g, or t
  misc_feature (3688)..(3688): n is a, c, g, or t
  misc_feature (3690)..(3692): n is a, c, g, or t
  misc_feature (3694)..(3694): n is a, c, g, or t
  misc_feature (3696)..(3696): n is a, c, g, or t
  misc_feature (3699)..(3701): n is a, c, g, or t
  misc_feature (3703)..(3703): n is a, c, g, or t
  misc_feature (3705)..(3707): n is a, c, g, or t
  misc_feature (3709)..(3711): n is a, c, g, or t
  misc_feature (3714)..(3717): n is a, c, g, or t
  misc_feature (3719)..(3720): n is a, c, g, or t
  misc_feature (3723)..(3724): n is a, c, g, or t
  misc_feature (3726)..(3726): n is a, c, g, or t
  misc_feature (3728)..(3728): n is a, c, g, or t
  misc_feature (3730)..(3732): n is a, c, g, or t
  misc_feature (3734)..(3741): n is a, c, g, or t
  misc_feature (3743)..(3744): n is a, c, g, or t
  misc_feature (3746)..(3746): n is a, c, g, or t
  misc_feature (3749)..(3753): n is a, c, g, or t
  misc_feature (3755)..(3755): n is a, c, g, or t
  misc_feature (3757)..(3758): n is a, c, g, or t
  misc_feature (3760)..(3760): n is a, c, g, or t
  misc_feature (3762)..(3763): n is a, c, g, or t
  misc_feature (3766)..(3779): n is a, c, g, or t
  misc_feature (3781)..(3793): n is a, c, g, or t
  misc_feature (3795)..(3800): n is a, c, g, or t
  misc_feature (3802)..(3804): n is a, c, g, or t
  misc_feature (3806)..(3809): n is a, c, g, or t
  misc_feature (3811)..(3812): n is a, c, g, or t
  misc_feature (3814)..(3818): n is a, c, g, or t
  misc_feature (3820)..(3822): n is a, c, g, or t
  misc_feature (3824)..(3824): n is a, c, g, or t
  misc_feature (3827)..(3842): n is a, c, g, or t
  misc_feature (3844)..(3853): n is a, c, g, or t
  misc_feature (3855)..(3864): n is a, c, g, or t
  misc_feature (3866)..(3869): n is a, c, g, or t
  misc_feature (3873)..(3873): n is a, c, g, or t
  misc_feature (3875)..(3892): n is a, c, g, or t
  misc_feature (3894)..(3896): n is a, c, g, or t
  misc_feature (3898)..(3900): n is a, c, g, or t
  misc_feature (3902)..(3905): n is a, c, g, or t
  misc_feature (3907)..(3908): n is a, c, g, or t
  misc_feature (3910)..(3912): n is a, c, g, or t
  misc_feature (3915)..(3920): n is a, c, g, or t
  misc_feature (3922)..(3922): n is a, c, g, or t
  misc_feature (3924)..(3925): n is a, c, g, or t
  misc_feature (3927)..(3928): n is a, c, g, or t
  misc_feature (3930)..(3940): n is a, c, g, or t
  misc_feature (3942)..(3945): n is a, c, g, or t
  misc_feature (3947)..(3954): n is a, c, g, or t
  misc_feature (3957)..(3968): n is a, c, g, or t
  misc_feature (3970)..(3976): n is a, c, g, or t
  misc_feature (3978)..(3979): n is a, c, g, or t
  misc_feature (3981)..(3992): n is a, c, g, or t
  misc_feature (3994)..(4000): n is a, c, g, or t
nnnnnnnnccntngnnnnggnnnnncnnnnnnccnnnnnnnnnanngncccnntnnnnannnaanncnnnnnnncngnnnnncnggnnnnntnnncnnnngncannnnncngnnnnnncnnnncntnnngnnnnnnnttncnnannanncnnnnnngncngncnnnncnncnnnaannnnnnnnnnggncgnnannaannaanccnnnnnncnnnttncggnngnnnncannnngnangcnaaggncgnnnnnnnnnnnnnnnnncnnnnnntnntnnncccngaaannanncnggnnnnncnnncgnnnnnntncnnngnggnngnnnncnnnaaaantnnnttnnnnnnnnnnnnttnngnnnannancnnnnnnngnncnnnaaaangncnntnnngnnncnggnnnaaangnnnnngnnntngnnnaaaaannnnnncntnnaaannntnnntttnnnnncngnnncnnnnncgnngnannngnannangnnggncntnnnnnnggaannnaanncnttnnnnnnnnnnannngcccntnggnnnnccnnnnnncnnnnnnnntnnaaanngnnnngnnnaaannnntnnnngnnannnnnnnnanncnngnnnnnnncnnnncnnnnangnanntnncnnnnccnnccnnnacnnnnncnnnnncnntnnnnntttnaanngnnnancnccnggtnnnnncnntnnnnnnnaaanngnnnnnccnnanggntaaantttnnnnntnnannaanncnnnnannncnnngnnnnnnncnnccccnnncnnnnnngnnnnnnnnnnnnnnnaaannnttngngnnacngnngnaannnnnnnnncnncnnngangnnnnngtnggntnaaannnnttnnntnaaactttntncnnaannttnnnnggncnncgggnnannnccnnnngnnnnnnnccnnnnnnnnnnaanncntttnnntnncccnaaannnaggncnggnanaaaccanngntnnncntnncnntaaannannccnnnnanttnttcgncnnnggnngncccnntnangggnnnnccntnnnanttnnnnnggnaaatnnanaaaagnnaaanntttnnnaaagagngaanaannntatgaactanaccganatcaacgccaaaatcgtggacngctgggtgnaaaacggctgggantggggcaancccatnnnncacgannngtttganaaagcnanaaacggcgaatggggcgtntanctcacnccgacnaaaancgtgccgcacgaatggttcggcgagatgcgcggcaagaaaattctgggtttagccagcggnggcgggcagcagattcccgttttcacngcgctcggcgcagactgcaccgtgctngattattccacggagcagctaaagcgcgaagaagangtcggcaagcgggagggctatactccaaagtgcgtccgcgccgatatgacaaagcccctgccgtttgaagacgggacctttgacctcatttttaacccggtttcaaattgttatgtagaagaactggagccgatctggaaagagtgcgcccgngtnntnaagccgggcggcgtnntgcttgtngggtttgataacggcatcaattacctttttgatgacgacgaaacgaagatnacgaacacgctgccgtataancccttaaaagacgaagcactctataaaaagtcgctggagctcgattacggcgtgcagttttcncacacnctngacgaagaaatcggcggccagctgcgcgcgggatttatgctgacggatatttatgaagacacaaacggcggaggctttctgcacgagcacggcgtgccctgctttgtcgcaacgcgctgtgtgaaaaagtaatagctgaataaaaancgtaaaaagcacggctttcccgaaaaacggcggaaaagctgtgctttttaaattttgccgcaaaaatattttttgaaatcgcacattcaaaaataagagnataaangagaaaaacnaagaataaacgagattagaattcgcagcttaaaaaaccgcaaaaaagcgcttgacaagccgtttttcgtgtggtactatcatttagcgcccatgggaaagctatgggcattttcagagatttcgtatcgcagcgcacaaagcgtttgccggtaccgagataatttaaatcaattttggaggtaaacgctatgtccacttatatggccaaggctggtcaggttgaccgcaaatggtatgtaattgacgctgcaggcaagccgctcggccgcgttgcagcacaggccgcagttcttctccgcggcaagcacaagcccacctttaccccgcacgttgactgcggtgaccacgtcatcatcatcaactgcgctgaggctgtcctcaccggcggtaaggctgaaaagaagtattattatcatcacacgggttatatcggccacctcaaggctgtccgttatgacaccntgatgcgcacaaagccggaaaaggcgatggagcttgctgttcacggcatgatcccctcgaacaccatcggcagagctgcagaagcaagacttcgtgtctacgccggcagcgagcacaagcacgaggcgcagaagccgacggcttgggaactttaataggaggtaaacgaatatgtacgataaggcaccttatttctacggcaccggcagaagaaaaagctccgttgcacgtgtaagaatttaccagggcaccggtaaggtcacgatcaacgaccgcgatatcgacgattatttcggccttgataccctcaagacgatcgttcgtcagccgctcgttctcaccggtaccgaagagaagttcgacatcgtttgccgcgttgcaggcggcggtgttaccggtcaggccggtgctatccgccacggtatctccagagctctgctccagtacgattccgagaacctccgcgctacgctgaagaaggccggtttcctcacccgtgacccgagaatgaaggaaagaaagaagtacggtctcaaagcngctcgtcgcgcnccncagttctccaagagataannnncccnacnnancanttcannnntgntcnnnnnnnnngnnacnatgngntnttnnnggcnttntnnnnnntnnnnannnngntntnntttntcnnnntnngnnnnnanttnnncnnnnnnnannnnnnnnnnnnngannanaaannnnnnnacnngcnnnnnnnnacnnnntnnnnntnaaanannngnncnnnnnnnnnngnnnnnnnnnnntttttnnnngnnnttttcnncnttntnnnntncnnnnnnnanngtntnnnntnccnggnnnntnttttnaannnnnnggnnngnnttgncangntnngncnnnaccnnntncnnnntntnnnntnnntnnnnntngnnnntnntnngnntnnannngnnnnnntnnngnnnnnnnnnnnnnnnntgnncnntncnnannnnctnnnngnnnnannnaggcnnnncnnnngnnnnnnnnganantnnnnnnannnntnanncnnncnnnanncngnattntgntncngnnnctnnnnannntgcgcnntgnnnnnctnagngnnnaccgngncancngnngnnnngannnncnnnngctnanngcnatgtgcnncncgntgnngannntntnnnntnnnatnnnnctnnnnnnnnnnnngntnnttnntnnnannangnnnangncgnnntntnnntnnncannnntnncanntncncnnncnnnnnnnncnncngtnnnnncngnngncnnaannnnnnnnnnnnnngnnnnnnnnnnnnntnnnnnnannnannnncnncnnnnnannngnccnnnnnnnnnnnnnnnncnnnnnnnnnngnnnnnnnnnnannnncacnannnnnnnnnnnnnnnnnntnnnannncnnnntnngnnnaannnnnngntnntnnannnnnnnnnnnannnngnnnnnnnnacnnnnnnnnnnnngnnnnnnnannannnnnnnnnnnngnnnnnnn

SEQ ID NO: 1472 - DNA, 4000 bp, Escherichia coli
  misc_feature (15)..(15): n is a, c, g, or t
  misc_feature (106)..(106): n is a, c, g, or t
  misc_feature (338)..(338): n is a, c, g, or t
  misc_feature (1569)..(1569): n is a, c, g, or t
  misc_feature (1705)..(1705): n is a, c, g, or t
  misc_feature (1735)..(1735): n is a, c, g, or t
  misc_feature (1774)..(1774): n is a, c, g, or t
  misc_feature (1987)..(1987): n is a, c, g, or t
  misc_feature (1991)..(1991): n is a, c, g, or t
  misc_feature (2004)..(2004): n is a, c, g, or t
  misc_feature (2008)..(2008): n is a, c, g, or t
  misc_feature (2184)..(2184): n is a, c, g, or t
  misc_feature (2194)..(2194): n is a, c, g, or t
  misc_feature (2197)..(2197): n is a, c, g, or t
  misc_feature (2203)..(2203): n is a, c, g, or t
  misc_feature (2215)..(2215): n is a, c, g, or t
  misc_feature (2218)..(2218): n is a, c, g, or t
  misc_feature (2230)..(2230): n is a, c, g, or t
  misc_feature (2235)..(2235): n is a, c, g, or t
  misc_feature (2260)..(2260): n is a, c, g, or t
  misc_feature (2264)..(2265): n is a, c, g, or t
  misc_feature (2280)..(2281): n is a, c, g, or t
  misc_feature (2299)..(2299): n is a, c, g, or t
  misc_feature (2313)..(2313): n is a, c, g, or t
  misc_feature (2329)..(2329): n is a, c, g, or t
  misc_feature (2332)..(2334): n is a, c, g, or t
  misc_feature (2338)..(2338): n is a, c, g, or t
  misc_feature (2342)..(2342): n is a, c, g, or t
  misc_feature (2344)..(2344): n is a, c, g, or t
  misc_feature (2353)..(2353): n is a, c, g, or t
  misc_feature (2359)..(2359): n is a, c, g, or t
  misc_feature (2364)..(2364): n is a, c, g, or t
  misc_feature (2371)..(2371): n is a, c, g, or t
  misc_feature (2389)..(2389): n is a, c, g, or t
  misc_feature (2407)..(2407): n is a, c, g, or t
  misc_feature (2412)..(2413): n is a, c, g, or t
  misc_feature (2424)..(2425): n is a, c, g, or t
  misc_feature (2739)..(2739): n is a, c, g, or t
  misc_feature (2844)..(2844): n is a, c, g, or t
  misc_feature (2864)..(2865): n is a, c, g, or t
  misc_feature (2871)..(2871): n is a, c, g, or t
  misc_feature (2880)..(2880): n is a, c, g, or t
  misc_feature (2885)..(2885): n is a, c, g, or t
  misc_feature (2889)..(2889): n is a, c, g, or t
  misc_feature (3782)..(3782): n is a, c, g, or t
  misc_feature (3792)..(3792): n is a, c, g, or t
  misc_feature (3806)..(3806): n is a, c, g, or t
  misc_feature (3809)..(3809): n is a, c, g, or t
  misc_feature (3812)..(3812): n is a, c, g, or t
  misc_feature (3815)..(3815): n is a, c, g, or t
  misc_feature (3821)..(3821): n is a, c, g, or t
  misc_feature (3823)..(3823): n is a, c, g, or t
  misc_feature (3830)..(3830): n is a, c, g, or t
  misc_feature (3833)..(3833): n is a, c, g, or t
  misc_feature (3836)..(3838): n is a, c, g, or t
  misc_feature (3845)..(3851): n is a, c, g, or t
  misc_feature (3856)..(3856): n is a, c, g, or t
  misc_feature (3858)..(3859): n is a, c, g, or t
  misc_feature (3861)..(3861): n is a, c, g, or t
  misc_feature (3863)..(3863): n is a, c, g, or t
  misc_feature (3865)..(3866): n is a, c, g, or t
  misc_feature (3874)..(3874): n is a, c, g, or t
  misc_feature (3878)..(3878): n is a, c, g, or t
  misc_feature (3880)..(3880): n is a, c, g, or t
  misc_feature (3882)..(3882): n is a, c, g, or t
  misc_feature (3884)..(3884): n is a, c, g, or t
  misc_feature (3886)..(3887): n is a, c, g, or t
  misc_feature (3889)..(3889): n is a, c, g, or t
  misc_feature (3892)..(3893): n is a, c, g, or t
  misc_feature (3895)..(3895): n is a, c, g, or t
  misc_feature (3897)..(3897): n is a, c, g, or t
  misc_feature (3899)..(3899): n is a, c, g, or t
  misc_feature (3902)..(3907): n is a, c, g, or t
  misc_feature (3913)..(3920): n is a, c, g, or t
  misc_feature (3922)..(3929): n is a, c, g, or t
  misc_feature (3931)..(3932): n is a, c, g, or t
  misc_feature (3934)..(3943): n is a, c, g, or t
  misc_feature (3945)..(3954): n is a, c, g, or t
  misc_feature (3956)..(3958): n is a, c, g, or t
  misc_feature (3960)..(3962): n is a, c, g, or t
  misc_feature (3964)..(3964): n is a, c, g, or t
  misc_feature (3967)..(3974): n is a, c, g, or t
  misc_feature (3976)..(3982): n is a, c, g, or t
  misc_feature (3984)..(3985): n is a, c, g, or t
  misc_feature (3987)..(3988): n is a, c, g, or t
  misc_feature (3990)..(3997): n is a, c, g, or t
  misc_feature (3999)..(4000): n is a, c, g, or t
gttaaataaatatcncctgcatcgcccgtgccgtcagccagacttggaatgttagttgtagcgttccaagttcctttgaattccattacagttgacggaagttgcnctgctggtatttttccgccattatccaaagtcgctactccgctattagcacctttttcgcttgcctgaatataagtttttaagtctgagatttggctttctgttatgcttatccctgtgcttttatcccaagctgtgaatactgggtctgtttcgctttgcaaggctgttgcgattaaactatggtcaaatgaactaagatgtcctgatagggagtttgaagccgaattganagggtcgtaaagtcctgcgtggtcgccccaaccataggcggtattccaattttctatttgagtagcatttgtaaatttattggttgtagcagcatcatctaagtcgtcagggtccaaagttttccattcattatcaaaatctacattagaagctttggccaaaacttgtccagtagttcctcccgtaatagcaccgtttccctttaaagataataactgccagtaagttgtgtcagtcggcaggttgccagttgactcttgaattgcaacataagaagaaccaagataagaaacgctttccccagtgttatatgtaacatcagcagcataaacacctttaggcgttattcctcctgtgaagttaagatgaactgggttgtcaattagttttactatttccatattataatattgttacaccagtaaatattccatctgtataaattagtgtttctgtagccaccgttgctcctgctaacttatagacgatagaagttagaacgccatcggtatagacgagttctttagtatcgtgcttagggatgtttagacctgctattgactgaatagtttcttcggtggctggtgtcattcttacctctctgccattgatgagcctcttgataccaacaacatctggtccacctccaccaccaaatgacttatcattgagtttctgcaagagttttgtaacttctcttaactgactgactgctttctcgtcgcttcgtggtgttagctctttaatctgcttctcaggaagtgggtattcttttggtagatcgattctcttctgctctggtatctcgattgaatcgatcgaagacacaattgacttcaagagagagacgactttcgaaagatcaactggctcattctttagctttctgagatctgacgataagctcgtaattgctctctcaatcttcgatgtatcaagcttcgtctctttagcagatatcttcttcagaatcctcttgacgtctactagaacattcgagagagacgtaacgtctgtcttctcaaacttgagattattcagagcatctacgatctctttattgcttgtaggttctagcgtcttcgctacatcattaaatgcatttatgactctattgacgtttgtctctagatttgttacgatcattccttccatagaaaatgcttaattctgcccagaagccagaaacttctgagcagtataaacaacctattaaacagcaatctggangtccaagaaagttctagcaccgtcagcaaatgtcttgtagccgtataaggcatcaatcaagaagttgacagtcttctgtcttggttctgggcgtggatcaggattgatatcgctttggataaccatatcaacaccnttctttctgccagcatagcagtgaatcatnttcttgctccagatatttgaagcatgagtcaaagtctcngtaacagataagcgaccagagcctgtacagactaagttaacagaagtgccagaagcagaagcaacgactctccagccgattaacttcttcctgtcagcatcagaaacctcagtataagtagtaccagcaccagcagcattgttgatagcagcgatcaagttagctctcgaagcagcagcgttagcaccggctaaaacttcaccagcaacagcngggnttgagcttagagnaganacaaacttgaatacaacgcctccaatcgaaacagtatcagtagcagtaacatcttgagctagagatagagaagcagtgaaagtcaagttgttagaacgataagttctgaaaccaacgatagggccagaatagccgttcttgaaagtagtaccggtcatctcgatattcttacctancaaagtttgnttngcaatngataagacgtanggntcagtgactagnactangtctccgttatcttcaacatcgttngcanntaacttagcacctanntctgagaagacctgagcnaagttagttgtggncagagcgataccgttnccnnnagtnccancnatatcaccntcgtcnaatgnatcgaangcatttagagtctgaccnaggatgtcagcatccatntaccnncgtaatttcanngtgcactctttagcagcaagttcaccaatcttgcgtgggccgttctgtaacttatcccagctatcaagtttgaagtcagcagacttctgtttgtcaattgtcaactgctcgttagaatcaccaacaccgttgatagtacgatcagtgtaccgagtgacgtctctcacatagatgtcagagaagtcagcaatggaacgactaacagttttaccttcagttaactgtgactgtaagcgagtgttgccaactacaaaaccaaccatcgtcttaccaagaatgtcctggtagcgaggtacaaatgcttccttaaatgnagttaaagcagacatagttaattagcttattgaccttgtgaatctaaccactcgtagtacttagtacgagattctggatttgccaatactttcttataagtctcntcgtccatcgtagcgaagtnnacattntctggtgcnttagnactngcaccttgagaaccagcttctggagagtctttcttcgttttcttctctttcgttgcattaggatagaattcttttcgaatgtcttcaagagtctttagatgtaagaagtctttgctaaatgcaatcttctgaaagacatccttctttccagctagttctggatacttagaagcgattgacttttcaaaatctgcttcgaatagagcaatgctctcttcagctagattgttcttagcaaccggcttaatcttctcctcaacttcttgaagaacttcttccttcgtcttcgtttgaatcatctttacgaatttcttggctacatctagctcgataccagcagcttgagcgaattcatcaatgtctttgtttgttaaatcaccagagagttgctccttcagagccttaaagtctctctttaattcaagaaagacgctaagaggaactgtgtcacttgaagactctttcttagccttcttctctccagtcggccgataagatgtgtctggttcatcgccttcttcatcttcgtcgtcctcggtgtctttaggatcaccttctccttcctggtctttctttcccgactgaccagattcgtcgtcttcgtgagaatcgagtccattcataatttcttcgattggctcactgttgctcttttcattgggcataaattagtagatcactaatcgagatagctatcaaggttgctaacctgtaataaccagtttcaagacgtagcggtctgtatttaataattaacttaaaagcgaggtaatagcggagaagtctgaacgtttagcttattagcataagcaatcgctgactccttcgggttctcgacaccatctttctcagaataaactctgagtaaacctttctctgaagaatagacaccntaagcatctntcttcgaagacatngcnctnacnacgaancnagcagcnacngtnnnttcttcnnnnnnnacagntnncngntnntcgtctangtcntngncntnntnttnntngncnttnnnnnnttgtcnnnnnnnnannnnnnnnannannnnnnnnnnannnnnnnnnngnnntnnnancannnnnnnnannnnnnntnntnntnnnnnnnncnn

SEQ ID NO: 1473 - DNA, 4000 bp, Escherichia coli
  misc_feature (597)..(597): n is a, c, g, or t
  misc_feature (697)..(697): n is a, c, g, or t
  misc_feature (899)..(899): n is a, c, g, or t
  misc_feature (941)..(941): n is a, c, g, or t
  misc_feature (1667)..(1667): n is a, c, g, or t
  misc_feature (1961)..(1961): n is a, c, g, or t
  misc_feature (1963)..(1964): n is a, c, g, or t
  misc_feature (1992)..(1992): n is a, c, g, or t
  misc_feature (2018)..(2018): n is a, c, g, or t
  misc_feature (2628)..(2628): n is a, c, g, or t
  misc_feature (3111)..(3111): n is a, c, g, or t
  misc_feature (3123)..(3123): n is a, c, g, or t
  misc_feature (3578)..(3578): n is a, c, g, or t
  misc_feature (3644)..(3644): n is a, c, g, or t
cgcgagaccatctcgcgcgaagcagaaatcacctacacccacaagaagcagtccggtggttccggtcagttcgccgaagtgaagatgatcctgatgccaaccgagccaggcgaaggctattccttcgagagccgcatcgttggtggtgccgttccgaaagaatacatcccgggcgtcgaaaaagggatcaactcggtcatggactccggtcctttggcgggcttcccggtcatcgacttcaaggttgctctgatcgacggtaaattccacgacgttgactccagcgttcttgcgtttgaaatcgcggcccgtatgggtatgcgcgaaggcatgcgtaaagctggtgcgaaactgctcgaaccgatcatgaaagtcgaagttatcactcctgaggattacacaggcgggatcatcggcgatctgacatcgcgtcgcggtcaggttcagggtcaggacacacgcgggaacgcaatcgcgatcgacgcacaggtgccgctggccaacatgttcggctacatcaacacgctgcgttcgatgtcgtcgggtcgtgcgaacttcaccatgcagttctcgcactacgaacctgttccgcagaanatctctgacgagatccaagcgaaattcgcgtaactggcgcgttgcaataactgggacggcggggataaccccgccctacccaaaccgtagggtgggtgtncaacccaccgcccaatttgaaaaccaaggaggccaccatggctaaggcaaagtttgaacgtaataaaccacacgttaacatcggtaccattggtcacgttgaccacggcaaaaccacgttgaccgcggcgatcaccaagtacttcggcgacttccgcgcctatgaccagattgacggcgcgcccgaagaaaaagcacgcggnatcaccatctcgaccgcacacgttgagtatgagaccgaaggncgtcactacgcccacgtcgactgcccaggccacgctgactatgtgaaaaacatgatcaccggtgcggcgcagatggacggcgcgatcctggttgtgaacgctgctgatggccccatgccacagacccgcgagcacatcctgctgggccgtcaggtcggcatccccgccatggttgtctacatgaacaaagtagaccaggtggacgatgaagagctgctggaactggttgaaatggaaatccgcgaactgctgtcttcctacgactacccaggcgacgacatccctgtgatcccaggttccgctctggcggcgatggaaggccgtgacgagaacatcggcgagaactccatccgcaagctgatggaagaagtcgacaactacatcccgacaccagagcgcgctgttgaccagccgttcctgatgcctgtggaagacgtcttctcgatctccggtcgtggtacagttgtgaccggccgtgttgagcgtggcgtgatcaacgttggcgacgaaatcgaaatcgttggcatccgcgacaccaagaaaaccacatgtaccggcgttgaaatgttccgcaaactgctggaccgtggggaagctggcgacaacatcggcgccctgctgcgcggtatcgaccgtgaaggcgttgagcgtggtcaggttctgtgtaagccaggttcggttaagccgcacaccaagttcacagccgaagcctatatcctcaccaangaagagggtggccgtcacacgccgttcttcgcgaactaccgtccacagttctacttccggaccacagacgttacaggtaccgttcagctgccagaaggcactgaaatggttatgcctggcgacaacctgcagttcgacgtggagctgatcgcccccatcgcgatggaagacggtctgcgcttcgcgatccgcgaaggcggtcgtaccgttggcgcgggcgtggtttccaaaatcaccgagtaagccaacccgcgggtcaccccgcgcaccggcaacaagacgaaggccgctccnanncggggcggcctttttcgtggcttggggncgggcggtgctggctgtgacactacngctttgaccgctgattgcggtcgtactgggcggattcgagcgaaacctcggattccccccttgccacatggcgcgactcgacctatagagcgcaagtctcagcggggtgcgtttttacgcgccccgtttgatttacgacaaaacgcaatgaagggccgtgatgaggcgtctcttcctcttcgtttctactcccaatgagggatgatgacatatggcacaaagccaaaatatccgcatccgtttgaaggcgttcgattaccgcgtgctggatgcgtccacacaggaaatcgttaacaccgccaagcgtaccggtgcatctgttcgcggcccaatcccgctgccgaacaagatcgaaaaattcacagttctgcgtggcccacacgttgacaagaaatcccgtgaccagttcgaaatccgcacgcacaagcgtctgctggatatcgttgatccgaccccccagaccgtggacgcgctgatgaagctcgacctggccgctggtgtggacgtcgagatcaagctgcagtcataagcgtaggagggtaataatatgttgcgctcaggcgttattgcaaaaaagatgggcatgacccgtttgttcatggaagacggnaagcagatccctgtgaccgttcttcagctcgacaaactgcaggttgtggctcagcgtacccccgagaaggacggctacacagctgttcagcttggtgcaggtacagccaaggccaagcggacgtcgcaggccatgcgtggtcactttgctgcggcaaaggttgaacccaagcgtaaggttgcggagttccgtgtggaccccgaagccatgttgaatgttggcgaagaaatcatcgccgatcactactttgctggtcagtatgttgacgttgcaggcacctccatcggtaaaggttttgccggtgcgatgaaacgccacaactttggcggtctgcgtgcgacacacggtgtttcgatctctcaccgttcgcatggttcgacaggtcagtgtcaggatccaggcaaggttttcaaaggcaagaaaatggccggtcacatgggtgctgcccgtgttaccacgcagaacctcgaagttgtcaaaacngacagcgcacgnggtctgatcatggtcaaaggcgccgtaccaggctccaaaggtggttgggtgactgttaaggacgcggtgaaaaagccgttcccagcagacgcgatcctgcctgccgctttgaaatccgccgctgacgaagccgcgaaagccgctgaagaagccgccgcagcagccgctgcagaggccgaagcagaagcagcacgcttggcagaagagcaagcagcgaccgaagctgccgcacttgccgaagccgaagcatccattgagtcggacaagaaggaaggtgacgaatgaaacttgatgtcatcaaactcgacggcggcgcagccggttcggtagacttggacgaggccctgttcggtcttgagccacgcgccgacattctgcaccgtgttgtccgctggcagcgtaacaacgcgcagcagggtacgcacaaggtcaagacacggtccgaggtcagctantcgaccaagaagatctatcgtcagaaaggcaccggcggcgcacgccacggcgcacgttctgcaccnatcttccgttcgggtggtatctacaagggtccaacccctcgtagccacggccacgacctgaccaagaagttccgcaaactgggtctgcgccacgctttgtcttccaaggcaaaaaccggcaacctggtcatcatcgacgatgccacatccgatgggaaaacagctgctttggccaaacaggttaagaacctgggctggaaacgcgcgttgatcatcgacggtgcctcggtaaatgagaacttcttgcaagccgcgcgcaacatcgaaggtctggatatcctgccgacgatgggtgcaaacgtctatgacatcctcaagcgtgacactctcgtgatcaccaaagcggggatcgaagc

SEQ ID NO: 1474 - DNA, 4000 bp, Escherichia coli
  misc_feature (2874)..(2874): n is a, c, g, or t
cacggtcacaatctgcgctgatggcaacggccgcaatgccccgttgagcgcccacaacatgctccaccgccgccttatattcggtggccagcccgccatgcgctacgataacgatacctatcaactgctcaaaaccttagagtctgaagtgtccgacggagccgcctgttccagcagctctctatgccgtatgctcacatgccagccgcgcaattgcaattctttctgtaacatttcgaccattgtgacggatcgatgtttgccgcccgtacagccaaagccaatggccagatgcgaccgcccctccgccacatgggctgggatcacaagatcgatcaaatcgagcactttttgcttgaaagccggaaaattactatcctcggccacataggcctgcaccttcgggtttcgtccatcttctgctctgagagtctcatcccaataaggattgcgcaggaagcgacaatcaaacatcatatcaatgccccgcggtgtgccacgtttatacgagaaggactgcacagaaatcgccattggattgcctttgtccggagcaaaataacgggtgacctccgcgcgcaggtcatggggcgacaattgggtggtatcgatcaaaacattggccctgacccgcgccggctgcatcaaatccaaatccagctgtatccccgcaagcgccgcgccatctggcgacagatggtgccgacgtcgcgtttcggagaagcggcggatcagaacatcctccgaacaatccaaatacaggacctcaagagtcaaagacggattggcagacaatgtcgcaattgtatccatcatttgcgcggtcgagaaatcgcgatttcgggtatcaaggcctagagccattggccgacttaagcccggctgttcgaacaacctcggtgcaaggctcaaaggcatattatcaatagattcaaagcccgcatcttccaaagcattgatcgcagtggttcgcccggccccagatgggccggtcacgagcacaacatgcaccggttgcgttttgtcagtcataggctgcaaatccattttgaagcaaaagcaggagcgccgcagcccgcggcacgtccggcccaccgggaataaccgagactctatgccccaatcttgtgacttcttgaacaaaaggcaagcggcgatcactatattgtgacagatctatgcagaattttagggacgcctcggacctatgcgcgcaggatataaggccaagaccgcgcgcctcgatacgccctgcgacggcgtcaggcgcctgaaggagcaacccattttgcgaagcgcgcagccagacgcgatcatctgaaaccaactgcgccccgagcgccagcatttcaatcgcgaggctggatttgccagcgcctgaagggcctaatatcaacaacccgcaaccgccgaccgacacggcggagccatgcaacagcaacgcctcatcgtcattgctgtaatttctccaagcctcaaagctcatgacatcacaccggcaggccaaacaaaaagcgcgccccaaacgcctgccccgcgccagcaggctgaaccggttctgcgcgaatgacccctgaatgggccgcaacgatctgtgccgcctccgcaagacccgcagtaaactcggccacgccctgatcgcccaatgtggccaagtttccggtcccaaatagggtttggctcaaaccctccggcaacggtgggcctgtgtcttcgaccacgaccaaaaccatgccatcttgaatccgcgtccagatccgaatctcgtccccccaggcgcatctttgaatggcattcgacagaaaagccgacaggatcgagcccacactcgtgggcaggccctcaatgatcacaggcacttttggtgtcgattgcgtcaagacaagaccgcgagtaaccgcggaggggcgcagcgccgccacccgggacgtaatcagcgaaatcagttcaaacctttccttcttgcccatcttgcgcctgggcagctctggggcagcggcgggtgcaggcgctgccgcctgggtgagcggagcggtgacccgctccaagcgcagcaaatcattgtcaatcacatccaagagttttgccgatgtcgaagggtccttttgaagacgcagagctttgatcgcggatttcatcgaggccatcgggttgttgatttcgcccgtcacctctgcgacagcggcctctgcctctctaatgcgtatgaaaagcgcgccgatcgtatggtgcagcgcctcggacagacgaccaatactgtctctgcgctgcggcaaattcggcgctgtgatatttttggcggcaaccccgtggcgcagctgattagaaaaccgctccacagagtccgccatgcggttgaccggtccgaacatcacccaagcgctcaccaccgaaagaacaatcgcaagagccacggctgttaaaagcaagcgcaaggccaattccagaaccatcttccgccccgccggatcgccagccttgcctggatatccaagagcaatgccacccaccatctcctgacgatgcaggatcggtaccgccacccagatctcggactcgctgctttgactctggatatgtcgcgggaaccctgggccatttagcaccgccgcaatcatcgacgccaccccgtccgaccgatccagcgccttggtcacctgcggagagatttgccgataaatttccgccaaatgatccaacagtacaggtgacgacggtccaagccagacgggccaggcgcgggggagggccatggcaggttgcgccttaaggctgtttcctggcgtgaggcttcgctgttcccccagcgggccgaaggcgatcacctcagcaccggcaggcaaggtgagcttgtcaaacagcccgtcaagatcnaccccgtcaccttgcacaaaatccaccggcacgcgatgcggcaatcgcccctcaaccacctgcgcaagcaaaagcacctcagaagtcaattgcgcccgtttgacatcgcggtcgtcagggtggagctgcagcagccaaaacgcgcccacggctggcagcaaaagcaccagcagatggaaaaatgtgatccggcgggtcatgggcgataggagaagccccataaaccatcggtttcggcggtagacgatgagatcattcattgcgaccatccaaaccgcacaaaaatatgggcaaagattggggcttaggcttcattatatcggtaaccgataccatagagtgtttcaattgcatcaaagtctccgtctacccgtcgcatcttttttcgcagccgtttgatatggctgtctattgttcggtcatcgacatagacctgatcatcataggccacatccatcagttgatcgcggcttttgacaaagcccggcctgaccgccagcgtcttcagcaaagcaaattccgtcacggtcaacgcaacggccatgccgcgccaagtcaccccgtggcgcatcgggtccatcgacaaaggaccacgcaccatgatggtcgtctcgtccgcctctaaagcttgatcgccccccagcacgtcccatcgtcgcaaaagcgcgcggatacgttcgagcaagacccttggtgaacttggttttttcacataatcatcggcccccatgcgcaggcccaacacttcgtcaatctcatcctcttttgtggtgcaaaacatcacggggatgttcgacacatgcctcagccgctgcaccacatccatgccatcgaggcctggaagcttgacgtccagcaccaaaatatcgggcaaggactttgacaaagactcccaagcggcaagcccatcggaatggcattcaacttcaaacccttccgcttcaagcatcatggagagagacatcatgtgactgcgatcatcatcgacaagaactattcttggcatgggtatcgtcctctgatcggctcaacattttaacactgatatctgccaccactttctttagttttgccgatctgtgcaacatgtaactacgaatcagcctcaaactcgcagcactatgat

SEQ ID NO: 1475 - DNA, 4000 bp, Escherichia coli
  misc_feature (835)..(835): n is a, c, g, or t
  misc_feature (2133)..(2133): n is a, c, g, or t
  misc_feature (2149)..(2149): n is a, c, g, or t
  misc_feature (2153)..(2153): n is a, c, g, or t
  misc_feature (2398)..(2398): n is a, c, g, or t
  misc_feature (2659)..(2659): n is a, c, g, or t
  misc_feature (2734)..(2734): n is a, c, g, or t
  misc_feature (2824)..(2824): n is a, c, g, or t
  misc_feature (2860)..(2860): n is a, c, g, or t
  misc_feature (2881)..(2881): n is a, c, g, or t
  misc_feature (2935)..(2935): n is a, c, g, or t
  misc_feature (2938)..(2938): n is a, c, g, or t
  misc_feature (2953)..(2953): n is a, c, g, or t
  misc_feature (2972)..(2972): n is a, c, g, or t
  misc_feature (3064)..(3064): n is a, c, g, or t
  misc_feature (3091)..(3091): n is a, c, g, or t
  misc_feature (3193)..(3193): n is a, c, g, or t
  misc_feature (3205)..(3208): n is a, c, g, or t
  misc_feature (3211)..(3211): n is a, c, g, or t
  misc_feature (3217)..(3217): n is a, c, g, or t
  misc_feature (3226)..(3226): n is a, c, g, or t
  misc_feature (3241)..(3241): n is a, c, g, or t
  misc_feature (3268)..(3268): n is a, c, g, or t
  misc_feature (3286)..(3286): n is a, c, g, or t
  misc_feature (3292)..(3292): n is a, c, g, or t
  misc_feature (3301)..(3301): n is a, c, g, or t
  misc_feature (3325)..(3325): n is a, c, g, or t
  misc_feature (3388)..(3388): n is a, c, g, or t
  misc_feature (3405)..(3405): n is a, c, g, or t
  misc_feature (3424)..(3424): n is a, c, g, or t
  misc_feature (3436)..(3436): n is a, c, g, or t
  misc_feature (3448)..(3448): n is a, c, g, or t
  misc_feature (3451)..(3451): n is a, c, g, or t
  misc_feature (3538)..(3538): n is a, c, g, or t
  misc_feature (3547)..(3547): n is a, c, g, or t
  misc_feature (3643)..(3643): n is a, c, g, or t
  misc_feature (3658)..(3658): n is a, c, g, or t
  misc_feature (3688)..(3688): n is a, c, g, or t
  misc_feature (3697)..(3697): n is a, c, g, or t
  misc_feature (3712)..(3712): n is a, c, g, or t
  misc_feature (3727)..(3727): n is a, c, g, or t
  misc_feature (3786)..(3786): n is a, c, g, or t
  misc_feature (3799)..(3799): n is a, c, g, or t
  misc_feature (3801)..(3801): n is a, c, g, or t
  misc_feature (3809)..(3809): n is a, c, g, or t
  misc_feature (3869)..(3873): n is a, c, g, or t
  misc_feature (3877)..(3879): n is a, c, g, or t
  misc_feature (3881)..(3884): n is a, c, g, or t
  misc_feature (3886)..(3889): n is a, c, g, or t
  misc_feature (3891)..(3891): n is a, c, g, or t
  misc_feature (3894)..(3901): n is a, c, g, or t
  misc_feature (3903)..(3912): n is a, c, g, or t
  misc_feature (3914)..(3920): n is a, c, g, or t
  misc_feature (3922)..(3922): n is a, c, g, or t
  misc_feature (3925)..(3935): n is a, c, g, or t
  misc_feature (3937)..(3938): n is a, c, g, or t
  misc_feature (3940)..(3940): n is a, c, g, or t
  misc_feature (3942)..(3942): n is a, c, g, or t
  misc_feature (3944)..(3945): n is a, c, g, or t
  misc_feature (3947)..(3949): n is a, c, g, or t
  misc_feature (3951)..(3954): n is a, c, g, or t
  misc_feature (3956)..(3957): n is a, c, g, or t
  misc_feature (3959)..(3977): n is a, c, g, or t
  misc_feature (3980)..(3984): n is a, c, g, or t
  misc_feature (3986)..(3995): n is a, c, g, or t
  misc_feature (3997)..(3997): n is a, c, g, or t
  misc_feature (4000)..(4000): n is a, c, g, or t
ctttatccctataatataagtagatagtcagacgagtagtgacgtcaggctcatctcacaaacaaataacatgtagaaatggccttttcgttttatctaatttccgaagaaacgaagggctattttgctatttctagacaaataagcgccacaagtgctccaaaggatatcatgactgataaaatcccaaggataatcataatgattttataaccactcataagcaaccctcccttcaaaaacgaagagaggcccaacctcgcctaactatcctaagtctattatagaacgaactaatatgcgatacaataagcattatattatataaatatacgaataaactaataaaagccaagttattcctaactatgaatagcttggcttttacattatgtaaataagttaaaaatatatcagaaatctaatatgcgtatttaggagctttcaaaagctaatgaaatatcagtccaataataatcagaatcggagccaggtaagaaacacaaaaataacaatagctaaaacaataatagtgccatacattaatatccctagctttataacaaaatctatactataaaagataaatgtccccactaaagattggtctttcaaagaaaagtaccaagctttcactctataataaatttttggtttatcaaacgctggatatagtttctcatgccacaaaataagccacggtaaaacccaaatattcccaaaggtaaatatcaatactggcaaataatcccttaatggatatgcttctaatacatatcgatcatagagcaatgtatagaaagcccaaatagagattccccaaataagtaaaagnacaagctttattaggagtccaaaaacaagttttatctttaatctatgtttattcactgttttaaccactctagtgccatacataaatattacaactcatcatcataagatagtccaaagatctttttatagatcaaattaggcaatttatatttttcatcaccaaattcagcaggtagaatcatagcttttagattttctgcatatatacgttgttggcgaatttgtccattattgtaataggtaccgccatcattaacggtccctgtaattcctgaacttccttgctttgcacgccaaatagagatatatggggtcttatcaccttgttttaaacttctatcatgatcattaatcaaatggcgcaaagaacgatccatttggtaatcgtattgtactgaaagtccttgaatcatattcgcagcaggcatggaaacataaatgacggcttcaatacgacgatggccattcggcgccgttacagacttaacagatgaaagatccaaatattttccatctcctcttccagagtcagcactcgaatcgatgtgttcaaatcgttctgcgtttaataagtcagcttgtgatacggcttggatttgcattggcaacacgaggcagcttagtaaccatagtgaaagtaaatatatgcgtttcatcatccacctcattgggccacaatatcatcaaaatgctgctgatatacagatacaaacatagcatccgctatatcatatataatagtattattacggttaagtgggaccttacgcgtatcgtttacataatgcattggctttgtcgccccatcaaatgtatatctcgctacatctacccctgtcatagctaaaccagacttactttcactagcctcaatcaaagccagcatagacgggctcggattcatgatacgagacgaatgaataagtgtcgctaacgaatagttagtatcataatccacggtgagctgtctctcattgatgatagattgataagacgtatccatcacaatatagtaagtcccgcgcaaggaatactgtggcggtgcatagcgtagggcctcaatcgaataagtgtttaaatagatatacaagccaccactctctatgggcccattcatcgactgagaataaacaagcttaaactgtggcgacgttttcaattcctgataagtaattgcctctgtaggcatggtgaaagccagcaacacaagagctagcatcaaaatacgttgaatcataaaaacctctctcaaaaaatgaatcttgtctctcaataaaataagcacagtcttattancataagtatactatgnaaanaaggctgtgcctatgattaataattttatattttagttcctaatatatatacattctccaacgttccaagaaactcctctttgtattttccccagtttttatggataattaaactatacttgatatatgcaccgcaagtagtaagggtgatttagtatgaatctctagatagtgtaaatttttggaggtgtcatatggattctctgactattatttgggttattgtttgcgcctatttattactnaatttattagtcggcgtgtattgtcatattcgtgtaaaagatagtactgactatctactcgcaggtcgtcgtattggggttcttatgacggcaggcacattagcagctacggaaatcggtggtgggagcaccgtaggtgtagcagcgaaagcgtatggttcttggggtttatctgcaggttggtacgtcgtatctgcagggattggtgttattctcgttgctttcatcgcaccgctcttacggcgtgccatggcaacaacngtaccggagatcatcggccgtcgtttcggcgcgtctagccatctcattacttccattctgtccatgctggcaacnattacactagcaggcgtacagattacagcaactgcaaccattattagcgttctcaccggactttcaacagagctcgccatcctcatctgnggcgcggtactcgtaatttacaccatgtccggcggnatgtggagcgtaacgatgacngacgttatccatttcttcgttctcgttgggggcttctccctcgcggtgccgttngtnttgcacaatgtgggnggctgggaatcggtagtgncaaaattgccacctgaacagctaggctttacaaaggtgggttggaaaaccatcatcggccttgtcatcatgtacttcatgaccttctccacngggcaagagtcagttcaacggtacttngcagcgaaaaatgaaagaacggccgttctcggttctatcatttgcgggattattatggctctattcgcctttgttcctgccgtattaggccttgtagcattngctgaattcccnnnnatngaagcnaacaatgcngtggcaacggtagcncttaacctcatgcctccagtaatggcnggcttcgttatggccgcngtcgtntcggccacnctttcatcaggcgcaggcgacctnttaggcgccgcaactgtatttaccaaggatattgtggaacatcattttggtaaaagcctcacngatgctcagctcactanatatagccgtctatgcgtnctattcctcggnatcatcgccatnatnatctccctcgtaagcaaagccatcattccgatgctcgtatttgctttcacaatgagatccgctggcccattcgccgcattcctactnggcctcacntggaaaaatgcaacagctggcgctggcatttggtccatcgtgctcggctccatcgcaggcgtgtactgggaattcgttggcaacccatatggcatnatgtccatcatcttnggttccatcgtcagcctcatcgtctttgtngctgtggtnttcattgaaagatcnatgggtaaaccaccngctcctccggctatacctgatgatgtaaaagaaatataatcaatttgttataatctgtnacttaataatagncntaaaagtnctataaaattacaattataaaaccaaaaactcctatcggtgaaagccaataggagttttnnnnntttnnnannnncnnnncnaannnnnnnncnnnnnnnnnntnnnnnnnanttnnnnnnnnnnnannancntnntnnnannnnannannnnnnnnnnnnnnnnnnnacnnnnngnnnnnnnnnnanttn

SEQ ID NO: 1476 - DNA, 4000 bp, Escherichia coli
  misc_feature (1985)..(1985): n is a, c, g, or t
  misc_feature (1988)..(1988): n is a, c, g, or t
  misc_feature (2004)..(2004): n is a, c, g, or t
  misc_feature (2038)..(2038): n is a, c, g, or t
  misc_feature (2989)..(2989): n is a, c, g, or t
  misc_feature (3164)..(3164): n is a, c, g, or t
gatttttcatcatcaagcgggatcgccgcaatatcatcctgcgtgcccgccgctggctcatataaactactgccatccgctgcgatatgcagcgcacggcccgatttaatcaccaaatcaacggcgttttgtatcacggttagggttttcaatcccagaaagtcgaattttaccagaccggcctgttccacccatttcatattgaactgcgtggcgggcatatccgatctggggtcctgatacaggggcaccagcgcatccagcggccgatcaccaatcaccaccccggccgcatgggtcgaagcattgcgcagcaacccctcgacctgttgcccataagtaagcaaacggtccacaacctcttcattttgcgcctcttcgcgcaaacgtggctcatcggccaaggctttttcaatgctgacaggcttcaccccttccaccggaatcattttggaaaggcggtcgacttgaccatagggcatttgcaaaacccgcccgatatctcgaacagcagcttttgataaaagcgccccaaaggtgatgatctggcccactttatcacggccatatttttcttgaacatattggatcacctcatcgcggcgatccatacagaaatcgatatcaaaatcgggcatgctcacgcgttctggatttaaaaaccgttcaaacaaaagcgaatagcgcagcggatccaaatcggtaatggtcagcgaataagccaccaaactgcccgccccagatccacgtccgggaccaaccggtatgttcttttccttcgcccatttgataaaatctgccacgatcagaaaatagcctggaaagcccatgccttcgataatcttcaactcaaattcaagacgcttttcataggcctccaccgtatccgcatgcggaataatcgccaaccgcgcggccaagcccgcttgcgcctggcgccgtaattcctgaacctcatcagttgcaaattttggcaaaatcggatcccgccgataagccatgaaggcgcagcggcgtgcgatttctagcgtattggcaacggcttcgggaagatcagcaaagagcgtcaccatttcttgtggcgttttgaaataatgctgcgcgcttagccgacggcggggtgcttgctgatccacataagccccttcggcgatgcaaatcaatgcgtcatgcgcctcatacatgtcgggtttggggaaatatacatcattggtggccaccaaaggcaaatccatgcgatacgcaaactcgatgaatacggcctctgtcaaccgttcggcctcgggaagccccgtctccccgggatggcgctgcaactcaacatacaggcgatccccataaatttctgaaaattgctgcatcaacgcttctgctgctggcgcttggcccgctctgagcaagcagcccacaggaccatctgcgccccccgttaagcagattagatctttatgaaatcgcttcaaatcctctaagctgacttgcggcagctcgccatcagccttgagatataagcaagagttcaatttgagtaagttttcatatcccgtttccgattgcgccagcagcacgatcggcgccggcggtggtttgcgcccacccaacggcacaggcgcataagccagatcaatctgacagcccagaatgggttgtacaccggccgcactggcagaaaccgaaaattcaagcgcagcgaataaattattgctatctgtcagcgcaacggccggcatcgccatgttttggcataaatccggaagctttttcagccgcatcgccccttcaagaagggaatactcgctgtgcaatctcagatggatgaattgggcattttttgtcatacatttagaatagaccagccgcggcacgaccccaatgccttatttcaaaatttgccctaaaaatcaccaatttggaaataaagagccctctggcacccttccttgaaaataaatcttgccaggatggtaaatcggcggctaactttnctncaatcatactcaaacnttctacgccgcatcgaaggttttgagataggcanatatggtaaggcggcaggtttaacccgatgaacatatcgtttcttctgaatggagagacagtggccctgacgaatatcagtgctacaacaagctttttggattggctgcgtgaaacgcgtggactgacgggaaccaaagaaggctgcaatgaaggcgattgcggggcctgcacagtggtggtgataaccccagaggccgtccaagcgctgaatgcctgtattctcttattgccacaattacagggtaaagccgtgcgcaccgtggaagctttggggcaaggcgacgcattgcacccggtgcaaagcgcgatgatcgacgcgcatggaagccaatgtggcttctgcacgccgggatttatcgcctcaatggccgccgcgcagatcaatcaagatgaagatcatgcaaccacgctggcgggtaatttatgccgctgcacgggctatgcgcccattttacgcgccgccgaagccagcgcccgcttgtcacagcccgactggctgcgcagcgaccgacaaaaattggccgcgttggatctgcagcatgaacaaccctatctgccaggctccagcgatgccttggccagcctattgcttgcagagccggaaacggttttggtcgccggtgcaaccgatctggcattatggatcacgaaagatctgcgcaaccccgccccattggcgtttttacatcaagcaaaagatctggcgcaaattgaagataacggcgatcatattcgtatcggtgctatggtgtctatcgaagccctgcgcctatgggcgcaaacgcatttgccgcattatagcgagatgttgcgacgctatggatcaacgcaagtgcgcatggcggccacattgggtggtaatatcgccaatgggtcgcccattggagacaatgcgcccgccttgatcgcgcttggtgctaaactggtgctgcgccgcggtgcagatcgncgcgagattgatttggaaacattcttcctgagctatggcaaacaggatctgcaaaaggcagaatttgttgaggctattttgctgccaaagctgggcgcatctgtgtattgctataagctttcgaaacgctttgatcaggatatttctgcggtatgcggatgttttaatattgggntcaaagaaggttatgtagaacgcgcgcggatttgctttggcggtatggctggcacgccgcagcgcgcatataaaacagaggctgctctgctgggccaaccatggcaagaaagcagccttgaaacctgtcgcgcagctttgacagctgattttcagcccctcagcgatatgcgcgcctctgccgcctatcgccaagacgctgcctatgggctgttgctccgttgttttcttgaaagccaagattgtgccgtgaacctgatgggagtaaacgcatgagccacggccacccgtttccccatgatgccgcccatctgcacgtgaccggtgccgcgcgctaccttgatgatctgccttgccccgccaattgcctgcacctagcgtttgggctttccagcatcgcctcggggcaaatcaccgatctgggcttagatcaggtgcgcgcccatgaaggcgtgatcgccgtcttaacagccgaagatctgccattttcaaacgatgtctcgccggcagcaggcgatgaaccgcttttaagcgagggccccgttcattatagcggccaaccgatttttttggtgattgcgaccagccacttgagcgcgcgcaaagccgcgcgcttggcaaaggtcacctatgaggaacacgaggcgatcctgtcgatagaccaagccctcgccgccaatagccgctttgaggatggtccccgcatctaccaaaaaggtgatcctagcgcggctatagcgcaggccgcgcataaaatccaaggtgagattgtgataggggggcaagaacatttttaccttgaaggccaagccgcgctggccctgccgcaagatgatc

SEQ ID NO: 1477 - DNA, 4000 bp, Escherichia coli
  misc_feature (2787)..(2787): n is a, c, g, or t
  misc_feature (3219)..(3219): n is a, c, g, or t
  misc_feature (3318)..(3318): n is a, c, g, or t
  misc_feature (3448)..(3448): n is a, c, g, or t
  misc_feature (3556)..(3558): n is a, c, g, or t
  misc_feature (3568)..(3568): n is a, c, g, or t
  misc_feature (3573)..(3573): n is a, c, g, or t
  misc_feature (3579)..(3579): n is a, c, g, or t
  misc_feature (3587)..(3588): n is a, c, g, or t
  misc_feature (3594)..(3594): n is a, c, g, or t
  misc_feature (3597)..(3597): n is a, c, g, or t
  misc_feature (3599)..(3599): n is a, c, g, or t
  misc_feature (3617)..(3617): n is a, c, g, or t
  misc_feature (3621)..(3621): n is a, c, g, or t
  misc_feature (3627)..(3627): n is a, c, g, or t
  misc_feature (3629)..(3629): n is a, c, g, or t
  misc_feature (3686)..(3686): n is a, c, g, or t
  misc_feature (3693)..(3693): n is a, c, g, or t
  misc_feature (3695)..(3695): n is a, c, g, or t
  misc_feature (3712)..(3712): n is a, c, g, or t
  misc_feature (3733)..(3733): n is a, c, g, or t
  misc_feature (3735)..(3735): n is a, c, g, or t
  misc_feature (3741)..(3741): n is a, c, g, or t
  misc_feature (3771)..(3771): n is a, c, g, or t
  misc_feature (3794)..(3795): n is a, c, g, or t
  misc_feature (3867)..(3867): n is a, c, g, or t
  misc_feature (3921)..(3921): n is a, c, g, or t
  misc_feature (3924)..(3924): n is a, c, g, or t
  misc_feature (3942)..(3942): n is a, c, g, or t
  misc_feature (3951)..(3951): n is a, c, g, or t
  misc_feature (3962)..(3962): n is a, c, g, or t
ccagtctgggcgattgccaaccattagttcaattcgtttttgtccccaatttggaatccacttaacattcaatatttcatcgttaaccttatctcttaggttttttttcgtcattgagacaaaccattgtggtgttgcacgaaagataactggtgttttatgtctccagcaatgcggataggagtgggtaataggctcatgtttgaccaacgtaccatggctttcaagtagtcctataatcgttgcattagccttaaaaataaattctcctgcaacgccctctgtagaatctatgaatacacctcttccatctactggacagtctacaggaaggttgtattgcaagccaaccacatagtcatcctgaccatgagctggcgcagtgtgaacagctccagttcctgtttcagtggtcacatgctctccaagaataactgggacttgtttgtcataaaatggatgctgaagcataagcccctcaagttcagagcccttatatgttttacttagttttttgaagtctttgactccatatctttcaagagaagactcaagtaaatcatcagacaaaatatagagggacttaccaacatcaactagagcataatcaagatcgggatgaagtgaaacagcttcattagccggaagtgtccaaggcgtagtggtccaaataataagagctacaggtttatcattctcaaaaaaatcaccaatgacgttgaaggcaacatcaaccgtatcagaacctttgtctttgtactcaacttcagcttcagcgagagcagatgagcactctgtgcaccaatgaacaggcttaaagcctttagtaagatggccattttttacaatttttccaagtgcacgaacaatatcagcttcatatttaaaatttttagttaagtaagggttatcccaatctccaaaaattcctaatcgcttaaaatcaactttttgtttttcaatttgcttatctgcatactctctgcaagcagctcgaaactcgtcagcagaaattttatgtccaacttttcctttctttttttcaaccatgtgctcaattggcagaccatgacaatcccagccagggacataaggagcatcataacccgacaaggttttgctttttacaataacatctttaaggactttattaacagcatgtccgatatgaatatcgccatttgcataaggggggccgtcatgcaaaacgaatagtggcttgcctttaaatttttgacgaatttgttgatgaatatctttgtcttgccaatctttaagaaaagacccttctcgatttgccaggttagccttcattggaaaatcagtagcaggcaagtttaaggtgtttttgtagtcagacattccaggatatattattactatctaaaaacgccattatacttgacacataaggtttatcaagattgataatcccttgcaaatgtaaattaaaaacttctaaaagggcactgattaaactctataaattcactgacttgaggagcgcttgcacctgtttcggtttgagatattctgattgatttgcacgcaaattttctggcaaacgtatatcactaaatcttgttctaataagtcgagaaactttaaaatctaatgcttcccatagcctccttacttctctttttctgccctctctaacaaccacatgataccaacgattagcaccctctccgcctccaagagtgactcgatgaaattttgcaaagccgtcatctaactctaagccagatgtgagctgtttgatatgctcattttctacctttcccaaaactcgaactgcatactctctatctatttctgagctaggatgcattaatttatttgctaaatctccattattggtgaaaagaagtagccctgaagtattcagatccaaacggcccaccataacccatcgcgtattctctggaagaaaatcaaaaacactttttcggccttcttcatctttatttgagcatataaccccagcttgtttatttaggattagcacttttgtttcttcctctgcataacgctgaagatctattaaccttccatcaatggtaactttatcagttacaagggctttatctccaagcttagcttcttggttattgattgaaattctgccttgctcaattaatctttctgcccagcgccttgagccatatcctgcatttgcaataagtttctgtaatctttcagacatgaatttacagcttaatttagtaggttatgcccatagcatctcgaacttcttccatagtagtttttgccactattcgggctctttcagagccctcaaagattatttcttgaataaggttagggttggcctcatacttcgttatttcttgttgaatgggatctaattctgaattgatagagtctacaatcggctttttacactcaatgcaccctattttagctttagtacagccttcctttacccagttcagtgtctcatcagaagaataaatttgatgcatctgccaaacagggcatttatttggatctccagcatctgtaagcttaatacgagcaggatctgttggcattctatttaccttttgcttaactgattcaggctcttctcttaatgagatcgtattattataggacttagacattttttgaccatccagaccaggcatttttgatgctttcgtaagaagcgcctcaggctcagtaagtataatttttcccaggccttcaataaaacctaagagtctttctctatctccaagggtaatgttttgctgctctccgagaagcgcttttgccttnaacaaagattcatcatcacccgtctcttgataggtttttcttagttctctatatagtttagattgcttcttacccatctttccaatcgctaattcagctttctcttcaaaatcagactctctgccgtagacataattaaaacgtctagcaacctctcttgtgaactcaacatgcgcaacttgatcctctcctacaggaacaagaccagccttatagatcaatatgtcagcactttgaagaagtggataacctaaaaaaccgtaagtagacaagtccttagattttaatttttcttgctgatctttaaacgatgggaccctctctaaccaactaaggggggttgtcatagatagtagcaaatgaagctccgcatgctcagggactttagactgaacaaacagtgtcgaagtgtttgggttaaggccagttgcnaaccagtcaacaaccatatctgagacattcttttctaagtcaatcctatcagaatagtgtgttgtaaatgcatgccaatcagctacaaaataataagantcatattcattttgaagtctggcccagtttttaagaacaccatggtaatgcccaagatgaagttggccagtaggacgcattcctgatagtacgcgatgatctttcattttatttatttaaggattaaatntttaattgaattatcccatagattggctatagctttctaagccatctaaaaccaaattatcaaagagctctatagatttgggaagttcttttttaatttcttttgccnnncctccacaancagtnacaacnccatcagnnaagttngantnaaaactttcaatttgatnattnatagcncnaatcatcattgcataggttccttgcttccaagcatcatctgtattatttgctaagcnttttaantnaagacttaaatcactcnttttaaacttttcaaaactcncnctaagngctttcatacctggcattatgaggcctccntgatgaagtccattcttatcaannacatcaaaagtaatagcgctcccaatatcgattactaaaagcggattattaggaaaatgatttattgcgccnaacatagctgaaaaacgatctgcacctaacattgaaggatcatcatatgagagngtnagatttccaaatctcttntgaggtttnataatattgantgtctcaaaatgagtggaaatttcctgaacaatgtctg

SEQ ID NO: 1478 - DNA, 4000 bp, Escherichia coli
  misc_feature (100)..(100): n is a, c, g, or t
  misc_feature (421)..(421): n is a, c, g, or t
  misc_feature (475)..(475): n is a, c, g, or t
  misc_feature (580)..(580): n is a, c, g, or t
  misc_feature (613)..(613): n is a, c, g, or t
  misc_feature (725)..(725): n is a, c, g, or t
ctactaactcttgtaaattaagtcacttggaggaaaacccatgacagataatgacaaaaaagccgctctcaccgaacgccttgcaaaatgctacagcggngcagtttatgacgccctgcgcgagagagggatcgacaatactgttctgcccaaagacatccggccgattgacgatactcatgttcttgctggtcccgttttcacaatttcaggaacaccaaaacctgggattagtgctgatgatgctctgctggcttggacgggtttcctttcaacagcgccgtctggccatgtcgtagtttgcaatggccacaccgacgacatcgcgatgatgggggaactgtctgccgagacgctccagatgcgcggtgtgcgcggatatgtgaccaatggcgggtgtcgggacagcaatttcattcgnaacatcggtttccccgttttccatcgcttctacaccgcccgcgatgtggtgggngcatggtcggtcgacaaaatggaagtccctgtgcagatcggtgacgttgtcgttaagcccggggattttctgattgccgacattgatggggccatccttatcccnggtgaaatcgctgaagagatcgtggctgaggtngaggaagtgatgaacaccgagaacaaggtccgctcggctatccgtagcgggacggatccgaaggaagcctacttgacctacgggcgtttctgagcggtcaaactggcgtaanggcacttggagatacgaatatgcatattggtttgcctgaccagggctgttttgttctgcgggtctgaaatccagcagtttcaggcccttcggtttcacccgcccgatacgtaggtattgggcacgcgtccgcccgtcccatgacgggcgaacgctcagcacttgaccgaaatcaattcgatcaaacgcgacacgctctaacgatgtgggctaacgctatcagtcaggatcaattctgtcgggacgagagtgagtttagttggcgctgtcggatccgagatacggcttagcagatgttgaatgacaactctccccatctcttgcagatcaatgcttgtcgtactcagcggcggattagtgtgttgcaactcatcgatcccctcgttcgcgatcaacgagaaatcttctccaatttttttccccaacctctgcaaaccggctttcagtccaagggtgacgatagcattatatccgatggcagcagtcggcggatcttcgacatccagaattctcgccgctgcttcgtatccctgagcacgaacagggcggcattcgaaaacaagcgcacgatcaaactcttgacccgcttcgtcaaatgcttgcctgatgcctttcatgcgacggttaaatggggaaatattgactgtgccgccaacagcggcaatgcgtctgtgaccaaggttaagcagatgttttgccgccgtgtaacccgcaagtgtctcatcaaccacgactgaatcgatgggatagccactgatctctcgcgagacacacactattggggggctgaatttcttcatctcttccaggtcggtcgcctgagttcccatcgctggaaccaggacgatgccatctgcattgtactcagacattttcctgataaattcggattgtctctccaccttttcatccgtattgcacaggaagaccgttttcccttctttggcaagttcaccttcaatcgatcccagaagctcgctgaaggacgggtcggacacgttattaagcacgatacccaccgtgtcggtctttgacttcctcaaccctgccccggaacgctgatagacatagcctgattcgcgcagtgcttctttgaccctggcacgcgtctggtctgatattcggctgttttccttcatcgctaaagagacagttgcagtggaaagtcctaactgttttgcgatttgactaagggacggcttctgcattcttgctattttacctatggttatgattgcctagggtagtaatttccaacactttttaatgtaagccgcctcatgaagaattcaagttaatcgatttaatttgatttgtagaagttaatcgattaacttgtagtgacaccgacggaacgcagtttacgcattccggagcgcaagcgcagttttaacaggaggaaaactatgaaactcaaaaaatatgcattcggtatagtctcgggtctggcgttgtcagggctccttgcaacaacagcccttgccgacacggtcaggctgaaattggctgggacctatccagtcaaccactttggccacgggattgtcgaaaacatgatcaaagagattgaagacgcagacgtaggcgtgaaaatctcctatttcccggcctcacagttggggtccggcgaagagctgatcgaagatgcaattcgcggcaatatcgaccttgtacaagcgttcatctacgctcaggccgatcctcggctggaactcatgaacctgccagggttggtgacaacttttgacgagttgaaagcggtctatggagacccggagtccaagctgaatacgattctgggcgggatcatggacgacctggggctggtctatcttgccaatactggcgaagggttggtcggtattgtagcgaacgaaaaacctaccgattatgccggtttcggtgataagggcatgaacatccgcgtctggagttcagaggtcgccaaaaagaccaccgaaagcctcgggtaccggacgacaacgatgaactgggcggaggttctgccagcgctccaatctggcgtcatcgacggagcgatctgctgtacgccggaatgggcctattcgaccttcgcggccgccggagttgggaaatactttattcccgtgaacacggctatcgaagcgtcatcattctatgccagtggcaagtcctgggagaagctgaaccaggaacagcgtgacgttatccgggccgccgccgagagagccgccagcgttgcgatcaacacagcctgggagcgcaatgaaggcttcgtcgagcagttgaaagaagccggctgggaaatccttgagtacagccctgaagagcgcgctgcgatggtcgcccacatccaggaaaacgtttggccggaactggctgacgtggttgggcaggaccttatcgacgaactgacggccaattaaccaagattttcttaggttgctcataaattggggatgccgtgattgtctggcatccccctcttaacggggagtgaactttaaatggtactatttgaagatgcattgccacccggtctgagccggttcgttcggctgatggttcggatcaagtcggtcctggtgagcgtcgctctcccgatactgccgatcacattctttttcgtagtgctgtttcgctatgttctggaacgcgatctttttgcctacgaagaatggctcatgccaatctgcttctggatcttcttcctgggcagtgcgcttggcacttattacgacaaacagatcaacgccgatcttcttgatacagtcaccgaaaattcaacactgctgtggcttcgcaagctcgtgatccagatcatcgagttgtcgataacgctggtacttgtttactgggcttggctgatgattgcggatgagatcgcggcatatcctggatggaaaaccaccatcgccctgaagattccgtttattgttccacgctttggaattttcgtggggttcgtgtttatggcgttctacagcgccttgtcgatcttcctgatgctgcgcgtgggccccgaacgatatgccgaggccatggcgaaagcgcgacaggcggagcctgatgagcaggagattgtgacatggtaatcctcatcgccataatccttatctgcgtcctgctggcaatcggcgtctcggttccattggcctttggcggtgtgttgatcgttctggcctataccggagggtacgatgtctctgggttcttcgcgacgggccactggaagatgaattcagttatcctgctggccattcctcttttcatcatggctggcgatattatgca

SEQ ID NO: 1479 - DNA, 4000 bp, Escherichia coli
  misc_feature (1)..(8): n is a, c, g, or t
  misc_feature (10)..(19): n is a, c, g, or t
  misc_feature (21)..(30): n is a, c, g, or t
  misc_feature (32)..(38): n is a, c, g, or t
  misc_feature (40)..(52): n is a, c, g, or t
  misc_feature (55)..(59): n is a, c, g, or t
  misc_feature (61)..(65): n is a, c, g, or t
  misc_feature (67)..(70): n is a, c, g, or t
  misc_feature (73)..(73): n is a, c, g, or t
  misc_feature (75)..(78): n is a, c, g, or t
  misc_feature (80)..(83): n is a, c, g, or t
  misc_feature (85)..(86): n is a, c, g, or t
  misc_feature (89)..(91): n is a, c, g, or t
  misc_feature (93)..(94): n is a, c, g, or t
  misc_feature (97)..(97): n is a, c, g, or t
  misc_feature (100)..(103): n is a, c, g, or t
  misc_feature (109)..(110): n is a, c, g, or t
  misc_feature (112)..(112): n is a, c, g, or t
  misc_feature (115)..(118): n is a, c, g, or t
  misc_feature (122)..(122): n is a, c, g, or t
  misc_feature (127)..(127): n is a, c, g, or t
  misc_feature (130)..(132): n is a, c, g, or t
  misc_feature (142)..(142): n is a, c, g, or t
  misc_feature (149)..(149): n is a, c, g, or t
  misc_feature (158)..(158): n is a, c, g, or t
  misc_feature (160)..(160): n is a, c, g, or t
  misc_feature (163)..(163): n is a, c, g, or t
  misc_feature (167)..(168): n is a, c, g, or t
  misc_feature (178)..(179): n is a, c, g, or t
  misc_feature (181)..(181): n is a, c, g, or t
  misc_feature (185)..(186): n is a, c, g, or t
  misc_feature (194)..(194): n is a, c, g, or t
  misc_feature (203)..(203): n is a, c, g, or t
  misc_feature (212)..(212): n is a, c, g, or t
  misc_feature (1014)..(1014): n is a, c, g, or t
  misc_feature (1359)..(1359): n is a, c, g, or t
  misc_feature (1441)..(1441): n is a, c, g, or t
  misc_feature (1467)..(1467): n is a, c, g, or t
  misc_feature (2040)..(2040): n is a, c, g, or t
  misc_feature (2809)..(2809): n is a, c, g, or t
  misc_feature (2866)..(2866): n is a, c, g, or t
nnnnnnnngnnnnnnnnnnannnnnnnnnnannnnnnngnnnnnnnnnnnnnagnnnnngnnnnnannnnagnannnnannnngnngannnannagnagnnnnagcagnngnagnnnnagcngaagnagnnncagcagcagnagaagcngcagcagcngnagnagcnncagcagcagnngnagcnncagcagcngaagaagcnccagcagcngaagaagctccagcagcggaagaagctccagcagcggaagaagctccagcggaagataagtagagattacggataatctctccatcgaaagcaatggaagatgatgtagtcattatggggaaaattgttgggcctcatggcatcaaaggatggctaaaagtacatccttttacagaagagataggaacgctgagtaattaccctcaatggcttatatcaaaagatgaaaagcattgggttggccataaagttgaaactgcgacagttaaagataaaacgttgcttgtcaaattggtgggaatagatgaccgaaatggatctgatagcgtcaataaaaatatggttggcatattgaaagaagagttacctaaattagacgcagacacttattactggtctgatttgataggtttggatgtacagaatgaagctggatattattttggtagcatacaaacaatgatggaaacagggtcaaacgatgtgatggtaatcaaaggtgaaagagaatttttgataccgtacttgcctgatgtaattataaaagtagatctcgaggctaaaaaagttttagttgattgggatgaaaattactaaatcgttatttagattcgatttagttacattgatgcccgagatgtttcaagcattaactgattttggagtgactggtagagcatttaagtctggtgtgattgaaatgcatgtttgcaatccgagagagtttgcaaaggatgctcataacactatagatgataaatcgtacggtggtggtccaggaatgttgatgatggtagagccnttggtaaaggctattgagtttataaaagagaagcagcataaaaaagggttgaaaggcgctaaggtagttcatatgaccccgaggggtaagtcattggatcaccaattagtaagagaattgttagaagaagactcattaattattattgccagtcgatacgaaggtgttgatgaaagaattaatgactgggtagatgaagaaatatcggtaggagattatgttatgagtgggggtgaattgccagccatgacattaatggattgtatgataaggcaattacctggagttttaaatgatgatgaatcagcgaatcaggattcatttgtggacggattattagatcanccacactttacaagaccagagctttatagagggcttaaggttcctgaggttttaatgtcaggtgaccatgaaaaaataagantatggcgactgaaagaatcgctaagngaaacttggactaaacgtccagatttgttggccgaaaggttgttgacgaaagaggagtctcgactgctacaagaagttaaaagagagcaggaacaagacccttataactaaaaggaataaatgatggcgaatattatagaaacattagagaatgaagaaattgcacgacttggaaagaaaattccaaagtttgcacctggagatacactttctgttggagtaaacgttgttgaaggaacaaggtctagggttcagttatttgagggagtggttatttcaagacgaaatcgcggactcaattcatcattcatagtaagaaaaatttcctcaggtgaaggtgtcgaaagaacatttcagcttcattctccccaaatagaaagcattgaagtaaaaagacgtggtgatgttaaaagagctaagctattttatctgcgcgacctctcaggcaagtctgctcgtattaaagaaaggcttaaagtgcgtccaagcgatagtgaatttgaaactatcccagagggtgcagctccggccccagtagaggctccattagaagatatggccccagtagaggcnccagtagtagaagaaaaatctgctgaatagacaattcataaagtatgttaaaagccccaaattttggggcttttttttaaccttcttttctttgatatttaatttagaaaatcaatgaaatccaggtcgaatagatttagaataaaaagaatgcataaatcacacacacacataaggtaaatcttaattgcatcaaaaaattattgatgattttattgaccatttatggcttgaagatgggttgtctaaaaatacgctaaatagttatcgctttgatttgataattttcgatagctggcttggcgagcaaaaaaaaatagctatgatggatgtttctgaattagaaatacaagaatttttagcttttaaatttccatcatcaaaatcaaggagcatatctcggcttttggcaaccttaagaaggttttttcgctatcagctcagggagaaaaaaattcaaaaagacccaacacttaaaattcaaacaccaaaaattccaaaatcattaccaaagtcattgagcgaagaggaggtggaaagtcttttagatgcacctaacctagattcatcttccggcttaagagacagatctatgttggagttgctatatgcttgtggcttaagagtaacggagttggtcgatattcaattaacggaagttatccttagtgatggcgttattagggtgactggtaagggctctaaaacaagactggtaccaatgggagaggaagcggtagattggataaaaaaatatattgctgaagcncgggatgatattttaagaaaaaaaacatctaaattcttatttgttactaaccgaggnggagcaatgacgcggcaggctttttggtatgtaataaaaaaatatgccgtaattgctaatatcaataaaccaatgtcaccccatatcttgcgtcatgcatttgcaacccatttaattaatcatggagcagacttaagagtggtgcaaatgttattaggccacacagatatttccacaacacaaatttatactcatgtggcaagggagagattaaaaaaaattcaccaagaacaccatccgagagggtagttagcgctttaaaataacaccaacgaagtctgtactcggtagtatcttgttttttgcaatttttaattcaatagctttaatagcaaattgtctcttgatagttgagacaatttcttcacctagtgattctaataatttgtagctatgattatcaccaattgttacgataatcttctcaatttgggcataatctaatgtctcatcaatatcatcagaatcgaatggtgaatgtttattgagctcaatatcaatatcgatatgtagattttgatagtgctccctctcaaaatctgggacaccaatcttagtttttatctgtaggccgtgaagaaaaatatagttagacatgaaggcgtaggctttttgaaatataatgatcctatatgataaatcaaattctttttgttgccattgcttatttaattggctctctgtcttttggcattttagcgagtaaaatttttagcatttccgacccaagaactatgggatcaaaaaaccctggggcgaccaatgtgttacgaacaggcaacaaatatgctgctatcttcaccttgcttggtgatatgttaaaagcgactatggtagtagccccggcaatcgcttacgatatatcaggcttagaattagtagtgatttcgctggccgttctgctcggccatgtattcccaatctaccataagtttaggggtggaaaaggtgtagcgactgctttagggatcctgtttgcaattaattgggtcttagcgcttatagttttatttgtttggcttgtaatatttttgttatttaggtattcatctcttgcggcgattatttcatcattggctgcaccattgatcgcatactttcttaatcaaggccaaactattgtcattattgctg

SEQ ID NO: 1480 - DNA, 4000 bp, Escherichia coli
  misc_feature (77)..(77): n is a, c, g, or t
  misc_feature (255)..(256): n is a, c, g, or t
  misc_feature (260)..(261): n is a, c, g, or t
  misc_feature (263)..(264): n is a, c, g, or t
  misc_feature (266)..(266): n is a, c, g, or t
  misc_feature (268)..(268): n is a, c, g, or t
  misc_feature (273)..(274): n is a, c, g, or t
  misc_feature (276)..(276): n is a, c, g, or t
  misc_feature (279)..(280): n is a, c, g, or t
  misc_feature (283)..(283): n is a, c, g, or t
  misc_feature (285)..(286): n is a, c, g, or t
  misc_feature (288)..(288): n is a, c, g, or t
  misc_feature (294)..(295): n is a, c, g, or t
  misc_feature (297)..(297): n is a, c, g, or t
  misc_feature (300)..(303): n is a, c, g, or t
  misc_feature (306)..(310): n is a, c, g, or t
  misc_feature (312)..(316): n is a, c, g, or t
  misc_feature (319)..(321): n is a, c, g, or t
  misc_feature (323)..(325): n is a, c, g, or t
  misc_feature (329)..(334): n is a, c, g, or t
  misc_feature (337)..(337): n is a, c, g, or t
  misc_feature (341)..(343): n is a, c, g, or t
  misc_feature (345)..(348): n is a, c, g, or t
  misc_feature (350)..(350): n is a, c, g, or t
  misc_feature (353)..(353): n is a, c, g, or t
  misc_feature (355)..(355): n is a, c, g, or t
  misc_feature (357)..(360): n is a, c, g, or t
  misc_feature (362)..(365): n is a, c, g, or t
  misc_feature (368)..(368): n is a, c, g, or t
  misc_feature (370)..(371): n is a, c, g, or t
  misc_feature (373)..(373): n is a, c, g, or t
  misc_feature (375)..(375): n is a, c, g, or t
  misc_feature (377)..(381): n is a, c, g, or t
  misc_feature (383)..(383): n is a, c, g, or t
  misc_feature (385)..(385): n is a, c, g, or t
  misc_feature (389)..(389): n is a, c, g, or t
  misc_feature (394)..(394): n is a, c, g, or t
  misc_feature (396)..(398): n is a, c, g, or t
  misc_feature (400)..(404): n is a, c, g, or t
  misc_feature (407)..(407): n is a, c, g, or t
  misc_feature (409)..(409): n is a, c, g, or t
  misc_feature (414)..(414): n is a, c, g, or t
  misc_feature (416)..(416): n is a, c, g, or t
  misc_feature (420)..(421): n is a, c, g, or t
  misc_feature (424)..(426): n is a, c, g, or t
  misc_feature (429)..(429): n is a, c, g, or t
  misc_feature (433)..(433): n is a, c, g, or t
  misc_feature (435)..(437): n is a, c, g, or t
  misc_feature (441)..(442): n is a, c, g, or t
  misc_feature (446)..(447): n is a, c, g, or t
  misc_feature (451)..(451): n is a, c, g, or t
  misc_feature (453)..(453): n is a, c, g, or t
  misc_feature (457)..(459): n is a, c, g, or t
  misc_feature (461)..(463): n is a, c, g, or t
  misc_feature (465)..(465): n is a, c, g, or t
  misc_feature (468)..(470): n is a, c, g, or t
  misc_feature (472)..(472): n is a, c, g, or t
  misc_feature (474)..(474): n is a, c, g, or t
  misc_feature (477)..(477): n is a, c, g, or t
  misc_feature (483)..(483): n is a, c, g, or t
  misc_feature (488)..(490): n is a, c, g, or t
  misc_feature (493)..(494): n is a, c, g, or t
  misc_feature (498)..(498): n is a, c, g, or t
  misc_feature (504)..(504): n is a, c, g, or t
  misc_feature (514)..(517): n is a, c, g, or t
  misc_feature (521)..(521): n is a, c, g, or t
  misc_feature (526)..(527): n is a, c, g, or t
  misc_feature (529)..(532): n is a, c, g, or t
  misc_feature (534)..(534): n is a, c, g, or t
  misc_feature (536)..(536): n is a, c, g, or t
  misc_feature (539)..(539): n is a, c, g, or t
  misc_feature (547)..(547): n is a, c, g, or t
  misc_feature (549)..(551): n is a, c, g, or t
  misc_feature (556)..(556): n is a, c, g, or t
  misc_feature (558)..(561): n is a, c, g, or t
  misc_feature (563)..(563): n is a, c, g, or t
  misc_feature (566)..(566): n is a, c, g, or t
  misc_feature (568)..(569): n is a, c, g, or t
  misc_feature (572)..(574): n is a, c, g, or t
  misc_feature (577)..(579): n is a, c, g, or t
  misc_feature (582)..(584): n is a, c, g, or t
  misc_feature (591)..(592): n is a, c, g, or t
  misc_feature (594)..(598): n is a, c, g, or t
  misc_feature (604)..(604): n is a, c, g, or t
  misc_feature (608)..(609): n is a, c, g, or t
  misc_feature (612)..(613): n is a, c, g, or t
  misc_feature (615)..(616): n is a, c, g, or t
  misc_feature (618)..(618): n is a, c, g, or t
  misc_feature (621)..(623): n is a, c, g, or t
  misc_feature (627)..(630): n is a, c, g, or t
  misc_feature (632)..(633): n is a, c, g, or t
  misc_feature (636)..(638): n is a, c, g, or t
  misc_feature (640)..(640): n is a, c, g, or t
  misc_feature (646)..(646): n is a, c, g, or t
  misc_feature (649)..(650): n is a, c, g, or t
  misc_feature (653)..(654): n is a, c, g, or t
  misc_feature (657)..(659): n is a, c, g, or t
  misc_feature (662)..(664): n is a, c, g, or t
  misc_feature (666)..(666): n is a, c, g, or t
  misc_feature (668)..(674): n is a, c, g, or t
  misc_feature (677)..(680): n is a, c, g, or t
  misc_feature (682)..(684): n is a, c, g, or t
  misc_feature (686)..(687): n is a, c, g, or t
  misc_feature (691)..(693): n is a, c, g, or t
  misc_feature (695)..(695): n is a, c, g, or t
  misc_feature (697)..(703): n is a, c, g, or t
  misc_feature (705)..(705): n is a, c, g, or t
  misc_feature (710)..(712): n is a, c, g, or t
  misc_feature (714)..(716): n is a, c, g, or t
  misc_feature (718)..(719): n is a, c, g, or t
  misc_feature (721)..(721): n is a, c, g, or t
  misc_feature (723)..(727): n is a, c, g, or t
  misc_feature (730)..(731): n is a, c, g, or t
  misc_feature (735)..(737): n is a, c, g, or t
  misc_feature (743)..(745): n is a, c, g, or t
  misc_feature (747)..(749): n is a, c, g, or t
  misc_feature (751)..(751): n is a, c, g, or t
  misc_feature (754)..(754): n is a, c, g, or t
  misc_feature (756)..(756): n is a, c, g, or t
  misc_feature (758)..(764): n is a, c, g, or t
  misc_feature (766)..(766): n is a, c, g, or t
  misc_feature (768)..(768): n is a, c, g, or t
  misc_feature (771)..(772): n is a, c, g, or t
  misc_feature (774)..(776): n is a, c, g, or t
  misc_feature (778)..(781): n is a, c, g, or t
  misc_feature (786)..(786): n is a, c, g, or t
  misc_feature (788)..(789): n is a, c, g, or t
  misc_feature (791)..(791): n is a, c, g, or t
  misc_feature (793)..(793): n is a, c, g, or t
  misc_feature (795)..(805): n is a, c, g, or t
  misc_feature (807)..(809): n is a, c, g, or t
  misc_feature (812)..(812): n is a, c, g, or t
  misc_feature (814)..(816): n is a, c, g, or t
  misc_feature (818)..(819): n is a, c, g, or t
  misc_feature (821)..(822): n is a, c, g, or t
  misc_feature (824)..(824): n is a, c, g, or t
  misc_feature (826)..(826): n is a, c, g, or t
  misc_feature (830)..(830): n is a, c, g, or t
  misc_feature (832)..(832): n is a, c, g, or t
  misc_feature (834)..(836): n is a, c, g, or t
  misc_feature (838)..(841): n is a, c, g, or t
  misc_feature (843)..(843): n is a, c, g, or t
  misc_feature (845)..(846): n is a, c, g, or t
  misc_feature (848)..(848): n is a, c, g, or t
  misc_feature (851)..(854): n is a, c, g, or t
  misc_feature (856)..(858): n is a, c, g, or t
  misc_feature (860)..(861): n is a, c, g, or t
  misc_feature (863)..(863): n is a, c, g, or t
  misc_feature (865)..(866): n is a, c, g, or t
  misc_feature (868)..(868): n is a, c, g, or t
  misc_feature (870)..(870): n is a, c, g, or t
  misc_feature (873)..(874): n is a, c, g, or t
  misc_feature (876)..(876): n is a, c, g, or t
  misc_feature (879)..(879): n is a, c, g, or t
  misc_feature (881)..(883): n is a, c, g, or t
  misc_feature (886)..(888): n is a, c, g, or t
  misc_feature (890)..(897): n is a, c, g, or t
  misc_feature (899)..(903): n is a, c, g, or t
  misc_feature (905)..(905): n is a, c, g, or t
  misc_feature (909)..(909): n is a, c, g, or t
  misc_feature (912)..(913): n is a, c, g, or t
  misc_feature (915)..(922): n is a, c, g, or t
  misc_feature (924)..(928): n is a, c, g, or t
  misc_feature (931)..(931): n is a, c, g, or t
  misc_feature (933)..(935): n is a, c, g, or t
  misc_feature (937)..(941): n is a, c, g, or t
  misc_feature (943)..(947): n is a, c, g, or t
  misc_feature (951)..(951): n is a, c, g, or t
  misc_feature (953)..(954): n is a, c, g, or t
  misc_feature (956)..(956): n is a, c, g, or t
  misc_feature (960)..(963): n is a, c, g, or t
  misc_feature (965)..(967): n is a, c, g, or t
  misc_feature (972)..(972): n is a, c, g, or t
  misc_feature (974)..(974): n is a, c, g, or t
  misc_feature (976)..(977): n is a, c, g, or t
  misc_feature (980)..(981): n is a, c, g, or t
  misc_feature (983)..(985): n is a, c, g, or t
  misc_feature (987)..(987): n is a, c, g, or t
  misc_feature (989)..(992): n is a, c, g, or t
  misc_feature (994)..(995): n is a, c, g, or t
  misc_feature (998)..(998): n is a, c, g, or t
  misc_feature (1000)..(1004): n is a, c, g, or t
  misc_feature (1007)..(1010): n is a, c, g, or t
  misc_feature (1012)..(1012): n is a, c, g, or t
  misc_feature (1016)..(1019): n is a, c, g, or t
  misc_feature (1021)..(1021): n is a, c, g, or t
  misc_feature (1023)..(1027): n is a, c, g, or t
  misc_feature (1031)..(1034): n is a, c, g, or t
  misc_feature (1036)..(1038): n is a, c, g, or t
  misc_feature (1040)..(1040): n is a, c, g, or t
  misc_feature (1042)..(1042): n is a, c, g, or t
  misc_feature (1046)..(1053): n is a, c, g, or t
  misc_feature (1057)..(1057): n is a, c, g, or t
  misc_feature (1059)..(1060): n is a, c, g, or t
  misc_feature (1062)..(1064): n is a, c, g, or t
  misc_feature (1066)..(1066): n is a, c, g, or t
  misc_feature (1069)..(1074): n is a, c, g, or t
  misc_feature (1077)..(1081): n is a, c, g, or t
  misc_feature (1083)..(1086): n is a, c, g, or t
  misc_feature (1088)..(1088): n is a, c, g, or t
  misc_feature (1090)..(1091): n is a, c, g, or t
  misc_feature (1093)..(1093): n is a, c, g, or t
  misc_feature (1095)..(1097): n is a, c, g, or t
  misc_feature (1099)..(1099): n is a, c, g, or t
  misc_feature (1102)..(1103): n is a, c, g, or t
  misc_feature (1105)..(1109): n is a, c, g, or t
  misc_feature (1111)..(1111): n is a, c, g, or t
  misc_feature (1113)..(1120): n is a, c, g, or t
  misc_feature (1124)..(1125): n is a, c, g, or t
  misc_feature (1127)..(1128): n is a, c, g, or t
  misc_feature (1130)..(1130): n is a, c, g, or t
  misc_feature (1132)..(1132): n is a, c, g, or t
  misc_feature (1135)..(1135): n is a, c, g, or t
  misc_feature (1137)..(1137): n is a, c, g, or t
  misc_feature (1139)..(1139): n is a, c, g, or t
  misc_feature (1141)..(1141): n is a, c, g, or t
  misc_feature (1143)..(1143): n is a, c, g, or t
  misc_feature (1146)..(1148): n is a, c, g, or t
  misc_feature (1152)..(1157): n is a, c, g, or t
  misc_feature (1159)..(1159): n is a, c, g, or t
  misc_feature (1161)..(1163): n is a, c, g, or t
  misc_feature (1166)..(1166): n is a, c, g, or t
  misc_feature (1169)..(1171): n is a, c, g, or t
  misc_feature (1173)..(1173): n is a, c, g, or t
  misc_feature (1176)..(1178): n is a, c, g, or t
  misc_feature (1180)..(1180): n is a, c, g, or t
  misc_feature (1182)..(1182): n is a, c, g, or t
  misc_feature (1184)..(1187): n is a, c, g, or t
  misc_feature (1189)..(1189): n is a, c, g, or t
  misc_feature (1191)..(1193): n is a, c, g, or t
  misc_feature (1195)..(1198): n is a, c, g, or t
  misc_feature (1200)..(1203): n is a, c, g, or t
  misc_feature (1206)..(1206): n is a, c, g, or t
  misc_feature (1208)..(1213): n is a, c, g, or t
  misc_feature (1215)..(1217): n is a, c, g, or t
  misc_feature (1219)..(1221): n is a, c, g, or t
  misc_feature (1223)..(1225): n is a, c, g, or t
  misc_feature (1228)..(1231): n is a, c, g, or t
  misc_feature (1233)..(1233): n is a, c, g, or t
  misc_feature (1235)..(1235): n is a, c, g, or t
  misc_feature (1237)..(1238): n is a, c, g, or t
  misc_feature (1240)..(1241): n is a, c, g, or t
  misc_feature (1244)..(1250): n is a, c, g, or t
  misc_feature (1252)..(1256): n is a, c, g, or t
  misc_feature (1258)..(1261): n is a, c, g, or t
  misc_feature (1263)..(1263): n is a, c, g, or t
  misc_feature (1265)..(1270): n is a, c, g, or t
  misc_feature (1272)..(1272): n is a, c, g, or t
  misc_feature (1274)..(1274): n is a, c, g, or t
  misc_feature (1276)..(1279): n is a, c, g, or t
  misc_feature (1281)..(1285): n is a, c, g, or t
  misc_feature (1287)..(1289): n is a, c, g, or t
  misc_feature (1291)..(1294): n is a, c, g, or t
  misc_feature (1297)..(1303): n is a, c, g, or t
  misc_feature (1305)..(1316): n is a, c, g, or t
  misc_feature (1318)..(1326): n is a, c, g, or t
  misc_feature (1328)..(1329): n is a, c, g, or t
  misc_feature (1332)..(1336): n is a, c, g, or t
  misc_feature (1338)..(1348): n is a, c, g, or t
  misc_feature (1350)..(1350): n is a, c, g, or t
  misc_feature (1352)..(1352): n is a, c, g, or t
  misc_feature (1357)..(1357): n is a, c, g, or t
  misc_feature (1359)..(1361): n is a, c, g, or t
  misc_feature (1363)..(1363): n is a, c, g, or t
  misc_feature (1365)..(1365): n is a, c, g, or t
  misc_feature (1367)..(1368): n is a, c, g, or t
  misc_feature (1370)..(1370): n is a, c, g, or t
  misc_feature (1373)..(1373): n is a, c, g, or t
  misc_feature (1378)..(1379): n is a, c, g, or t
  misc_feature (1384)..(1385): n is a, c, g, or t
  misc_feature (1388)..(1388): n is a, c, g, or t
  misc_feature (1390)..(1390): n is a, c, g, or t
  misc_feature (1395)..(1396): n is a, c, g, or t
  misc_feature (1398)..(1398): n is a, c, g, or t
  misc_feature (1400)..(1400): n is a, c, g, or t
  misc_feature (1402)..(1404): n is a, c, g, or t
  misc_feature (1410)..(1410): n is a, c, g, or t
  misc_feature (1412)..(1415): n is a, c, g, or t
  misc_feature (1418)..(1418): n is a, c, g, or t
  misc_feature (1420)..(1421): n is a, c, g, or t
  misc_feature (1423)..(1427): n is a, c, g, or t
  misc_feature (1431)..(1431): n is a, c, g, or t
  misc_feature (1436)..(1436): n is a, c, g, or t
  misc_feature (1438)..(1438): n is a, c, g, or t
  misc_feature (1440)..(1441): n is a, c, g, or t
  misc_feature (1443)..(1444): n is a, c, g, or t
  misc_feature (1448)..(1449): n is a, c, g, or t
  misc_feature (1451)..(1452): n is a, c, g, or t
  misc_feature (1454)..(1456): n is a, c, g, or t
  misc_feature (1459)..(1460): n is a, c, g, or t
  misc_feature (1463)..(1463): n is a, c, g, or t
  misc_feature (1465)..(1466): n is a, c, g, or t
  misc_feature (1469)..(1470): n is a, c, g, or t
  misc_feature (1473)..(1476): n is a, c, g, or t
  misc_feature (1478)..(1479): n is a, c, g, or t
  misc_feature (1482)..(1484): n is a, c, g, or t
  misc_feature (1487)..(1487): n is a, c, g, or t
  misc_feature (1489)..(1497): n is a, c, g, or t
  misc_feature (1499)..(1499): n is a, c, g, or t
  misc_feature (1501)..(1501): n is a, c, g, or t
  misc_feature (1504)..(1505): n is a, c, g, or t
  misc_feature (1507)..(1508): n is a, c, g, or t
  misc_feature (1511)..(1512): n is a, c, g, or t
  misc_feature (1515)..(1515): n is a, c, g, or t
  misc_feature (1517)..(1517): n is a, c, g, or t
  misc_feature (1519)..(1519): n is a, c, g, or t
  misc_feature (1525)..(1525): n is a, c, g, or t
  misc_feature (1527)..(1527): n is a, c, g, or t
  misc_feature (1532)..(1532): n is a, c, g, or t
  misc_feature (1534)..(1536): n is a, c, g, or t
  misc_feature (1538)..(1540): n is a, c, g, or t
  misc_feature (1542)..(1542): n is a, c, g, or t
  misc_feature (1545)..(1546): n is a, c, g, or t
  misc_feature (1548)..(1548): n is a, c, g, or t
  misc_feature (1551)..(1551): n is a, c, g, or t
  misc_feature (1553)..(1554): n is a, c, g, or t
  misc_feature (1556)..(1556): n is a, c, g, or t
  misc_feature (1559)..(1561): n is a, c, g, or t
  misc_feature (1563)..(1563): n is a, c, g, or t
  misc_feature (1567)..(1567): n is a, c, g, or t
  misc_feature (1570)..(1571): n is a, c, g, or t
  misc_feature (1573)..(1576): n is a, c, g, or t
  misc_feature (1580)..(1583): n is a, c, g, or t
  misc_feature (1585)..(1585): n is a, c, g, or t
  misc_feature (1588)..(1589): n is a, c, g, or t
  misc_feature (1592)..(1592): n is a, c, g, or t
  misc_feature (1594)..(1594): n is a, c, g, or t
  misc_feature (1596)..(1596): n is a, c, g, or t
  misc_feature (1598)..(1598): n is a, c, g, or t
  misc_feature (1601)..(1601): n is a, c, g, or t
  misc_feature (1605)..(1607): n is a, c, g, or t
  misc_feature (1610)..(1610): n is a, c, g, or t
  misc_feature (1612)..(1615): n is a, c, g, or t
  misc_feature (1618)..(1622): n is a, c, g, or t
  misc_feature (1627)..(1629): n is a, c, g, or t
  misc_feature (1632)..(1636): n is a, c, g, or t
  misc_feature (1640)..(1640): n is a, c, g, or t
  misc_feature (1643)..(1647): n is a, c, g, or t
  misc_feature (1649)..(1650): n is a, c, g, or t
  misc_feature (1654)..(1656): n is a, c, g, or t
  misc_feature (1662)..(1662): n is a, c, g, or t
  misc_feature (1665)..(1665): n is a, c, g, or t
  misc_feature (1668)..(1671): n is a, c, g, or t
  misc_feature (1675)..(1676): n is a, c, g, or t
  misc_feature (1678)..(1678): n is a, c, g, or t
  misc_feature (1680)..(1681): n is a, c, g, or t
  misc_feature (1683)..(1683): n is a, c, g, or t
  misc_feature (1686)..(1687): n is a, c, g, or t
  misc_feature (1689)..(1690): n is a, c, g, or t
  misc_feature (1856)..(1856): n is a, c, g, or t
  misc_feature (1949)..(1949): n is a, c, g, or t
  misc_feature (1952)..(1952): n is a, c, g, or t
  misc_feature (1964)..(1964): n is a, c, g, or t
  misc_feature (1988)..(1988): n is a, c, g, or t
  misc_feature (1991)..(1991): n is a, c, g, or t
  misc_feature (3289)..(3289): n is a, c, g, or t
  misc_feature (3361)..(3361): n is a, c, g, or t
  misc_feature (3977)..(3977): n is a, c, g, or t
acattgccggatcatacaggccattttccttatgtgtgtcaactataacttctaaggtcaccgaacccttaagattnctatccaccacttcggtagctacacgtgaagcatgatcttctggaaaccattgcaaaggatagtgctcaaatctaagttgtgaagcaaagaaaattgccacgataatcatcactgaactaatagcaacaatcgcttttggatagcctgttgaaatacgactaatgcctaacagcatanngtcnntnntngngtgtnntnttnnatntnntncgctcnntnttnnnntannnnncnnnnnacnnntnnnagcnnnnnntancacnnnannnnanaanantnnnntnnnnacncnncnantnnnnnananaccnaaatntnnnannnnngananctcananaatnngannnacnatantnnngctnntgtnntcananaggnnntnnnantannnanancanaatgcnccatnnngtnntttnaagagntttttacatnnnnagantttgnnannnntntntanaaaatagncnnnagatnannnncnccncnngtnnngannnctnnnaaaaatnncnnnnnaatttnagtnncannanngnatnnngtannnntnntannnancaatgnaanngtnnctnnnatnnnanannnnnnngcnnnnannngnnaaannntncnnnnnnnangtttnnncnnntnngntnnnnnatnntgannntcgctnnncnnntnttncncnnnnnnntnanaanntnnnannnngcttngnntnangnnnnnnnnnnnannngcngnnncnntnngntntatntngnnntnnnntntnncnaannnntnnntnntntnntnanttnntntancnnnaannntnnnnnnnncnnnnnanaaanatnncnnnnnnnncnnnnnagntnnntnnnnntnnnnngcananncntctnnnncnnnctcancnannaanntnnncngnnnntnnaangnnnnntannnntntgtnnnnanannnnnagtnnnnannntntnatcnnnnnnnnaaantnngnnntntannnnnngannnnngnnnncncnntntnnntncgnntnnnnntnannnnnnnntttnngnnantnttnananananctnnnacannnnnncnannnttnttnnnanaannntntntnnnntnannnannnnannnncancnnnnnnannngnnngnnnatnnnnangntnntnntgnnnnnnntnnnnntnnnntnannnnnntnantnnnnannnnntnnngnnnnaannnnnnntnnnnnnnnnnnntnnnnnnnnnanngannnnntnnnnnnnnnnnangntgacncnnntngnanncnttntactnnaatcnngantntgganngncntnnnaacaantnnnntgntnntnnnnnaagnccaanancnntnnaaanncnnannnaannganannagnncannnncnnagnnnacntnnnnnnnnntntnaanntnnctnnaantntntttatngnatatnannntnnnanatnntntgnanntnttnnngngtantannannnnctannnntnatnnggntntngnatntatnnntgngnnnnaannnnncattnnnaannnnngtantgnnnnngnngtannntgatanttntannnntttnnananntnaannanngaatatggtgccgatggccagagtcgaactggcacgagcgtagctcactaccccctcaaggtagcgcgtctaccaattccgccacatcggcaataaaatttagtcaggtatgtcgctgagcggtacgtcgatcataggaacatcagacggtatagctggagtagcnattacctgatccataacactttgagtgttgttgctagcacttggctcgttagtagctagataagccaacgttaaagaagttaaaaagaaaccngtngcaacgcctgcngttaatttataaataaaagagctngcncctcgcgcgccaaatactgagcccgcagaacccgcgccaaatgcagcgccagcatcggcacctttaccatgttgcattaaaattagcgcaactagacccaacgccagcaacacatgaacaattaaaattacttgaaacgacataattaacccgctttacaaattcttaaaaaatcttcagcctttaatgaggcgccgccaatcagcccaccatcgatgtcttcacagccaatcagctcttctgcattggtagggttcatgctaccgccgtatagaatgggagtagattgagcaatatcggtgttattctcagctagcatcgaacgaataaaggcgtgtgcatcttgtgcctgctgtggtgttgcagtaacgccagtaccaattgcccaaactggctcataagcaatgataatatttttaaaggcatcaataccaacgcgatcaaccactgcttgaatttgacgagaaaccacgatttccatattacccgcctctctctcttctaaggtttcgccgatacagaaaagtggagttagtccgttatccagtgcagcttgtactttctcggcaacaatttcatcagtctctccgtataagcttctgcgctcggagtggccaacaatcacgtgctcggcgccaaattctttaatcatgtctgcgctcacttcgccagtaaaggcacctgaagcgttgacgttaaaattttgcgcacccagatgaacttgagagtgggtgattaaagcttccacttgcgataaataagggtaaggagcacaaacaataacctttgactcaacgtcggccattcctgaaagaatgcccattatcaatgtattaaccgcttcttttgaagcgttcattttccaattgcctgcaacgattacttgacgcataatgattgttcactgtaaaaaaggagcaatgttacgctatttggctataaaaatcaatcagtgctttgcctttgagccaaaataaagcgccaaagaaaccattaaaatacccaatgaaaaatacaacaaatcaagtgcgccggtaaaactcatggataacgatacttcgaagaaggttaccaccaaaatcataagaattactttggctaattttgcctttaaatcatctaacgaattgatcaccagaacttttgaagattgaccgctttctttggcctcatcaatatcactaataaacagctcatacaagcccaaggaaaatatcaataaaatggttgccaacaaaaacccatcaatagcaccaaccgtatgggccaccatttctatttttaaaagccttctgtcntctcctgatgctgaaaaataatcgggcgcatgggccagcaaaccagcaacatccacggcagtaatgacaaanaaaagcaaggacagtagcattgaagaaatcacagcagccaaaaccataaggcgagacccccacaacaatttttcaaaatatttttcgacaattcccatttttttaactccccgtgcacaacacaaagctttagtatatcattattaattttaaataaaaccccaatcctaatacagaaaatacaatggtaaaaataaacactaattttgtatttttatcgtcaggattaaacacataaaaacttatgtcaaaaacttgggaaaaatgtctaaccactctcagagacaccgttgatttacacacattcagcttgtggattcgacccctaaaagcacttgaagaccctatcactctatccttgttggcacctaacacttctgtacttgactatgttaacggtaatttaaaaaaagaaattaaagccgccatagcacagcacagcaaaaaccttgaggtttatattggtgtatctccacaaaaaaaaggcactgttcaaagcattaaacaacacaaaacgccattatttgcagattatacatttgacaacttagtactgggcggcgctaatcagattgcttatggcgccgcccaacagattgctgaaaacattaaaaancctctttacaacccttttattat

SEQ ID NO: 1481 - DNA, 4000 bp, Escherichia coli
  misc_feature (1985)..(1994): n is a, c, g, or t
  misc_feature (1996)..(1998): n is a, c, g, or t
  misc_feature (2000)..(2000): n is a, c, g, or t
  misc_feature (2002)..(2010): n is a, c, g, or t
  misc_feature (2012)..(2014): n is a, c, g, or t
  misc_feature (2052)..(2054): n is a, c, g, or t
  misc_feature (2057)..(2070): n is a, c, g, or t
  misc_feature (2072)..(2074): n is a, c, g, or t
  misc_feature (2076)..(2076): n is a, c, g, or t
  misc_feature (2078)..(2080): n is a, c, g, or t
  misc_feature (2117)..(2118): n is a, c, g, or t
  misc_feature (2120)..(2124): n is a, c, g, or t
  misc_feature (2127)..(2129): n is a, c, g, or t
  misc_feature (2131)..(2131): n is a, c, g, or t
  misc_feature (2133)..(2141): n is a, c, g, or t
  misc_feature (2143)..(2146): n is a, c, g, or t
  misc_feature (2183)..(2186): n is a, c, g, or t
  misc_feature (2188)..(2191): n is a, c, g, or t
  misc_feature (2193)..(2193): n is a, c, g, or t
  misc_feature (2196)..(2204): n is a, c, g, or t
  misc_feature (2207)..(2212): n is a, c, g, or t
  misc_feature (2249)..(2278): n is a, c, g, or t
  misc_feature (2318)..(2318): n is a, c, g, or t
  misc_feature (2320)..(2329): n is a, c, g, or t
  misc_feature (2331)..(2336): n is a, c, g, or t
  misc_feature (2339)..(2344): n is a, c, g, or t
  misc_feature (2382)..(2383): n is a, c, g, or t
  misc_feature (2385)..(2386): n is a, c, g, or t
  misc_feature (2388)..(2389): n is a, c, g, or t
  misc_feature (2394)..(2399): n is a, c, g, or t
  misc_feature (2401)..(2410): n is a, c, g, or t
  misc_feature (2430)..(2430): n is a, c, g, or t
  misc_feature (2432)..(2434): n is a, c, g, or t
  misc_feature (2436)..(2436): n is a, c, g, or t
  misc_feature (2439)..(2439): n is a, c, g, or t
  misc_feature (2441)..(2441): n is a, c, g, or t
  misc_feature (2448)..(2453): n is a, c, g, or t
  misc_feature (2455)..(2458): n is a, c, g, or t
  misc_feature (2460)..(2461): n is a, c, g, or t
  misc_feature (2463)..(2470): n is a, c, g, or t
  misc_feature (2472)..(2474): n is a, c, g, or t
  misc_feature (2476)..(2476): n is a, c, g, or t
  misc_feature (2478)..(2478): n is a, c, g, or t
  misc_feature (2482)..(2483): n is a, c, g, or t
  misc_feature (2487)..(2488): n is a, c, g, or t
  misc_feature (2492)..(2492): n is a, c, g, or t
  misc_feature (2494)..(2495): n is a, c, g, or t
  misc_feature (2498)..(2498): n is a, c, g, or t
  misc_feature (2502)..(2505): n is a, c, g, or t
  misc_feature (2508)..(2508): n is a, c, g, or t
  misc_feature (2512)..(2514): n is a, c, g, or t
  misc_feature (2516)..(2518): n is a, c, g, or t
  misc_feature (2520)..(2523): n is a, c, g, or t
  misc_feature (2525)..(2528): n is a, c, g, or t
  misc_feature (2530)..(2540): n is a, c, g, or t
  misc_feature (2542)..(2544): n is a, c, g, or t
  misc_feature (2548)..(2549): n is a, c, g, or t
  misc_feature (2552)..(2553): n is a, c, g, or t
  misc_feature (2558)..(2562): n is a, c, g, or t
  misc_feature (2568)..(2571): n is a, c, g, or t
  misc_feature (2574)..(2575): n is a, c, g, or t
  misc_feature (2579)..(2587): n is a, c, g, or t
  misc_feature (2589)..(2591): n is a, c, g, or t
  misc_feature (2593)..(2602): n is a, c, g, or t
  misc_feature (2607)..(2607): n is a, c, g, or t
  misc_feature (2648)..(2649): n is a, c, g, or t
  misc_feature (2657)..(2657): n is a, c, g, or t
  misc_feature (2659)..(2659): n is a, c, g, or t
  misc_feature (2663)..(2664): n is a, c, g, or t
  misc_feature (2668)..(2670): n is a, c, g, or t
  misc_feature (2673)..(2673): n is a, c, g, or t
  misc_feature (2713)..(2714): n is a, c, g, or t
  misc_feature (2721)..(2721): n is a, c, g, or t
  misc_feature (2724)..(2724): n is a, c, g, or t
  misc_feature (2728)..(2728): n is a, c, g, or t
  misc_feature (2730)..(2730): n is a, c, g, or t
  misc_feature (2737)..(2739): n is a, c, g, or t
  misc_feature (2779)..(2779): n is a, c, g, or t
  misc_feature (2784)..(2785): n is a, c, g, or t
  misc_feature (2787)..(2787): n is a, c, g, or t
  misc_feature (2793)..(2794): n is a, c, g, or t
  misc_feature (2796)..(2796): n is a, c, g, or t
  misc_feature (2798)..(2798): n is a, c, g, or t
  misc_feature (2800)..(2801): n is a, c, g, or t
  misc_feature (2804)..(2806): n is a, c, g, or t
  misc_feature (2826)..(2826): n is a, c, g, or t
  misc_feature (2828)..(2835): n is a, c, g, or t
  misc_feature (2837)..(2839): n is a, c, g, or t
  misc_feature (2842)..(2843): n is a, c, g, or t
  misc_feature (2845)..(2850): n is a, c, g, or t
  misc_feature (2852)..(2853): n is a, c, g, or t
  misc_feature (2855)..(2855): n is a, c, g, or t
  misc_feature (2857)..(2857): n is a, c, g, or t
  misc_feature (2859)..(2859): n is a, c, g, or t
  misc_feature (2861)..(2862): n is a, c, g, or t
  misc_feature (2864)..(2869): n is a, c, g, or t
  misc_feature (2872)..(2872): n is a, c, g, or t
  misc_feature (2874)..(2875): n is a, c, g, or t
  misc_feature (2878)..(2879): n is a, c, g, or t
  misc_feature (2882)..(2884): n is a, c, g, or t
  misc_feature (2888)..(2892): n is a, c, g, or t
  misc_feature (2894)..(2901): n is a, c, g, or t
  misc_feature (2903)..(2905): n is a, c, g, or t
  misc_feature (2908)..(2908): n is a, c, g, or t
  misc_feature (2911)..(2913): n is a, c, g, or t
  misc_feature (2915)..(2919): n is a, c, g, or t
  misc_feature (2921)..(2925): n is a, c, g, or t
  misc_feature (2927)..(2929): n is a, c, g, or t
  misc_feature (2932)..(2932): n is a, c, g, or t
  misc_feature (2935)..(2935): n is a, c, g, or t
  misc_feature (2937)..(2941): n is a, c, g, or t
  misc_feature (2944)..(2945): n is a, c, g, or t
  misc_feature (2948)..(2950): n is a, c, g, or t
  misc_feature (2954)..(2958): n is a, c, g, or t
  misc_feature (2960)..(2967): n is a, c, g, or t
  misc_feature (2969)..(2971): n is a, c, g, or t
  misc_feature (2974)..(2974): n is a, c, g, or t
  misc_feature (2977)..(2977): n is a, c, g, or t
  misc_feature (2980)..(2982): n is a, c, g, or t
  misc_feature (2988)..(2993): n is a, c, g, or t
  misc_feature (2995)..(2996): n is a, c, g, or t
  misc_feature (2999)..(3003): n is a, c, g, or t
  misc_feature (3005)..(3007): n is a, c, g, or t
  misc_feature (3010)..(3011): n is a, c, g, or t
  misc_feature (3014)..(3016): n is a, c, g, or t
  misc_feature (3020)..(3024): n is a, c, g, or t
  misc_feature (3026)..(3033): n is a, c, g, or t
  misc_feature (3035)..(3037): n is a, c, g, or t
  misc_feature (3040)..(3042): n is a, c, g, or t
  misc_feature (3044)..(3044): n is a, c, g, or t
  misc_feature (3047)..(3056): n is a, c, g, or t
  misc_feature (3059)..(3059): n is a, c, g, or t
  misc_feature (3061)..(3071): n is a, c, g, or t
  misc_feature (3073)..(3073): n is a, c, g, or t
  misc_feature (3076)..(3077): n is a, c, g, or t
  misc_feature (3080)..(3082): n is a, c, g, or t
  misc_feature (3086)..(3090): n is a, c, g, or t
  misc_feature (3092)..(3099): n is a, c, g, or t
  misc_feature (3101)..(3103): n is a, c, g, or t
  misc_feature (3106)..(3107): n is a, c, g, or t
  misc_feature (3109)..(3112): n is a, c, g, or t
  misc_feature (3115)..(3124): n is a, c, g, or t
  misc_feature (3126)..(3130): n is a, c, g, or t
  misc_feature (3132)..(3132): n is a, c, g, or t
  misc_feature (3134)..(3135): n is a, c, g, or t
  misc_feature (3137)..(3139): n is a, c, g, or t
  misc_feature (3142)..(3143): n is a, c, g, or t
  misc_feature (3146)..(3148): n is a, c, g, or t
  misc_feature (3152)..(3156): n is a, c, g, or t
  misc_feature (3158)..(3165): n is a, c, g, or t
  misc_feature (3167)..(3169): n is a, c, g, or t
  misc_feature (3172)..(3174): n is a, c, g, or t
  misc_feature (3176)..(3177): n is a, c, g, or t
  misc_feature (3182)..(3183): n is a, c, g, or t
  misc_feature (3186)..(3192): n is a, c, g, or t
  misc_feature (3194)..(3195): n is a, c, g, or t
  misc_feature (3198)..(3199): n is a, c, g, or t
  misc_feature (3201)..(3203): n is a, c, g, or t
  misc_feature (3205)..(3205): n is a, c, g, or t
  misc_feature (3208)..(3209): n is a, c, g, or t
  misc_feature (3212)..(3214): n is a, c, g, or t
  misc_feature (3218)..(3222): n is a, c, g, or t
  misc_feature (3224)..(3231): n is a, c, g, or t
  misc_feature (3233)..(3235): n is a, c, g, or t
  misc_feature (3238)..(3239): n is a, c, g, or t
  misc_feature (3241)..(3246): n is a, c, g, or t
  misc_feature (3248)..(3251): n is a, c, g, or t
  misc_feature (3253)..(3262): n is a, c, g, or t
  misc_feature (3264)..(3264): n is a, c, g, or t
  misc_feature (3266)..(3271): n is a, c, g, or t
  misc_feature (3274)..(3275): n is a, c, g, or t
  misc_feature (3278)..(3280): n is a, c, g, or t
  misc_feature (3284)..(3288): n is a, c, g, or t
  misc_feature (3290)..(3297): n is a, c, g, or t
  misc_feature (3299)..(3301): n is a, c, g, or t
  misc_feature (3304)..(3305): n is a, c, g, or t
  misc_feature (3307)..(3308): n is a, c, g, or t
  misc_feature (3310)..(3311): n is a, c, g, or t
  misc_feature (3313)..(3314): n is a, c, g, or t
  misc_feature (3316)..(3317): n is a, c, g, or t
  misc_feature (3319)..(3321): n is a, c, g, or t
  misc_feature (3323)..(3326): n is a, c, g, or t
  misc_feature (3328)..(3328): n is a, c, g, or t
  misc_feature (3330)..(3332): n is a, c, g, or t
  misc_feature (3334)..(3337): n is a, c, g, or t
  misc_feature (3340)..(3341): n is a, c, g, or t
  misc_feature (3344)..(3346): n is a, c, g, or t
  misc_feature (3350)..(3353): n is a, c, g, or t
  misc_feature (3356)..(3356): n is a, c, g, or t
  misc_feature (3358)..(3363): n is a, c, g, or t
  misc_feature (3365)..(3370): n is a, c, g, or t
  misc_feature (3372)..(3375): n is a, c, g, or t
  misc_feature (3377)..(3378): n is a, c, g, or t
  misc_feature (3380)..(3393): n is a, c, g, or t
  misc_feature (3395)..(3396): n is a, c, g, or t
  misc_feature (3398)..(3399): n is a, c, g, or t
  misc_feature (3401)..(3405): n is a, c, g, or t
  misc_feature (3407)..(3407): n is a, c, g, or t
  misc_feature (3409)..(3410): n is a, c, g, or t
  misc_feature (3412)..(3428): n is a, c, g, or t
  misc_feature (3430)..(3433): n is a, c, g, or t
  misc_feature (3436)..(3440): n is a, c, g, or t
  misc_feature (3445)..(3445): n is a, c, g, or t
  misc_feature (3449)..(3450): n is a, c, g, or t
  misc_feature (3452)..(3464): n is a, c, g, or t
  misc_feature (3467)..(3469): n is a, c, g, or t
  misc_feature (3472)..(3474): n is a, c, g, or t
  misc_feature (3477)..(3478): n is a, c, g, or t
  misc_feature (3481)..(3492): n is a, c, g, or t
  misc_feature (3494)..(3494): n is a, c, g, or t
  misc_feature (3496)..(3497): n is a, c, g, or t
  misc_feature (3500)..(3503): n is a, c, g, or t
  misc_feature (3505)..(3505): n is a, c, g, or t
  misc_feature (3507)..(3513): n is a, c, g, or t
  misc_feature (3515)..(3518): n is a, c, g, or t
  misc_feature (3520)..(3521): n is a, c, g, or t
  misc_feature (3523)..(3524): n is a, c, g, or t
  misc_feature (3526)..(3531): n is a, c, g, or t
  misc_feature (3533)..(3534): n is a, c, g, or t
  misc_feature (3537)..(3541): n is a, c, g, or t
  misc_feature (3543)..(3546): n is a, c, g, or t
  misc_feature (3548)..(3548): n is a, c, g, or t
  misc_feature (3550)..(3556): n is a, c, g, or t
  misc_feature (3558)..(3561): n is a, c, g, or t
  misc_feature (3563)..(3563): n is a, c, g, or t
  misc_feature (3565)..(3568): n is a, c, g, or t
  misc_feature (3570)..(3574): n is a, c, g, or t
  misc_feature (3579)..(3580): n is a, c, g, or t
  misc_feature (3583)..(3587): n is a, c, g, or t
  misc_feature (3589)..(3593): n is a, c, g, or t
  misc_feature (3595)..(3598): n is a, c, g, or t
  misc_feature (3600)..(3600): n is a, c, g, or t
  misc_feature (3602)..(3602): n is a, c, g, or t
  misc_feature (3604)..(3607): n is a, c, g, or t
  misc_feature (3610)..(3611): n is a, c, g, or t
  misc_feature (3613)..(3614): n is a, c, g, or t
  misc_feature (3616)..(3634): n is a, c, g, or t
  misc_feature (3636)..(3638): n is a, c, g, or t
  misc_feature (3641)..(3644): n is a, c, g, or t
  misc_feature (3646)..(3646): n is a, c, g, or t
  misc_feature (3648)..(3648): n is a, c, g, or t
gggaagcgaattatgggattcagaacagttgtcattaccaacccgtgtaagctaacgtataaaaatgattatttaatcatacgtggagaagatgtgaatatgatacatctttccgagatatcaacgctgttgatcgataccacaatggtatcgatcacagcttacctcctgtgtgaactggtaaaaaataagattaaagttgttttttgtgatgagcgtagaaatcctgtcagtgaattaattccatactatggctgtcacaatagcagtaaacgggttatgaaccagattctttgggatgattattataaaaaagcagtatggacagctattgtgcggcaaaaaataaaaaatcaggcattattgttgaaagcattagggaaacctgaatatgccaaattggagggatatatagaggaactggaatttttcgatgtaaccaatcgggaaggccatgctgcaaaagtatacttgaacagtttatttgggaaagatttttgccgagaagatccgaatgacattaatgctgcgctaaattatggatatgcggttatcctgtcaactttcaataaagagattgtgagtaagggttaccttacgcaacttgggattaggcataaaaatgaatttaacttttttaacttatcctgtgatttaatggagccctttcgtgtgctggttgatcatctggtttatatacatcaaacagagtattttgatagcaactacaagctgaaactggtagagatattaaatcagccggttcgcctagggggacgggaaaatatattaatgaatgcgattcagatttatatcgaaagtgtagttaaggccattgagacgaaagaattaaatcaattgttattatatgagtttgcatgagagagcgttttatgagaatattaatcttttttgatttgccggtagaaacatctgaggataggaaagagtatcgacgttttcgaaaattcctcataaaagagggtttcgtgatgatgcaggagtcggtctattccaaacttgccctcaatggttcggcgctggatttaattgtgaacaaaattaaacgggaaaagccgaaagagggcttggttcagattttgaatattacggaaaagcaatttgcttccatcattaatatctgtggcgaaaataaacagaatgtgattgagtctgcttcgaggttggttgttttatgaaactgcggattttcccattggaaaatgagataatttttggggattgggttaatgttctggagattaacaatcctaaactcttttcaaacattgtgtggagcattgatgccattattaatggggagaagggtaaggagcagatagttgccatcgatgaaacgggaattgttgatatgactaaagaatgcttgttattgatcgatccgcttcatttggattttgggcaaaaaaggttttccagtaaattgcttcaaatgatcgaagaaatgtataataatgattatgagctgaaggaaaagattttgcattatttatcggagataaactatcttttccaatctatttttgatgaattttcctttgacatctcttataaaaatgccggagttcaggattatctaaaaatgatttcaccgaagatcgatatgggaggaaacagaacaccgcttgagaatttatttgggttaattgatgtaataacagagtttagactggtcaaacttttatttttgtgtaatatgaaaagtttttttacgaataaagagcttgttgaactgtacaaatattcattatataaaaaaataaatcttttaatggtggaacctcgctgtgttagtgaattgctggaatacgaaaggaaggtggtggttgatgaagagtttgatgattttcttgtgggtcattaaaccattcaaaatggccggttttttcgttgaaaacaaatctctgaagcctataaaagatttgaggttttagagttgtgtcattctgaatggtattaaaacnnnnnnnnnngnnntnannnnnnnnnannngttttagagttgtgtcattctgaatggtattaaaaccnnnaannnnnnnnnnnnnncnnnancnnngttttagagttgtgtcattctgaatggtattaaaacnnannnnntgnnntngnnnnnnnnntnnnngttttagagttgtgtcattctgaatggtattaaaacnnnngnnnngngannnnnnnnnaannnnnngttttagagttgtgtcattctgaatggtattaaaacnnnnnnnnnnnnnnnnnnnnnnnnnnnnnngttttagagttgtgtcattctgaatggtattaaaacccanannnnnnnnnncnnnnnnatnnnnnngttttagagttgtgtcattctgaatggtattaaaacannannannggctnnnnnngnnnnnnnnnngttttagagttgtgtcattntnnntngtntnaaaacannnnnncnnnntnngnnnnnnnncnnntngntttnnagtnntgtnannctnaatnnnnttnaaannnannngnnnnannnnannnnnnnnnnnannntttnnagnngtgtnnnnntgaatnnnnttnnaacnnnnnnnnngnnntnnnnnnnnnntaacnagttttagagttgtgtcattctgaatggtattaaaacactnnagaacatntntgtnntgcnnncancgttttagagttgtgtcattctgaatggtattaaaacacnnggtacgnttngaantntcacggnnnggttttagagttgtgtcattctgaatggtattaaaacacnatttnnanaatcanncnangnntcnnngttttagagttgtgtcattntnnnnnnnntnnnaanncnnnnnntnnangntntnnannnnnngcngnnttnnagnnntgtnnnnntnnnnnnnntnnnaanacnnnannnnntnnnnntnnntcntcntnnnnnttnnagnnntgtnnnnntnnnnnnnntnnnaanacnagnnnatgttnnnnnngnngannnnntnnnttnnagnnntgtnnnnntnnnnnnnntnnnaannnangannnnnnnnnnagncnnnnnnnnnnntnttnnagnnntgtnnnnntnnnnnnnntnnnaanncnnnnggnnnnnnnnnntnnnnncnanntnnnttnnagnnntgtnnnnntnnnnnnnntnnnaannntnnatttnntgnnnnnnnanntgnncnnntnttnnagnnntgtnnnnntnnnnnnnntnnnaanncnnnnnncnnnntnnnnnnnnnngnannnnnnttnnagnnntgtnnnnntnnnnnnnntnnnaanncnncnntnntnnannncnnnncncnnncnnnnttnnagnnntgtnnnnttntnnnnnntnnnnnnannnntnnannnnnnnnnnnnnntnngnncnnnnntnanngnnnnnnnnnnnnnnnnngnnnnaannnnnacccnattnnannnnnnnnnnnnnatnnnttnnnganntgnnnnnnnnnnnntngnnttnnnncnannnnnnnannnnannanngnnnnnngnngtnnnnnannnntntnnnnnnnannnntntnnnnannnnnatcannatnnnnntnnnnntnnnnangntnnnnagnngnntnnnnnnnnnnnnnnnnnnnannnaannnnananattaatggccattacgaagttttagagttgtgtcattctgaatggtattaaaactgaaagcattatcattattgagcttggcatgttttagagttgtgtcattctgaatggtattaaaacgcggtttaagctgttcgaacagcaaatcaagttttagagttgtgtcattctgaatggtattaaaactacaatgcatgatcttgggatgtgttccgagttttagagttgtgtcattctgaatggtattaaaacaaaaatggaaagagataatcaaggattatagttttagagttgtgtcattctgaatggtattaaaaccgataatacagtcaccatccactggaataagttt

SEQ ID NO: 1482 - DNA, 4000 bp, Escherichia coli
  misc_feature (33)..(33): n is a, c, g, or t
  misc_feature (237)..(237): n is a, c, g, or t
  misc_feature (373)..(373): n is a, c, g, or t
  misc_feature (448)..(448): n is a, c, g, or t
  misc_feature (469)..(469): n is a, c, g, or t
  misc_feature (481)..(481): n is a, c, g, or t
  misc_feature (519)..(519): n is a, c, g, or t
  misc_feature (553)..(553): n is a, c, g, or t
  misc_feature (640)..(640): n is a, c, g, or t
  misc_feature (673)..(673): n is a, c, g, or t
  misc_feature (688)..(688): n is a, c, g, or t
  misc_feature (691)..(691): n is a, c, g, or t
  misc_feature (781)..(781): n is a, c, g, or t
  misc_feature (796)..(796): n is a, c, g, or t
  misc_feature (853)..(853): n is a, c, g, or t
  misc_feature (862)..(862): n is a, c, g, or t
  misc_feature (895)..(895): n is a, c, g, or t
  misc_feature (925)..(925): n is a, c, g, or t
  misc_feature (994)..(994): n is a, c, g, or t
  misc_feature (1035)..(1035): n is a, c, g, or t
  misc_feature (1078)..(1078): n is a, c, g, or t
  misc_feature (1093)..(1093): n is a, c, g, or t
  misc_feature (1105)..(1105): n is a, c, g, or t
  misc_feature (1141)..(1141): n is a, c, g, or t
  misc_feature (1144)..(1144): n is a, c, g, or t
  misc_feature (1207)..(1207): n is a, c, g, or t
  misc_feature (1213)..(1213): n is a, c, g, or t
  misc_feature (1222)..(1222): n is a, c, g, or t
  misc_feature (1276)..(1276): n is a, c, g, or t
  misc_feature (1284)..(1284): n is a, c, g, or t
  misc_feature (1342)..(1342): n is a, c, g, or t
  misc_feature (1351)..(1351): n is a, c, g, or t
  misc_feature (1363)..(1363): n is a, c, g, or t
  misc_feature (1375)..(1375): n is a, c, g, or t
  misc_feature (1411)..(1411): n is a, c, g, or t
  misc_feature (1441)..(1441): n is a, c, g, or t
  misc_feature (1770)..(1770): n is a, c, g, or t
  misc_feature (1821)..(1821): n is a, c, g, or t
  misc_feature (2009)..(2009): n is a, c, g, or t
  misc_feature (2352)..(2352): n is a, c, g, or t
  misc_feature (3505)..(3505): n is a, c, g, or t
  misc_feature (3976)..(3976): n is a, c, g, or t
gtaagattatcaacaatggttaaatgaggaaanaggttaaagtgctggaataccatagacacttcacttctaatttgtctaattttttgtgcgtcatcggtcaattctgttccagataccactatagagccctcttggaatttttctaagaaattaacacaccttatcagagttgatttaccacttcctgaaggcccacagacaacaattatttcaccttcctttatctctagattnatgttcttgagggcatgaaagtctccataccacttatttaagtcagatatttctatgatattggttttatttttatcgttgctcattttcttataacctttagtttttattttcagtattgaatcgtatttctaanttctttgagtagcgggacattgtatatagtatagcccacataacaatagtaacgaatacaaagccttctgtttcnctggcaagccaatatgggtcnttactagttagnttgaccatagcaagcatatcgaatagtccaataatcanaacaagcgttgtatctttaaataaagaaattgangagccaacaatatttggtattgatatttttaatgcttgtggaagaataattagtgcgtttttttggaaataactcaagcctattgcntcagctgcctcatattgacctcttggaatagcntgaagccctcctctnacnacttcagcaaagtatgcagcttgaaaaagagcaataccgataagcgctcttaagagcttatcaaaataatttcctgactctaagaatagngggagaacaaaagangccataaacaaaatagtgattaatggcacagctctaataaactcaataaataaagtngaaaatagnttgattacctttaaatctgattgtcttcctagngctagaaggactcctattggaaaagaaacnataatccctactgatgcaataattaatgtcagcaataagccgccccattgatcagttgaaacaggcatnaatattccaaagccaccagcaattaaaacataggaaaccantgggtaaaagatgattaatgataaagtgactctatttttgtanttatagttttttacnagcgggactatnacaaatagcaggccagttagtgcaaatactgtattnggnctccaggtctctgttcgaggatagaatccataggtatacatgtaaagcttttcataaatatanggccancaagccccnactctgccacagttttgattagttgccatttcctcactaaactttatttcaaanccaaaaangtttacagttccaaaactaaagcttgcattaaagaacatccagtcaagcaatggaggnatcataatntaaagcaaatanagcgatgcaagngtaagggctgaatttacccatgaagagaagagattngttctaagccatacaagtgcaccaatttgngatattggcggctttctagtagcttgttggtcaaatactggcataattatcttccctgaatttccatctttttattgacatagttcagcaataaagagataaatagtgaaatgactagataaacaagcatcgccatggctagaatttcgactgcctggccaacttgatttaaaacagttcctccaaaagtactcattaactctggatagccaattacggtagctaaagaagagttttttgtaagattcaaatactggttaattgttggcggtattgcaaccctaagggcttgtggcaaaataataagtttaagcgattgaacgggtgtnaagccaatcgcagctgcagcctctttttgtcccttgtcaactgcctcaatncctgatcgaatggcctcagcaatataggttgcagtataaacactaagagcaaacgttaatgctaaaaactctggcacaactgccattccaccctttaagttaaatttacctagaacggcaaagtcaaatgccagtggagatccaaataccagataaacaagaattggcagaccaagaattaaaccaantgaatatggccatgtactggtgtgaataccagttagttcatgcttcttcttataggatttcttaataaaataagctgcaatgattccaatgatgaatgcaaatactacgtataagaagccctcttcagggattggtttgggcagatacaaacctcgttgatttagaaatgcaagatcaaaaaatgatagactttgctttgggtgcggaaaaacattaataaataagttataccaaaataaaatttgaagaagtataggaatgtttctaaagagctctatgtagccccctgctagcttagcaacaagataattatttgaaagtcttgcgataccaataagaagncctattagcgtcgataaaatgattccaataaaggcgacaacaagtgtgttaattaatcccacataaaaaacagttaagtttgaagattcaggggtgtagtcaaccgcaatattgcctaaaaaagggagtatgtcaaagcctgctctgttttttaggaatgtaaatccagtttggatgcctctatcttcaatgttttgaaagaggtttcctattgctgtataaaaaagccctattaccaggacaaaggtaattacttggaataaaaaagacctgacttcgttgttataaagtagatctcgaaagtttgatcctctgtgttgagattttcctaaggattcgaggataagttttttcataaattgctaaaaatttgaatatgaatattttactaaatatagtgtttctaagtttgaaaaaatcaaaaaaaaaccagactgctaaagtatagcagtctggtttaggttctaactagataattgcttatctaaatggaggtgagtaaagaataccaccttgtgaccatagtgcgttaacaccacgagcaataccaattggagtagaaagtccaatgttacgctcgaagctttcagcatagttacctacttgcttaacgatttggtaagtccagtctggagtcagaccaacatactcatgagtgcttcctgaacgacccattaagcgctcacgctctgggttgttagaaacatcatcaacgttaccactgttaacaccaatttcttctgcagtaatcatagcgtttaaagaccatcttacaatgttgaaccattgatcgtcaccttgacgaacaacaggacctagaggctctttagaaatgatttctggaagtactacatgctctgaaggatcatttgcacctgcacgcattgagtaaagaccagaagcatcagttgttaatacatcacaacgtccagcatcatagttagttagagtttgagcattagtatctgatacaactgagttgtactcgattccatttgctttaccccagtcagctaagttcaattcagtagtagtacctgcttgaatacaaatagcagcaccacttaattccatagcactagaaacacctagagaagacttaaccataaagccttgtccgtcgtagtagttaacaccagcaaagttcaatccnaatgaagcgtcacgagtaattgtccaagtcgtatttctagacaacatatcgatctcaccagattgtagcgcagtgaatctttccttagcagttaatggtacaaatttaactttagttgcatcgccaagcgttgcagcagcaacagcacgacaaacatcaacgtcaataccagtccatgtaccagacgagtcagctgaagaaaaaccagcaagacctttagagacaccacaagatacgtgtcctttagcctgaacgtcgctcaaagtagaagcttgtacactaagtgcaccaacaactaacaatgaagcagcagacaattttaataattgtttcatatatatctccttaatgagtttcaaagtataaaaaaccttcacaattgaatgaggttcacagaaaattttaacactagttaaacaagtaatacaaattaattattaaaaaaaaatttaaatcaattcaactagcaangcttgatttttgctattaaagcga

SEQ ID NO: 1483 - DNA, 4000 bp, Escherichia coli
  misc_feature (1)..(2): n is a, c, g, or t
  misc_feature (5)..(5): n is a, c, g, or t
  misc_feature (8)..(12): n is a, c, g, or t
  misc_feature (14)..(14): n is a, c, g, or t
  misc_feature (16)..(20): n is a, c, g, or t
  misc_feature (22)..(31): n is a, c, g, or t
  misc_feature (34)..(34): n is a, c, g, or t
  misc_feature (36)..(37): n is a, c, g, or t
  misc_feature (39)..(45): n is a, c, g, or t
  misc_feature (48)..(52): n is a, c, g, or t
  misc_feature (55)..(61): n is a, c, g, or t
  misc_feature (63)..(77): n is a, c, g, or t
  misc_feature (80)..(82): n is a, c, g, or t
  misc_feature (84)..(94): n is a, c, g, or t
  misc_feature (96)..(108): n is a, c, g, or t
  misc_feature (110)..(112): n is a, c, g, or t
  misc_feature (114)..(125): n is a, c, g, or t
  misc_feature (127)..(148): n is a, c, g, or t
  misc_feature (150)..(152): n is a, c, g, or t
  misc_feature (154)..(154): n is a, c, g, or t
  misc_feature (157)..(157): n is a, c, g, or t
  misc_feature (159)..(161): n is a, c, g, or t
  misc_feature (163)..(165): n is a, c, g, or t
  misc_feature (169)..(170): n is a, c, g, or t
  misc_feature (172)..(178): n is a, c, g, or t
  misc_feature (180)..(201): n is a, c, g, or t
  misc_feature (204)..(204): n is a, c, g, or t
  misc_feature (207)..(223): n is a, c, g, or t
  misc_feature (225)..(225): n is a, c, g, or t
  misc_feature (227)..(233): n is a, c, g, or t
  misc_feature (235)..(238): n is a, c, g, or t
  misc_feature (240)..(241): n is a, c, g, or t
  misc_feature (243)..(245): n is a, c, g, or t
  misc_feature (247)..(253): n is a, c, g, or t
  misc_feature (255)..(256): n is a, c, g, or t
  misc_feature (258)..(258): n is a, c, g, or t
  misc_feature (260)..(260): n is a, c, g, or t
  misc_feature (262)..(266): n is a, c, g, or t
  misc_feature (269)..(274): n is a, c, g, or t
  misc_feature (276)..(276): n is a, c, g, or t
  misc_feature (280)..(281): n is a, c, g, or t
  misc_feature (283)..(291): n is a, c, g, or t
  misc_feature (294)..(299): n is a, c, g, or t
  misc_feature (301)..(307): n is a, c, g, or t
  misc_feature (309)..(312): n is a, c, g, or t
  misc_feature (316)..(323): n is a, c, g, or t
  misc_feature (325)..(325): n is a, c, g, or t
  misc_feature (328)..(333): n is a, c, g, or t
  misc_feature (335)..(341): n is a, c, g, or t
  misc_feature (343)..(349): n is a, c, g, or t
  misc_feature (352)..(352): n is a, c, g, or t
  misc_feature (354)..(365): n is a, c, g, or t
  misc_feature (367)..(375): n is a, c, g, or t
  misc_feature (378)..(381): n is a, c, g, or t
  misc_feature (386)..(386): n is a, c, g, or t
  misc_feature (390)..(391): n is a, c, g, or t
  misc_feature (394)..(396): n is a, c, g, or t
  misc_feature (400)..(403): n is a, c, g, or t
  misc_feature (409)..(409): n is a, c, g, or t
  misc_feature (412)..(413): n is a, c, g, or t
  misc_feature (416)..(416): n is a, c, g, or t
  misc_feature (419)..(424): n is a, c, g, or t
  misc_feature (427)..(438): n is a, c, g, or t
  misc_feature (442)..(448): n is a, c, g, or t
  misc_feature (457)..(461): n is a, c, g, or t
  misc_feature (464)..(464): n is a, c, g, or t
  misc_feature (469)..(469): n is a, c, g, or t
  misc_feature (568)..(569): n is a, c, g, or t
  misc_feature (613)..(613): n is a, c, g, or t
  misc_feature (1062)..(1062): n is a, c, g, or t
  misc_feature (1137)..(1137): n is a, c, g, or t
  misc_feature (1425)..(1425): n is a, c, g, or t
  misc_feature (2484)..(2486): n is a, c, g, or t
  misc_feature (2489)..(2491): n is a, c, g, or t
  misc_feature (2493)..(2493): n is a, c, g, or t
  misc_feature (2495)..(2497): n is a, c, g, or t
  misc_feature (2499)..(2500): n is a, c, g, or t
  misc_feature (2503)..(2503): n is a, c, g, or t
  misc_feature (2506)..(2506): n is a, c, g, or t
  misc_feature (2508)..(2510): n is a, c, g, or t
  misc_feature (2516)..(2517): n is a, c, g, or t
  misc_feature (2521)..(2522): n is a, c, g, or t
  misc_feature (2528)..(2532): n is a, c, g, or t
  misc_feature (2538)..(2540): n is a, c, g, or t
  misc_feature (2542)..(2542): n is a, c, g, or t
  misc_feature (2547)..(2547): n is a, c, g, or t
  misc_feature (2549)..(2552): n is a, c, g, or t
  misc_feature (2554)..(2554): n is a, c, g, or t
  misc_feature (2557)..(2566): n is a, c, g, or t
  misc_feature (2569)..(2569): n is a, c, g, or t
  misc_feature (2572)..(2574): n is a, c, g, or t
  misc_feature (2576)..(2577): n is a, c, g, or t
  misc_feature (2579)..(2580): n is a, c, g, or t
  misc_feature (2582)..(2582): n is a, c, g, or t
  misc_feature (2584)..(2585): n is a, c, g, or t
  misc_feature (2587)..(2587): n is a, c, g, or t
  misc_feature (2590)..(2590): n is a, c, g, or t
  misc_feature (2595)..(2595): n is a, c, g, or t
  misc_feature (2599)..(2600): n is a, c, g, or t
  misc_feature (2602)..(2602): n is a, c, g, or t
  misc_feature (2605)..(2607): n is a, c, g, or t
  misc_feature (2611)..(2615): n is a, c, g, or t
  misc_feature (2617)..(2617): n is a, c, g, or t
  misc_feature (2619)..(2619): n is a, c, g, or t
  misc_feature (2621)..(2622): n is a, c, g, or t
  misc_feature (2625)..(2626): n is a, c, g, or t
  misc_feature (2628)..(2628): n is a, c, g, or t
  misc_feature (2630)..(2630): n is a, c, g, or t
  misc_feature (2633)..(2633): n is a, c, g, or t
  misc_feature (2637)..(2643): n is a, c, g, or t
  misc_feature (2645)..(2648): n is a, c, g, or t
  misc_feature (2650)..(2652): n is a, c, g, or t
  misc_feature (2656)..(2657): n is a, c, g, or t
  misc_feature (2661)..(2662): n is a, c, g, or t
  misc_feature (2665)..(2666): n is a, c, g, or t
  misc_feature (2672)..(2673): n is a, c, g, or t
  misc_feature (2675)..(2675): n is a, c, g, or t
  misc_feature (2677)..(2677): n is a, c, g, or t
  misc_feature (2680)..(2680): n is a, c, g, or t
  misc_feature (2682)..(2684): n is a, c, g, or t
  misc_feature (2686)..(2691): n is a, c, g, or t
  misc_feature (2693)..(2693): n is a, c, g, or t
  misc_feature (2696)..(2696): n is a, c, g, or t
  misc_feature (2698)..(2698): n is a, c, g, or t
  misc_feature (2701)..(2702): n is a, c, g, or t
  misc_feature (2704)..(2705): n is a, c, g, or t
  misc_feature (2708)..(2708): n is a, c, g, or t
  misc_feature (2712)..(2715): n is a, c, g, or t
  misc_feature (2718)..(2718): n is a, c, g, or t
  misc_feature (2722)..(2722): n is a, c, g, or t
  misc_feature (2724)..(2726): n is a, c, g, or t
  misc_feature (2728)..(2728): n is a, c, g, or t
  misc_feature (2730)..(2731): n is a, c, g, or t
  misc_feature (2734)..(2735): n is a, c, g, or t
  misc_feature (2740)..(2744): n is a, c, g, or t
  misc_feature (2748)..(2749): n is a, c, g, or t
  misc_feature (2751)..(2752): n is a, c, g, or t
  misc_feature (2754)..(2756): n is a, c, g, or t
  misc_feature (2758)..(2760): n is a, c, g, or t
  misc_feature (2764)..(2764): n is a, c, g, or t
  misc_feature (2768)..(2769): n is a, c, g, or t
  misc_feature (2771)..(2771): n is a, c, g, or t
  misc_feature (2774)..(2774): n is a, c, g, or t
  misc_feature (2776)..(2776): n is a, c, g, or t
  misc_feature (2779)..(2781): n is a, c, g, or t
  misc_feature (2783)..(2783): n is a, c, g, or t
  misc_feature (2785)..(2787): n is a, c, g, or t
  misc_feature (2789)..(2789): n is a, c, g, or t
  misc_feature (2792)..(2796): n is a, c, g, or t
  misc_feature (2798)..(2798): n is a, c, g, or t
  misc_feature (2801)..(2802): n is a, c, g, or t
  misc_feature (2804)..(2806): n is a, c, g, or t
  misc_feature (2808)..(2809): n is a, c, g, or t
  misc_feature (2811)..(2811): n is a, c, g, or t
  misc_feature (2813)..(2814): n is a, c, g, or t
  misc_feature (2816)..(2819): n is a, c, g, or t
  misc_feature (2823)..(2823): n is a, c, g, or t
  misc_feature (2826)..(2827): n is a, c, g, or t
  misc_feature (2829)..(2829): n is a, c, g, or t
  misc_feature (2834)..(2837): n is a, c, g, or t
  misc_feature (2844)..(2850): n is a, c, g, or t
  misc_feature (2852)..(2855): n is a, c, g, or t
  misc_feature (2859)..(2859): n is a, c, g, or t
  misc_feature (2863)..(2865): n is a, c, g, or t
  misc_feature (2868)..(2868): n is a, c, g, or t
  misc_feature (2870)..(2871): n is a, c, g, or t
  misc_feature (2873)..(2873): n is a, c, g, or t
  misc_feature (2880)..(2880): n is a, c, g, or t
  misc_feature (2884)..(2888): n is a, c, g, or t
  misc_feature (2890)..(2898): n is a, c, g, or t
  misc_feature (2900)..(2901): n is a, c, g, or t
  misc_feature (2904)..(2904): n is a, c, g, or t
  misc_feature (2907)..(2908): n is a, c, g, or t
  misc_feature (2910)..(2911): n is a, c, g, or t
  misc_feature (2913)..(2916): n is a, c, g, or t
  misc_feature (2918)..(2918): n is a, c, g, or t
  misc_feature (2920)..(2922): n is a, c, g, or t
  misc_feature (2924)..(2925): n is a, c, g, or t
  misc_feature (2927)..(2927): n is a, c, g, or t
  misc_feature (2930)..(2934): n is a, c, g, or t
  misc_feature (2936)..(2936): n is a, c, g, or t
  misc_feature (2939)..(2940): n is a, c, g, or t
  misc_feature (2942)..(2943): n is a, c, g, or t
  misc_feature (2946)..(2948): n is a, c, g, or t
  misc_feature (2950)..(2950): n is a, c, g, or t
  misc_feature (2952)..(2953): n is a, c, g, or t
  misc_feature (2955)..(2955): n is a, c, g, or t
  misc_feature (2957)..(2963): n is a, c, g, or t
  misc_feature (2965)..(2971): n is a, c, g, or t
  misc_feature (2973)..(2973): n is a, c, g, or t
  misc_feature (2975)..(2978): n is a, c, g, or t
  misc_feature (2982)..(2984): n is a, c, g, or t
  misc_feature (2986)..(2986): n is a, c, g, or t
  misc_feature (2988)..(2993): n is a, c, g, or t
  misc_feature (2995)..(2995): n is a, c, g, or t
  misc_feature (2997)..(3001): n is a, c, g, or t
  misc_feature (3003)..(3003): n is a, c, g, or t
  misc_feature (3005)..(3005): n is a, c, g, or t
  misc_feature (3007)..(3008): n is a, c, g, or t
  misc_feature (3010)..(3014): n is a, c, g, or t
  misc_feature (3017)..(3017): n is a, c, g, or t
  misc_feature (3019)..(3022): n is a, c, g, or t
  misc_feature (3024)..(3024): n is a, c, g, or t
  misc_feature (3029)..(3047): n is a, c, g, or t
  misc_feature (3052)..(3061): n is a, c, g, or t
  misc_feature (3065)..(3066): n is a, c, g, or t
  misc_feature (3068)..(3069): n is a, c, g, or t
  misc_feature (3071)..(3072): n is a, c, g, or t
  misc_feature (3075)..(3080): n is a, c, g, or t
  misc_feature (3083)..(3086): n is a, c, g, or t
  misc_feature (3088)..(3095): n is a, c, g, or t
  misc_feature (3099)..(3101): n is a, c, g, or t
  misc_feature (3104)..(3122): n is a, c, g, or t
  misc_feature (3127)..(3154): n is a, c, g, or t
  misc_feature (3158)..(3164): n is a, c, g, or t
  misc_feature (3166)..(3167): n is a, c, g, or t
  misc_feature (3169)..(3170): n is a, c, g, or t
  misc_feature (3172)..(3172): n is a, c, g, or t
  misc_feature (3174)..(3177): n is a, c, g, or t
  misc_feature (3179)..(3183): n is a, c, g, or t
  misc_feature (3185)..(3195): n is a, c, g, or t
  misc_feature (3197)..(3199): n is a, c, g, or t
  misc_feature (3201)..(3210): n is a, c, g, or t
  misc_feature (3212)..(3212): n is a, c, g, or t
  misc_feature (3216)..(3216): n is a, c, g, or t
  misc_feature (3218)..(3218): n is a, c, g, or t
  misc_feature (3221)..(3235): n is a, c, g, or t
  misc_feature (3237)..(3242): n is a, c, g, or t
  misc_feature (3245)..(3253): n is a, c, g, or t
  misc_feature (3255)..(3258): n is a, c, g, or t
  misc_feature (3261)..(3261): n is a, c, g, or t
  misc_feature (3263)..(3271): n is a, c, g, or t
  misc_feature (3273)..(3284): n is a, c, g, or t
  misc_feature (3286)..(3288): n is a, c, g, or t
  misc_feature (3292)..(3300): n is a, c, g, or t
  misc_feature (3302)..(3305): n is a, c, g, or t
  misc_feature (3307)..(3310): n is a, c, g, or t
  misc_feature (3312)..(3312): n is a, c, g, or t
  misc_feature (3314)..(3314): n is a, c, g, or t
  misc_feature (3317)..(3320): n is a, c, g, or t
  misc_feature (3322)..(3326): n is a, c, g, or t
  misc_feature (3330)..(3333): n is a, c, g, or t
  misc_feature (3335)..(3335): n is a, c, g, or t
  misc_feature (3337)..(3339): n is a, c, g, or t
  misc_feature (3341)..(3341): n is a, c, g, or t
  misc_feature (3344)..(3345): n is a, c, g, or t
  misc_feature (3350)..(3351): n is a, c, g, or t
  misc_feature (3353)..(3353): n is a, c, g, or t
  misc_feature (3355)..(3355): n is a, c, g, or t
  misc_feature (3358)..(3358): n is a, c, g, or t
  misc_feature (3360)..(3360): n is a, c, g, or t
  misc_feature (3362)..(3362): n is a, c, g, or t
  misc_feature (3368)..(3368): n is a, c, g, or t
  misc_feature (3371)..(3371): n is a, c, g, or t
  misc_feature (3373)..(3375): n is a, c, g, or t
  misc_feature (3377)..(3378): n is a, c, g, or t
  misc_feature (3381)..(3381): n is a, c, g, or t
  misc_feature (3387)..(3388): n is a, c, g, or t
  misc_feature (3391)..(3393): n is a, c, g, or t
  misc_feature (3395)..(3396): n is a, c, g, or t
  misc_feature (3401)..(3401): n is a, c, g, or t
  misc_feature (3416)..(3416): n is a, c, g, or t
  misc_feature (3420)..(3422): n is a, c, g, or t
  misc_feature (3426)..(3426): n is a, c, g, or t
  misc_feature (3430)..(3430): n is a, c, g, or t
  misc_feature (3435)..(3435): n is a, c, g, or t
  misc_feature (3438)..(3438): n is a, c, g, or t
  misc_feature (3441)..(3441): n is a, c, g, or t
  misc_feature (3446)..(3446): n is a, c, g, or t
  misc_feature (3450)..(3450): n is a, c, g, or t
  misc_feature (3452)..(3452): n is a, c, g, or t
  misc_feature (3454)..(3454): n is a, c, g, or t
  misc_feature (3456)..(3456): n is a, c, g, or t
  misc_feature (3462)..(3462): n is a, c, g, or t
  misc_feature (3466)..(3467): n is a, c, g, or t
  misc_feature (3469)..(3469): n is a, c, g, or t
  misc_feature (3472)..(3473): n is a, c, g, or t
  misc_feature (3475)..(3475): n is a, c, g, or t
  misc_feature (3477)..(3477): n is a, c, g, or t
  misc_feature (3481)..(3481): n is a, c, g, or t
  misc_feature (3486)..(3486): n is a, c, g, or t
  misc_feature (3491)..(3491): n is a, c, g, or t
  misc_feature (3494)..(3498): n is a, c, g, or t
  misc_feature (3500)..(3500): n is a, c, g, or t
  misc_feature (3502)..(3503): n is a, c, g, or t
  misc_feature (3509)..(3510): n is a, c, g, or t
  misc_feature (3513)..(3513): n is a, c, g, or t
  misc_feature (3515)..(3515): n is a, c, g, or t
  misc_feature (3525)..(3525): n is a, c, g, or t
  misc_feature (3528)..(3529): n is a, c, g, or t
  misc_feature (3531)..(3535): n is a, c, g, or t
  misc_feature (3546)..(3546): n is a, c, g, or t
  misc_feature (3550)..(3550): n is a, c, g, or t
  misc_feature (3556)..(3556): n is a, c, g, or t
  misc_feature (3560)..(3560): n is a, c, g, or t
  misc_feature (3565)..(3567): n is a, c, g, or t
  misc_feature (3569)..(3569): n is a, c, g, or t
  misc_feature (3571)..(3572): n is a, c, g, or t
  misc_feature (3574)..(3576): n is a, c, g, or t
  misc_feature (3580)..(3581): n is a, c, g, or t
  misc_feature (3583)..(3584): n is a, c, g, or t
  misc_feature (3587)..(3588): n is a, c, g, or t
  misc_feature (3594)..(3594): n is a, c, g, or t
  misc_feature (3597)..(3597): n is a, c, g, or t
  misc_feature (3602)..(3602): n is a, c, g, or t
  misc_feature (3604)..(3604): n is a, c, g, or t
  misc_feature (3606)..(3606): n is a, c, g, or t
  misc_feature (3609)..(3609): n is a, c, g, or t
  misc_feature (3611)..(3612): n is a, c, g, or t
  misc_feature (3616)..(3616): n is a, c, g, or t
  misc_feature (3618)..(3620): n is a, c, g, or t
  misc_feature (3627)..(3628): n is a, c, g, or t
  misc_feature (3635)..(3635): n is a, c, g, or t
  misc_feature (3638)..(3638): n is a, c, g, or t
  misc_feature (3642)..(3642): n is a, c, g, or t
  misc_feature (3645)..(3645): n is a, c, g, or t
  misc_feature (3647)..(3647): n is a, c, g, or t
  misc_feature (3650)..(3650): n is a, c, g, or t
  misc_feature (3654)..(3655): n is a, c, g, or t
  misc_feature (3659)..(3659): n is a, c, g, or t
  misc_feature (3662)..(3663): n is a, c, g, or t
  misc_feature (3665)..(3665): n is a, c, g, or t
  misc_feature (3668)..(3669): n is a, c, g, or t
  misc_feature (3675)..(3675): n is a, c, g, or t
  misc_feature (3678)..(3678): n is a, c, g, or t
  misc_feature (3680)..(3680): n is a, c, g, or t
  misc_feature (3685)..(3685): n is a, c, g, or t
  misc_feature (3687)..(3688): n is a, c, g, or t
  misc_feature (3692)..(3693): n is a, c, g, or t
  misc_feature (3702)..(3702): n is a, c, g, or t
  misc_feature (3711)..(3711): n is a, c, g, or t
  misc_feature (3714)..(3714): n is a, c, g, or t
  misc_feature (3716)..(3716): n is a, c, g, or t
  misc_feature (3719)..(3722): n is a, c, g, or t
  misc_feature (3724)..(3727): n is a, c, g, or t
  misc_feature (3730)..(3731): n is a, c, g, or t
  misc_feature (3733)..(3733): n is a, c, g, or t
  misc_feature (3735)..(3735): n is a, c, g, or t
  misc_feature (3738)..(3739): n is a, c, g, or t
  misc_feature (3743)..(3755): n is a, c, g, or t
  misc_feature (3757)..(3761): n is a, c, g, or t
  misc_feature (3765)..(3769): n is a, c, g, or t
  misc_feature (3771)..(3774): n is a, c, g, or t
  misc_feature (3777)..(3778): n is a, c, g, or t
  misc_feature (3781)..(3781): n is a, c, g, or t
  misc_feature (3785)..(3786): n is a, c, g, or t
  misc_feature (3789)..(3792): n is a, c, g, or t
  misc_feature (3796)..(3799): n is a, c, g, or t
  misc_feature (3803)..(3807): n is a, c, g, or t
  misc_feature (3809)..(3809): n is a, c, g, or t
  misc_feature (3811)..(3813): n is a, c, g, or t
  misc_feature (3815)..(3817): n is a, c, g, or t
  misc_feature (3819)..(3820): n is a, c, g, or t
  misc_feature (3826)..(3826): n is a, c, g, or t
  misc_feature (3829)..(3831): n is a, c, g, or t
  misc_feature (3833)..(3836): n is a, c, g, or t
  misc_feature (3838)..(3841): n is a, c, g, or t
  misc_feature (3844)..(3844): n is a, c, g, or t
  misc_feature (3846)..(3846): n is a, c, g, or t
  misc_feature (3850)..(3850): n is a, c, g, or t
  misc_feature (3852)..(3852): n is a, c, g, or t
  misc_feature (3854)..(3865): n is a, c, g, or t
  misc_feature (3868)..(3870): n is a, c, g, or t
  misc_feature (3873)..(3879): n is a, c, g, or t
  misc_feature (3881)..(3885): n is a, c, g, or t
  misc_feature (3887)..(3891): n is a, c, g, or t
  misc_feature (3893)..(3897): n is a, c, g, or t
  misc_feature (3899)..(3902): n is a, c, g, or t
  misc_feature (3904)..(3905): n is a, c, g, or t
  misc_feature (3908)..(3915): n is a, c, g, or t
  misc_feature (3918)..(3920): n is a, c, g, or t
  misc_feature (3922)..(3925): n is a, c, g, or t
  misc_feature (3927)..(3931): n is a, c, g, or t
  misc_feature (3933)..(3936): n is a, c, g, or t
  misc_feature (3938)..(3946): n is a, c, g, or t
  misc_feature (3948)..(3948): n is a, c, g, or t
  misc_feature (3950)..(3953): n is a, c, g, or t
  misc_feature (3955)..(3960): n is a, c, g, or t
  misc_feature (3963)..(3968): n is a, c, g, or t
  misc_feature (3970)..(3975): n is a, c, g, or t
  misc_feature (3977)..(3978): n is a, c, g, or t
  misc_feature (3981)..(3994): n is a, c, g, or t
  misc_feature (3996)..(3998): n is a, c, g, or t
  misc_feature (4000)..(4000): n is a, c, g, or t
nnttnctnnnnncncnnnnntnnnnnnnnnnttntnnannnnnnnttnnnnnttnnnnnnnannnnnnnnnnnnnnnaannncnnnnnnnnnnntnnnnnnnnnnnnntnnntnnnnnnnnnnnntnnnnnnnnnnnnnnnnnnnnnncnnnanccngnnntnnnaaanncnnnnnnntnnnnnnnnnnnnnnnnnnnnnnttnggnnnnnnnnnnnnnnnnntntnnnnnnntnnnntnnannncnnnnnnntnntntncnnnnnaannnnnngnaaanncnnnnnnnnnttnnnnnncnnnnnnntnnnnaaannnnnnnntnttnnnnnnannnnnnntnnnnnnnttnannnnnnnnnnnntnnnnnnnnnaannnnccaanaaannttnnngggnnnntttttnttnnttnttnnnnnnttnnnnnnnnnnnngggnnnnnnncccaagggnnnnnaanaaccntctttgcaccaagcttgtaatagaattcgtgtttgtttgccgccgtaaacaccacatcgaagtattgcagtcttcctcttagtattgcgggaaacctgnnggtgtctgggtaaaccaacgctaagcgatggctctgggaaagcntttttaaaacggtatcagaaatcacttcgcccttaaacaccaagataaggtctggatcaattttccttaccgcactcggtaaactcttgttgattttctgtgaatccactaatatcctcattaccttggtgcgggtcacaagcagcctaaaaagaaattttctacttataccttcatactgatccaaaacaaacacttcatggccaagcctgcgcaggtatttcgtgtagaagtgctctgcgttaaacctattcacagaacccacaagaagaatcttcactttatcacgaatacaggataggaaacatattccttacgtttacttaccatatagcaatgtcccaacagctgaaaattttagaaagagcaaacgctttttagctacatgcgtgtttttgacttttagagagagtaggtttgacgtgagggtgctcattcttttaaggatnctttggacggcgggcgctcagcgaattgctgtgaacgaataccgctggcttaagaaacttgggtacgatgcacanatcgtttttctgagagcttcgaataccaagggttatgaggagattttgaaagatgtcgagtacaccgttattcgaaagacttcgggtccccttactcctgttttttcagcgattaccaaaaagtttgcgaaagacagaggtagcgaaagcacagtggatttggatcttattttaaagactcccgaaatcgcaaagaagaaaaaagcggattatttggtgtgccacgaccagtgggctgggctaggtggttacctcgcaaaaaagacactcggtttaccttatgtcgtntttatacacgaaaagttgtcggattattctgtccctctcctcggaaagcttgccacagatgtcgaaaaaaaggttttagaaaacgcagaaaaagttttggccgtgaccgacaaagtcgcaaagacggttgaggaaaaacacggtgtcagagcaacagtgaactttcctggtttagacgaactctcaagcacaccgctttcccaaaaggagaatttgctacttacagtggctttttgggacaaaggtagaaaaccagagatttacttggatatcgcagaaaaaattggcggtcacaaactgatctttgctggaaactggagaatcccagaattaaaaagggattttcttataaaggttggtaaaagaggtctagaggacaaagttttgttaaaagaaggcctgagcgaaaaagagcttactgggctttataagaaaagcaagtttttattaaggtttggtttcggagaatacggtcttggcacaccagtggtcgaagcactacaacacaccttgcctgttatcgtaaacgaggaacttggcacttcatccctcattaaggcgtataagtgtggctatgttttacctgatataaaccccaacgccgttgctgaaatagttagctcaatcgatgaagaacaatacacttctatgcagcttggcatttcgaaactcagaaatgtgtacacctgggaaagacacgcaaggcaactgatttcttaaagccaaaaaattaatgttggttggctttaatggtcaatatgtagcgctaagatcagcaattcgcaacgaagcttgcttggctgactccttctagaaaaaattctagtgagcgaataggatgtgacactgtcacatagaatcatttgctacccaagatgcggtgtcatagttctattgcacacgcttttcaaactaaaaattaagctccacaatcatatataattaagtctgaggtattaatctccagcctttcgggccaccacaaaaatgtgtgaagcgaaactactaaatctcgaaaatattttgtccaacgttctaaaaagaggattgtctactccnnntgnnntnannncnntanaancnnntatttnnaaannaaaatnnnnnatatannntnataangnnnntntannnnnnnnnnttntgnnncnntnncncnncnccntcaanatcnntngcnnnaagnnnnnantnannganncntnatnagannnnnnntnnnntnnnaatnnaagnncanntctgtnngncnatnannnannnnnngntgngnttnnanncantaannnnttnggtntnnncncnnttnnaattnnnnncatnntnnannntnnnttgnaaanntnctntntcnnntntnnnancannnnnangtnnannntnntntnntnnnnaggnaannantcgcnnnntacgtcnnnnnnnannnntttnatcnnnctntnntnaagtttntttnnnnncnnnnnnnnnannttnaanncnntnnnnantnnnanntnaannnnntnctnnannttnnntnanntntnnnnnnntnnnnnnncnannnncaannncntnnnnnntncnnnnntnantnnannnnnttntnnnntntttannnnnnnnnnnnnnnnnnngtttnnnnnnnnnngttnnannannttnnnnnnaannnntnnnnnnnntttnnnaannnnnnnnnnnnnnnnnnnatttnnnnnnnnnnnnnnnnnnnnnnnnnnnnaaannnnnnngnncnncncnnnnannnnntnnnnnnnnnnnannncnnnnnnnnnntncaananaannnnnnnnnnnnnnngnnnnnnaannnnnnnnncnnnnttntnnnnnnnnncnnnnnnnnnnnngnnntccnnnnnnnnngnnnncnnnnancncannnnannnnngttnnnnancnnnanttnnacacnntnantancnangaagantantnnngnnagnggtagnntcnnngnntttcnatcgagatcctttcnaatnnncttnactncaaangtngtngagantganantnanaaaagntcgnngnatnnanangttnttttnaaagnacnnnnncntnnactagnnatnancttgatctcncgnnannnnnttcctataccntatntgtttnaatntcttnnnantnnannnacanncnnggnngccacnagncttgncngnaananntaantnnntattgtnnactactntantctnatncnganatcnnaagnaanncngannaaaacntanangtcananngaannaagtaagtntctaaaaanatntnaannnnannnnagnntntntannatcnnnnnnnnnnnnngnnnnnttannnnnannnntannganaganntgnnnnaatnnnncttnnnnnantnnnannnanngcgttnaannntnnnncnnnngtngncttntntnnnnnnnnnnnnttnnnatnnnnnnntnnnnncnnnnngnnnnnannnnannttnnnnnnnnagnnngnnnnannnnngnnnnannnnnnnnntnannnnannnnnnaannnnnntnnnnnntnnaannnnnnnnnnnnnnannnan

SEQ ID NO: 1484 - DNA, 4000 bp, Escherichia coli
  misc_feature (2219)..(2219): n is a, c, g, or t
tcataaacggacattgtaacttcatttaatggaacatcagattcgctagagacgattccactcacgcgagctgtaataagtgtatcaccttgaaatggaatagaaaaatcgatattcgctgtttcttcattttctacaatggaaacgatgattgcattgtcgatatcttctgcgtcatcataatattccatatagaaaaaggatgaagaatcggaatggtcgttttgtccgtggtcgctatttctatctgttgcgatactagccacataataatttccttcgggcacggtgagttcataatgaccattatcatctgtccaaactcccaaattagatccacaaccccaaccttcttcgcgaatgagtcggataaaagcataacctggaccatcagcatcatcgtaacttacgtttccagagatagaaccaaacccagctaaaggagagagcccaatatcaaataaagtggaatctccaatatcgattgtctgattaaaaaattcaaatcctgcttcaaaaacacgaacatttccttcacctgttgcgagattatcaaatgcataattcccgttttcatcagtctctgttgtgaaaacatgatgtccccaactatcatgggaaccatcattattattagcagtaatcacacgaaccgttgttccaacaaaaccttctccagtttcgctattgcttacggtcccataaagcgaaccatcatatacgattgccgaaagagcgaaatcaaggctcatgtctgcatcaagggtaagactggtttcttcagaagtgtatccccatgccacggctttcaaattcatatcgccttcaagatggtcaacggaatagtatccattggaatccgcccaagccaatctaaaccaatgtccattttcattctcttttttgatggcagcataagggaggccctctccagtttcaacgtcagtaactaaaccagagagggtatggccataacttgtaagtgcaaaattgatggtggtatccgcatcaatatttaggctcatctcttcagagttatatccccatgccatggttttgatatttaaatcaccttcagcattaaaggaataatatcctacagaatcagcccacgcaagcggaaaccaatgtccaaaattgttttctcttttaatcacagcgtatggaacaccatcagcactttcagcatcattgatatatcctgaaacaacaaagccgcttcccgatgtattatgttcatttaatgccatatcaaatgtcatgtctccatcgagtgttagtgtagcaaaaaatccttcatacccttccgccgaagcaaaaaggttgtaattccccacagctaaactgtcaaaggtgtagtttccattttcgtcagtagatgcttcattccaatcccaatttgaatggcttgaatctgccagatgcaaagacacctgtgcattttcaataggaagaccagtctcagtgtctgtgatgatgccacttagacttgcgccaaagcttaatgcagtcatcaagataaatgatagggtcatttgtaatgtatttttcattttcttttccttttctttttttctgtcaatcatcctcttccagagaatggggttctgttttttagaccgatgattgaccattgtgtttactttttttagaaagacaaaatgtctttctaaaagcgttccttaatttattttagtaaaatgattttctgatgttctagtatttttccttgtgataattggacaaaatatataccgctcgcttgattttctgcatgccattgaatctcatgcgttccgggtgaaaatttcccattgaccaaagtcttcacaaggcgaccattaatatcgaatatttgtagagacacaatgcgttgcatctctaccctaaattggatgcttgttcttgggttaaatggatttggataggcagatagcagggaaaacgtatttggatttgtatcaaaaccatcgacacttacggtctcacctacaaccgtaaattgtcccatcatgcccgcttcttcatgggtaagaatatggcaatgatacatgtaaggcacgtctgaatctgcgaagtcttcaaattttgtgatgaatttcaccgtgccgttcataggcggaactaaaacgacatctttccaaccttgcatgtgagctggcggtgtttcaccatttatttctaaaatattgaattgaacatcgtgaatatgaaatggntgtgatatttgcgactgatttgtcaattcccaaatttcagtattatttagtggaatttcataattaataacattcatatcaaaggcttcaccattaaagacaaaaggaccatttaatgcgccattgggtcccatcacggctggagaaaattgaattattcttgtttcatcaatctcattttgatcccattcatcaacgctaacaagcgtagaaggaatcgagctaatagggtttgccgtttgcgtgccgacatgtaaagaaagtagaggaaaatctgctccatttaaatgattatccgtataataagggatagagcttccacccattccaccgatagttgctgtaccataaataccacttggaatggtagaaccaaagttcatcacatggaccatttcattttcatgatgagtcaaatcaacgagaatctcataacgttctcctggtgatatgagtagttcgtccaaagcaatgggcgcttctaataagccaccgtctgtcccgatgacataaaaagtctcgtgattatccagtcccacattaaaagatcgttcggatgcaccgttgagcaaccgaaatctcacgatttgtgcaggtgcatcaagataggcgtctcgtgttccgttggtaaataaggctgtatccaaaccacttgaatccatattggttacgatttgatagttttcattcaaggtttttgtttgaaaaactaagggaaagtcatccacgccatattcccgaggtaaatctaataaggcttcttcatcgtctttcacaatcacaaatcctgcgatgcccatttgaacatgctcatttgtcttatgcattagatgagggtgataccacatggttgaggcgtggtccatcactgtaaattgtgggttccaaatcgtatttggtgggataggcgtatgaggaccgccatcgacttcagcagggacatgcataccatgccagtgaatagtggtcgtatcagaaagttgattgtcgaaagttatattgaccgtttctcctttttgcatcaaaagtgtaggacctaaaataggtgaactaatacccatagtttgagtcataacgcctggaaaaaattccatttcaccttcttgaatggtcaggtcaaaattaggtccagtcaaaagggggggaatgatgattgggctttgtgaaaatcccaagcttatgagtaatagcaatttgaatagtagtttcatattttctcttctttgtgtcttatgcttattggataagtatttgaatggatatttttcttaattcgcttaactttatttgcagcaccggcataagaaatgttcaaagtttttgccaattgtttaatattttttgtattgtgtgcataagcacgttggataagttcatcttcgaataattgattcatctctttccaggataaggaaggatttttttgaataaatcgctggatagcttcgttcttagtgtttgaatcttttgctttgtgaagaatatcaaaaatagatctttcactcatttttaagtgatttgccgcgtctctttttgaatcacattgactgatggtgttttcaagaaatagatcttgaaatatttgttttgattttgcgagagattgagaaataagtttttcccaatcagagtcatgagaagcatccgaagcgaacgcttgtttatacttttcttgaaaggcgaaataaccattcatggcttttaatgtatctcctgcacaggggaaatgattctcaaccatattcatcccagcgcgaaatccttgcgaatgaaatgattga

SEQ ID NO: 1485 - DNA, 4000 bp, Escherichia coli
  misc_feature (2)..(5): n is a, c, g, or t
  misc_feature (8)..(18): n is a, c, g, or t
  misc_feature (20)..(23): n is a, c, g, or t
  misc_feature (25)..(26): n is a, c, g, or t
  misc_feature (28)..(28): n is a, c, g, or t
  misc_feature (30)..(36): n is a, c, g, or t
  misc_feature (40)..(42): n is a, c, g, or t
  misc_feature (44)..(44): n is a, c, g, or t
  misc_feature (47)..(49): n is a, c, g, or t
  misc_feature (51)..(53): n is a, c, g, or t
  misc_feature (55)..(60): n is a, c, g, or t
  misc_feature (62)..(62): n is a, c, g, or t
  misc_feature (65)..(66): n is a, c, g, or t
  misc_feature (68)..(71): n is a, c, g, or t
  misc_feature (73)..(74): n is a, c, g, or t
  misc_feature (80)..(80): n is a, c, g, or t
  misc_feature (82)..(82): n is a, c, g, or t
  misc_feature (87)..(87): n is a, c, g, or t
  misc_feature (90)..(90): n is a, c, g, or t
  misc_feature (92)..(92): n is a, c, g, or t
  misc_feature (97)..(99): n is a, c, g, or t
  misc_feature (102)..(104): n is a, c, g, or t
  misc_feature (108)..(115): n is a, c, g, or t
  misc_feature (117)..(117): n is a, c, g, or t
  misc_feature (119)..(120): n is a, c, g, or t
  misc_feature (122)..(123): n is a, c, g, or t
  misc_feature (125)..(127): n is a, c, g, or t
  misc_feature (129)..(132): n is a, c, g, or t
  misc_feature (134)..(135): n is a, c, g, or t
  misc_feature (137)..(140): n is a, c, g, or t
  misc_feature (144)..(146): n is a, c, g, or t
  misc_feature (149)..(151): n is a, c, g, or t
  misc_feature (153)..(153): n is a, c, g, or t
  misc_feature (155)..(155): n is a, c, g, or t
  misc_feature (157)..(158): n is a, c, g, or t
  misc_feature (160)..(160): n is a, c, g, or t
  misc_feature (163)..(163): n is a, c, g, or t
  misc_feature (165)..(169): n is a, c, g, or t
  misc_feature (174)..(176): n is a, c, g, or t
  misc_feature (178)..(179): n is a, c, g, or t
  misc_feature (182)..(182): n is a, c, g, or t
  misc_feature (184)..(184): n is a, c, g, or t
  misc_feature (187)..(188): n is a, c, g, or t
  misc_feature (190)..(190): n is a, c, g, or t
  misc_feature (193)..(194): n is a, c, g, or t
  misc_feature (196)..(196): n is a, c, g, or t
  misc_feature (199)..(199): n is a, c, g, or t
  misc_feature (201)..(201): n is a, c, g, or t
  misc_feature (203)..(203): n is a, c, g, or t
  misc_feature (205)..(205): n is a, c, g, or t
  misc_feature (207)..(212): n is a, c, g, or t
  misc_feature (215)..(218): n is a, c, g, or t
  misc_feature (220)..(223): n is a, c, g, or t
  misc_feature (225)..(228): n is a, c, g, or t
  misc_feature (232)..(232): n is a, c, g, or t
  misc_feature (234)..(237): n is a, c, g, or t
  misc_feature (239)..(240): n is a, c, g, or t
  misc_feature (242)..(244): n is a, c, g, or t
  misc_feature (246)..(247): n is a, c, g, or t
  misc_feature (253)..(258): n is a, c, g, or t
  misc_feature (262)..(262): n is a, c, g, or t
  misc_feature (265)..(265): n is a, c, g, or t
  misc_feature (271)..(271): n is a, c, g, or t
  misc_feature (273)..(273): n is a, c, g, or t
  misc_feature (277)..(278): n is a, c, g, or t
  misc_feature (281)..(284): n is a, c, g, or t
  misc_feature (290)..(292): n is a, c, g, or t
  misc_feature (294)..(294): n is a, c, g, or t
  misc_feature (296)..(305): n is a, c, g, or t
  misc_feature (307)..(310): n is a, c, g, or t
  misc_feature (312)..(312): n is a, c, g, or t
  misc_feature (316)..(316): n is a, c, g, or t
  misc_feature (318)..(319): n is a, c, g, or t
  misc_feature (322)..(322): n is a, c, g, or t
  misc_feature (324)..(327): n is a, c, g, or t
  misc_feature (330)..(330): n is a, c, g, or t
  misc_feature (332)..(332): n is a, c, g, or t
  misc_feature (334)..(335): n is a, c, g, or t
  misc_feature (338)..(338): n is a, c, g, or t
  misc_feature (342)..(343): n is a, c, g, or t
  misc_feature (350)..(350): n is a, c, g, or t
  misc_feature (352)..(352): n is a, c, g, or t
  misc_feature (354)..(354): n is a, c, g, or t
  misc_feature (356)..(357): n is a, c, g, or t
  misc_feature (359)..(363): n is a, c, g, or t
  misc_feature (367)..(367): n is a, c, g, or t
  misc_feature (370)..(370): n is a, c, g, or t
  misc_feature (372)..(372): n is a, c, g, or t
  misc_feature (374)..(374): n is a, c, g, or t
  misc_feature (397)..(397): n is a, c, g, or t
  misc_feature (399)..(401): n is a, c, g, or t
  misc_feature (403)..(403): n is a, c, g, or t
  misc_feature (406)..(408): n is a, c, g, or t
  misc_feature (410)..(410): n is a, c, g, or t
  misc_feature (412)..(412): n is a, c, g, or t
  misc_feature (414)..(414): n is a, c, g, or t
  misc_feature (416)..(417): n is a, c, g, or t
  misc_feature (419)..(419): n is a, c, g, or t
  misc_feature (422)..(422): n is a, c, g, or t
  misc_feature (426)..(427): n is a, c, g, or t
  misc_feature (429)..(431): n is a, c, g, or t
  misc_feature (435)..(435): n is a, c, g, or t
  misc_feature (438)..(438): n is a, c, g, or t
  misc_feature (440)..(440): n is a, c, g, or t
  misc_feature (444)..(444): n is a, c, g, or t
  misc_feature (457)..(457): n is a, c, g, or t
  misc_feature (459)..(460): n is a, c, g, or t
  misc_feature (473)..(473): n is a, c, g, or t
  misc_feature (476)..(477): n is a, c, g, or t
  misc_feature (479)..(479): n is a, c, g, or t
  misc_feature (484)..(484): n is a, c, g, or t
  misc_feature (1991)..(1991): n is a, c, g, or t
  misc_feature (3686)..(3686): n is a, c, g, or t
  misc_feature (3688)..(3688): n is a, c, g, or t
  misc_feature (3703)..(3704): n is a, c, g, or t
  misc_feature (3706)..(3706): n is a, c, g, or t
  misc_feature (3709)..(3709): n is a, c, g, or t
  misc_feature (3717)..(3717): n is a, c, g, or t
  misc_feature (3723)..(3723): n is a, c, g, or t
  misc_feature (3726)..(3726): n is a, c, g, or t
  misc_feature (3732)..(3732): n is a, c, g, or t
  misc_feature (3735)..(3735): n is a, c, g, or t
  misc_feature (3739)..(3746): n is a, c, g, or t
  misc_feature (3750)..(3750): n is a, c, g, or t
  misc_feature (3752)..(3754): n is a, c, g, or t
  misc_feature (3756)..(3762): n is a, c, g, or t
  misc_feature (3764)..(3764): n is a, c, g, or t
  misc_feature (3766)..(3778): n is a, c, g, or t
  misc_feature (3780)..(3782): n is a, c, g, or t
  misc_feature (3786)..(3786): n is a, c, g, or t
  misc_feature (3791)..(3793): n is a, c, g, or t
  misc_feature (3795)..(3795): n is a, c, g, or t
  misc_feature (3797)..(3797): n is a, c, g, or t
  misc_feature (3800)..(3801): n is a, c, g, or t
  misc_feature (3808)..(3808): n is a, c, g, or t
  misc_feature (3811)..(3811): n is a, c, g, or t
  misc_feature (3815)..(3815): n is a, c, g, or t
  misc_feature (3818)..(3818): n is a, c, g, or t
  misc_feature (3827)..(3827): n is a, c, g, or t
  misc_feature (3829)..(3830): n is a, c, g, or t
  misc_feature (3834)..(3834): n is a, c, g, or t
  misc_feature (3836)..(3836): n is a, c, g, or t
  misc_feature (3847)..(3847): n is a, c, g, or t
  misc_feature (3856)..(3856): n is a, c, g, or t
  misc_feature (3868)..(3868): n is a, c, g, or t
  misc_feature (3871)..(3871): n is a, c, g, or t
  misc_feature (3878)..(3880): n is a, c, g, or t
  misc_feature (3896)..(3896): n is a, c, g, or t
  misc_feature (3898)..(3898): n is a, c, g, or t
  misc_feature (3912)..(3912): n is a, c, g, or t
  misc_feature (3914)..(3914): n is a, c, g, or t
  misc_feature (3916)..(3916): n is a, c, g, or t
  misc_feature (3933)..(3933): n is a, c, g, or t
  misc_feature (3936)..(3936): n is a, c, g, or t
  misc_feature (3958)..(3959): n is a, c, g, or t
  misc_feature (3965)..(3965): n is a, c, g, or t
  misc_feature (3969)..(3969): n is a, c, g, or t
  misc_feature (3981)..(3981): n is a, c, g, or t
  misc_feature (3985)..(3985): n is a, c, g, or t
  misc_feature (3991)..(3992): n is a, c, g, or t
annnntannnnnnnnnnnannnntnntntnnnnnnntatnnntntannnannntnnnnnnanaanntnnnnanncattantnaaaanttnanatttnnnatnnnttannnnnnnntnannannannntnnnntnnannnntaannnaannnantntnntnatntnnnnnataannntnnaananagnnantcnntnttnanantntnnnnnntannnnannnnannnnatantnnnnannannntnnattaannnnnnaaanaanataatntntatnnttnnnnatatannntntnnnnnnnnnnannnnantttnanngtntnnnnaananannaanaaannaaataanananannannnnnaatnaanananaaaataaaaaaatatatattatnannnanatnnnananantnnanaanaaannannnttanaantnaaanaaaaaaataaaanannaaaataaaaaaanaannanaaaanaaaaaaaaaaaaaaaaaaaaaaaattaacacaaaaaagaaaaattaaagaaaaataataaatctatatttctatataaaaataaatataatattatatataatatattatatattataatattatattatattattatattgaagttattttataaaaaattattattattcaattatatttttataattaataataattaaagaatatacatttttatattaaaaaagaggaaaggatttgttttgtttataaaacttttttttttctttaataaaatttaaatttatataaattaaatataaatttaattttaaattattgtaaaaagtttttttttttttaatattaaaaagtaattatatattataaaggtaataaaaataacaataaattatattgaattatcgaagaataaataaattatcgttttactaataaaatattatatgaaaattttttatttttttataaataattatatttatatttcttcggacaataaaatattataattggcacatttatatcaaaattttacttggaaataattttggaaatatttttttttcaataataattgtaatcgtttcaatattatttaataaaatttgtatcaactccttcaattaattatattattaattcttgtaaaatagaaaatgatgatggataaaggtaaatcagaacatcgtattggtcaatacaaaagtcgtggtcttcttcaaactgatgaattaagacgtcgtcgtgaagatgctgctgtcgaaattagaaagcaaaaaagagaagaaaatttagcaaagagaagaaacttccttaatcaagatttctctgatgatagtgatgatgattatgaatttgaaaccccatatgctgaagaagtaaatatttattatttattataaatgttcgaggatttactattttataaatattaaaatcagaaattttttaataattaataacaatattttatatatatatattttaatataattataataattcattaaatatatttttataattatcaataattattatttaatcaatataacagcttcaacaattaccagaaatgatcaataaaatatattctaacgatattgaagatcaattagatgccactactaaattcagaaaattactttcaaaagaacgtaatccaccaattgaagaagtcattaaatgtggagtaattccaagatttgtcgaatttttaaaatctcaacattctcttttacaagtatatatcatatcattatatatataaaattaattcaggaagttaatttattaagtataaatttttattttattacatttatattataaatttaaatagtttgaagctgcctgggctttaacaaacattgcctccggtacttcagatcaaactaaagttattattgataacggagctgtaccaatctttatttctttattatattcaccagtctcagatgttaaagaacaagtaagttaaaaaaaaaaaaaaatttatntttttttttttttttttaattttgaatttttaattacacttttattaaatatttaatatatatttacattttaaataattattcatttattattcataataaaaaaggctgtttgggctcttggtaatattgctggtgataatccaacttgcagagattatgttttaagtcaaaatgctttaactccaatcttaaatattttaaacgaccataccaataaaatttcaatgttacgtaatgctacatgggctttatctaatctttgtagaggaaagaatccacaaccagattgggaaactgtaaatatcaaaataatatatattttttattataaattaaaaatagaaatataacatttaacttacattatattaataatataaaatatattaaacaaactttaaaagatatcacaatgtcttccagttttagctaaattaatttatgctcaagatccagaagttttaactgatgcttgctgggctctttcatacttatctgatggttccaacaaaaagattcaagctgttattgaatctggtgtttgccgtcgtttagttgaacttttaatgtatccacaatataatgttcaaactccagctcttcgtactattggtaacattgttactggtgatgatgttcaaactcaagtaaatatattataatataaatcataaaatcataatataagtgttttcaaaaattatataatattaatgaaatgcatatatatttttattttatcttttatattatttatttttaataggtcattattaattctaatgctttaccatctcttttatcattactcaacagtccaagagaaggtattaagaaggaagcttgttggacaatttctaatattactgccggtaatacttctcaaattcaagtaagtagataatattttataacaattaatatattgatatataaaaaattttattctaaaattttaattttaatttttttattaaataattaaggatgttattgatgccaatattattccagttttaattgatgttcttaagactggtgatttcaagactaagaaggaagcttgttgggctatttctaatgccacttctggtggtttacaaaacccagaacaaattaggtaattataaaataaatacatataagtttgatttttaatatcagagtattaatttaatattattattattatgcaattatagatatttagttcaacaaggttgtattactccactttgtgatcttcttacttgcaaggataatagaattattcaagttgctttagatggtttagaaaatatactaaaggttggtgaacaagatagaaaattaaatgaagataacttaaaccaaatggctttatatattgaagaatgtggtggtatggataagattcacaatttacaagctcacaaaaatgttgaaatttacaataaggcttacaatattattgataagtacttcaacgatgatgaagaagaaactggtttagaagctgaagtcgataatactggtgctttcaacttctcagctgataacagacaatttgttccaaatggtggtttccactttggtcattaaataatttaaacgaattcaatacattaaaaatttttttttaaacaatcctttatttcatattctttttcaataactaatcaaaaattaaaaaaaaaaaaaaaaaaaaaaaantnttaaaaaaaaatttnntnttntattttanaaatanaantttttnttnattnnnnnnnntatntnnnannnnnnnanannnnnnnnnnnnntnnnaatnaaaannntntntannataaatnatnaatnatnaatattaananntaananttttatctttntcaatttantattaaattttnaantataatnnntataattaatataaantntatataatattatnananaaaaataaataatcaanatnaaaaaattaataaattattatnnttaatnttanttttatgttttnatanattttnnatttataa

SEQ ID NO: 1486 - DNA, 4000 bp, Escherichia coli
  misc_feature (1)..(6): n is a, c, g, or t
  misc_feature (8)..(11): n is a, c, g, or t
  misc_feature (13)..(24): n is a, c, g, or t
  misc_feature (26)..(26): n is a, c, g, or t
  misc_feature (28)..(30): n is a, c, g, or t
  misc_feature (32)..(37): n is a, c, g, or t
  misc_feature (39)..(53): n is a, c, g, or t
  misc_feature (56)..(58): n is a, c, g, or t
  misc_feature (60)..(60): n is a, c, g, or t
  misc_feature (62)..(68): n is a, c, g, or t
  misc_feature (70)..(83): n is a, c, g, or t
  misc_feature (85)..(89): n is a, c, g, or t
  misc_feature (91)..(94): n is a, c, g, or t
  misc_feature (96)..(96): n is a, c, g, or t
  misc_feature (98)..(98): n is a, c, g, or t
  misc_feature (101)..(105): n is a, c, g, or t
  misc_feature (107)..(131): n is a, c, g, or t
  misc_feature (134)..(135): n is a, c, g, or t
  misc_feature (137)..(146): n is a, c, g, or t
  misc_feature (148)..(159): n is a, c, g, or t
  misc_feature (162)..(173): n is a, c, g, or t
  misc_feature (175)..(175): n is a, c, g, or t
  misc_feature (180)..(180): n is a, c, g, or t
  misc_feature (182)..(185): n is a, c, g, or t
  misc_feature (187)..(191): n is a, c, g, or t
  misc_feature (194)..(206): n is a, c, g, or t
  misc_feature (208)..(210): n is a, c, g, or t
  misc_feature (212)..(212): n is a, c, g, or t
  misc_feature (214)..(222): n is a, c, g, or t
  misc_feature (226)..(229): n is a, c, g, or t
  misc_feature (231)..(245): n is a, c, g, or t
  misc_feature (247)..(261): n is a, c, g, or t
  misc_feature (263)..(267): n is a, c, g, or t
  misc_feature (269)..(269): n is a, c, g, or t
  misc_feature (271)..(272): n is a, c, g, or t
  misc_feature (274)..(276): n is a, c, g, or t
  misc_feature (278)..(281): n is a, c, g, or t
  misc_feature (283)..(283): n is a, c, g, or t
  misc_feature (285)..(287): n is a, c, g, or t
  misc_feature (289)..(289): n is a, c, g, or t
  misc_feature (291)..(292): n is a, c, g, or t
  misc_feature (294)..(309): n is a, c, g, or t
  misc_feature (311)..(319): n is a, c, g, or t
  misc_feature (321)..(321): n is a, c, g, or t
  misc_feature (325)..(335): n is a, c, g, or t
  misc_feature (337)..(351): n is a, c, g, or t
  misc_feature (353)..(355): n is a, c, g, or t
  misc_feature (357)..(361): n is a, c, g, or t
  misc_feature (365)..(367): n is a, c, g, or t
  misc_feature (369)..(370): n is a, c, g, or t
  misc_feature (372)..(372): n is a, c, g, or t
  misc_feature (374)..(386): n is a, c, g, or t
  misc_feature (388)..(395): n is a, c, g, or t
  misc_feature (397)..(403): n is a, c, g, or t
  misc_feature (405)..(407): n is a, c, g, or t
  misc_feature (409)..(410): n is a, c, g, or t
  misc_feature (412)..(424): n is a, c, g, or t
  misc_feature (426)..(432): n is a, c, g, or t
  misc_feature (434)..(445): n is a, c, g, or t
  misc_feature (447)..(454): n is a, c, g, or t
  misc_feature (456)..(457): n is a, c, g, or t
  misc_feature (459)..(465): n is a, c, g, or t
  misc_feature (467)..(485): n is a, c, g, or t
  misc_feature (487)..(493): n is a, c, g, or t
  misc_feature (496)..(497): n is a, c, g, or t
  misc_feature (499)..(517): n is a, c, g, or t
  misc_feature (519)..(523): n is a, c, g, or t
  misc_feature (525)..(528): n is a, c, g, or t
  misc_feature (530)..(534): n is a, c, g, or t
  misc_feature (536)..(544): n is a, c, g, or t
  misc_feature (546)..(569): n is a, c, g, or t
  misc_feature (571)..(593): n is a, c, g, or t
  misc_feature (595)..(605): n is a, c, g, or t
  misc_feature (607)..(608): n is a, c, g, or t
  misc_feature (610)..(614): n is a, c, g, or t
  misc_feature (616)..(616): n is a, c, g, or t
  misc_feature (619)..(621): n is a, c, g, or t
  misc_feature (623)..(633): n is a, c, g, or t
  misc_feature (635)..(637): n is a, c, g, or t
  misc_feature (640)..(653): n is a, c, g, or t
  misc_feature (655)..(656): n is a, c, g, or t
  misc_feature (658)..(661): n is a, c, g, or t
  misc_feature (663)..(677): n is a, c, g, or t
  misc_feature (679)..(698): n is a, c, g, or t
  misc_feature (702)..(706): n is a, c, g, or t
  misc_feature (709)..(712): n is a, c, g, or t
  misc_feature (714)..(721): n is a, c, g, or t
  misc_feature (723)..(728): n is a, c, g, or t
  misc_feature (730)..(734): n is a, c, g, or t
  misc_feature (736)..(747): n is a, c, g, or t
  misc_feature (749)..(756): n is a, c, g, or t
  misc_feature (758)..(764): n is a, c, g, or t
  misc_feature (766)..(788): n is a, c, g, or t
  misc_feature (791)..(796): n is a, c, g, or t
  misc_feature (798)..(806): n is a, c, g, or t
  misc_feature (808)..(814): n is a, c, g, or t
  misc_feature (816)..(819): n is a, c, g, or t
  misc_feature (821)..(824): n is a, c, g, or t
  misc_feature (826)..(831): n is a, c, g, or t
  misc_feature (833)..(839): n is a, c, g, or t
  misc_feature (841)..(843): n is a, c, g, or t
  misc_feature (845)..(851): n is a, c, g, or t
  misc_feature (854)..(859): n is a, c, g, or t
  misc_feature (861)..(903): n is a, c, g, or t
  misc_feature (905)..(913): n is a, c, g, or t
  misc_feature (915)..(919): n is a, c, g, or t
  misc_feature (921)..(926): n is a, c, g, or t
  misc_feature (928)..(930): n is a, c, g, or t
  misc_feature (933)..(933): n is a, c, g, or t
  misc_feature (935)..(939): n is a, c, g, or t
  misc_feature (941)..(942): n is a, c, g, or t
  misc_feature (944)..(944): n is a, c, g, or t
  misc_feature (946)..(963): n is a, c, g, or t
  misc_feature (965)..(965): n is a, c, g, or t
  misc_feature (967)..(967): n is a, c, g, or t
  misc_feature (969)..(969): n is a, c, g, or t
  misc_feature (972)..(973): n is a, c, g, or t
  misc_feature (975)..(979): n is a, c, g, or t
  misc_feature (981)..(987): n is a, c, g, or t
  misc_feature (990)..(1001): n is a, c, g, or t
  misc_feature (1003)..(1004): n is a, c, g, or t
  misc_feature (1006)..(1012): n is a, c, g, or t
  misc_feature (1015)..(1016): n is a, c, g, or t
  misc_feature (1018)..(1020): n is a, c, g, or t
  misc_feature (1023)..(1027): n is a, c, g, or t
  misc_feature (1030)..(1030): n is a, c, g, or t
  misc_feature (1038)..(1043): n is a, c, g, or t
  misc_feature (1045)..(1049): n is a, c, g, or t
  misc_feature (1051)..(1052): n is a, c, g, or t
  misc_feature (1056)..(1060): n is a, c, g, or t
  misc_feature (1062)..(1062): n is a, c, g, or t
  misc_feature (1064)..(1064): n is a, c, g, or t
  misc_feature (1066)..(1073): n is a, c, g, or t
  misc_feature (1075)..(1078): n is a, c, g, or t
  misc_feature (1080)..(1080): n is a, c, g, or t
  misc_feature (1082)..(1084): n is a, c, g, or t
  misc_feature (1086)..(1091): n is a, c, g, or t
  misc_feature (1093)..(1094): n is a, c, g, or t
  misc_feature (1097)..(1098): n is a, c, g, or t
  misc_feature (1100)..(1102): n is a, c, g, or t
  misc_feature (1104)..(1104): n is a, c, g, or t
  misc_feature (1107)..(1108): n is a, c, g, or t
  misc_feature (1110)..(1112): n is a, c, g, or t
  misc_feature (1114)..(1115): n is a, c, g, or t
  misc_feature (1118)..(1119): n is a, c, g, or t
  misc_feature (1121)..(1123): n is a, c, g, or t
  misc_feature (1127)..(1134): n is a, c, g, or t
  misc_feature (1136)..(1136): n is a, c, g, or t
  misc_feature (1138)..(1139): n is a, c, g, or t
  misc_feature (1141)..(1144): n is a, c, g, or t
  misc_feature (1146)..(1150): n is a, c, g, or t
  misc_feature (1152)..(1155): n is a, c, g, or t
  misc_feature (1157)..(1164): n is a, c, g, or t
  misc_feature (1166)..(1168): n is a, c, g, or t
  misc_feature (1170)..(1173): n is a, c, g, or t
  misc_feature (1175)..(1177): n is a, c, g, or t
  misc_feature (1180)..(1180): n is a, c, g, or t
  misc_feature (1182)..(1183): n is a, c, g, or t
  misc_feature (1186)..(1188): n is a, c, g, or t
  misc_feature (1192)..(1193): n is a, c, g, or t
  misc_feature (1195)..(1197): n is a, c, g, or t
  misc_feature (1200)..(1200): n is a, c, g, or t
  misc_feature (1202)..(1207): n is a, c, g, or t
  misc_feature (1210)..(1210): n is a, c, g, or t
  misc_feature (1212)..(1214): n is a, c, g, or t
  misc_feature (1217)..(1220): n is a, c, g, or t
  misc_feature (1224)..(1225): n is a, c, g, or t
  misc_feature (1228)..(1228): n is a, c, g, or t
  misc_feature (1232)..(1235): n is a, c, g, or t
  misc_feature (1237)..(1238): n is a, c, g, or t
  misc_feature (1240)..(1241): n is a, c, g, or t
  misc_feature (1243)..(1247): n is a, c, g, or t
  misc_feature (1250)..(1255): n is a, c, g, or t
  misc_feature (1259)..(1260): n is a, c, g, or t
  misc_feature (1262)..(1266): n is a, c, g, or t
  misc_feature (1269)..(1269): n is a, c, g, or t
  misc_feature (1272)..(1272): n is a, c, g, or t
  misc_feature (1283)..(1285): n is a, c, g, or t
  misc_feature (1335)..(1335): n is a, c, g, or t
  misc_feature (1340)..(1340): n is a, c, g, or t
  misc_feature (1444)..(1444): n is a, c, g, or t
  misc_feature (1989)..(1991): n is a, c, g, or t
  misc_feature (2042)..(2042): n is a, c, g, or t
  misc_feature (2075)..(2076): n is a, c, g, or t
  misc_feature (2361)..(2361): n is a, c, g, or t
  misc_feature (2422)..(2422): n is a, c, g, or t
  misc_feature (2424)..(2426): n is a, c, g, or t
  misc_feature (2429)..(2429): n is a, c, g, or t
  misc_feature (2434)..(2434): n is a, c, g, or t
  misc_feature (2438)..(2450): n is a, c, g, or t
  misc_feature (2452)..(2454): n is a, c, g, or t
  misc_feature (2457)..(2458): n is a, c, g, or t
  misc_feature (2460)..(2461): n is a, c, g, or t
  misc_feature (2463)..(2471): n is a, c, g, or t
  misc_feature (2473)..(2473): n is a, c, g, or t
  misc_feature (2476)..(2477): n is a, c, g, or t
  misc_feature (2479)..(2482): n is a, c, g, or t
  misc_feature (2484)..(2484): n is a, c, g, or t
  misc_feature (2486)..(2486): n is a, c, g, or t
  misc_feature (2488)..(2494): n is a, c, g, or t
  misc_feature (2496)..(2496): n is a, c, g, or t
  misc_feature (2498)..(2503): n is a, c, g, or t
  misc_feature (2505)..(2508): n is a, c, g, or t
  misc_feature (2510)..(2510): n is a, c, g, or t
  misc_feature (2512)..(2512): n is a, c, g, or t
  misc_feature (2514)..(2523): n is a, c, g, or t
  misc_feature (2525)..(2528): n is a, c, g, or t
  misc_feature (2530)..(2531): n is a, c, g, or t
  misc_feature (2533)..(2539): n is a, c, g, or t
  misc_feature (2541)..(2541): n is a, c, g, or t
  misc_feature (2544)..(2545): n is a, c, g, or t
  misc_feature (2548)..(2551): n is a, c, g, or t
  misc_feature (2553)..(2559): n is a, c, g, or t
  misc_feature (2561)..(2561): n is a, c, g, or t
  misc_feature (2563)..(2565): n is a, c, g, or t
  misc_feature (2567)..(2568): n is a, c, g, or t
  misc_feature (2571)..(2571): n is a, c, g, or t
  misc_feature (2573)..(2574): n is a, c, g, or t
  misc_feature (2576)..(2576): n is a, c, g, or t
  misc_feature (2578)..(2578): n is a, c, g, or t
  misc_feature (2582)..(2582): n is a, c, g, or t
  misc_feature (2584)..(2589): n is a, c, g, or t
  misc_feature (2591)..(2592): n is a, c, g, or t
  misc_feature (2594)..(2597): n is a, c, g, or t
  misc_feature (2599)..(2600): n is a, c, g, or t
  misc_feature (2602)..(2602): n is a, c, g, or t
  misc_feature (2604)..(2605): n is a, c, g, or t
  misc_feature (2607)..(2608): n is a, c, g, or t
  misc_feature (2612)..(2615): n is a, c, g, or t
  misc_feature (2617)..(2617): n is a, c, g, or t
  misc_feature (2620)..(2622): n is a, c, g, or t
  misc_feature (2624)..(2626): n is a, c, g, or t
  misc_feature (2628)..(2634): n is a, c, g, or t
  misc_feature (2636)..(2636): n is a, c, g, or t
  misc_feature (2638)..(2638): n is a, c, g, or t
  misc_feature (2640)..(2642): n is a, c, g, or t
  misc_feature (2644)..(2644): n is a, c, g, or t
  misc_feature (2646)..(2648): n is a, c, g, or t
  misc_feature (2650)..(2650): n is a, c, g, or t
  misc_feature (2652)..(2654): n is a, c, g, or t
  misc_feature (2656)..(2658): n is a, c, g, or t
  misc_feature (2660)..(2661): n is a, c, g, or t
  misc_feature (2663)..(2663): n is a, c, g, or t
  misc_feature (2665)..(2665): n is a, c, g, or t
  misc_feature (2668)..(2678): n is a, c, g, or t
  misc_feature (2680)..(2680): n is a, c, g, or t
  misc_feature (2683)..(2684): n is a, c, g, or t
  misc_feature (2686)..(2686): n is a, c, g, or t
  misc_feature (2688)..(2691): n is a, c, g, or t
  misc_feature (2693)..(2693): n is a, c, g, or t
  misc_feature (2695)..(2696): n is a, c, g, or t
  misc_feature (2700)..(2700): n is a, c, g, or t
  misc_feature (2702)..(2702): n is a, c, g, or t
  misc_feature (2704)..(2706): n is a, c, g, or t
  misc_feature (2708)..(2708): n is a, c, g, or t
  misc_feature (2711)..(2719): n is a, c, g, or t
  misc_feature (2721)..(2724): n is a, c, g, or t
  misc_feature (2727)..(2732): n is a, c, g, or t
  misc_feature (2734)..(2734): n is a, c, g, or t
  misc_feature (2736)..(2736): n is a, c, g, or t
  misc_feature (2739)..(2739): n is a, c, g, or t
  misc_feature (2741)..(2741): n is a, c, g, or t
  misc_feature (2743)..(2745): n is a, c, g, or t
  misc_feature (2748)..(2749): n is a, c, g, or t
  misc_feature (2751)..(2771): n is a, c, g, or t
  misc_feature (2774)..(2793): n is a, c, g, or t
  misc_feature (2795)..(2800): n is a, c, g, or t
  misc_feature (2802)..(2802): n is a, c, g, or t
  misc_feature (2804)..(2808): n is a, c, g, or t
  misc_feature (2810)..(2811): n is a, c, g, or t
  misc_feature (2813)..(2815): n is a, c, g, or t
  misc_feature (2817)..(2819): n is a, c, g, or t
  misc_feature (2821)..(2831): n is a, c, g, or t
  misc_feature (2833)..(2833): n is a, c, g, or t
  misc_feature (2835)..(2839): n is a, c, g, or t
  misc_feature (2841)..(2842): n is a, c, g, or t
  misc_feature (2844)..(2846): n is a, c, g, or t
  misc_feature (2848)..(2848): n is a, c, g, or t
  misc_feature (2850)..(2854): n is a, c, g, or t
  misc_feature (2856)..(2860): n is a, c, g, or t
  misc_feature (2862)..(2868): n is a, c, g, or t
  misc_feature (2870)..(2877): n is a, c, g, or t
  misc_feature (2880)..(2883): n is a, c, g, or t
  misc_feature (2885)..(2885): n is a, c, g, or t
  misc_feature (2887)..(2888): n is a, c, g, or t
  misc_feature (2890)..(2892): n is a, c, g, or t
  misc_feature (2894)..(2895): n is a, c, g, or t
  misc_feature (2897)..(2898): n is a, c, g, or t
  misc_feature (2900)..(2903): n is a, c, g, or t
  misc_feature (2907)..(2908): n is a, c, g, or t
  misc_feature (2910)..(2913): n is a, c, g, or t
  misc_feature (2917)..(2917): n is a, c, g, or t
  misc_feature (2919)..(2924): n is a, c, g, or t
  misc_feature (2926)..(2931): n is a, c, g, or t
  misc_feature (2933)..(2935): n is a, c, g, or t
  misc_feature (2937)..(2946): n is a, c, g, or t
  misc_feature (2948)..(2952): n is a, c, g, or t
  misc_feature (2955)..(2956): n is a, c, g, or t
  misc_feature (2959)..(2959): n is a, c, g, or t
  misc_feature (2962)..(2966): n is a, c, g, or t
  misc_feature (2968)..(2972): n is a, c, g, or t
  misc_feature (2974)..(2976): n is a, c, g, or t
  misc_feature (2978)..(2979): n is a, c, g, or t
  misc_feature (2981)..(2981): n is a, c, g, or t
  misc_feature (2983)..(2986): n is a, c, g, or t
  misc_feature (2988)..(2989): n is a, c, g, or t
  misc_feature (2991)..(2991): n is a, c, g, or t
  misc_feature (2993)..(2996): n is a, c, g, or t
  misc_feature (2999)..(3001): n is a, c, g, or t
  misc_feature (3003)..(3004): n is a, c, g, or t
  misc_feature (3007)..(3013): n is a, c, g, or t
  misc_feature (3016)..(3016): n is a, c, g, or t
  misc_feature (3019)..(3021): n is a, c, g, or t
  misc_feature (3023)..(3025): n is a, c, g, or t
  misc_feature (3027)..(3028): n is a, c, g, or t
  misc_feature (3030)..(3032): n is a, c, g, or t
  misc_feature (3034)..(3034): n is a, c, g, or t
  misc_feature (3038)..(3039): n is a, c, g, or t
  misc_feature (3041)..(3041): n is a, c, g, or t
  misc_feature (3043)..(3050): n is a, c, g, or t
  misc_feature (3052)..(3052): n is a, c, g, or t
  misc_feature (3054)..(3055): n is a, c, g, or t
  misc_feature (3058)..(3058): n is a, c, g, or t
  misc_feature (3060)..(3061): n is a, c, g, or t
  misc_feature (3064)..(3064): n is a, c, g, or t
  misc_feature (3067)..(3067): n is a, c, g, or t
  misc_feature (3071)..(3077): n is a, c, g, or t
  misc_feature (3079)..(3082): n is a, c, g, or t
  misc_feature (3084)..(3088): n is a, c, g, or t
  misc_feature (3091)..(3092): n is a, c, g, or t
  misc_feature (3094)..(3103): n is a, c, g, or t
  misc_feature (3105)..(3105): n is a, c, g, or t
  misc_feature (3107)..(3111): n is a, c, g, or t
  misc_feature (3113)..(3116): n is a, c, g, or t
  misc_feature (3118)..(3118): n is a, c, g, or t
  misc_feature (3121)..(3123): n is a, c, g, or t
  misc_feature (3125)..(3126): n is a, c, g, or t
  misc_feature (3128)..(3130): n is a, c, g, or t
  misc_feature (3133)..(3133): n is a, c, g, or t
  misc_feature (3135)..(3135): n is a, c, g, or t
  misc_feature (3137)..(3139): n is a, c, g, or t
  misc_feature (3141)..(3141): n is a, c, g, or t
  misc_feature (3143)..(3143): n is a, c, g, or t
  misc_feature (3145)..(3148): n is a, c, g, or t
  misc_feature (3150)..(3157): n is a, c, g, or t
  misc_feature (3162)..(3166): n is a, c, g, or t
  misc_feature (3168)..(3170): n is a, c, g, or t
  misc_feature (3172)..(3181): n is a, c, g, or t
  misc_feature (3187)..(3187): n is a, c, g, or t
  misc_feature (3189)..(3189): n is a, c, g, or t
  misc_feature (3191)..(3191): n is a, c, g, or t
  misc_feature (3193)..(3193): n is a, c, g, or t
  misc_feature (3195)..(3200): n is a, c, g, or t
  misc_feature (3202)..(3209): n is a, c, g, or t
  misc_feature (3211)..(3212): n is a, c, g, or t
  misc_feature (3215)..(3218): n is a, c, g, or t
  misc_feature (3222)..(3225): n is a, c, g, or t
  misc_feature (3227)..(3229): n is a, c, g, or t
  misc_feature (3231)..(3231): n is a, c, g, or t
  misc_feature (3233)..(3241): n is a, c, g, or t
  misc_feature (3243)..(3244): n is a, c, g, or t
  misc_feature (3246)..(3246): n is a, c, g, or t
  misc_feature (3249)..(3251): n is a, c, g, or t
  misc_feature (3253)..(3253): n is a, c, g, or t
  misc_feature (3255)..(3255): n is a, c, g, or t
  misc_feature (3257)..(3257): n is a, c, g, or t
  misc_feature (3260)..(3262): n is a, c, g, or t
  misc_feature (3266)..(3269): n is a, c, g, or t
  misc_feature (3271)..(3273): n is a, c, g, or t
  misc_feature (3275)..(3280): n is a, c, g, or t
  misc_feature (3283)..(3285): n is a, c, g, or t
  misc_feature (3287)..(3287): n is a, c, g, or t
  misc_feature (3292)..(3293): n is a, c, g, or t
  misc_feature (3295)..(3297): n is a, c, g, or t
  misc_feature (3299)..(3302): n is a, c, g, or t
  misc_feature (3305)..(3305): n is a, c, g, or t
  misc_feature (3307)..(3308): n is a, c, g, or t
  misc_feature (3310)..(3311): n is a, c, g, or t
  misc_feature (3313)..(3314): n is a, c, g, or t
  misc_feature (3316)..(3318): n is a, c, g, or t
  misc_feature (3320)..(3324): n is a, c, g, or t
  misc_feature (3326)..(3327): n is a, c, g, or t
  misc_feature (3330)..(3332): n is a, c, g, or t
  misc_feature (3334)..(3334): n is a, c, g, or t
  misc_feature (3336)..(3337): n is a, c, g, or t
  misc_feature (3339)..(3339): n is a, c, g, or t
  misc_feature (3341)..(3348): n is a, c, g, or t
  misc_feature (3350)..(3358): n is a, c, g, or t
  misc_feature (3360)..(3361): n is a, c, g, or t
  misc_feature (3363)..(3363): n is a, c, g, or t
  misc_feature (3366)..(3367): n is a, c, g, or t
  misc_feature (3370)..(3386): n is a, c, g, or t
  misc_feature (3388)..(3389): n is a, c, g, or t
  misc_feature (3391)..(3393): n is a, c, g, or t
  misc_feature (3396)..(3398): n is a, c, g, or t
  misc_feature (3400)..(3409): n is a, c, g, or t
  misc_feature (3412)..(3419): n is a, c, g, or t
  misc_feature (3421)..(3425): n is a, c, g, or t
  misc_feature (3427)..(3428): n is a, c, g, or t
  misc_feature (3430)..(3431): n is a, c, g, or t
  misc_feature (3433)..(3434): n is a, c, g, or t
  misc_feature (3436)..(3436): n is a, c, g, or t
  misc_feature (3438)..(3440): n is a, c, g, or t
  misc_feature (3442)..(3446): n is a, c, g, or t
  misc_feature (3448)..(3454): n is a, c, g, or t
  misc_feature (3456)..(3464): n is a, c, g, or t
  misc_feature (3467)..(3468): n is a, c, g, or t
  misc_feature (3470)..(3474): n is a, c, g, or t
  misc_feature (3478)..(3478): n is a, c, g, or t
  misc_feature (3480)..(3484): n is a, c, g, or t
  misc_feature (3486)..(3490): n is a, c, g, or t
  misc_feature (3492)..(3498): n is a, c, g, or t
  misc_feature (3500)..(3501): n is a, c, g, or t
  misc_feature (3503)..(3505): n is a, c, g, or t
  misc_feature (3507)..(3513): n is a, c, g, or t
  misc_feature (3515)..(3518): n is a, c, g, or t
  misc_feature (3520)..(3521): n is a, c, g, or t
  misc_feature (3523)..(3523): n is a, c, g, or t
  misc_feature (3525)..(3527): n is a, c, g, or t
  misc_feature (3530)..(3532): n is a, c, g, or t
  misc_feature (3534)..(3534): n is a, c, g, or t
  misc_feature (3536)..(3539): n is a, c, g, or t
  misc_feature (3542)..(3546): n is a, c, g, or t
  misc_feature (3550)..(3555): n is a, c, g, or t
  misc_feature (3559)..(3562): n is a, c, g, or t
  misc_feature (3566)..(3568): n is a, c, g, or t
  misc_feature (3570)..(3570): n is a, c, g, or t
  misc_feature (3573)..(3573): n is a, c, g, or t
  misc_feature (3576)..(3580): n is a, c, g, or t
  misc_feature (3582)..(3585): n is a, c, g, or t
  misc_feature (3587)..(3588): n is a, c, g, or t
  misc_feature (3590)..(3597): n is a, c, g, or t
  misc_feature (3599)..(3602): n is a, c, g, or t
  misc_feature (3604)..(3606): n is a, c, g, or t
  misc_feature (3608)..(3613): n is a, c, g, or t
  misc_feature (3615)..(3616): n is a, c, g, or t
  misc_feature (3618)..(3619): n is a, c, g, or t
  misc_feature (3621)..(3621): n is a, c, g, or t
  misc_feature (3623)..(3624): n is a, c, g, or t
  misc_feature (3626)..(3628): n is a, c, g, or t
  misc_feature (3630)..(3631): n is a, c, g, or t
  misc_feature (3637)..(3640): n is a, c, g, or t
  misc_feature (3642)..(3648): n is a, c, g, or t
  misc_feature (3650)..(3651): n is a, c, g, or t
  misc_feature (3654)..(3661): n is a, c, g, or t
  misc_feature (3664)..(3665): n is a, c, g, or t
  misc_feature (3668)..(3685): n is a, c, g, or t
  misc_feature (3687)..(3687): n is a, c, g, or t
  misc_feature (3689)..(3693): n is a, c, g, or t
  misc_feature (3696)..(3698): n is a, c, g, or t
  misc_feature (3702)..(3708): n is a, c, g, or t
  misc_feature (3711)..(3716): n is a, c, g, or t
  misc_feature (3718)..(3718): n is a, c, g, or t
  misc_feature (3720)..(3722): n is a, c, g, or t
  misc_feature (3724)..(3724): n is a, c, g, or t
  misc_feature (3727)..(3727): n is a, c, g, or t
  misc_feature (3729)..(3729): n is a, c, g, or t
  misc_feature (3731)..(3735): n is a, c, g, or t
  misc_feature (3737)..(3741): n is a, c, g, or t
  misc_feature (3744)..(3760): n is a, c, g, or t
  misc_feature (3762)..(3762): n is a, c, g, or t
  misc_feature (3764)..(3765): n is a, c, g, or t
  misc_feature (3767)..(3768): n is a, c, g, or t
  misc_feature (3771)..(3771): n is a, c, g, or t
  misc_feature (3773)..(3773): n is a, c, g, or t
  misc_feature (3775)..(3781): n is a, c, g, or t
  misc_feature (3783)..(3791): n is a, c, g, or t
  misc_feature (3794)..(3800): n is a, c, g, or t
  misc_feature (3802)..(3802): n is a, c, g, or t
  misc_feature (3804)..(3809): n is a, c, g, or t
  misc_feature (3811)..(3811): n is a, c, g, or t
  misc_feature (3814)..(3814): n is a, c, g, or t
  misc_feature (3816)..(3817): n is a, c, g, or t
  misc_feature (3819)..(3819): n is a, c, g, or t
  misc_feature (3822)..(3832): n is a, c, g, or t
  misc_feature (3835)..(3838): n is a, c, g, or t
  misc_feature (3840)..(3840): n is a, c, g, or t
  misc_feature (3844)..(3844): n is a, c, g, or t
  misc_feature (3847)..(3847): n is a, c, g, or t
  misc_feature (3850)..(3852): n is a, c, g, or t
  misc_feature (3854)..(3854): n is a, c, g, or t
  misc_feature (3856)..(3858): n is a, c, g, or t
  misc_feature (3860)..(3860): n is a, c, g, or t
  misc_feature (3863)..(3865): n is a, c, g, or t
  misc_feature (3869)..(3870): n is a, c, g, or t
  misc_feature (3872)..(3874): n is a, c, g, or t
  misc_feature (3876)..(3879): n is a, c, g, or t
  misc_feature (3881)..(3884): n is a, c, g, or t
  misc_feature (3886)..(3886): n is a, c, g, or t
  misc_feature (3889)..(3890): n is a, c, g, or t
  misc_feature (3892)..(3893): n is a, c, g, or t
  misc_feature (3895)..(3895): n is a, c, g, or t
  misc_feature (3897)..(3901): n is a, c, g, or t
  misc_feature (3903)..(3903): n is a, c, g, or t
  misc_feature (3905)..(3905): n is a, c, g, or t
  misc_feature (3907)..(3908): n is a, c, g, or t
  misc_feature (3910)..(3915): n is a, c, g, or t
  misc_feature (3917)..(3918): n is a, c, g, or t
  misc_feature (3920)..(3921): n is a, c, g, or t
  misc_feature (3923)..(3923): n is a, c, g, or t
  misc_feature (3925)..(3930): n is a, c, g, or t
  misc_feature (3933)..(3933): n is a, c, g, or t
  misc_feature (3935)..(3939): n is a, c, g, or t
  misc_feature (3941)..(3941): n is a, c, g, or t
  misc_feature (3943)..(3945): n is a, c, g, or t
  misc_feature (3948)..(3948): n is a, c, g, or t
  misc_feature (3950)..(3951): n is a, c, g, or t
  misc_feature (3954)..(3954): n is a, c, g, or t
  misc_feature (3957)..(3957): n is a, c, g, or t
  misc_feature (3961)..(3962): n is a, c, g, or t
  misc_feature (3964)..(3967): n is a, c, g, or t
  misc_feature (3970)..(3970): n is a, c, g, or t
  misc_feature (3972)..(3972): n is a, c, g, or t
  misc_feature (3975)..(3975): n is a, c, g, or t
  misc_feature (3977)..(3981): n is a, c, g, or t
  misc_feature (3983)..(3983): n is a, c, g, or t
  misc_feature (3986)..(3991): n is a, c, g, or t
  misc_feature (3993)..(3994): n is a, c, g, or t
  misc_feature (3996)..(3997): n is a, c, g, or t
nnnnnngnnnngnnnnnnnnnnnncngnnngnnnnnncnnnnnnnnnnnnnnngannncngnnnnnnngnnnnnnnnnnnnnncnnnnncnnnncncncgnnnnngnnnnnnnnnnnnnnnnnnnnnnnnngcnngnnnnnnnnnngnnnnnnnnnnnngcnnnnnnnnnnnncnccgcncnnnntnnnnnccnnnnnnnnnnnnncnnncngnnnnnnnnncccnnnncnnnnnnnnnnnnnnnannnnnnnnnnnnnnnannnnntngnngnnnannnngncnnngncnncnnnnnnnnnnnnnnnngnnnnnnnnngncggnnnnnnnnnnncnnnnnnnnnnnnnnnannncnnnnnggcnnnanncncnnnnnnnnnnnnncnnnnnnnngnnnnnnncnnngnngnnnnnnnnnnnnngnnnnnnncnnnnnnnnnnnncnnnnnnnngnncnnnnnnngnnnnnnnnnnnnnnnnnnncnnnnnnncgnncnnnnnnnnnnnnnnnnnnncnnnnncnnnncnnnnngnnnnnnnnncnnnnnnnnnnnnnnnnnnnnnnnngnnnnnnnnnnnnnnnnnnnnnnngnnnnnnnnnnncnncnnnnncncgnnngnnnnnnnnnnngnnnccnnnnnnnnnnnnnngnngnnnngnnnnnnnnnnnnnnngnnnnnnnnnnnnnnnnnnnncccnnnnnggnnnncnnnnnnnncnnnnnncnnnnngnnnnnnnnnnnncnnnnnnnncnnnnnnncnnnnnnnnnnnnnnnnnnnnnnngcnnnnnngnnnnnnnnngnnnnnnncnnnncnnnngnnnnnncnnnnnnngnnngnnnnnnnggnnnnnncnnnnnnnnnnnnnnnnnnnnnnnnnnnnnnnnnnnnnnnnnnncnnnnnnnnncnnnnnannnnnnannnccncnnnnnanngngnnnnnnnnnnnnnnnnnngngngnggnnannnnntnnnnnnntgnnnnnnnnnnnntnngnnnnnnncgnncnnncgnnnnnccnccccccgnnnnnngnnnnngnnctgnnnnngngnannnnnnnntnnnngngnnnannnnnntnngtnngnnngnccnngnnncnnccnncnnncccnnnnnnnnanannannnncnnnnngnnnngnnnnnnnnannnannnngnnnggnannggnnngggnngnnnccncnnnnnnaancnnncannnnaacnnaanggannnngnnannannnnntcnnnnnnaagnncnnnnnagngcnctcatgagttnnnctaagaacgatcaagccgatcgagcgattagtaccagtaagctacatgcntcgcngcacttccacacctggcctatcaacgtggtggtctaccacggctctcggcgaagccttgttttgaggttagtttcccgcttagatgctttcagcggttatctantccacacttagctaccctgctgcgcggctggcgccacgacaggtccaccagaggtgtgtccatcccggtcctctcgtactagggacagatcctctcaagcttcgtacacccacggcagatagggaccaaactgtctcacgacgttctgaacccagctcacgtaccactttaatcggcgaacagccgaacccttgggacctgctccagccccaggatgtgatgagccgacatcgaggtgccaaactttgccgtcgctgtggacgcttgggcaaaatcagcctgttatccctagagtaccttttattcgttgagcgatggcccttccatacagaaccaccggatcactatggccgactttcgtctctgctcgacttgtcagtctcgcagtcaggcgggcttatgccattgcactcgacgagcgatttccgaccgctctgagcccaccatcgcgcgcctccgttacactttgggaggcgaccgccccagtcaaactacccgccacgccatgtcccgaacccggataacgggccgcggttagacgtcannnacaacaagggtggtatttcaaggttggctccaccgaagctggcgccccggnttcatagcctcccacctatcctacacatgttgnngctaacgccaaggcgaagctgtagtaaaggttcatagggtctttccgtctgaccgcgggaaccccgcatcttcacggggaattcaatttcgctgagcctatgctggagacagtggggaagtcgttacgccattcgtgcaggtcggaacttacccgacaaggaatttcgctaccttaggaccgttatagttacggccgccgtttaccggggcttcaattcggagcttgcacccctccttttaaccttccggcaccgggcaggcgtcagaccctatacgtcgccttncggcttcgcagagccctgtgtttttgataaacagtcgctaccccctggcctgtgccactcntnnntgnttgcncaannnnnnnnnnnnntnnnccnnanntnnnnnnnnnanttnncnnnntncntnnnnnnngntnnnnnnannnncntngnnnnnnnnnncnnnncnncnnnnnnngnttnnggnnnngnnnnnnntngnnntnnttncnngnancccntnnnnnncnngnnnnanncnannanncccnnnnanttnnngnnntnnnnnnntncnannngncnnngnannntnnncnngntnccnnnnnnnnnnncnttnngncnnnncntnngggncngnnnanccnnnnnnnnntnnnnttnnnnnngnanccntngnnnttnngnnnnnnnnnnnnnnnnnnnnnttnnnnnnnnnnnnnnnnnnnntnnnnnntncnnnnncnncnnncnnncnnnnnnnnnnncntnnnnngnntnnngnannnnncnnnnncnnnnnnntnnnnnnnnccnnnncntnngnnnanngnntnnnncccnntnnnntttncnnnnnngnnnnnntnnncnnnnnnnnnntnnnnnttnnttnaannnnngnnnnntnnnanncnannnncnngntnnnnaannnannccnnnnnnnttnccnnntnnncnntnnntngggnncntnnnnnnnngntnnggntnnttnccntttnnnnnnngnnnntnnnnnccnncnnnnnnnnnncngnnnnntnnnntnggnnntnngnnnttngntnnnantngnnnnannnnnnnnccccnnnnncnnncnnnnnnnnnncccccnangnantnnnnnnannnnnnnncnnaannnntttnnnngnnnancnnnnnnnnncnngnttnnntngncnttnnncccnnnncnnnannnnnnccnnnanttttnnannntnnnnggntnngnncnncnnntnnnnntnnccnnncntnnancnnnnnnnngnnnnnnnnncnngnttnnggnnnnnnnnnnnnnnnnntnntnnnccnnntnnnnnnnnnnttnnnnnnnncnnnnncnnanngnntnannntnnnnngnnnnnnnannnnnnnnnccnntnnnnnaaangnnnnncnnnnncnnnnnnngnngnnncnnnnnnntnnnngnntncnnnttnnngntnnnnttnnnnncccnnnnnngggnnnntttnnncnttnccnnnnngnnnntnntnnnnnnnngnnnntnnngnnnnnntnngnntngnngnnngnncccccnnnntnnnnnnngnnttnnnnnnnnccnnccnnnnnnnnnnnnnnnnnnantnnnnnctnnngggnnnnnnnccnnnnnngncnnncnttncnannnnntnnnnnttnnnnnnnnnnnnnnnnngncnngnnccngntnnnnnnncnnnnnnnnnggnnnnnnngntnnnnnncnttncnncnggnnnnnnnnnnnttnnnntncccnggnttnnntnannnanccnnntttnntnnngnnnntnnnncnttnnannancnnnnnancngnncnnnnnncnnanncngnnnnnnaantnnnnnantnnnaangnnggnttncccnntnnnnaantntcngnnnnnanggnnnnnngnncnnccc

SEQ ID NO: 1487 - DNA, 4000 bp, Escherichia coli
  misc_feature (1)..(1): n is a, c, g, or t
  misc_feature (3)..(3): n is a, c, g, or t
  misc_feature (6)..(7): n is a, c, g, or t
  misc_feature (9)..(9): n is a, c, g, or t
  misc_feature (11)..(16): n is a, c, g, or t
  misc_feature (18)..(18): n is a, c, g, or t
  misc_feature (21)..(23): n is a, c, g, or t
  misc_feature (25)..(28): n is a, c, g, or t
  misc_feature (32)..(33): n is a, c, g, or t
  misc_feature (36)..(40): n is a, c, g, or t
  misc_feature (44)..(45): n is a, c, g, or t
  misc_feature (48)..(49): n is a, c, g, or t
  misc_feature (52)..(52): n is a, c, g, or t
  misc_feature (55)..(55): n is a, c, g, or t
  misc_feature (57)..(58): n is a, c, g, or t
  misc_feature (60)..(61): n is a, c, g, or t
  misc_feature (65)..(69): n is a, c, g, or t
  misc_feature (71)..(73): n is a, c, g, or t
  misc_feature (76)..(78): n is a, c, g, or t
  misc_feature (80)..(81): n is a, c, g, or t
  misc_feature (83)..(83): n is a, c, g, or t
  misc_feature (86)..(88): n is a, c, g, or t
  misc_feature (91)..(94): n is a, c, g, or t
  misc_feature (96)..(97): n is a, c, g, or t
  misc_feature (99)..(102): n is a, c, g, or t
  misc_feature (105)..(108): n is a, c, g, or t
  misc_feature (110)..(114): n is a, c, g, or t
  misc_feature (117)..(118): n is a, c, g, or t
  misc_feature (121)..(121): n is a, c, g, or t
  misc_feature (123)..(124): n is a, c, g, or t
  misc_feature (127)..(127): n is a, c, g, or t
  misc_feature (129)..(129): n is a, c, g, or t
  misc_feature (131)..(132): n is a, c, g, or t
  misc_feature (134)..(135): n is a, c, g, or t
  misc_feature (138)..(138): n is a, c, g, or t
  misc_feature (142)..(144): n is a, c, g, or t
  misc_feature (146)..(146): n is a, c, g, or t
  misc_feature (148)..(148): n is a, c, g, or t
  misc_feature (150)..(154): n is a, c, g, or t
  misc_feature (157)..(162): n is a, c, g, or t
  misc_feature (164)..(166): n is a, c, g, or t
  misc_feature (170)..(171): n is a, c, g, or t
  misc_feature (174)..(179): n is a, c, g, or t
  misc_feature (184)..(184): n is a, c, g, or t
  misc_feature (187)..(187): n is a, c, g, or t
  misc_feature (189)..(189): n is a, c, g, or t
  misc_feature (191)..(193): n is a, c, g, or t
  misc_feature (195)..(196): n is a, c, g, or t
  misc_feature (199)..(200): n is a, c, g, or t
  misc_feature (202)..(203): n is a, c, g, or t
  misc_feature (205)..(206): n is a, c, g, or t
  misc_feature (208)..(208): n is a, c, g, or t
  misc_feature (210)..(211): n is a, c, g, or t
  misc_feature (213)..(215): n is a, c, g, or t
  misc_feature (219)..(221): n is a, c, g, or t
  misc_feature (223)..(225): n is a, c, g, or t
  misc_feature (227)..(228): n is a, c, g, or t
  misc_feature (232)..(233): n is a, c, g, or t
  misc_feature (237)..(237): n is a, c, g, or t
  misc_feature (240)..(240): n is a, c, g, or t
  misc_feature (243)..(243): n is a, c, g, or t
  misc_feature (245)..(253): n is a, c, g, or t
  misc_feature (255)..(256): n is a, c, g, or t
  misc_feature (259)..(259): n is a, c, g, or t
  misc_feature (262)..(262): n is a, c, g, or t
  misc_feature (266)..(268): n is a, c, g, or t
  misc_feature (271)..(271): n is a, c, g, or t
  misc_feature (273)..(274): n is a, c, g, or t
  misc_feature (276)..(276): n is a, c, g, or t
  misc_feature (278)..(281): n is a, c, g, or t
  misc_feature (283)..(284): n is a, c, g, or t
  misc_feature (286)..(288): n is a, c, g, or t
  misc_feature (290)..(292): n is a, c, g, or t
  misc_feature (296)..(296): n is a, c, g, or t
  misc_feature (298)..(298): n is a, c, g, or t
  misc_feature (301)..(301): n is a, c, g, or t
  misc_feature (303)..(305): n is a, c, g, or t
  misc_feature (307)..(309): n is a, c, g, or t
  misc_feature (312)..(312): n is a, c, g, or t
  misc_feature (315)..(316): n is a, c, g, or t
  misc_feature (321)..(322): n is a, c, g, or t
  misc_feature (325)..(325): n is a, c, g, or t
  misc_feature (328)..(329): n is a, c, g, or t
  misc_feature (331)..(333): n is a, c, g, or t
  misc_feature (335)..(336): n is a, c, g, or t
  misc_feature (342)..(343): n is a, c, g, or t
  misc_feature (346)..(347): n is a, c, g, or t
  misc_feature (350)..(351): n is a, c, g, or t
  misc_feature (353)..(354): n is a, c, g, or t
  misc_feature (363)..(365): n is a, c, g, or t
  misc_feature (367)..(367): n is a, c, g, or t
  misc_feature (371)..(372): n is a, c, g, or t
  misc_feature (376)..(381): n is a, c, g, or t
  misc_feature (386)..(387): n is a, c, g, or t
  misc_feature (390)..(392): n is a, c, g, or t
  misc_feature (398)..(398): n is a, c, g, or t
  misc_feature (402)..(403): n is a, c, g, or t
  misc_feature (408)..(408): n is a, c, g, or t
  misc_feature (410)..(414): n is a, c, g, or t
  misc_feature (417)..(417): n is a, c, g, or t
  misc_feature (419)..(421): n is a, c, g, or t
  misc_feature (423)..(423): n is a, c, g, or t
  misc_feature (427)..(429): n is a, c, g, or t
  misc_feature (432)..(432): n is a, c, g, or t
  misc_feature (436)..(437): n is a, c, g, or t
  misc_feature (439)..(440): n is a, c, g, or t
  misc_feature (443)..(443): n is a, c, g, or t
  misc_feature (445)..(446): n is a, c, g, or t
  misc_feature (449)..(450): n is a, c, g, or t
  misc_feature (453)..(454): n is a, c, g, or t
  misc_feature (456)..(457): n is a, c, g, or t
  misc_feature (459)..(459): n is a, c, g, or t
  misc_feature (462)..(464): n is a, c, g, or t
  misc_feature (468)..(469): n is a, c, g, or t
  misc_feature (473)..(473): n is a, c, g, or t
  misc_feature (475)..(475): n is a, c, g, or t
  misc_feature (477)..(478): n is a, c, g, or t
  misc_feature (480)..(480): n is a, c, g, or t
  misc_feature (482)..(482): n is a, c, g, or t
  misc_feature (484)..(484): n is a, c, g, or t
  misc_feature (486)..(486): n is a, c, g, or t
  misc_feature (488)..(488): n is a, c, g, or t
  misc_feature (490)..(493): n is a, c, g, or t
  misc_feature (495)..(498): n is a, c, g, or t
  misc_feature (501)..(503): n is a, c, g, or t
  misc_feature (505)..(505): n is a, c, g, or t
  misc_feature (507)..(508): n is a, c, g, or t
  misc_feature (511)..(511): n is a, c, g, or t
  misc_feature (514)..(515): n is a, c, g, or t
  misc_feature (517)..(519): n is a, c, g, or t
  misc_feature (524)..(527): n is a, c, g, or t
  misc_feature (531)..(531): n is a, c, g, or t
  misc_feature (533)..(533): n is a, c, g, or t
  misc_feature (540)..(540): n is a, c, g, or t
  misc_feature (543)..(543): n is a, c, g, or t
  misc_feature (546)..(554): n is a, c, g, or t
  misc_feature (557)..(561): n is a, c, g, or t
  misc_feature (563)..(564): n is a, c, g, or t
  misc_feature (567)..(568): n is a, c, g, or t
  misc_feature (571)..(572): n is a, c, g, or t
  misc_feature (574)..(574): n is a, c, g, or t
  misc_feature (576)..(577): n is a, c, g, or t
  misc_feature (580)..(580): n is a, c, g, or t
  misc_feature (583)..(587): n is a, c, g, or t
  misc_feature (589)..(589): n is a, c, g, or t
  misc_feature (594)..(594): n is a, c, g, or t
  misc_feature (596)..(597): n is a, c, g, or t
  misc_feature (599)..(599): n is a, c, g, or t
  misc_feature (603)..(605): n is a, c, g, or t
  misc_feature (607)..(609): n is a, c, g, or t
  misc_feature (614)..(618): n is a, c, g, or t
  misc_feature (621)..(622): n is a, c, g, or t
  misc_feature (624)..(626): n is a, c, g, or t
  misc_feature (629)..(629): n is a, c, g, or t
  misc_feature (633)..(634): n is a, c, g, or t
  misc_feature (636)..(637): n is a, c, g, or t
  misc_feature (640)..(641): n is a, c, g, or t
  misc_feature (643)..(643): n is a, c, g, or t
  misc_feature (645)..(646): n is a, c, g, or t
  misc_feature (649)..(652): n is a, c, g, or t
  misc_feature (660)..(660): n is a, c, g, or t
  misc_feature (662)..(665): n is a, c, g, or t
  misc_feature (668)..(668): n is a, c, g, or t
  misc_feature (670)..(675): n is a, c, g, or t
  misc_feature (678)..(680): n is a, c, g, or t
  misc_feature (683)..(683): n is a, c, g, or t
  misc_feature (686)..(687): n is a, c, g, or t
  misc_feature (693)..(694): n is a, c, g, or t
  misc_feature (696)..(696): n is a, c, g, or t
  misc_feature (698)..(702): n is a, c, g, or t
  misc_feature (705)..(706): n is a, c, g, or t
  misc_feature (709)..(714): n is a, c, g, or t
  misc_feature (717)..(718): n is a, c, g, or t
  misc_feature (723)..(726): n is a, c, g, or t
  misc_feature (730)..(730): n is a, c, g, or t
  misc_feature (732)..(733): n is a, c, g, or t
  misc_feature (738)..(739): n is a, c, g, or t
  misc_feature (743)..(744): n is a, c, g, or t
  misc_feature (747)..(747): n is a, c, g, or t
  misc_feature (752)..(753): n is a, c, g, or t
  misc_feature (755)..(757): n is a, c, g, or t
  misc_feature (760)..(763): n is a, c, g, or t
  misc_feature (766)..(766): n is a, c, g, or t
  misc_feature (768)..(774): n is a, c, g, or t
  misc_feature (777)..(778): n is a, c, g, or t
  misc_feature (780)..(780): n is a, c, g, or t
  misc_feature (782)..(782): n is a, c, g, or t
  misc_feature (784)..(784): n is a, c, g, or t
  misc_feature (787)..(787): n is a, c, g, or t
  misc_feature (791)..(792): n is a, c, g, or t
  misc_feature (794)..(794): n is a, c, g, or t
  misc_feature (797)..(798): n is a, c, g, or t
  misc_feature (801)..(803): n is a, c, g, or t
  misc_feature (807)..(808): n is a, c, g, or t
  misc_feature (811)..(812): n is a, c, g, or t
  misc_feature (816)..(819): n is a, c, g, or t
  misc_feature (824)..(825): n is a, c, g, or t
  misc_feature (828)..(833): n is a, c, g, or t
  misc_feature (835)..(835): n is a, c, g, or t
  misc_feature (838)..(845): n is a, c, g, or t
  misc_feature (847)..(847): n is a, c, g, or t
  misc_feature (849)..(850): n is a, c, g, or t
  misc_feature (852)..(852): n is a, c, g, or t
  misc_feature (856)..(858): n is a, c, g, or t
  misc_feature (862)..(863): n is a, c, g, or t
  misc_feature (865)..(867): n is a, c, g, or t
  misc_feature (870)..(876): n is a, c, g, or t
  misc_feature (880)..(880): n is a, c, g, or t
  misc_feature (883)..(886): n is a, c, g, or t
  misc_feature (888)..(890): n is a, c, g, or t
  misc_feature (893)..(893): n is a, c, g, or t
  misc_feature (895)..(900): n is a, c, g, or t
  misc_feature (903)..(904): n is a, c, g, or t
  misc_feature (906)..(906): n is a, c, g, or t
  misc_feature (909)..(909): n is a, c, g, or t
  misc_feature (912)..(913): n is a, c, g, or t
  misc_feature (915)..(915): n is a, c, g, or t
  misc_feature (918)..(919): n is a, c, g, or t
  misc_feature (921)..(921): n is a, c, g, or t
  misc_feature (923)..(929): n is a, c, g, or t
  misc_feature (931)..(931): n is a, c, g, or t
  misc_feature (933)..(933): n is a, c, g, or t
  misc_feature (935)..(944): n is a, c, g, or t
  misc_feature (946)..(946): n is a, c, g, or t
  misc_feature (951)..(954): n is a, c, g, or t
  misc_feature (957)..(964): n is a, c, g, or t
  misc_feature (966)..(968): n is a, c, g, or t
  misc_feature (972)..(976): n is a, c, g, or t
  misc_feature (978)..(983): n is a, c, g, or t
  misc_feature (985)..(985): n is a, c, g, or t
  misc_feature (987)..(988): n is a, c, g, or t
  misc_feature (990)..(991): n is a, c, g, or t
  misc_feature (993)..(993): n is a, c, g, or t
  misc_feature (995)..(998): n is a, c, g, or t
  misc_feature (1000)..(1002): n is a, c, g, or t
  misc_feature (1005)..(1007): n is a, c, g, or t
  misc_feature (1009)..(1009): n is a, c, g, or t
  misc_feature (1012)..(1012): n is a, c, g, or t
  misc_feature (1015)..(1015): n is a, c, g, or t
  misc_feature (1017)..(1019): n is a, c, g, or t
  misc_feature (1021)..(1021): n is a, c, g, or t
  misc_feature (1024)..(1024): n is a, c, g, or t
  misc_feature (1027)..(1028): n is a, c, g, or t
  misc_feature (1030)..(1030): n is a, c, g, or t
  misc_feature (1032)..(1032): n is a, c, g, or t
  misc_feature (1036)..(1037): n is a, c, g, or t
  misc_feature (1041)..(1041): n is a, c, g, or t
  misc_feature (1043)..(1043): n is a, c, g, or t
  misc_feature (1045)..(1045): n is a, c, g, or t
  misc_feature (1050)..(1050): n is a, c, g, or t
  misc_feature (1053)..(1057): n is a, c, g, or t
  misc_feature (1059)..(1065): n is a, c, g, or t
  misc_feature (1069)..(1072): n is a, c, g, or t
  misc_feature (1074)..(1075): n is a, c, g, or t
  misc_feature (1077)..(1081): n is a, c, g, or t
  misc_feature (1087)..(1093): n is a, c, g, or t
  misc_feature (1095)..(1100): n is a, c, g, or t
  misc_feature (1102)..(1112): n is a, c, g, or t
  misc_feature (1114)..(1115): n is a, c, g, or t
  misc_feature (1117)..(1125): n is a, c, g, or t
  misc_feature (1128)..(1132): n is a, c, g, or t
  misc_feature (1135)..(1138): n is a, c, g, or t
  misc_feature (1140)..(1157): n is a, c, g, or t
  misc_feature (1159)..(1160): n is a, c, g, or t
  misc_feature (1163)..(1164): n is a, c, g, or t
  misc_feature (1167)..(1170): n is a, c, g, or t
  misc_feature (1174)..(1175): n is a, c, g, or t
  misc_feature (1177)..(1189): n is a, c, g, or t
  misc_feature (1192)..(1192): n is a, c, g, or t
  misc_feature (1196)..(1211): n is a, c, g, or t
  misc_feature (1213)..(1217): n is a, c, g, or t
  misc_feature (1220)..(1221): n is a, c, g, or t
  misc_feature (1223)..(1228): n is a, c, g, or t
  misc_feature (1232)..(1232): n is a, c, g, or t
  misc_feature (1294)..(1294): n is a, c, g, or t
  misc_feature (1533)..(1533): n is a, c, g, or t
  misc_feature (1809)..(1809): n is a, c, g, or t
  misc_feature (2002)..(2002): n is a, c, g, or t
  misc_feature (2004)..(2004): n is a, c, g, or t
  misc_feature (2412)..(2412): n is a, c, g, or t
  misc_feature (2414)..(2414): n is a, c, g, or t
  misc_feature (2596)..(2596): n is a, c, g, or t
  misc_feature (2742)..(2742): n is a, c, g, or t
  misc_feature (2911)..(2911): n is a, c, g, or t
  misc_feature (3070)..(3070): n is a, c, g, or t
ngngannantnnnnnngnggnnnannnngggnngannnnnccgnnggnnggnggngnnanntttnnnnncnnngannngnnanacnnncgnnnntnncnnnngtnnnnannnnngcnnganannaanananngnnggnaggnnngngngnnnnnatnnnnnncnnngggnncannnnnngcgancgngngnnngnnttnntnncnnananngnnngggnnngnnntnngaannaaanganagngnnnnnnnnngnnagnggngggnnngananntntnnnnanncnnncnnngagngnggngnnntnnnganagnnaaaanntanttnntnnntnngagagnngcnnagnngnnagagaaagnnngngagnnagannnnnngagtnngtnnngcgcgngcgnncgcgngnnnnnaanannngngggnnngtntgtnngnnganannaanngtnnanngngcnnntttnngtgngngnngngngnangnannnnannnnagnnnanannaanaannannnttttnnnnagananaaaaaanagngannnnnnnnnacnnnnngnncgnnaannanannaanagnnnnnanaaaancnncncgcnnnannnaaaannnnnganntnnnctntgtnnanngtnngnanngannnncgctcgancnnnncgntnnnnnnggnnncanaanngcgctnncncnnnnnagnnggnnnnnncgnnaaaannnncgcnannaacanncgcnngangaaannannnaannnnttntnnnnnnncanncncncnctntctnncnccnncannnaaannaanngcgnnnnaaaannaannnnnnanaannnnnnnnananngnatgnnngatnnannnaannnnnnntttnttnnnngnnngcncnnnnnnaanncncgngannanagnncncnnnnnnngntngnnnnnnnnnnanaaaannnnccnnnnnnnnannnaaannnnntnnnnnncngnngnntntnnnnannnagnnngnaanaanannnanagnaannanangaannaaangnanaaaangannnnnannnnnnngaannnngnngnnnnnaaaaannnnnnncnnnnnnannnnnnnnnnnanngnnnnnnnnngannnnngannnncnnnnnnnnnnnnnnnnnnannaannaannnntctnncnnnnnnnnnnnnnganagannnnnnnnnnnnnnnncnnnnnttnnannnnnnatanatatatatagagagagagaaagagagagagttcgaaatgctctgctccggtagaagacaaangtaagaatacgagcgggcggcgaagcgaccggatgcggaaaatggcagacctttcaaaattcaaaattcaaccacaaactccacataaataagcgctcagtaaacacgaatcaacgcgaatcatcatgctcgaagaaaccaccaacaacgcgaacatcatcaccaccaccacaaccaccaccaccaacgagccaacactcacgcaatacgaagccgagcgcaacgcgcggatacaaaanaacatcgaacgcatgaaatcgttcggcatcgacgacgcgaggaaaaaagtgatgacgatggaatcgaagcacaaaaacaacgcgacgacgtccttgttatccaaaaagcgcgtcaaaaaacgctctgaaaacgcaacacagatggacagatcgaaacaaccgaggcggacgtcctcgcgcgtgcgcggagagaaagcgccggacgttttcgtgcccgatgaaagaaatctttgggaaccgacgtataacgaggaaatctacacgcaaaggcaagtntcgaacttgggcgatcgaaaatcggagtggcaactcttcgtctccgggtacgaccaacaaggtcgacggttgtacgacaacaacagaggcgtgtgttgtcaccagtgcaggcagaaaacgctgggaacgcacacgacgtgcaggaagtgcaacatgatgcgcgggaagttttgcggagactgtatttttatgngntacggtgaaaacgttctggaaatcaacgaaaatccggagtgggagtgcccggtgtgtcgtgacatctgcaattgttcgttctgtcgcacgaagaaagggtggatgccgactgggaacatgtaccgagccgcgatcgcgagcgggtacaaatccgtggcgcattatttagtcttgtcgagacaggacgacgaggaaaaggccaaactgtgcgaagaggaagccgaacgcgtcgccgagcgattgcagagagaagaaaagagacgaattcaagaaaacccagagttatacgcgaaagaacaagaggagaggaggaataggccgcactggttgaagaataaaaagtagtaaagcgggacggacagaagagcggaggatgtcccgcggccgctttgtaccatcactagaagntntaccaaattggagagagaaaaaaccacactttttatcatcatcatcatcatcatcatgtctcctcctcctcctctttcggagtctcacaccgccgagtccctccgaaaccttttcgcctctactttctcttggttcctccccgagaacgtcatcgacgaggacacgctcgagtatctgttcncgagtttatccgatggaagtttcgaggacaaggaggagtttctggatttcgtgacgccacttttgatggaattattcgaaggtgacgacgaagacgaggcgagagcgcagtgcacgaaagcgcacgatttgttatacggcaaatgngtagaagaagggagcgatactacgaaagaggaggagacgaccacgagagtgataaacgtgaaattaggtggcactccaggggaagaggaggaaagcgaattcgagaaagaggtttcgaggcggttgcgagagaaggaaagagaccgtttgccagattttagcacgaatncgaaccatcgaaatcaaaacgaagataaagcgcaggagaaagagcaacggaaaatgaggaaaaaactggaagagagcgaggaggaggtgcggaagttgttgagagaactggacgtcgccagggagacggcggcgaagaggcgcatcgaaggaagtagcngcggagggaacgggtcgattggaacgattgaagttgggccgttcaacgtgccgaatccaggtggagggcaggatctcatcaacgattgcgttttgacgttcgtacctgggagaaggtacgcgttgattggaagaaatggaacgggtaagtctactttgctgaagtatttggcgtccagacgggtgggcgacaaggttggtttctccgaggatgttttcgtgcattacgtgaatcaagaggtcacgttgaacgaggagcaagaagaatggttaccagtggacgttgtgttacacgcggacgtgcaaagacgacttttgttggaggagttgaaagagttggaatccaacgcgagcggagaaggtgacgtgcaaaggatttctgtcgttcacgaacatttagattctatagagtcctcgtccgcgcacgccagagcgtcgcaattgcttcgcagtctcggtttcagcgaggaattagccagtcgtaaaatgaaacagttatctggtgggtggagagttcggacgagtttagccgccgcgttgttcgcgactcccgatatattattcttggacgagccgacgaatcatttgtcgattcaagcggtaatgtttttagcaaaagagctggtggagaatccagtttggaaatctcgcattatcgtctgcgtttcgcacgacagacacttcttggacgaaaccacgacggattcgttgcatatttccggcgtcgccaaacgagtcacgtcgcatcgaatgaactattccagttgggccaaaaagaggagagaacagcaaatcgcgttgaaaaaacgcacggaattgagacagataaagattgacacgctgaaggaattcgctgggcacgggttccgctacggcggctcctcgtcgcaaatcaatatgatgcagaagaaagcctccgaggcgaagaaat

SEQ ID NO: 1488 - DNA, 4000 bp, Escherichia coli
  misc_feature (47)..(47): n is a, c, g, or t
  misc_feature (64)..(64): n is a, c, g, or t
  misc_feature (67)..(67): n is a, c, g, or t
  misc_feature (72)..(72): n is a, c, g, or t
  misc_feature (74)..(74): n is a, c, g, or t
ttaaaaaatcaaaatttaatttattaaaatagatttaattaaaaatnaaaaaaaaagttgaaanaanaaaananaaaaaaaaaaaaagattggaaagaggctagaaataaataattaaaagaaagtgtaacaactgaatgataatatcaaagtacaaataataatgtatttatagtaaataataatgttaatagtaaatagtaaataaataaacaagttaataaaatagtattaaataataaaataaagaaaaaatattaataataatacagataatgtggtcatgatactattaatacaatcaatacattgatgtatcaatatttatgtcaacatagtacattaattattgtatcgtcaaaatactgaatattaatattaataataatgtattataatagtattattaattaatatatactattaaaaaaatagaaaataattttttaatttacactaaataataaataaaaaaaattataaaatttcgaaattttaaatatatgtagatttttcatataaaagtgaaggaatttcctttccaacattttttttttcaataaaaaaaaattttttttatttgtgaatataattattataatatatttattataataattgacagataataattttcttgtataaataagaataataatttaacagtaattaaaatgaaatttttatttaagggattggttcttgtctcagttgctggtcttgtattggctgacaactattccggagactgtaaagaaatttatgattatttaaaacaaagtaattatgaattaaatctaaagaattgtacaactaatgaagaaggtttagttaaacaattgtatgtatatgaaacaattctattataatatatataatataaaaacaaaacaaaacaaaataaaaaaaaaaaaaggaaagaatttatatttatttatatacaaaattcatttataattaaatattaatgaataatacagagacctttacacttattgtttaactgaagaagatattaaccaattaattcactatgaatcaattagtagtctgtaagtttactattcatatcaaagaatatacattttgaattagaattacaacaatatataataattttttaattattaaaattttatataaaagtaaccttgataccgaaaccacttattattccaatgaatatgatactttaaagaattgtaatcaattattaaatttaccagatgttattacttctttatcaaatttggaatccttgtaaataaatatttttttattttattttgcatttttaaatattaaatttatattaaaaatattattcaaaaatatattgataaatattaatatatctttcatatattgatatattaaaatttttatttttataattatgacatatacagagaactccacagtttaataaaaataaaagaaaaagatttattaaaaattccaagttcagttcgtaaattgtatgtataatatatttaaatttgttaattttgtaacattattataatttaaaaatgtcctattgtgaaattagtttttattgatataattatatattatatatcaaatatttttttttttttattttatattaaaatataaataaaattaatatatattatagaacttttggtgatgttgctcttgaacaatttgttattgatgacatttctcaattatctaatatcgaagaattgtaattattattttattttattttattttaaatattatatatttatataaaatatataaatttgtcagttattaatattgtctggcgttaccataaatactatatatatacatttttaaaattaattttttttagatctttcgttcgtactacctctaataatgaattaaattttgaaccaatcaagaatctttccaacttatcttctttgtaattaaaaactgaaattgatatatatatttttaaaaaaaattaaaacaacctatttaactattaactttttttttcttttttttttttttaatagatacatttctaattctgaagacagaagaactgttaaaaagtatataaatccatcatatttaaaaagctttaccaatcttaagaaattgtaagataccattaattatacatatatatattatataatattttaaatgaataaacccatttacattaatatatattttttttatgttaatgaaaatatttagtgaagcttttgaatactcattcagtcaagaagctattgatgccatttccactttaactaatcttgaagaaatgtaattattatatataaccataatgaaaatttgtataaatttaaacatgagagtaataacattataaatattaataatgttaatatttaaaatagtacttttactgaatgtggttttgatgaagatttagatactgaatccataggaaatcttaccaaccttaaagcattgtaaatattaattaaatataaaatatatatttatttctctttactaaatcattatcataataatatatatttaatataatatatcagcaatatgctcggaactacacaacattgtttagaagaaattgatatttttggtggtaacaattgtccattagatgaaattccagaatctcttttcactattgaaggattaaagaaactgtaggtgtagatataataataatcataaattacaaaatgatatttattctaattaatcggaccttattatatataaattaattatagtgtttacaataaacaaaaggaacttgattacagtgctttagaagatattggtgaacttaagaaacttgaatacctgtaagcattaaaattcttgtttatatattaaaactacgtatgaaaatcctaaaaataataatgtaataataatttttaataaatattatgtaaatatagtgatttatccggtattcaattaaatgaagttccatcttctattaagcaacttaaaaagcttcaatacctgtaaatataaatttaaaatttaatattataattaaaattattatatataaatttcaatactattattataatatcattattctaaaaaaaataattgtaatatatatatatatgaattaataaattattattaattggtattattaaaatcataatctgatttaatttaatacagtaatttaagcaataactttatcgaaactgttccagatattttcagtaaaattaagaatattgaagaaatgtaagtagtattaatatttaaaaaataaataaaataaataaatttaatgtaaaatatattaaaatatataatatatattttaattgtcaaatagtgatttaagttcaaattcactcaaaacccttccagctagttttggaaaacttaagaacctcaagaaactgtaaggattataaatttcaaaatatatatatatatttatttaatattattaaataaaagttattaatatataattttaaattttgtatttttaatattaattattataaaaatattatctatatagtaatttgggtctcaatgaatttgaatccattccagaagttttaggaaatcttaaaaatgttgaatacctgtaattatctgatacattatatttttttttctttcatatttataataaattaacaaatataaaatatataaatgaaatatttttatattatatatgatattcagtaacatggaatttaataaacttaccaatttatctaaatctcttggaaacatgaaaaaccttaaggaactgtaagcgcaaaatatattattaaaaaatacaatattatagattttatgataatagaaataaaaatttatcataaaataaattatttatacttatttattttaaaaaacattatattaataaaaatttagtgatttaaataccaacggacttactattattccagatgattctagtattgttaatctttctaaccttgaagttctgtaaatatgcatttttgaataattattagttata

SEQ ID NO: 1489 - DNA, 4000 bp, Escherichia coli
  misc_feature (59)..(60): n is a, c, g, or t
  misc_feature (231)..(231): n is a, c, g, or t
  misc_feature (1980)..(1980): n is a, c, g, or t
  misc_feature (1986)..(1986): n is a, c, g, or t
acaacatcatcttcttcttcttctggtgtctgttccgacgcgcgcggtagtattgcgannagtgaatcatataccgacgacagagtggtgttgtcgtcgtcatcatcgaaaggatttttggttcgaacgaaagctacgtattcgaacaacgacgacgaggtgatgaagaaagatacgaaaaaattgattgattacggtcgagtcggtgtcgcgttcgcctttccggcgttngccgggttcctttttggtctcgatattggcctctcttcgggcgcgctggagagcataaaaacatcctcatcggatttcttcaatttgactgcgtcgcaatcgggtcaaattgtctccgcgtctctttttggcgcgttgacggcatccgcggtcgccgccgccggcgccggcgagaagttgggatcgaggaaagaaatcgccttggcgggagtgttgtatttaatcggcgggactatggaagcgaacgcgcagtcggttgattttttaatctttgcgaaagctatttatgggttagggattggatttgccatgcacggcgcgccggtgtacatcgcggagaccgcgccgagttctctgagaggaactttgatttctttgaaagaagcggcgattgtgtttgggattttgtgcgggtatttttgcgcgagtcagtacgtcggggaagatgggggatggagatccatgtttttaacctctgtgccattcgcagtgttgacgttagtcggtgctgggttcatcttaccggattctccgagatggttggcgtcgaaaaatatggactcgtttccggcgctgaaaaaattgcgagggccgaacgtgagcgagatggaattgatgaacgaattagacgagatcaacatgtttgcgaacgtgaggaggaaagaagagatgggaagaacgaaatcgccgtttgcgattttagataagaaatacgcgaaagctttgtacgtcggcttatcggtggttttgtttcagcaattaactgggcaaccgtcggtgttgtattacgcgacgcaaacgttcgaggcggccgggtggtcggcgcaaggcgcctcgaacattgccgtcgtggttggcgtgttcaaactattcatgaccggtatagccgtgtggaaagtagacagtttaggccggcgtccgttgttactcggcggggtgagcttgattacgttgtcgctgatggttctagcgttggcctcgccggattttgcgggatccggcgtcgaggcagcggcactttcagaaacgcaagcgcgcatttccgtggctgctattttcttatacgtaggcgcgtatcaagtgagttttggtccaattgcgtggttgttagtcggggaggtgttcccgacgaaagtccgttcgcaagcggttggcatcgcgacgcttttaaacttcgggtctaacttcatcgtcagtttaaacttgccgtacgcgattgaacaaattggcatcaagtctacgtatttcgggttcgcgtcgattggcgttttgagcgtcgcttcgatatatttcagtgtcgtggaaacgaaaggtaaaacgttggaggagattgaagacgcgtataccgtcaccgcgacgaaagtcgaagaagatcgatgattttcttttacgaaccaggcacttcttcgaagatgattaggaaaatattaatataacagctgtattgtacctcacgcgaaatcactcaaccctactattaacggatcgtcgaacgatattaatctatccgctttagaaatctcaaccaaatctcgatcggcttccgatactccgcacgtttcgccggcgaaaagttctgccgtttcaccctttgcagtcacgcctcccggtaataccgagtacgcgattgaaggcgagtcgcactcgactttccgcaaagcgctagtgatgtttttaacaacgcgacattcgccagctctgagcgtaattcctagttgcggcccgaaaattctcgcgctctttaccganttcggnctgtaccagccagggaaacacgacggatcagacgtcgaggaaaactcgtttctgctcgaagaattttcttcacttctgctcgcgatgcgaacttgagcggcgttgacatcattgggatcgatggaggataaaaaggtcgtaaacaagtcatccaaatcattctccagagattctaaaaacgtagagtttgccgtgccgttcgtttgccgtgccatcgtcgtcgtcgaagacgtcgtttcgccatctgtctgtttggtcaataagatctcagcaacgcgcggatcggattgcgcgaccattttcatgagataatcgctcccgtcttgaagcagacgaactaactcagcgacagttggatccgacgtagtagcggcgcctgcgttgaacgagaagaggaacgcaaagacggatgcgagaaggattaattttctggatggaaacataatttttgtatcgcaatcgaaaacgaagcgtttttaatttatttaccttttcatcgtttttgtcacttcaacaatttaaactacttttcaagtctaacttgaagacgcgctgtgtttgtttcctaccatctctctcgttgccgatgctgttgatgctgctgctgctgccgaattcctctcgcaggacagtctgcagatttgtggccgaaaccgttgcagttgtaacacttcattcctccgccgccgccgccgccggagcggttgtatttcatcgaagaaggacaatctctctggaagtgaccaactttcccgcattgtttacaagctttagcttggggattaaacgggtgcgacaaaatgctcgggccgaaaagaaacattgattttctcccgttcttgaatgaaaagttaggccagttcgcgtactccgctttgagttgattcatcgcctctcgcagtttttccgtggctggattcggcggtaagggaggcggcgccgtcgcggattgaaagctagaaacaactggtggcgtcggtgctaccgcattttgcttcggtattgaaaagcccgcacctcctccggccgaggaaggcattggtgttgatttttgtccaatgagaggtcgtttgtattgcggcgttttcgtctcggaagcaactactgaggcggcggatgcctccgcagcgagagcagacttttcatccttctctcgcttttgcttccgttgttcctcctcttcctcttgtttttctcgaactcttttctttgctgtctgttcttgcttcttcttctgctcttctgggacgatgaactcaatcacttctatgcctttctttttctccggcggcacgccgttggtggcggtggtaggagttataattcccacagccgacggcgacttttctgcactcttattcttattcttatcgacagcatctttctcatcttctctcggaggttccggcgtcgactgtttccgcgctacttttccttctactacttttttgacttctacttctttcttcttcgccgatgttgccgccggcttcttctgcttctccgccgacgcccccggtgttttcttcgtggcacctttcttcttcttcgcgctgctctcttcttcgactaacgctacgacgctatccatcactcgctttctttcgctcgcgagagttttctcgtcgctcgtaaatgtgctcaaacacgtcactttctttgtcctgaaaaccttcgcctccaactccgtctctctccttccactcgccccggtgttcgtaaacttcatcgtcgctactctggtttcaaacacgttgtcttccaacgatttctttttcggaggttgcaccaaatgatgtctcgcattcatcacttcgacgatgtcgccgatatcaatccacccggaatcgtcctcggtgacgaagatttcgtactcgttcgcctcttcgtccgacatacttttgatttcgttcggctttaacccttgctttggacaaacgtcgatgaatttcccgacccactcgtgtctacattcgtttcgagtaagaattctaactcctttaaacgttccttt

SEQ ID NO: 1490 - DNA, 4000 bp, Escherichia coli
  misc_feature (3)..(4): n is a, c, g, or t
  misc_feature (6)..(9): n is a, c, g, or t
  misc_feature (13)..(18): n is a, c, g, or t
  misc_feature (21)..(23): n is a, c, g, or t
  misc_feature (26)..(26): n is a, c, g, or t
  misc_feature (28)..(28): n is a, c, g, or t
  misc_feature (31)..(31): n is a, c, g, or t
  misc_feature (33)..(35): n is a, c, g, or t
  misc_feature (37)..(41): n is a, c, g, or t
  misc_feature (43)..(46): n is a, c, g, or t
  misc_feature (48)..(48): n is a, c, g, or t
  misc_feature (51)..(51): n is a, c, g, or t
  misc_feature (53)..(54): n is a, c, g, or t
  misc_feature (58)..(59): n is a, c, g, or t
  misc_feature (61)..(61): n is a, c, g, or t
  misc_feature (63)..(63): n is a, c, g, or t
  misc_feature (65)..(65): n is a, c, g, or t
  misc_feature (67)..(71): n is a, c, g, or t
  misc_feature (74)..(78): n is a, c, g, or t
  misc_feature (80)..(90): n is a, c, g, or t
  misc_feature (92)..(93): n is a, c, g, or t
  misc_feature (96)..(97): n is a, c, g, or t
  misc_feature (99)..(99): n is a, c, g, or t
  misc_feature (101)..(101): n is a, c, g, or t
  misc_feature (103)..(103): n is a, c, g, or t
  misc_feature (106)..(108): n is a, c, g, or t
  misc_feature (110)..(110): n is a, c, g, or t
  misc_feature (113)..(116): n is a, c, g, or t
  misc_feature (118)..(119): n is a, c, g, or t
  misc_feature (122)..(123): n is a, c, g, or t
  misc_feature (127)..(127): n is a, c, g, or t
  misc_feature (130)..(134): n is a, c, g, or t
  misc_feature (136)..(136): n is a, c, g, or t
  misc_feature (138)..(138): n is a, c, g, or t
  misc_feature (140)..(140): n is a, c, g, or t
  misc_feature (144)..(144): n is a, c, g, or t
  misc_feature (146)..(146): n is a, c, g, or t
  misc_feature (148)..(148): n is a, c, g, or t
  misc_feature (150)..(151): n is a, c, g, or t
  misc_feature (153)..(155): n is a, c, g, or t
  misc_feature (161)..(162): n is a, c, g, or t
  misc_feature (165)..(166): n is a, c, g, or t
  misc_feature (168)..(171): n is a, c, g, or t
  misc_feature (173)..(173): n is a, c, g, or t
  misc_feature (175)..(175): n is a, c, g, or t
  misc_feature (177)..(178): n is a, c, g, or t
  misc_feature (180)..(182): n is a, c, g, or t
  misc_feature (184)..(184): n is a, c, g, or t
  misc_feature (186)..(188): n is a, c, g, or t
  misc_feature (190)..(191): n is a, c, g, or t
  misc_feature (193)..(196): n is a, c, g, or t
  misc_feature (199)..(199): n is a, c, g, or t
  misc_feature (202)..(202): n is a, c, g, or t
  misc_feature (206)..(207): n is a, c, g, or t
  misc_feature (211)..(211): n is a, c, g, or t
  misc_feature (214)..(216): n is a, c, g, or t
  misc_feature (218)..(222): n is a, c, g, or t
  misc_feature (225)..(225): n is a, c, g, or t
  misc_feature (231)..(231): n is a, c, g, or t
  misc_feature (236)..(238): n is a, c, g, or t
  misc_feature (240)..(240): n is a, c, g, or t
  misc_feature (246)..(248): n is a, c, g, or t
  misc_feature (250)..(251): n is a, c, g, or t
  misc_feature (254)..(254): n is a, c, g, or t
  misc_feature (256)..(263): n is a, c, g, or t
  misc_feature (266)..(268): n is a, c, g, or t
  misc_feature (272)..(272): n is a, c, g, or t
  misc_feature (274)..(274): n is a, c, g, or t
  misc_feature (277)..(277): n is a, c, g, or t
  misc_feature (279)..(279): n is a, c, g, or t
  misc_feature (281)..(283): n is a, c, g, or t
  misc_feature (287)..(288): n is a, c, g, or t
  misc_feature (291)..(292): n is a, c, g, or t
  misc_feature (295)..(295): n is a, c, g, or t
  misc_feature (297)..(298): n is a, c, g, or t
  misc_feature (302)..(303): n is a, c, g, or t
  misc_feature (305)..(305): n is a, c, g, or t
  misc_feature (307)..(307): n is a, c, g, or t
  misc_feature (309)..(309): n is a, c, g, or t
  misc_feature (311)..(311): n is a, c, g, or t
  misc_feature (315)..(315): n is a, c, g, or t
  misc_feature (317)..(319): n is a, c, g, or t
  misc_feature (321)..(321): n is a, c, g, or t
  misc_feature (323)..(323): n is a, c, g, or t
  misc_feature (325)..(325): n is a, c, g, or t
  misc_feature (329)..(329): n is a, c, g, or t
  misc_feature (331)..(332): n is a, c, g, or t
  misc_feature (334)..(336): n is a, c, g, or t
  misc_feature (338)..(339): n is a, c, g, or t
  misc_feature (341)..(341): n is a, c, g, or t
  misc_feature (343)..(345): n is a, c, g, or t
  misc_feature (347)..(347): n is a, c, g, or t
  misc_feature (356)..(356): n is a, c, g, or t
  misc_feature (366)..(366): n is a, c, g, or t
  misc_feature (378)..(379): n is a, c, g, or t
  misc_feature (391)..(391): n is a, c, g, or t
  misc_feature (406)..(406): n is a, c, g, or t
  misc_feature (412)..(412): n is a, c, g, or t
  misc_feature (487)..(487): n is a, c, g, or t
  misc_feature (554)..(554): n is a, c, g, or t
  misc_feature (589)..(589): n is a, c, g, or t
  misc_feature (1108)..(1108): n is a, c, g, or t
  misc_feature (1963)..(1963): n is a, c, g, or t
  misc_feature (3386)..(3387): n is a, c, g, or t
  misc_feature (3391)..(3397): n is a, c, g, or t
  misc_feature (3400)..(3404): n is a, c, g, or t
  misc_feature (3406)..(3411): n is a, c, g, or t
  misc_feature (3413)..(3417): n is a, c, g, or t
  misc_feature (3419)..(3420): n is a, c, g, or t
  misc_feature (3423)..(3425): n is a, c, g, or t
  misc_feature (3428)..(3429): n is a, c, g, or t
  misc_feature (3431)..(3439): n is a, c, g, or t
  misc_feature (3442)..(3442): n is a, c, g, or t
  misc_feature (3444)..(3446): n is a, c, g, or t
  misc_feature (3449)..(3451): n is a, c, g, or t
  misc_feature (3454)..(3454): n is a, c, g, or t
  misc_feature (3458)..(3460): n is a, c, g, or t
  misc_feature (3462)..(3474): n is a, c, g, or t
  misc_feature (3476)..(3477): n is a, c, g, or t
  misc_feature (3479)..(3479): n is a, c, g, or t
  misc_feature (3481)..(3483): n is a, c, g, or t
  misc_feature (3485)..(3489): n is a, c, g, or t
  misc_feature (3491)..(3492): n is a, c, g, or t
  misc_feature (3494)..(3495): n is a, c, g, or t
  misc_feature (3497)..(3497): n is a, c, g, or t
  misc_feature (3499)..(3503): n is a, c, g, or t
  misc_feature (3505)..(3505): n is a, c, g, or t
  misc_feature (3507)..(3511): n is a, c, g, or t
  misc_feature (3513)..(3526): n is a, c, g, or t
  misc_feature (3528)..(3528): n is a, c, g, or t
  misc_feature (3531)..(3534): n is a, c, g, or t
  misc_feature (3536)..(3537): n is a, c, g, or t
  misc_feature (3539)..(3545): n is a, c, g, or t
  misc_feature (3548)..(3555): n is a, c, g, or t
  misc_feature (3557)..(3565): n is a, c, g, or t
  misc_feature (3567)..(3570): n is a, c, g, or t
  misc_feature (3572)..(3579): n is a, c, g, or t
  misc_feature (3581)..(3583): n is a, c, g, or t
  misc_feature (3585)..(3585): n is a, c, g, or t
  misc_feature (3587)..(3587): n is a, c, g, or t
  misc_feature (3589)..(3591): n is a, c, g, or t
  misc_feature (3593)..(3593): n is a, c, g, or t
  misc_feature (3596)..(3596): n is a, c, g, or t
  misc_feature (3599)..(3602): n is a, c, g, or t
  misc_feature (3604)..(3604): n is a, c, g, or t
  misc_feature (3608)..(3608): n is a, c, g, or t
  misc_feature (3610)..(3621): n is a, c, g, or t
  misc_feature (3626)..(3626): n is a, c, g, or t
  misc_feature (3628)..(3628): n is a, c, g, or t
  misc_feature (3630)..(3634): n is a, c, g, or t
  misc_feature (3636)..(3639): n is a, c, g, or t
  misc_feature (3641)..(3642): n is a, c, g, or t
  misc_feature (3644)..(3644): n is a, c, g, or t
  misc_feature (3647)..(3647): n is a, c, g, or t
  misc_feature (3655)..(3655): n is a, c, g, or t
  misc_feature (3657)..(3665): n is a, c, g, or t
  misc_feature (3669)..(3672): n is a, c, g, or t
  misc_feature (3674)..(3679): n is a, c, g, or t
  misc_feature (3681)..(3681): n is a, c, g, or t
  misc_feature (3683)..(3687): n is a, c, g, or t
  misc_feature (3689)..(3690): n is a, c, g, or t
  misc_feature (3692)..(3693): n is a, c, g, or t
  misc_feature (3698)..(3698): n is a, c, g, or t
  misc_feature (3700)..(3700): n is a, c, g, or t
  misc_feature (3702)..(3703): n is a, c, g, or t
  misc_feature (3706)..(3708): n is a, c, g, or t
  misc_feature (3710)..(3720): n is a, c, g, or t
  misc_feature (3722)..(3723): n is a, c, g, or t
  misc_feature (3726)..(3729): n is a, c, g, or t
  misc_feature (3732)..(3732): n is a, c, g, or t
  misc_feature (3734)..(3739): n is a, c, g, or t
  misc_feature (3741)..(3741): n is a, c, g, or t
  misc_feature (3743)..(3747): n is a, c, g, or t
  misc_feature (3749)..(3750): n is a, c, g, or t
  misc_feature (3753)..(3754): n is a, c, g, or t
  misc_feature (3757)..(3762): n is a, c, g, or t
  misc_feature (3765)..(3770): n is a, c, g, or t
  misc_feature (3772)..(3773): n is a, c, g, or t
  misc_feature (3782)..(3782): n is a, c, g, or t
  misc_feature (3800)..(3800): n is a, c, g, or t
  misc_feature (3839)..(3839): n is a, c, g, or t
  misc_feature (3875)..(3875): n is a, c, g, or t
  misc_feature (3911)..(3911): n is a, c, g, or t
  misc_feature (3920)..(3920): n is a, c, g, or t
  misc_feature (3941)..(3941): n is a, c, g, or t
tanntnnnntccnnnnnnttnnnttntnaantnnntnnnnnannnnanttnannaatnntntnantnnnnnttnnnnntnnnnnnnnnnntnntanngngntnaannnanggnnnnannttnntttnggnnnnnancntngaantngnanncnnnctcttnnttnnannnngnantnntnnntngnnnannannnnccnatnattnnaaanttnnntnnnnnaantttttntattnnnantttttnnncnnttntnnnnnnnnttnnncaantnttncnannntttnnttnnatngnnctanntncngngntttntnnncntncnttgnanntnnnanntncnnntntaggtattncattttcaantcagattcttgnntttacttctaancttgaactagagagnaatacnaatgatactaacagtgattcaaagtttttagaatcagatgatttttctatgcctactgtttctcttgcgaatgcnaagagacaagcacttaggatagcagaagtctctcaaaatatggttgtgtcatcacttgcagtaatgngagatgataacgaaatattaagaaatgaaattatnaaaaatgaggatattgttgataatctctttgactctataaagctttatattgctcgaatattacaagaagagctttcaccaaaagaaagccaacaagcactcaatattcttaactttacaacaaacatggagcatataggtgatattgtcaataatagtttaatggacatttctaaaaagaaaatttcaaaacatatacagttttctaaagaaggtttcagtgagattatttctattcatgaggtagtatgttctgattatgatcttgctattagtacatttatgtcgaatgattgtgagttagctaaagttctgtatggaaaaaaacaagagcttcataaactggaaactaaatcagtctcaaaacatcttcaacgaattggaaagggagttactgatagccttgagactagctcaatgcatattgatgtgataagagattataaaagaataaatagccttttatcatcgatagcctatccaattctatttgcatctggtgagatattagaaactagnttaaaggaaaacagctaattattaaggtgcaataaataagtactttaattttattaattcatcttgagagctctgcattatttctccttttgtagagttctcgaaatgtttaagactgttagatcaaggttttcataaatttaagagtgtttttaaatttatatttcttttattttgaatttaaaattggtggaatttttaataggtctttaaatttctcaatttgataatcagactctttgcagtcaggatctgggttgaagataattgtagtcaatcctattgctttagcaccatcaatttcaattttagcatgtccaacaaatgcagcattttctgggctttcattaagaggttcaagtgctgcaaggtatattctagggtctggcttggttatttgaagttcaaatgaatcagcataagaatcccaaatatcactaattccaacagatttaaaccaagtatttttttctgttctagagttgaatgtatttgttacaattccaagattaaatcctcttctttttaactcatgaagtgtttcgggaacgccttcaaaaaaatgtacatcactctgttggtttttcagtaacttaattccatcagcaaaatctgatgaatttgtgacgccataatgctccattagccattcaaaaaaagattctgtttcaattctccctgcatgtgcgtctcgtcgttttgccttttctactggatcattttcaagtggagcagaatagcctcgttcagtaagaaatttaatgactgatgatttacgattaggtttgttgtagagaatgtcaccagcatcaaagagtatggtttttaaaagcacattaattccttatttatttnagataaatttaatattaaacctaggtatgaaacgccttggctaaaatataaccaaggcgaaagttgtggtattttaaggcattaaagtaagataaagtgctaggaaaccaaactttgaataatagatttcctctggatctactggccataggccaagatctccaaatgccggtaaatcaaattttactaattgcttagcttcaaggtttgaacgcgcagcataatcacctggttcgttccaaggtttaaagccatcttcctccatcatatatcggattaaaagtttagctgcatttggatgtggtgccatatcagctatcactaacgcagttggataagttacaccaaaggctggatcaagatcgtaggctgggcctgaagaatatactccttccttgtttttacgaagttttgaaaatgtagtgattccaattggtggcttctcttgagtaacatctccaacatttttaaagatttttgttgtagatccttgaaatacgggttcattatttaagaatctatagagccattccattgaagcagttggggaatctaatgtagcgttttcttctacggcttcaataacatcctctgaaaaagttatctcttcaccaaattctcttttgtaagccgcagccatttcatctgagttatttaagactgtttgaataaaattagcagataagctatcttcaagagggctaggtaaaagaacgcgacccttccattcatcacgggtcatgtcccatagtgagtcaagtggcgctccatctggatgtacagctgtattgtaataaacgattcgactagagtgacgttgaatcaacaatggattcatttcgccagattccaaatctccggctacactttctggaatgaaattccaaaccaattgttttggtagggcttcattaagtagaatcgaagattctgaattaaacaaaacatctactgaatgaacacctgctcgatgctcacgcgatagtttttctagttgaaggtcagagggaatatcgtatcctataatatcgatatcatagcgctctttaaatccatcaactaattttgcaatgcgtgaggatactgaataaattactacctcaccttcttcacgtgcagcagcttcaattgcactccagttttgattgtcagacgcataacttccaacacctgcttttttttgccacgcttcatcagcttgaactgatccaatagaggaaaatgctaatcctaaggataaagcaaatacactaattgatgccattttttccatttttgttctcctttttaagtttgacttacaatttgatatttacaaattattaatattttttatacttacgattttcttataccatatagtttagatttatgcaataattattgcaataaatttaaatcgtgctataatttttgcaaaaannaaannnnnnnccnnnnnannnnnnannnnnannaannnttnnannnnnnnnnaantnnnttnnnggnaaannnannnnnnnnnnnnnannantnnntnnnnntnntnntngnnnnncntnnnnngnnnnnnnnnnnnnntncgnnnnanntnnnnnnnaannnnnnnntnnnnnnnnnannnntnnnnnnnntnnnangnannntnggnttnnnngntttncnnnnnnnnnnnnaaaantnannnnngnnnntnnanttnaaaaaaantnnnnnnnnnaaannnngnnnnnnantnnnnntnntnnaaaangntnnaannntnnnnnnnnnnntnnaannnnaantnnnnnnantnnnnncnnttnnaannnnnnttnnnnnnanncaaattgangaagtagtaaacaaaatntataaagcaaaaagtatttttatagttggacgaggaagngctgctccattaatgacacattttgaacgtcgtctnagaagatcaggtattcagtgccgtgttgcattaaanttgcaaagnagggatttagctgaacaactnattggaattcaaaaaggtgatgcaattgttgtttttggttttcagtcaattaactctct

SEQ ID NO: 1491 - DNA, 4000 bp, Escherichia coli
  misc_feature (294)..(294): n is a, c, g, or t
  misc_feature (443)..(443): n is a, c, g, or t
  misc_feature (1052)..(1052): n is a, c, g, or t
tcagccttatgttgttgatgagtaacctcgtgtccagacagagcagctaatgctagtacaagctcttcagtcgcatgaccatataagaacttcattaaggtagctggtgtcatagactcagctttatagttcctatgtctataccaaaggtatctatcttgcttaccgatactactcattcgtaaagcattactctcttcatgcttcgtaagtacttgattcttaaggatattcttcattgcctcaccaaagttatccacaatcttatccacatctacaccttcggctgcttcnttctttactaacacctcatagatgtcatctactaaatcttcaatcttcttcataactactcctagtgagtttcagcccacgtatctcctactttaaattcagcatcaaggggacagttcatctcatagtatgtacctgcctcaatcatnctccctactgccaagcttccgaatagaccagcttgttcttcttttacttctgtttgaatctcatcgtgaatattacccacgaacttataatcaatattgtaactcttagcatacccatccagtattactaaggctctcttcattactatcgcacctgctgattgtagtaatgtattcagagctgcatgtggacttctgatgtttaacttcctatcatctaatcctttaattgtgccttgttcagacaacttagtaactctgtctcgtaaatctttaagtgctggcgtattagcaaggaagtctttcttaagtcgtttaccatcgctacttgttcctccgacaatgtcaccgattttcccatccccagctccgtacaagaaagcatagatgaaagtctttgcctgatttcttgattcaagtcctgcagccatttgatttgctgtgtgtatatctccatctacaacctccttagtgtaatcttcattgttcatatagtgtgccagcatccttaactccagacctgacgcatccatccctactaacttataaccatctcttactttaaatagactcctacattgctcaccataagggctaccactagcaggnacttgagctagattaggattgctatgtgtcatcctattagtaacagcacctataggattaatataagcatgtatcctatctaatacacctgccgcttcaatccaagaagatactaaccctagtctcttttgtaacattaagtatctagctattaacttaccttcaggaaactctacattctctagtatagtctctgatacttgaggtatcccagtctcagttaactcagttggttcccatccataatgtattaggtgtctggctatctgcttcctactacctaagttaaactcagggtaggtaatcttaccccacccttgttcagggtctaggtaagctaatgaatctaattgtctttgtaaggaagctgcaacttcaccatcaatagtataaggcttgcttggaaagctcagtgatacaaaggtaggtagaggtacaaagacttctcttacttcatcttcagccttgaacatctcagacttaagttctgcttgtagagttatagcatccttagtattgaactcccaaccattaatcttctgttgatggattatcttagctaccttatactctagagttatggcatctttagataacttctgctgaagtagtaggttgtataaactatatgtaaccttgacatcttgaatacaatactcaagcatctcttggttatagttactccaagcatcttctttcttaccgaagtcacctttagcattacctagtctctcaccccaagcatctaagctatgaccacctttacgacttggactatctaacctagacagtaccaaggtgtcttcaatctcaccccaccaagtgaagtgtagtaatctttctataactggtatgtcaaagttgataatgttatgacctattagtacctctaccttgttatcttgtagccaaggtatgaagtctttaacatccttaggttcaaaggtagtaggctcatcccacctacctactatcttggcagcaatacaccagatgactgatggattaagaccattagtttctatatcgaatattgctttaaccattacatctcctcgggggctactgtttctctaagtctccctgtttctgcatcatattgtaagtaccctgtgactcctgtctcacctgtgtacctattctttagaatcctcagtgtagttgtgttcctaatgagagggtcatctgattgttgattacgttctaaggcaatgaccatattagataactgagctataccttgtgaacctctaaggtgtgacaatgagatagaacccccttcttcatgcggtgtaccttgttgtcttgatagatgggatacgaggaataagccaatgttagtctcaactactacctcacgtagcttagtcattaaagcatcgatgttcctacgttcatcacccttagcatcaccagacattacaaggttaagatggtctaatacaatccacttaatgttctgagccttagccatcaacttgatacgacttactatcttctcaatggatagttctttgccatcatataaagttaaagcttccccttcatctctttgaaagagttcatcgaaagcttcttcggctacttttcgtttagttaaagctctacattcatctaagtgataaggtctcttaaggtggatacctacaagaccatcaatagttctctcagttgtttcttctaagtgaatcactcctactctatcaggtgtctgagttaataagtggtactctagttctctaaccactgaagacttacccatacctgtgcccgatgtaagcgttaccagctcccctagtctaaaccctttagtcatctggttaagacatatccaagggtaagctactgaagctgtctcaggtctctctaaccaagtatcctttagttgtgtagcacctataatgtcttgaggcatccagctcttagcgttccagaaacactctgtaatttccttaacaagaccagcttgtagcatatcactgatgtctttgtaaccctcagggtaggacataatcttaatcttctctggtgagaacatctcgatagctttatcaatagccttcttacctgcctcatccttatcaaaggctagtacgatataggtaaacgaatcaaggaagtcatagctttgttgtattgatttctcaacactggagctaccattcttaagggaacacaccgcccacttgccattgaatacctcagctaaggatagagcatctatctcaccttcagttactgtgatgtacttaccacctttatcccatagacactcaccgaatagaccagtatctttgaagctaccttctgtatggaacttcttagtaggaacatctcttactttataagctgtaactctacaagcttggtcagtgaaagggtagtaatgtgtgttaccatcttcagatactctaacttgatactgcttacaaatagcttcagagattctacgcttagggatagcaccccaagtccctttaataggtaactctacgctgtttgttatcttccttgtataagaagtagatacttgtgctgtagctttaccatcccagaagttacatccttctgtaaagcaatgcttatggtcatcatagaccgctacgttgtcctcacttccacacttgggacacgcctcatgcttaataaacttactcattttgaatcctcattctattgttttataattaagtgactgcttgctcacacggctgcagtcatcaccgtcttaattactttagcatcatggagtacgctaaagaagtagtgagcttactaagagattagaaagttgattcatcctcaaagaacccagcctcagccccatggtctccaccctcccccatctctaagactagcactcgtttaacataaggcacttcacctgctgttggatgcttcttagtaatgtactcaagtctcactttagtaccactcggtaactcttt

SEQ ID NO: 1492 - DNA, 4000 bp, Escherichia coli
  misc_feature (5)..(5): n is a, c, g, or t
  misc_feature (8)..(8): n is a, c, g, or t
  misc_feature (10)..(10): n is a, c, g, or t
  misc_feature (13)..(13): n is a, c, g, or t
  misc_feature (17)..(17): n is a, c, g, or t
  misc_feature (21)..(21): n is a, c, g, or t
  misc_feature (23)..(23): n is a, c, g, or t
  misc_feature (32)..(33): n is a, c, g, or t
  misc_feature (35)..(35): n is a, c, g, or t
  misc_feature (41)..(42): n is a, c, g, or t
  misc_feature (45)..(45): n is a, c, g, or t
  misc_feature (62)..(62): n is a, c, g, or t
  misc_feature (78)..(78): n is a, c, g, or t
  misc_feature (116)..(119): n is a, c, g, or t
  misc_feature (161)..(161): n is a, c, g, or t
  misc_feature (215)..(215): n is a, c, g, or t
  misc_feature (262)..(262): n is a, c, g, or t
  misc_feature (269)..(269): n is a, c, g, or t
  misc_feature (411)..(411): n is a, c, g, or t
  misc_feature (458)..(458): n is a, c, g, or t
  misc_feature (1271)..(1271): n is a, c, g, or t
  misc_feature (1823)..(1823): n is a, c, g, or t
  misc_feature (1968)..(1969): n is a, c, g, or t
  misc_feature (1971)..(1972): n is a, c, g, or t
  misc_feature (1974)..(1975): n is a, c, g, or t
  misc_feature (1978)..(1979): n is a, c, g, or t
  misc_feature (1981)..(1982): n is a, c, g, or t
  misc_feature (1984)..(1984): n is a, c, g, or t
  misc_feature (1986)..(1987): n is a, c, g, or t
  misc_feature (1989)..(1992): n is a, c, g, or t
  misc_feature (1995)..(1998): n is a, c, g, or t
  misc_feature (2001)..(2008): n is a, c, g, or t
  misc_feature (2010)..(2011): n is a, c, g, or t
  misc_feature (2013)..(2014): n is a, c, g, or t
  misc_feature (2017)..(2018): n is a, c, g, or t
  misc_feature (2021)..(2021): n is a, c, g, or t
  misc_feature (2818)..(2818): n is a, c, g, or t
  misc_feature (2986)..(2986): n is a, c, g, or t
  misc_feature (3517)..(3517): n is a, c, g, or t
  misc_feature (3521)..(3521): n is a, c, g, or t
  misc_feature (3781)..(3781): n is a, c, g, or t
  misc_feature (3790)..(3790): n is a, c, g, or t
ttgcnttnanagnatancatncnctttatggnntngatatnnttnctcctgaaaaggagggngtggtaaagacttttncttggaaagatattgaaacaacttcttttccaatgcannnnttacccaagtttgatgctatcatccatttggcaggcaaagcncatgatacaaagaatcagtctgcttctcaggtatattttgatatcaatacaggnctgacacagaagatatttgatttctttttagaatcatctgcgaagangtttatntttttcagttctgtgaaagctgccgcagacagtgtagtgggggatatgttgacagaagatgtgatacctactccggttggtccttatggagaaagtaagattgcggctgaagaatatattcttagtaaattgagaagcgagnatggagaattgaaagttgctatgcagcgcgataagcgagtgtatatnttgcgtccttgtatgatccacggtcctggtaataagggtaatctgaacttgctttataatgtggtaaagaaaggtatcccctggcctttaggcgattttgagaacaagcgttcttttacttctatagataatctttgctatgttgtggaaggtttgttgacaaaagacgtagcgagcggtatttatcacatgggtgatgacgaagctttgtctacgaatgaactgattgctcttatgtgtgaagctatgggtaaggagcctcacatctggaaaatgaacagaaaaatgatggaaggttgcgcaggcttgggtacgctgcttcatttgcctttgaatacagaacggctgagaaaactgactgagaattacgtggtaagtaatgagaagataaaatcagctcttggcattgaccggatgcctgtccgtgcggcggatggaataatgaaaacaatacggagtttctaacctatttataaattgtaaatcgtgtattatatcattatattagttctgctctttgtagcagaacttttttattttagagtagctgataagtttaatatcattgataagcccaatgagcgtagttctcattcacggataactttgcgtggtggcggtataatcttctattttggagctttagcctatttcctgagtaatcattgggagtatccatggtttatgttggcattgactctgatcacttttatcagttttgtagatgatgtccgttctacttcccaaggtctgaggttggtgtttcactttactgctatggctctaatgttttaccaatggggcttgttttcnctttcctggtggtggatcattatagctttgattatttgtacgggtatcatcaatgcttataattttatggatggcatcaatggcatcacaggtggttattcattggttatccttggtgcattagcttatatcaattctgagatcactacgtttgttgaaccggctttgattaataccgttctttgcgcagtcctggtcttttgtttcttcaatttccgtaagaaggcgaagtgttttgcgggtgatgtcggttctgtgagtatcgcttttattcttctttttctgatagggaagctcatcattaaaacagaagatttcagttggataattctgttatccgtttatggtgtcgatagtgttctgactatcattcatcgcctgatgcttcatgagaacatcggtttgccccaccgaaaacacatgtatcaattgatggcaaacgagttgaaaatacctcatgttggggtatcattaatttatatgggggcacaggctttggtcatattaggttatttctgtttcgtgagatatggttattggtatttgttgggnataattgtattgttgagtggcatttatgtgttgtttatgagaaggtattttcatttgcatattcaaaagggaaaataaaaatgagtctccggctttaggaaacaatgcgatgaatatctaaataaaaatatcctgttttttttannannannggnngnnangnngnnnnttnnnnaannnnnnnntnncnnccnnttntttttttatagtttaaaattctacaactttttttctatccttataactttattgtatatttgccgaaacaattctatattcactgaatgggcttatttaggaaaataatatatagtttttttcttttcttactgatatccatttgggggctttcatcagcctttgcggtgactggagaacacccagtactgattatcagttcgtataatccggatgctcgtcagacttccggaaatatatacgatttcatggaagagtttgagcgtctgggtggaaaagctccgatagctttggaaaacatgaactgcaaaagcttctccgagtcgccacagtggaaatcgaaaatggcggagatactggataagtatgagggaaagcgcgcgcctgtattacttgttttaattggtcaggaggcatgggctgcctatctgtcgcaagcagattctatacgtggaaagttcccggtactgacttcgttggcaagccgcaatgccattattcttccggatgattctgtaaatctgaaaacatggatgcctggtgcagtggatttctttaatgactttactgattcttcagtcaaagccggttttgtttatgaatatgatgtggaagccaatatcaatctgataaaacacttatatccgaatactaagaatatagcttttgtttctgataacagttatgggggcgtttccttgcaagcccatgtagtagcggagatgaagaaacatccggagttaaatctgattctactggatggacgtaccaatacgatttataccatcagtgataancttcatgaattgcccccgaatacagctttgttgatgggtacctggcgtgtggatatgtacgacggatattttatgcgtaatgcaacttataccatgatggaagctgcgggtgatgtacctacattttccattagttctgtcggtatcggttattgggctataggtggngtgacaccctcttatcggccattgggcaaggatatggcgtatcaggcagtccgtctgctgcaaggagctgacagtgatcgtatagaagtagaagtcatccctaataaagtgatgatggatagtaagattgtgaaggaaaagcgtctggatctgtcttttattcatcagccgatagaaatggtgaatgaaaatccatcgttctacgaacaatataaatatcatatctggactgttgcaaccattttagtcgtgttatctgcggggttgtttgtttcattgtacttctattaccataccaaaaagctgaaagatgaactgcaagagtcggagagtgctttgagagatgcgaaagatcgtgcagaagagtccagccgtctgaagagtgccttcctcgcaaatatgagtcatgaaatccgtactccgctgaatgcaattgtgggattctcggatgtgttggcttccgggggaagttcggaagatgaacagcaggggtatgttgatatcatcaaaaccaattctgatttgctgctncgcntgataaatgatattctggatgtttcccgtctggaggcggaccgggttacgtttacatttgaggaatgtgatgtagtgccgttgtgccaacgcgttttggcttccgtcagtcaggctcgcaagtcagaaaatgaatttatctttgagtgtgaccgtgaaagcatggatatgcgcactgacactcagcgtctgcaacaggttatcataaatctgctttccaatgccgataagtttacccggaatggtaagattactttgggnctgaaagtngatgagaagcagagagaagtcctgttttctgtctcggataccggtacaggtattcctttggagaaacagaagcttgtatttgagcgatttgaaaaactgaacgagtacgtacagggcacaggattgggactttccatctgtaagttgaccgtagagaagtggggaggagagatctgggtggatccgggatatacggatggggcaagattt

SEQ ID NO: 1493 - DNA, 4000 bp, Escherichia coli
  misc_feature (1985)..(1985): n is a, c, g, or t
  misc_feature (2952)..(2952): n is a, c, g, or t
cggcccggagtcacgcagaagacctgcgcagcctgcttaagctcccgagccacagatgccgctcaggatcatttgcccatcactggaggcggaaccgctggcaaggtgaagcgaaatgcagcgcctttgcccggagccgtctcgagtcgcacctcaccgccgtgggcctggatgatgtgcttgacgatactcaagccaagacccgtgcctccctgctcccgcgaccgggctgtatccacgcgatagaaccgttcgaaaacccgctcagcagcctcggtcggaatacccggaccgtcatcggccacggccagctcgaccaagtctccgcccggaaggtcgcgcccctcgatgcgcaccctgccaccggggcgaccgtatttgatggcgttgtcgatgaggttcgacagcacctgatccaggcgatcggagtcggcacgcgcatgcaacccagcgggcacatcgttgatgagctggacgccgcggtcctccgccttgcggtggaaatcgtcgaacacctccgtcacatgtccgcgcaatggcaccgtgtcgtaattgatggccaactgaccggactccaatcgggacaaagtcaggagatcctcaatcaggtaggtcaaccggtcgcaatgacgatcgatgatgtcgaggaacttggaagcgatcgccggttgcgacgccgcaccatccaacaaggtctccaccgaacctttgatgagcgagagcggggtgcgcaactcatggctgacattggccacgaattcacgccgggttcgctccaactgacggaggcgcgtcgcatcgtgcaacaccatcagcacgccatcggtccgcccctcgggcccgatcaaagcgacggcattgacctgaagcaaccgggcttctgatccaccttccaactccaattccttgccgttgacccgccccgccttggccgcctcggcagccaccgccgaaagatcgttgcagcggaaggcctcgaggagcgtacgaccccgaacatcagcctcgagatcaaaaaatcgccggcacgcggtgttggtgaactgcacccttccggaagcgtccaacaacagcactccttcgagcatgttctcgaagagcgcctgttgccgggcgttctcggccgcctgggattcagcccggctggagcgctcgcgagcgagttgatcacgcagggctgttgcctctttggtcactcggaggcatcgcccccgcatgaacaaggtaacgaccaatccagagattccagcacccagaaccgccgccagtaatggagaaatcgacatgctcgggactcaggcctccatgaagcggtagccgactccgcgcacggtgtccaagtactgggccccggctcccaatttttcacgcaggcgccgcatgtgggtatcgacggtccgggtgtcgatgaggttgtcgtattcccagacatcgcgcagcaacgcctcccggctctgaacacggccacgtcgctgagccaacacgatcaagagcttgaactcggtggccgtcagatcgacccgttgacccgcaacactgaccaaatggcggggaatatcgatgaggagatcgccaaactgcatcgtctgcggcttttcctcctccgtctcgctgcgacgcttgagcaaattgcggatgcgcaagatcaattcgcgcgggctgaaaggcttggtgacgtagtcgtcggcgcccaactccaagcccaccacgcggtcgatctccgcggccttggcagtcaccatgatgatgggaatgccgctggtggccgggtctcgccgcaacagcttgcacacttccaagccatccacctcgggcagcatgaggtccaggaggatcaggtcgggcaactgttgacgcgcctttttcagcgcagcgtcgccgtcatccgccgtcgtcacctcgtatccggcgttcttcaaattgaagcccagaacctccagcgcatcgggttcgtcgtcgacgacgagtatctttgccataactcncactggttctagcatcaatgccatggtcgctccgtgtcggtcaggttacaagtccgtgacttgacccgatttcagcgacgtctgtgatcccattcaacactgagatatttgtacgggtgaacccctgcaaacccactggctaggggaggtgcttgacctacacagggtgtcgaccaaggtgcaacccatgtgtggccggtacagtttgacgcgggaatccatggaggtggaagtcgggacccaacgcgtctcacgccgtggaaaaccccgttacaatatcgcgcccacccagcgcgccccggtgatccgccggaaggccgctggtttggcggtggacgacttgcgctggggactcgttcccgagtggtcccgcgatgaggccatcggtttttcactcatcaacgcccgttccgaaaccttggccgacaaacccgccttccggaccgccttccgaagtcggcggtgtctcattgtggccgatgggttttacgaatggcaggtcctcggccggtccaagcaaccctggagattcagacgaaccgaccccgacttcctgctgttcgccgggctgtgggaatcctggtcatcgcccactgaagctgccccactcgaatccttcaccgtcatcaccacggtcccgaactccgtggttgcacccatccacgaccggatgccggcatgcctcgaccgggaagccgcggcgctctggctggaaccgtcgtccccagtggaactcctgcaaaccctcctcaggccgagcccggaggctgactggtcggcctaccgggtgaaccccatcgtgggccaggcccgcatcgacgacccacgatgcatcgaagcgttcgctgaacaaccgagcctgttctgattctggccccaggcgaagagaggcgcaggccgggttccagctcagtcgaaaatcgggaagaaggtgttgaaggccttctcgcagaaataccccgggtcnttgaagcggcgatggcggtcgagtgcatcgatggcctgcatttgcccatcgctcagcgaaaagtcgaagacctgggcattatcgcgcaaatgattgaaatcctgcgccttcggaatgacggcgcatccgcgctggactccccatcgcagcaccacttgggccggagtgcgccccagagccgcggcgatgccggccaccacgggatccaccagcaccgactcctccggtcgggccatccccaagggcagataagacggcgcgcccagcggcgagaacgccgtcacggcgattccctccgactggcagaagcgcacctgacgttcctggatcaggtacggatgcgcttcgaactgatgcaccgccggccggatggaggccgtgttcagcacttcccgcagcatcgagacgttcaggttgcacacgccgatccgcttcaccaggccggcccgctgcaattcttccatcgcaccccaggtgtcggcatagggcacggcgatggggttcatggccggcttttcggccgccggatcgaagaaccactctggcggatagcgcacgtcgaagggcacgtaagccagagcgatggggaaatgcaccaggtacaaatccagaacatccaagcgcaggtcccgcagcgaccgctcgcaggcggcacgaacgtgcttcggttcgtggtaggtgttccacagtttggaggtgacccagaggtcgtcccggcggcaaaggccttgctggacaaccgaagccaaccccgcgcccacctcggcctcattgccatagtcgcaggcgcaatcaaaatgccggtacccgagccggaccgcctcgcggatcaccgccggtgcctgcggcttgggcagtttccaagtacccaggccgagcgtcggaaaacccaggtcggtgaaggagcgaaggtccggactgagtcgcgattggggcaagcgctgcgtcatcttgggaaccatttgggttcacccgacggaaatccagcccctgctcacgatccttcggacgccgatgccgatcgtcagaactccgcccacgttcgaag

SEQ ID NO: 1494 - DNA, 4000 bp, Escherichia coli
agggttagaaccgagactgtggtgtcgatcttggatagctgaaaatcgtcccaatcctgagtgtaataagcagcgtttagacgtaaccgaccgtctacgaagttacccttcatacccagttcgtagctggtcaggatgtctgcctggtaggcacctgctacggccgtaacgctgagacgattcaacccgccaggtcggtagccttccgagaaggtaccgtagaccaagaggtcgttgttgacggcataggagacgttaaacttgtggacgtctttagattcgtcaatggttaaatcattgttgaattcggaatctcccctcggtccgtaacggctgggccaccagatagtgcccgagaagccaaccaaagaggactcatagttaaaatagcgagtgctataggagaccgataaatcttccgtaaggtcataagcgatctcgccaaagtaagcagtctctttgttgccacggatctggttcgtcgtccaatagatatcgggtggctcaacatacccaggggtgaatgccccggtagtctccggcgtgatcgttgcaagacctagcacgtgccaatctaggtcgaaatcgtgtgtagcttcctcataaaatgcgccaacgatccaacgaaaacgttgatcttgagctgagaccaatcgaacttcatgattttcccgcgcccactcttgatcacctgtgtaaagcaaggttgggtcagcgcagatgccgaagtacgagacataacaagcgtagtagccaacgacgtagcctggtgaaccgttgctgggatcagaatacaaggagtagtctgcgttttgatatgactcacgatcgaggtccgagtaggcataggtcaacgacatatcattgattttgccctctaccaccagggcgctttgggtccattcatcatcattggtgtcaggttgaaatcgcacaaccgataaatcgccaacgtctgtcgggtcatggtcccaaacgcctttcgcttcaagctcttggcgcatgacgctcgcggtaaccgtccagttttcatttaaatcgactcgaagcgcgacgcgcccaccggtcgtttcggcggtattaaagtcttcttgaacatagtctgcattgtcgatggtttgatcggcggccatctcaacaagcgctgggtcgtcagcaacgcttgctcgaatgccggataagtcaaaagtatgggtccccggcacgttatcgatgtaacccgcttcgtctttgcgatagccgacaattcgaatagcggccttgtcgcccagaggaatattcacaaagccctcgatgagattaccggtatcgccctcattgaccgaattaaattcaacatcgtagccagctgaaaatgcgccaggtgtcggtttgttggtgataaatcggatgctgcccgcctgtgaattggccccatataacgtgccttgaggtccagcgagagtctcaattctggcgacatcgtaaatgtgggggttcagaaaagagcctacggccgtcaccggttgctcgtccatatagaccgcaacgttaggggttgcaccaagaaggctttcgccaccgcttgagatgccgcgcatgtagacgttgccagtgcccgggcctagcgtgacgtagttcagtgaggcgatcaaatgagcaaagtcctcgaggtcaccaacaccgttattctcgagttcgccctcactaagtacatcgatactaatgggaatatcttggacgctttcgttgcgccgggtggctgaaacaatgatctcctcgagctcatactgctcttcggcgagcgcaatgtggcctgcacctgaggacagcgccacggctagtgccagaggctttatcataaaatttggtttattggttgcctgtttggtcatcaaaatccccttagatttagccattattgggcggtttttgggaagtaattcccactcatgaagaccatgacggcaagtcattaacttgtgtcagatcttaaaatagagcgaattgatttttacacgcttctccgagacatacaaatcgggtggttaacggcctgattagctgcctacaggcttgactcatgcaaagtgatccagggcgctagaatttctctcattggttcgaggtgggattcatagttgcgccattgctctagcgcgccactatagagcggttgtctgacttgctcagagctggcagtacgaatcgcgcgatcagtctgatgaaattcaaggcaagcggcttcaaagggaagtccgcaataatccaaaatgcctctgacctcctgttctaggttttcgatcactgactcatagttaaccctcagcaccttaccgggaagcacattgtcccagtgcaacattaggcgggcgtagtccgcgtaatatcgagcgatatcagtttgactgtaggtaaaagtttggccagcggcaaacagttgcttgtatccactaaagcaggtcgccattgggtgtcttcgggcatcgataatttttgcattggggaggatcttgctaataagcgcaacatgttggaaattgttgggcattttatcgatgaaatacggcgcctcctgacgttggattcgggtgcgttccaaatattcagcccctaacgatcgacacgtctcggcggacaaatcaaacaaaatttcagggtacagcgacgcgtcatcgcgattgcgcttgccgcctaatctacgcgcgatcgcaatcatttcccgcagttcagaggtgccatcgacgagcgagtgactggctagaatttgttcaagtaaggttgagccggcgcgaggaagcccaacgataaaaatgggatctggcgcgggatcgcctgattctggctggcgcgctagacgcgcttttgagcaatgtgtaattagggcagtcgtttcggcctcggtgtcatcggcctgatagccctctagcggctgtttgcggttattaccaagctcatagtagcgaaaggattcgtcaaattgtttgtcgtcctcaagggccttccccaacgcaaagcacaagtgatagtaatccctgggtgcactctggtcagtatcgataagctgacgcatggcactgacatctgctgtctcaaaacggaacgtcttaagatttgccaagttccaataggtttcgcccaggctgggtttgacggtcatagcctgacggtaagcagcgatggcgtcttgttgtttacctagggtcttgagggcatgaccgtgactattgtgtagctgtgcatataacggaaagcgattggtaagatcggtatatcgagcaacagctgcctcgtaatttccgaccatgacctcgatggatgctgccaaaatactatgggaaaaattctgcgggtcaacacgctctaaataactgatttgttgcagggcttgttcatatttatgagcttgaccaagggcattggcataagtgtttcgggcgagatgaaaatcgggcgcgatctttaggcagtcttcaaggagcaactccgggtcctccttgatgccgagcttgatgccaatctcagcgagtagcctgattaccgtgacatcctcaggatgacgctttagatagtccctgcaaataccttcggccatgccaagtctttcctgctgcactaggtcgatggcctttacgatcgctgggtgagtgtggctgtgcgcgagcgcctgtcgaatggcatgctctgcctcctgagcctcgccctcgctatgaagcgattcaccgagtaatcgccaactgaccgcaagcgtggggtctatggataacgcgtctctgagtgccgtaatagcatcgtcgatctgaccaaggccgtgaagcgcctggcctaattcttggtggataatcgcaaccccttgagtgccagcggcaagccttcgtaacgctaatacagcttcctcgagtcggcctaagcggcgcagtgctgctgctcgtaaatagtgagttttagcgtcttttggatgaacgtccaaaatcgcttccgcttgcgcatgggcgagctcaaactggccggtctgcagcag

SEQ ID NO: 1495 - DNA, 4000 bp, Escherichia coli
  misc_feature (2)..(2): n is a, c, g, or t
  misc_feature (4)..(4): n is a, c, g, or t
  misc_feature (8)..(8): n is a, c, g, or t
  misc_feature (10)..(10): n is a, c, g, or t
  misc_feature (13)..(14): n is a, c, g, or t
  misc_feature (17)..(21): n is a, c, g, or t
  misc_feature (23)..(27): n is a, c, g, or t
  misc_feature (29)..(29): n is a, c, g, or t
  misc_feature (31)..(32): n is a, c, g, or t
  misc_feature (34)..(36): n is a, c, g, or t
  misc_feature (38)..(40): n is a, c, g, or t
  misc_feature (42)..(44): n is a, c, g, or t
  misc_feature (46)..(49): n is a, c, g, or t
  misc_feature (52)..(53): n is a, c, g, or t
  misc_feature (55)..(58): n is a, c, g, or t
  misc_feature (61)..(61): n is a, c, g, or t
  misc_feature (64)..(72): n is a, c, g, or t
  misc_feature (74)..(77): n is a, c, g, or t
  misc_feature (84)..(87): n is a, c, g, or t
  misc_feature (89)..(89): n is a, c, g, or t
  misc_feature (91)..(91): n is a, c, g, or t
  misc_feature (93)..(93): n is a, c, g, or t
  misc_feature (96)..(98): n is a, c, g, or t
  misc_feature (100)..(101): n is a, c, g, or t
  misc_feature (103)..(103): n is a, c, g, or t
  misc_feature (105)..(110): n is a, c, g, or t
  misc_feature (112)..(113): n is a, c, g, or t
  misc_feature (115)..(117): n is a, c, g, or t
  misc_feature (119)..(119): n is a, c, g, or t
  misc_feature (121)..(121): n is a, c, g, or t
  misc_feature (124)..(128): n is a, c, g, or t
  misc_feature (130)..(133): n is a, c, g, or t
  misc_feature (142)..(142): n is a, c, g, or t
  misc_feature (144)..(144): n is a, c, g, or t
  misc_feature (146)..(146): n is a, c, g, or t
  misc_feature (148)..(151): n is a, c, g, or t
  misc_feature (153)..(158): n is a, c, g, or t
  misc_feature (160)..(161): n is a, c, g, or t
  misc_feature (167)..(168): n is a, c, g, or t
  misc_feature (170)..(170): n is a, c, g, or t
  misc_feature (172)..(172): n is a, c, g, or t
  misc_feature (175)..(175): n is a, c, g, or t
  misc_feature (178)..(180): n is a, c, g, or t
  misc_feature (182)..(183): n is a, c, g, or t
  misc_feature (186)..(186): n is a, c, g, or t
  misc_feature (188)..(195): n is a, c, g, or t
  misc_feature (197)..(197): n is a, c, g, or t
  misc_feature (202)..(204): n is a, c, g, or t
  misc_feature (206)..(207): n is a, c, g, or t
  misc_feature (209)..(209): n is a, c, g, or t
  misc_feature (212)..(212): n is a, c, g, or t
  misc_feature (219)..(219): n is a, c, g, or t
  misc_feature (222)..(223): n is a, c, g, or t
  misc_feature (225)..(225): n is a, c, g, or t
  misc_feature (227)..(227): n is a, c, g, or t
  misc_feature (231)..(232): n is a, c, g, or t
  misc_feature (235)..(235): n is a, c, g, or t
  misc_feature (239)..(241): n is a, c, g, or t
  misc_feature (243)..(253): n is a, c, g, or t
  misc_feature (255)..(258): n is a, c, g, or t
  misc_feature (260)..(264): n is a, c, g, or t
  misc_feature (267)..(269): n is a, c, g, or t
  misc_feature (271)..(272): n is a, c, g, or t
  misc_feature (274)..(275): n is a, c, g, or t
  misc_feature (279)..(280): n is a, c, g, or t
  misc_feature (282)..(282): n is a, c, g, or t
  misc_feature (284)..(284): n is a, c, g, or t
  misc_feature (286)..(286): n is a, c, g, or t
  misc_feature (288)..(288): n is a, c, g, or t
  misc_feature (291)..(294): n is a, c, g, or t
  misc_feature (297)..(297): n is a, c, g, or t
  misc_feature (302)..(306): n is a, c, g, or t
  misc_feature (308)..(310): n is a, c, g, or t
  misc_feature (312)..(315): n is a, c, g, or t
  misc_feature (317)..(317): n is a, c, g, or t
  misc_feature (320)..(323): n is a, c, g, or t
  misc_feature (325)..(325): n is a, c, g, or t
  misc_feature (333)..(333): n is a, c, g, or t
  misc_feature (336)..(338): n is a, c, g, or t
  misc_feature (340)..(340): n is a, c, g, or t
  misc_feature (342)..(345): n is a, c, g, or t
  misc_feature (347)..(347): n is a, c, g, or t
  misc_feature (349)..(350): n is a, c, g, or t
  misc_feature (352)..(353): n is a, c, g, or t
  misc_feature (355)..(355): n is a, c, g, or t
  misc_feature (357)..(357): n is a, c, g, or t
  misc_feature (359)..(362): n is a, c, g, or t
  misc_feature (364)..(366): n is a, c, g, or t
  misc_feature (370)..(375): n is a, c, g, or t
  misc_feature (377)..(377): n is a, c, g, or t
  misc_feature (380)..(381): n is a, c, g, or t
  misc_feature (383)..(383): n is a, c, g, or t
  misc_feature (385)..(386): n is a, c, g, or t
  misc_feature (1991)..(1991): n is a, c, g, or t
  misc_feature (2392)..(2395): n is a, c, g, or t
  misc_feature (2397)..(2399): n is a, c, g, or t
  misc_feature (2401)..(2401): n is a, c, g, or t
  misc_feature (2404)..(2404): n is a, c, g, or t
  misc_feature (2406)..(2408): n is a, c, g, or t
  misc_feature (2412)..(2413): n is a, c, g, or t
  misc_feature (2415)..(2415): n is a, c, g, or t
  misc_feature (2417)..(2418): n is a, c, g, or t
  misc_feature (2422)..(2423): n is a, c, g, or t
  misc_feature (2430)..(2432): n is a, c, g, or t
  misc_feature (2434)..(2435): n is a, c, g, or t
  misc_feature (2439)..(2440): n is a, c, g, or t
  misc_feature (2443)..(2443): n is a, c, g, or t
  misc_feature (2446)..(2446): n is a, c, g, or t
  misc_feature (2448)..(2448): n is a, c, g, or t
  misc_feature (2450)..(2450): n is a, c, g, or t
  misc_feature (2452)..(2452): n is a, c, g, or t
  misc_feature (2454)..(2454): n is a, c, g, or t
  misc_feature (2457)..(2466): n is a, c, g, or t
  misc_feature (2469)..(2472): n is a, c, g, or t
  misc_feature (2474)..(2474): n is a, c, g, or t
  misc_feature (2476)..(2478): n is a, c, g, or t
  misc_feature (2483)..(2483): n is a, c, g, or t
  misc_feature (2486)..(2489): n is a, c, g, or t
  misc_feature (2491)..(2494): n is a, c, g, or t
  misc_feature (2498)..(2498): n is a, c, g, or t
  misc_feature (2501)..(2502): n is a, c, g, or t
  misc_feature (2504)..(2513): n is a, c, g, or t
  misc_feature (2515)..(2527): n is a, c, g, or t
  misc_feature (2530)..(2538): n is a, c, g, or t
  misc_feature (2541)..(2543): n is a, c, g, or t
  misc_feature (2545)..(2555): n is a, c, g, or t
  misc_feature (2557)..(2562): n is a, c, g, or t
  misc_feature (2564)..(2570): n is a, c, g, or t
  misc_feature (2572)..(2575): n is a, c, g, or t
  misc_feature (2577)..(2579): n is a, c, g, or t
  misc_feature (2581)..(2581): n is a, c, g, or t
  misc_feature (2583)..(2593): n is a, c, g, or t
  misc_feature (2595)..(2595): n is a, c, g, or t
  misc_feature (2598)..(2608): n is a, c, g, or t
  misc_feature (2610)..(2613): n is a, c, g, or t
  misc_feature (2615)..(2617): n is a, c, g, or t
  misc_feature (2619)..(2620): n is a, c, g, or t
  misc_feature (2624)..(2624): n is a, c, g, or t
  misc_feature (2627)..(2630): n is a, c, g, or t
  misc_feature (2632)..(2637): n is a, c, g, or t
  misc_feature (2639)..(2639): n is a, c, g, or t
  misc_feature (2642)..(2642): n is a, c, g, or t
  misc_feature (2645)..(2645): n is a, c, g, or t
  misc_feature (2647)..(2647): n is a, c, g, or t
  misc_feature (2650)..(2652): n is a, c, g, or t
  misc_feature (2654)..(2658): n is a, c, g, or t
  misc_feature (2660)..(2663): n is a, c, g, or t
  misc_feature (2665)..(2665): n is a, c, g, or t
  misc_feature (2667)..(2667): n is a, c, g, or t
  misc_feature (2670)..(2670): n is a, c, g, or t
  misc_feature (2675)..(2699): n is a, c, g, or t
  misc_feature (2701)..(2701): n is a, c, g, or t
  misc_feature (2703)..(2706): n is a, c, g, or t
  misc_feature (2708)..(2708): n is a, c, g, or t
  misc_feature (2710)..(2711): n is a, c, g, or t
  misc_feature (2713)..(2714): n is a, c, g, or t
  misc_feature (2716)..(2724): n is a, c, g, or t
  misc_feature (2726)..(2731): n is a, c, g, or t
  misc_feature (2733)..(2734): n is a, c, g, or t
  misc_feature (2736)..(2737): n is a, c, g, or t
  misc_feature (2740)..(2743): n is a, c, g, or t
  misc_feature (2745)..(2747): n is a, c, g, or t
  misc_feature (2749)..(2752): n is a, c, g, or t
  misc_feature (2755)..(2755): n is a, c, g, or t
  misc_feature (2758)..(2758): n is a, c, g, or t
  misc_feature (2760)..(2763): n is a, c, g, or t
  misc_feature (2765)..(2765): n is a, c, g, or t
  misc_feature (2767)..(2773): n is a, c, g, or t
  misc_feature (2776)..(2776): n is a, c, g, or t
  misc_feature (2779)..(2783): n is a, c, g, or t
  misc_feature (2785)..(2785): n is a, c, g, or t
  misc_feature (2787)..(2789): n is a, c, g, or t
  misc_feature (2791)..(2804): n is a, c, g, or t
  misc_feature (2806)..(2806): n is a, c, g, or t
  misc_feature (2808)..(2808): n is a, c, g, or t
  misc_feature (2810)..(2812): n is a, c, g, or t
  misc_feature (2814)..(2816): n is a, c, g, or t
  misc_feature (2819)..(2819): n is a, c, g, or t
  misc_feature (2822)..(2826): n is a, c, g, or t
  misc_feature (2828)..(2834): n is a, c, g, or t
  misc_feature (2836)..(2837): n is a, c, g, or t
  misc_feature (2839)..(2839): n is a, c, g, or t
  misc_feature (2841)..(2844): n is a, c, g, or t
  misc_feature (2847)..(2851): n is a, c, g, or t
  misc_feature (2855)..(2858): n is a, c, g, or t
  misc_feature (2860)..(2860): n is a, c, g, or t
  misc_feature (2862)..(2867): n is a, c, g, or t
  misc_feature (2869)..(2869): n is a, c, g, or t
  misc_feature (2872)..(2875): n is a, c, g, or t
  misc_feature (2877)..(2891): n is a, c, g, or t
  misc_feature (2894)..(2894): n is a, c, g, or t
  misc_feature (2898)..(2898): n is a, c, g, or t
  misc_feature (2901)..(2901): n is a, c, g, or t
  misc_feature (2903)..(2905): n is a, c, g, or t
  misc_feature (2907)..(2917): n is a, c, g, or t
  misc_feature (2919)..(2920): n is a, c, g, or t
  misc_feature (2922)..(2927): n is a, c, g, or t
  misc_feature (2929)..(2932): n is a, c, g, or t
  misc_feature (2934)..(2934): n is a, c, g, or t
  misc_feature (2936)..(2936): n is a, c, g, or t
  misc_feature (2938)..(2940): n is a, c, g, or t
  misc_feature (2944)..(2952): n is a, c, g, or t
  misc_feature (2955)..(2955): n is a, c, g, or t
  misc_feature (2957)..(2959): n is a, c, g, or t
  misc_feature (2961)..(2972): n is a, c, g, or t
  misc_feature (2976)..(2977): n is a, c, g, or t
  misc_feature (2980)..(2983): n is a, c, g, or t
  misc_feature (2985)..(2987): n is a, c, g, or t
  misc_feature (2989)..(2991): n is a, c, g, or t
  misc_feature (2993)..(2996): n is a, c, g, or t
  misc_feature (2998)..(3004): n is a, c, g, or t
  misc_feature (3007)..(3007): n is a, c, g, or t
  misc_feature (3009)..(3010): n is a, c, g, or t
  misc_feature (3013)..(3020): n is a, c, g, or t
  misc_feature (3022)..(3028): n is a, c, g, or t
  misc_feature (3030)..(3033): n is a, c, g, or t
  misc_feature (3035)..(3036): n is a, c, g, or t
  misc_feature (3038)..(3043): n is a, c, g, or t
  misc_feature (3045)..(3045): n is a, c, g, or t
  misc_feature (3047)..(3047): n is a, c, g, or t
  misc_feature (3049)..(3056): n is a, c, g, or t
  misc_feature (3058)..(3063): n is a, c, g, or t
  misc_feature (3067)..(3069): n is a, c, g, or t
  misc_feature (3071)..(3072): n is a, c, g, or t
  misc_feature (3074)..(3074): n is a, c, g, or t
  misc_feature (3076)..(3079): n is a, c, g, or t
  misc_feature (3082)..(3103): n is a, c, g, or t
  misc_feature (3105)..(3107): n is a, c, g, or t
  misc_feature (3109)..(3111): n is a, c, g, or t
  misc_feature (3113)..(3114): n is a, c, g, or t
  misc_feature (3116)..(3123): n is a, c, g, or t
  misc_feature (3125)..(3134): n is a, c, g, or t
  misc_feature (3136)..(3142): n is a, c, g, or t
  misc_feature (3144)..(3145): n is a, c, g, or t
  misc_feature (3147)..(3148): n is a, c, g, or t
  misc_feature (3151)..(3154): n is a, c, g, or t
  misc_feature (3157)..(3158): n is a, c, g, or t
  misc_feature (3160)..(3160): n is a, c, g, or t
  misc_feature (3162)..(3162): n is a, c, g, or t
  misc_feature (3166)..(3168): n is a, c, g, or t
  misc_feature (3170)..(3172): n is a, c, g, or t
  misc_feature (3174)..(3176): n is a, c, g, or t
  misc_feature (3178)..(3178): n is a, c, g, or t
  misc_feature (3180)..(3195): n is a, c, g, or t
  misc_feature (3197)..(3200): n is a, c, g, or t
  misc_feature (3202)..(3209): n is a, c, g, or t
  misc_feature (3212)..(3215): n is a, c, g, or t
  misc_feature (3217)..(3222): n is a, c, g, or t
  misc_feature (3224)..(3229): n is a, c, g, or t
  misc_feature (3231)..(3235): n is a, c, g, or t
  misc_feature (3237)..(3237): n is a, c, g, or t
  misc_feature (3239)..(3243): n is a, c, g, or t
  misc_feature (3245)..(3247): n is a, c, g, or t
  misc_feature (3249)..(3251): n is a, c, g, or t
  misc_feature (3253)..(3259): n is a, c, g, or t
  misc_feature (3262)..(3262): n is a, c, g, or t
  misc_feature (3264)..(3266): n is a, c, g, or t
  misc_feature (3268)..(3273): n is a, c, g, or t
  misc_feature (3276)..(3287): n is a, c, g, or t
  misc_feature (3289)..(3289): n is a, c, g, or t
  misc_feature (3291)..(3291): n is a, c, g, or t
  misc_feature (3293)..(3299): n is a, c, g, or t
  misc_feature (3301)..(3301): n is a, c, g, or t
  misc_feature (3303)..(3304): n is a, c, g, or t
  misc_feature (3306)..(3306): n is a, c, g, or t
  misc_feature (3308)..(3311): n is a, c, g, or t
  misc_feature (3313)..(3313): n is a, c, g, or t
  misc_feature (3318)..(3321): n is a, c, g, or t
  misc_feature (3323)..(3327): n is a, c, g, or t
  misc_feature (3330)..(3330): n is a, c, g, or t
  misc_feature (3333)..(3334): n is a, c, g, or t
  misc_feature (3336)..(3339): n is a, c, g, or t
  misc_feature (3341)..(3341): n is a, c, g, or t
  misc_feature (3343)..(3347): n is a, c, g, or t
  misc_feature (3349)..(3359): n is a, c, g, or t
  misc_feature (3361)..(3362): n is a, c, g, or t
  misc_feature (3364)..(3366): n is a, c, g, or t
  misc_feature (3370)..(3370): n is a, c, g, or t
  misc_feature (3372)..(3373): n is a, c, g, or t
  misc_feature (3375)..(3377): n is a, c, g, or t
  misc_feature (3379)..(3391): n is a, c, g, or t
  misc_feature (3393)..(3395): n is a, c, g, or t
  misc_feature (3398)..(3399): n is a, c, g, or t
  misc_feature (3401)..(3402): n is a, c, g, or t
  misc_feature (3404)..(3405): n is a, c, g, or t
  misc_feature (3408)..(3415): n is a, c, g, or t
  misc_feature (3417)..(3426): n is a, c, g, or t
  misc_feature (3428)..(3429): n is a, c, g, or t
  misc_feature (3432)..(3438): n is a, c, g, or t
  misc_feature (3440)..(3441): n is a, c, g, or t
  misc_feature (3443)..(3443): n is a, c, g, or t
  misc_feature (3445)..(3457): n is a, c, g, or t
  misc_feature (3459)..(3461): n is a, c, g, or t
  misc_feature (3463)..(3463): n is a, c, g, or t
  misc_feature (3465)..(3470): n is a, c, g, or t
  misc_feature (3473)..(3474): n is a, c, g, or t
  misc_feature (3477)..(3480): n is a, c, g, or t
  misc_feature (3482)..(3485): n is a, c, g, or t
  misc_feature (3487)..(3489): n is a, c, g, or t
  misc_feature (3492)..(3495): n is a, c, g, or t
  misc_feature (3497)..(3499): n is a, c, g, or t
  misc_feature (3501)..(3504): n is a, c, g, or t
  misc_feature (3506)..(3507): n is a, c, g, or t
  misc_feature (3510)..(3512): n is a, c, g, or t
  misc_feature (3514)..(3517): n is a, c, g, or t
  misc_feature (3519)..(3526): n is a, c, g, or t
  misc_feature (3528)..(3547): n is a, c, g, or t
  misc_feature (3551)..(3553): n is a, c, g, or t
  misc_feature (3556)..(3556): n is a, c, g, or t
  misc_feature (3558)..(3558): n is a, c, g, or t
  misc_feature (3560)..(3561): n is a, c, g, or t
  misc_feature (3564)..(3568): n is a, c, g, or t
  misc_feature (3571)..(3577): n is a, c, g, or t
  misc_feature (3579)..(3583): n is a, c, g, or t
  misc_feature (3585)..(3585): n is a, c, g, or t
  misc_feature (3587)..(3587): n is a, c, g, or t
  misc_feature (3589)..(3589): n is a, c, g, or t
  misc_feature (3591)..(3595): n is a, c, g, or t
  misc_feature (3597)..(3605): n is a, c, g, or t
  misc_feature (3607)..(3616): n is a, c, g, or t
  misc_feature (3618)..(3626): n is a, c, g, or t
  misc_feature (3628)..(3630): n is a, c, g, or t
  misc_feature (3633)..(3635): n is a, c, g, or t
  misc_feature (3638)..(3641): n is a, c, g, or t
  misc_feature (3643)..(3643): n is a, c, g, or t
  misc_feature (3645)..(3645): n is a, c, g, or t
  misc_feature (3648)..(3648): n is a, c, g, or t
  misc_feature (3651)..(3651): n is a, c, g, or t
  misc_feature (3656)..(3657): n is a, c, g, or t
  misc_feature (3660)..(3660): n is a, c, g, or t
  misc_feature (3662)..(3663): n is a, c, g, or t
  misc_feature (3672)..(3672): n is a, c, g, or t
  misc_feature (3675)..(3675): n is a, c, g, or t
  misc_feature (3678)..(3678): n is a, c, g, or t
  misc_feature (3681)..(3681): n is a, c, g, or t
  misc_feature (3684)..(3684): n is a, c, g, or t
  misc_feature (3699)..(3699): n is a, c, g, or t
  misc_feature (3713)..(3713): n is a, c, g, or t
  misc_feature (3715)..(3715): n is a, c, g, or t
  misc_feature (3717)..(3717): n is a, c, g, or t
  misc_feature (3720)..(3720): n is a, c, g, or t
  misc_feature (3722)..(3722): n is a, c, g, or t
  misc_feature (3726)..(3726): n is a, c, g, or t
  misc_feature (3729)..(3730): n is a, c, g, or t
  misc_feature (3734)..(3734): n is a, c, g, or t
  misc_feature (3744)..(3745): n is a, c, g, or t
  misc_feature (3753)..(3753): n is a, c, g, or t
  misc_feature (3755)..(3764): n is a, c, g, or t
  misc_feature (3767)..(3767): n is a, c, g, or t
  misc_feature (3769)..(3770): n is a, c, g, or t
  misc_feature (3772)..(3772): n is a, c, g, or t
  misc_feature (3776)..(3776): n is a, c, g, or t
  misc_feature (3778)..(3778): n is a, c, g, or t
  misc_feature (3781)..(3781): n is a, c, g, or t
  misc_feature (3783)..(3783): n is a, c, g, or t
  misc_feature (3785)..(3785): n is a, c, g, or t
  misc_feature (3787)..(3788): n is a, c, g, or t
  misc_feature (3795)..(3795): n is a, c, g, or t
  misc_feature (3797)..(3798): n is a, c, g, or t
  misc_feature (3802)..(3802): n is a, c, g, or t
  misc_feature (3809)..(3812): n is a, c, g, or t
  misc_feature (3815)..(3816): n is a, c, g, or t
  misc_feature (3819)..(3819): n is a, c, g, or t
  misc_feature (3821)..(3829): n is a, c, g, or t
  misc_feature (3831)..(3831): n is a, c, g, or t
  misc_feature (3836)..(3837): n is a, c, g, or t
  misc_feature (3839)..(3839): n is a, c, g, or t
  misc_feature (3842)..(3843): n is a, c, g, or t
  misc_feature (3845)..(3850): n is a, c, g, or t
  misc_feature (3852)..(3860): n is a, c, g, or t
  misc_feature (3863)..(3865): n is a, c, g, or t
  misc_feature (3868)..(3881): n is a, c, g, or t
  misc_feature (3887)..(3887): n is a, c, g, or t
  misc_feature (3892)..(3892): n is a, c, g, or t
  misc_feature (3894)..(3895): n is a, c, g, or t
  misc_feature (3904)..(3904): n is a, c, g, or t
  misc_feature (3916)..(3916): n is a, c, g, or t
  misc_feature (3921)..(3921): n is a, c, g, or t
  misc_feature (3924)..(3924): n is a, c, g, or t
  misc_feature (3927)..(3927): n is a, c, g, or t
  misc_feature (3929)..(3929): n is a, c, g, or t
  misc_feature (3934)..(3934): n is a, c, g, or t
  misc_feature (3943)..(3943): n is a, c, g, or t
  misc_feature (3957)..(3957): n is a, c, g, or t
  misc_feature (3968)..(3968): n is a, c, g, or t
  misc_feature (3970)..(3970): n is a, c, g, or t
  misc_feature (3978)..(3978): n is a, c, g, or t
  misc_feature (3985)..(3985): n is a, c, g, or t
tntntttntntannatnnnnnannnnnanannannntnnnannntnnnncannannnntanaannnnnnnnntnnnnttttttnnnnanananaannntnntntnnnnnntnntnnnananatnnnnntnnnnatatatatntntntnnnnannnnnnannatatannananatnttnnnannatntnnnnnnnntntatannntnnanaanatatatnttnnananaaanngtntttnnncnnnnnnnnnnntnnnnannnnnatnnnannannacanntntntntntcnnnntanaaaannnnnannntnnnnanatnnnnanaaaaaaanatnnnanannnntntnntnntntntnnnntnnnatannnnnnanaanntntnntatatatatatatatatatatatatttttatttatttattttttatctatattaatattaaatatgttgcttcattgcacgtgtacgccattttaacatgactaatgtatcatattgaaaacctaacaataaaatagaattttattataatataattgacattgttactatttaacctaatttctttgtctaataacgtatataaaagtaattatttatttgcttatttatttatataattttaatcattttaattatttaaaataaataaatatatataatatatatattatattttcttctacattgtaaaaatggaaatattataaaagtttagtaaaaataaataataattagattatagatgaataaatattcttttcatatctcaattatgttaaataataatagcacaaacattatgttataatgtttgtgctattattattacttgttttactttaacatcgaaattaaaaattattttaattttttgtgaaaaaaaaaaaattaaatttacattaaaaatgtttgataaagtttttttaagcaacttggatttactttatcgttaatggcaatattaaaataaacttaatcatattgttagcttcatatttgttttatcattaaataaaattgtaatctcaatataataatttctatataatataaataaaccagtatataccctatcaatttttttaatataaatattgttaatattcctaccacagttaatgtatttaaaattatgttttcttttgaataataatatttcaattcattgcataaatctcgtttttatttgaagattaaaatcgttatataatatatttatattttattaattaatatttaatattactatttcaatttattttcatatattttaattatttgttatattttccaagataaagataaaagtatattttccatgataaaaataaaaagttttatgtagctatttattgttttaaagttaacaaatacaataaaaaactttcaattaccattatttattatttagctttctcatggataaacctattttaatattaaatatcattataccgatatataatattcaatattaatgataataatattaataaagagtaatattattacttcatataatacgatacaatataattattacaaaacgatatattaaactattaaagtctaataataccattttataaattaatttataatatttttatattttataatttattaataaacctaaccttttattaatttaatgaaatataaaatatccccaattgactaagtaatttattactaaatatatttatttttcctatttattatataaatatgatttatttatgtaaatataaaaattctccaattgattataggtattatttatttattattatatagttattgaataggaatataaagagatattgatataaaagtatatacatatactatttttattttaagagaagaatgaaaatttacaacatttgtttatgtaattcataattattcatgtatgtacattattttatattttttaattattactatttaatttttttttaaaaaaaaaaaaaaataaanaaataaacctgactttatttttatatattataatgtttttacacaaatttttagtaataaaatatttgatagagttttggcgtttttggcagtacattatacattttttattagttatatacaaattacaaaaaatattatcaacataaatacaaagtaagtctgaaaataatttatcagatgataatgtctaatctttatacattattttaacaaataaattttagacaaaaaaaatattcttttcaatatggttcatgcgcatatacgttcaattaataatatcaatgaaaaggatgtaaaaataattaacataacaattaataaaaatctaatagttgaattttattgaagatttattataataaaaaaaaaaaaaaaaaaaaaaaaaaaaaaaaaannnntnnntnaantnnntttnnanannaaannaaaaatnnntnntttnnttnaantntntntnttnnnnnnnnnnatnnnnantnnnaattnaannnntnnnntttnaannannnnnnnnnntnnnnnnnnnnnnnaannnnnnnnnaannnannnnnnnnnnntnnnnnntnnnnnnntnnnnannnantnnnnnnnnnnntnttnnnnnnnnnnntnnnnannnannttanttnnnntnnnnnntnttnttntnttnnntnnnnntnnnntntnaantaaannnnnnnnnnnnnnnnnnnnnnnnnanannnnananntnnannnnnnnnntnnnnnnannannaannnnannnannnntanatnannnntntnnnnnnnaanatnnnnntntnnntnnnnnnnnnnnnnntntntnnntnnnttnttnnnnntnnnnnnnanntntnnnnttnnnnntttnnnntntnnnnnntnatnnnnannnnnnnnnnnnnnnttntttnttntnnnannnnnnnnnnnannannnnnntnnnntntntnnntttnnnnnnnnntantnnntnnnnnnnnnnnnatanntannnntnnntnnntnnnntnnnnnnntanannaannnnnnnnannnnnnnannnnanntnnnnnntntntnnnnnnnnannnnnnatannnannanannnntannnnnnnnnnnnnnnnnnnnnntnnnannnannannnnnnnnannnnnnnnnntnnnnnnntnntnnttnnnntannantnattnnnannnannntnannnnnnnnnnnnnnnntnnnnannnnnnnnttnnnntnnnnnnannnnnnannnnnantnnnnntnnnannntnnnnnnnttntnnntnnnnnnatnnnnnnnnnnnnantntnnnnnnntnanntntnnnntnttttnnnntnnnnnttnttnntnnnntnannnnnannnnnnnnnnntnntnnntttntnntnnnannnnnnnnnnnnntnnnttnntnnannatnnnnnnnntnnnnnnnnnntnnttnnnnnnntnnanannnnnnnnnnnnnannnanannnnnnatnntannnntnnnntnnnttnnnnannnannnnanntannntnnnntnnnnnnnnannnnnnnnnnnnnnnnnnnnaaannnaantntnnttnnnnnttnnnnnnntnnnnntntnanannnnnannnnnnnnntnnnnnnnnnntnnnnnnnnnannnaannnaannnnananaanaanaaaannaanannaaaaaaaanaanaanaanaanaaaaaaaaaaaaaanaaaaaaaaaaaaanananaananaaanatnnaaanaaatatatanntttttatntnnnnnnnnnnatnannanatantntantnananntttattntnntatnttttttnnnnatnnatntnnnnnnnnntnttttnntnatnntnnnnnntnnnnnnnnnttnnnaannnnnnnnnnnnnnatatanatttnannatatatatntttctttttctnttaanaanatntnaaaantatattctnaaaataaatattcncaatattattntntttttttntattttntttattttttttttt

SEQ ID NO: 1496 - DNA, 4000 bp, Escherichia coli
  misc_feature (460)..(460): n is a, c, g, or t
  misc_feature (535)..(535): n is a, c, g, or t
  misc_feature (901)..(901): n is a, c, g, or t
  misc_feature (910)..(910): n is a, c, g, or t
  misc_feature (1593)..(1593): n is a, c, g, or t
  misc_feature (1663)..(1663): n is a, c, g, or t
  misc_feature (1711)..(1711): n is a, c, g, or t
  misc_feature (1871)..(1871): n is a, c, g, or t
  misc_feature (1937)..(1937): n is a, c, g, or t
  misc_feature (1956)..(1956): n is a, c, g, or t
  misc_feature (1987)..(1989): n is a, c, g, or t
  misc_feature (2035)..(2035): n is a, c, g, or t
  misc_feature (2075)..(2075): n is a, c, g, or t
  misc_feature (2217)..(2217): n is a, c, g, or t
  misc_feature (2222)..(2222): n is a, c, g, or t
  misc_feature (2332)..(2332): n is a, c, g, or t
  misc_feature (2777)..(2777): n is a, c, g, or t
agtgtgactgagatttttagtaaacatatcagcagggttgttgttaccttcagtgaagaagacttcaaccttgcctttgtcaatacaatctctaatatgatgataacgaatatctatatgttttgagcagatttcttgtaccagattacaagacataaaaattgatccctggttatctccagcaagtaggattggcccaaggttatatcctagctctttaagcacattctgaagccaagcagcttgttggcttccatcagacagagccatatactctgtctctgtagaggataatacaacagtcttctgtgctctagatctccaactgataatgccctttgctaaaaggaagaagaatccagtagtagggcgtcttgttgttggatttgagccccagtcagcatctgtatatccctccaatccctgatcactagtaccatcatatattagagcatagtcncttgtttctgcaagatagcagcatatatacaatgccttatctaaatgttcttttgagggatttgctgagaactgngataagcaagttacagcatatgctatatcaggatgtgttcctaacataatatataataatgagccaattacagattggaatctggaatcgctgctcttggtcaatggttccttcataaggtattggctgataaccttctagtagtggagttgaagcaactcatacattgaacatgttaaattttttgagtactttgttaaggtaggctgtttgagtgatgaaaatcttatgctgttctcgatgtatattcatatgcaaaaattctttaacatctccaagatctctacactaccagtgcttcatgaagtcaccctttagtttattgactagtaatttattcttgccaataaagagagcatcgtcaanatatatganaacaatgactgtttcattatcctttagataaatgaatacacctgcatctgcagtgagtcacttaaaacccaatattttcatggatttagtaagttgtttccaccaggctaaagcagcttgcttcagcccatatattgcttgatgcaagcagagcactttgtactctaggccttttatcttaaagccttcaggttgctccatataaatctcctcatctagtttcctatataggaaagtgctcttgacatctaagcctgttatgtaccaatccttaagagcacttagtgcaagaatgagttacacagtctcaaaccttacaacaggtgagaagatttcattaaaatctatgtcttcaatttgtgagaaccctttggccacaagttgtgccttcttttgaccatttgccttctggtcaaaaacccaacaacatttgattattttctgcccttgaggcagatctacaacatcacagactttgtggtctttaagagcatcaagctcttcatagcaggcctttttctattcctcctggttttgcttaggcaagtgtgcaatgtcttgaaatgttcattctcggacattacctggaagattaatttcatctattattgcctttgagagcaggtatgaaattaatagtactctccctttacaggccaatttcattattgttgattcttccnggttagaatcgtcattaggaacctcagaacttggtctgggaatagacctttttgattctgagattgcacntgaagtatccctgattatatgtttccatcctttgatctgatgaatttntttttcaatgtcaatagggctttgagttttcccatagacattgccagggtgtgttacatggctccttactctatgagggcgttccctgtagatggtggcacattttggtgctcttgcccttcatctggatttggagtaggttgacaaggggcaggaggtntaagggcaaccagagcagtacactccaggagattccttgtaaggggacccctaatccgcgactccngagcccgttctagagctcnggagcgaccctgtagctgatccaatattacnnngtaatattgggtctcactcccatcattctgagagcactccattgcnacccaacacactttccttgttcagaccctggttactgatncagggacacgaagacactgtagtatataatgtagattattccctccaggaacctcatctaattctctgaggaatctcctggaggtaggttgtaatcatatttcataaattataattaactaaggaatctcctggagtcttcnactcnggtcacccttacagtagaattagatcctattatcagagccccagaatttctcagtggacagccgccctccagtcgccctctgctaacaaactctggccccttgatcactncactccaaagagatgtcactctctgcggacacccccccagccttcgctgatgtcttaggctacctgcagcaccatctccaggagttaaccgagcatcagaacacttcggaacatgttattaacaataccctcgcgagcctaacagcccaaatacaacagctcactcaactgatgaccagccctgcccccgctccaacagtcgctccgcctccgataacaacgtctccccctcttgtcaaccctccttccctagtcccgtccgccccgaccaaacagcggacgaggccaaaactcccttctccacccaacttctccagtgaacaaacttctggccgagccttcttaaactcctgtatgttatacctatgcctggctccggagcagttcagctgcaatgaggagaaaatctttgggacactcacctttttcaaagacggacgtgccntgaggtggtccgagaacctctttcgccaggaggcgaacaccggcgtttttcctatccagtcttgggctgactttgaacaacagttccagagtcaattcttcccggtcaatgcagaagcggatgccgttaacgctctggaaggctcctcatactaccaagaaaaccagacggtggacgattacctggactgtttcctaaccttggtctccgacactggatacactgacccccagactcttgtggtgaagttccgccgaggcctcaagacgaacattcagggccaaatcgccaccatgcccttcggacgacccgctgacactgatccggaggcttggtacgcagctgcccagaggattgaccaagtacgattgaccaatgaggcttttcaattcacgctctggtcaacaactatggcacctatgcgctctgcccttccctggcctgtccctctcttgatgttctgcctgcctcagtccgctctgctccccgttctcccaagacccgctccacctgtaccatctggagggatacctatggacgtggacaccatccagaagacgtgccctacacctccgcagggatgttatcgatgcggagagcccaactatctcataaaggactgtccctactgtctagacgtccagaggttaaccgcggagcaacaggaagaattgattgaagatttgatggccttgaaagatgcagtagcagaagaggaagttggctcctccccggaggaggattttgtttagcgtggccagcgaaaagtgcgccccggtcgctgctagttaataggttcactgtattagacgtagaagaagtcaatacagaaattcgtgaacctatagacgcactccctctctctcctccactccagtcaggacagccctgcctcggaggtccaaatgggaaaaaaaactccccagacgactctccgccaacaccctcgacgcctgtgaaatgtctatcatcctgcctatagagatcggtaccaccgacaccagcgaggtgcattccatcaaagcgcttttggactccggagccaccggcaacttcatagacaaggattttgtccgtacaaaaggtattagtacccggagcatctctcgtcccataccggtgttcaatgtggatggctctcctaacgaagcaggacaaatctccaaagtagtggatgtagtcctccgttataagacccactctgaaagaacgctccttgccat

SEQ ID NO: 1497 - DNA, 4000 bp, Escherichia coli
  misc_feature (1492)..(1492): n is a, c, g, or t
  misc_feature (1778)..(1778): n is a, c, g, or t
  misc_feature (1859)..(1859): n is a, c, g, or t
  misc_feature (1991)..(1991): n is a, c, g, or t
  misc_feature (3218)..(3218): n is a, c, g, or t
  misc_feature (3220)..(3220): n is a, c, g, or t
  misc_feature (3225)..(3226): n is a, c, g, or t
  misc_feature (3228)..(3231): n is a, c, g, or t
  misc_feature (3234)..(3236): n is a, c, g, or t
  misc_feature (3238)..(3238): n is a, c, g, or t
  misc_feature (3240)..(3240): n is a, c, g, or t
  misc_feature (3242)..(3246): n is a, c, g, or t
  misc_feature (3248)..(3250): n is a, c, g, or t
  misc_feature (3252)..(3252): n is a, c, g, or t
  misc_feature (3254)..(3257): n is a, c, g, or t
  misc_feature (3260)..(3267): n is a, c, g, or t
  misc_feature (3270)..(3271): n is a, c, g, or t
  misc_feature (3273)..(3275): n is a, c, g, or t
  misc_feature (3279)..(3279): n is a, c, g, or t
  misc_feature (3281)..(3281): n is a, c, g, or t
  misc_feature (3283)..(3285): n is a, c, g, or t
  misc_feature (3288)..(3288): n is a, c, g, or t
  misc_feature (3291)..(3301): n is a, c, g, or t
  misc_feature (3303)..(3304): n is a, c, g, or t
  misc_feature (3306)..(3307): n is a, c, g, or t
  misc_feature (3309)..(3313): n is a, c, g, or t
  misc_feature (3316)..(3320): n is a, c, g, or t
  misc_feature (3324)..(3324): n is a, c, g, or t
  misc_feature (3327)..(3327): n is a, c, g, or t
  misc_feature (3329)..(3329): n is a, c, g, or t
  misc_feature (3332)..(3337): n is a, c, g, or t
  misc_feature (3339)..(3352): n is a, c, g, or t
  misc_feature (3354)..(3363): n is a, c, g, or t
  misc_feature (3365)..(3389): n is a, c, g, or t
  misc_feature (3392)..(3393): n is a, c, g, or t
  misc_feature (3395)..(3400): n is a, c, g, or t
  misc_feature (3402)..(3415): n is a, c, g, or t
  misc_feature (3418)..(3454): n is a, c, g, or t
  misc_feature (3456)..(3462): n is a, c, g, or t
  misc_feature (3464)..(3464): n is a, c, g, or t
  misc_feature (3466)..(3474): n is a, c, g, or t
  misc_feature (3477)..(3478): n is a, c, g, or t
  misc_feature (3480)..(3486): n is a, c, g, or t
  misc_feature (3488)..(3498): n is a, c, g, or t
  misc_feature (3500)..(3504): n is a, c, g, or t
  misc_feature (3507)..(3507): n is a, c, g, or t
  misc_feature (3509)..(3530): n is a, c, g, or t
  misc_feature (3532)..(3541): n is a, c, g, or t
  misc_feature (3543)..(3549): n is a, c, g, or t
  misc_feature (3551)..(3568): n is a, c, g, or t
  misc_feature (3570)..(3572): n is a, c, g, or t
  misc_feature (3574)..(3575): n is a, c, g, or t
  misc_feature (3577)..(3581): n is a, c, g, or t
  misc_feature (3583)..(3585): n is a, c, g, or t
  misc_feature (3587)..(3593): n is a, c, g, or t
  misc_feature (3595)..(3597): n is a, c, g, or t
  misc_feature (3599)..(3610): n is a, c, g, or t
  misc_feature (3612)..(3623): n is a, c, g, or t
  misc_feature (3625)..(3627): n is a, c, g, or t
  misc_feature (3629)..(3638): n is a, c, g, or t
  misc_feature (3640)..(3643): n is a, c, g, or t
  misc_feature (3645)..(3645): n is a, c, g, or t
  misc_feature (3647)..(3653): n is a, c, g, or t
  misc_feature (3655)..(3662): n is a, c, g, or t
  misc_feature (3664)..(3671): n is a, c, g, or t
  misc_feature (3673)..(3701): n is a, c, g, or t
  misc_feature (3704)..(3721): n is a, c, g, or t
  misc_feature (3723)..(3723): n is a, c, g, or t
  misc_feature (3725)..(3725): n is a, c, g, or t
  misc_feature (3727)..(3732): n is a, c, g, or t
  misc_feature (3734)..(3742): n is a, c, g, or t
  misc_feature (3744)..(3747): n is a, c, g, or t
  misc_feature (3749)..(3753): n is a, c, g, or t
  misc_feature (3755)..(3760): n is a, c, g, or t
  misc_feature (3762)..(3765): n is a, c, g, or t
  misc_feature (3767)..(3772): n is a, c, g, or t
  misc_feature (3774)..(3780): n is a, c, g, or t
  misc_feature (3782)..(3788): n is a, c, g, or t
  misc_feature (3791)..(3800): n is a, c, g, or t
  misc_feature (3802)..(3802): n is a, c, g, or t
  misc_feature (3804)..(3805): n is a, c, g, or t
  misc_feature (3807)..(3817): n is a, c, g, or t
  misc_feature (3819)..(3832): n is a, c, g, or t
  misc_feature (3835)..(3835): n is a, c, g, or t
  misc_feature (3837)..(3838): n is a, c, g, or t
  misc_feature (3840)..(3841): n is a, c, g, or t
  misc_feature (3843)..(3854): n is a, c, g, or t
  misc_feature (3856)..(3860): n is a, c, g, or t
  misc_feature (3862)..(3884): n is a, c, g, or t
  misc_feature (3886)..(3897): n is a, c, g, or t
  misc_feature (3899)..(3935): n is a, c, g, or t
  misc_feature (3937)..(3947): n is a, c, g, or t
  misc_feature (3949)..(3966): n is a, c, g, or t
  misc_feature (3968)..(4000): n is a, c, g, or t
tccccgccgtcaatgtaaccggcgggcatagagaagttctgcgcggcgatcagctgctttaaggtgttcatgttcagcagctggtccagattggcgcttttcagcgcttcctcgcgggccgattcatactcttcgcgggcggagtccaactgggtctggcccgcttccagctgggtgcggccgctgctgatctggaactcgcccaaactgagctgggcttcggtgccgctgagcagcagctgcacggccatatcggccagttgggggtctgtcgggttggcagaaaggctttccagcatcgattgcagcttgccgcgctgatcgttcaaattggccagcatggcttcggctttgtcgatctgggtgttcagggtggtaatcgtctgctgtagggtttggcgcagttcctcggtgctctcgttcaggctggcttcggcttcctgccgggctttcagcagcaccgttgcgttccgcaaggccgtctgggtggtggaaagggtgctttcatcactcttgtaaccatccagggctgcgcgctggctggtggcagtgtccagctgggtctgtaaagccgcctgttcagcttttttgctttcgatttccgcgcggatggcatcctgctcttccggggcggcggtatccagctgctgttccagctgaacgatctcgttatccttctgctgcacctgcacggtcagcgtcaggatctgggcgtccagcgcggcgcaggcatcgctgacgctctgcccgccggtcagggcggcagcttcggtctcaatggcctgctgggcgcgctcgatggaagccagcatcgcggccatcttggtcaggtcgctcttggcttcctccaaattagcgggcatggcatttgcatcgtactgggggtcatattttgccagaatctctttgcaggaagcaaacagtgcatcatcgatcggcagcgtcacttccggcaggctgctggggtccactttcagctggttcagcttgctctgggcggtgtccagctgggttttcagccccgcaatctgctcttccagcttggggatctcctcgttcagctggtcgatggcatcccgcagctgctgggtcaggctctgcttttgggtattcagctgggctttgccggaatccagctggctctgggcactgtccagctccgccaggccgtccttgattttggcctcgttttcgtccagctgctttttggcttcggccaggcggtcgctcaccttgaccagcagtttgtcattcacctcgtcaattttgtcctggtccagcgtgatctgcactgattttttgacaaggccggtggtggaaacgctggccacgccgtccacgcgctccagctggggtacgatcgtatcctccacatagtcggaaagctcgtagatgtccatcccctcatagtccaccgcaacatactgggtggccatcatatcggggctcatctccatcagcgtgggggtgctggccatatcgggcagactgnccgaaagctggttcacggcggtgctggccttgaccatggcgctgtccatgtcggtgtcgtcctggtattccagaatgacaaggctgtagttttcgttgctctggctggtcacgttctttacaccattcagggtggaaaggctgttttccagcggctgggtcacatcgctttccacctgttccgggctggcgccggggtaggtggtaatgaccagcaggtagggcaggttcatattgggcagcaggtctgtctgcatgccggtcaggcttacaaagcccagcaccancaccaatatgaccgccacaagtacggtaaatggctttttaacactgtattttggcatttgtttgttccctttgcccgcacnttgggcgggcctatgttggcggatgtgaccgaccggccgggttcaggctgccccaaaaggaaggagcgccgaagcgcagcgcagccgccgtgtggcgcccctttttagggggaaacggagcttttttagcgngcttgaccgaccggtcggtcggtttttcgctgttattatagcaccgcggaaaatcattgtaaagaggagataaagattccgtccgtgcggtacagtttgccgcaaaagcggcaaaaatcgccgccagccttgctttttcggccccaatcatgtaaactgttcatcataagtttacagttatacggtgcagctgaaaaaacgaacattcagtcggtttccttgttttccgctgcaccctgggtaaggaagggcgttttgcatggggatcgttgtcatcggcgcagtttttgttgatatcaaggggtacccccttgccacctatattccgggcgggcgcaacgccgggcgggtagaacaggtacacggcggtgtgtgccgcaatgtggcggaggatatcgccaacgtggagctgcgccccacctttgtaagcctggtggatgacactggcacagggcaggatgttattgataaactggcgcgccacaaggtgaacacccgctatatccagcgcgtgccggacggcatgggcacctggctggctgtgttcaataatgagggcgatgtggtggccgccatctccaagcggccggacaccaatcccctgaccgacctgctggccgaaaaaggcgatgaaatttttaaggactgcgatggcattgccattgaacttgatctggaaaaagacactgtaaagcaggtcttgtattttgcacagaaataccacaaaaaggtatatgccgcggtttccaacatgagcattgccatggagcggcgtgactttttgcagcaaatcgactgttttgtctgcaaccagcaggaagcggggatcctcttttctgacgaatacgaccatatggggccggaggaaatgtgccgcacgctggccgctaatgtaggcagcgcccgcatcccctgcatggttgttaccatgggggacaaaggcgcggtgtacgcctgcgcggatggcgaaagtggcattgtacccgccaaaaaggtaaacgtgatcgataccaccggcgcaggcgatgcgttctttgccggtacggtcattggccgcgcttatggcaaaacgatggcggaagcctgcggcattggcagccggctggcggcttcggtcatctgcaccgccgaaaatgtctgcccgcggttccgcccgcaggagttcgggctggatgttccggttgtggattgagcgccgtttcagcaggccggtcacagccgccggancngtgcnnannnngcnnngngngnnnnntnnngngnnnnccnnnnnnnnaannannncccngnannnttncannnnnnnnnnngnncnncnnnnnctnnnnngggnttncntcnnnnnntnnnnnnnnnnnnnngnnnnnnnnnncnnnnnnnnnnnnnnnnnnnnnnnnntgnntnnnnnnannnnnnnnnnnnnnaannnnnnnnnnnnnnnnnnnnnnnnnnnnnnnnnnnnncnnnnnnntncnnnnnnnnngcnncnnnnnnngnnnnnnnnnnnannnnngcngnnnnnnnnnnnnnnnnnnnnnncnnnnnnnnnntnnnnnnncnnnnnnnnnnnnnnnnnnannntnngnnnnncnnngnnnnnnntnnncnnnnnnnnnnnntnnnnnnnnnnnncnnncnnnnnnnnnngnnnngncnnnnnnncnnnnnnnnannnnnnnngnnnnnnnnnnnnnnnnnnnnnnnnnnnnngtnnnnnnnnnnnnnnnnnncngncnnnnnncnnnnnnnnngnnnngnnnnncnnnnnngnnnngnnnnnngnnnnnnncnnnnnnngcnnnnnnnnnncngnngnnnnnnnnnnncnnnnnnnnnnnnnnaananncnncnnnnnnnnnnnnannnnngnnnnnnnnnnnnnnnnnnnnnnncnnnnnnnnnnnncnnnnnnnnnnnnnnnnnnnnnnnnnnnnnnnnnnnnnannnnnnnnnnncnnnnnnnnnnnnnnnnnngnnnnnnnnnnnnnnnnnnnnnnnnnnnnnnnnn

SEQ ID NO: 1498 - DNA, 4000 bp, Escherichia coli
  misc_feature (1986)..(1986): n is a, c, g, or t
  misc_feature (1988)..(1988): n is a, c, g, or t
  misc_feature (1992)..(1992): n is a, c, g, or t
agtcaaaatcaaaccaaatatcaccttctgttaatagatccgctgttataggattacttgttagagttgaggaataatcattctccaataatggatcccaattaaactgtgcacttggctcagggtctccaacatttggattaatcatccagttatcagaattgtcattgaatctccattgttggaaggtaaaggttccttgatcccatccttcgaagaatggtaaatcatatccccatacaacctctacagtatctgttccttcccacgctgactcaccaaaatctcctgggaagccaaaaatagttaggtcatataccgcacttacatcaaataagtaagttgctggatccaaattattaacaacatgatatacatgctcatctactgcctgtccttcgtatggtacgttggcaatatttactccgtcctggtatacgttaaatgataccaatccatctggtatcattccgccgccaccgccgccgccactgtagtcagctagctcgatgccccataacgtctcattttgtgcattaccaccaatggttaccttatcaggtgaccatagagctggtgttgtatatgctccaccggccagtgcagttgcaccagtaatagatccaacatctaaggttaaacctgttgctgtaccatctggtagagtatattgtactaagttattagcaccttgatcatatgcccacaagtactcattacttggatctgaatagtcatcatatgccaatccataaatacttgttacacttggtgtaaatgatccaaggttagctccactagcatcaaaggtaacaatgtctgttccccagttgttgccatagaatgtcatatcattatgattgtatgctatagctctaactgctgttggtgctgtaaatgaagtaactagtgtctgtgttgcaaagtccattacatatactgttgtagatgcagcagctccatacataaactcaccatcatatgctaaatcacgtacgccacttgttccagcaatactaaatgattctatcatatttcctgctaaatcatacttgaaatatgttgatccattccatagagatgtataaacaaattctccatcagactcacaacctgcttcaccagagttatcaactgttgggaatgcgaactgaaagtcaccaaagtcacgtgtactttgtggattatcaaattcaatgatagtaacctctgaagctgcctctacgtttggtcctactgcactaagctgtggtcctacataaacaactttaaaagctgatgtcattggaattgttcctgtcattggtggtaaccacatcaatggcacctcattggttccataaacatactcatcatccaattctcttggtgggtgtaggtaagttgatgtccatgtataacatacttcatcacttaatccacatgcgtacaatgcacgtacacatccctcataagtttcaccatatgctaaatccatatatgtccactcacgtgtggtagcatctgttgatccaacaaacgcatcattaaggtatacatagtatcccaatactggtgatggtccgtttttaacagctacattatcaactgcccaaccagaaccccagttgccgttgtcgtcagaatggaatgctaaccatacatttgatgatgttaaacctgatagagcagctaagctaacctctacatctgtccaagcaccaggagttggtgacattgcctccaatacttcccatgtagctccaccatcataactatattcaacatatgcactttgaccataagctgcatcaaagaaactactgaaatataatgtgaagtcatcactttctctaagatccaactctggagtgattagataatcatcttctccatcatttgtactacccgctgcatcatcatttgcaactgcgtagaatccgtcaccttctggaatagcccaagcaccagttccggcatcatcactgcgataccatccttgtcctnangtanttgattgccatcccgctggtgggaatgcagcatcttcgaaagtctctgtaaatagtgctgtaattaatggctcatcccatgtagcatgtgatgttaactcatcaaccataaagttacgcggtgcgtaagccttctcggttaataccaagctataagtctgatcatcaaaaattgcaagattgtagtgctcatactgtgtatagcctaccttatttacaaacatatcataataaccatctataacgctatcaaatacaacaataccagcagcatctgttgatcctacatgaaaatcataaggataatcctgtccaactagtaatacttctgcatcacttggctcattaccatcacataaactaacctctacggtaaattcattggcaagtaaatgtccaactatattggaataaacccatatggattcattggattcataaacagctttaactgcatatgcgtaaaaacctgctggctgtccgccaaaggctgcatcattatacatctcagttgttgggttggcaataggtgttaatgtacctgtctctggtcctaaatcaggatcaaaattgctaactcttgcaactgtataatttgtaaagtcacgtgtggcattggttacttcaattggaaggaattctccatcctttagagttccactaacacctgttggcatacttgttgccaagaatggaccttgtgttacttttggtaaacgaaccatagatccaacagcactgctaacaacaccagcatttggcccgtcaacaatcgcgcgaatcataaagtcttggtatggggatgttgaccatccactaccaccaggtaattgaaccacagaacgatatacagttggtagatcagtatccactcctactggagctgagttactagccaaacctaactgccacattactatgtagaaatctccatcactaatagtagcaccaaatactccactaaagtcaacccagccaaaattagctacatcaacaactgctgaatcaagaactgttccaggcataccgtttgtaccatcatcatcaagtactccaactgccatctgcgtgcctaaaaagtttgttcctcctgggaagctaccatcaccaacataaaggctaccgcctgttattgtggctgggtatccagctggtgtaaagtctacacctactgctcctcctggagtgttccagataacgtagtcattagcctgaccatcatcataaacaataacatatgggcccattggtaatgtccatgttacctcacattgtgtatcatcctgatttggatcagcaaatacccattgtacaggatatggtgtttcacacatggatgcatttaattcagtcgcattaccagatgtaacaatagcaacaccaaattcattttcaaaacctaatttttcaaaggaaacgccatactcatctgcatcagcatacatcatgtactgaccactaccatctgtagttgcataataaataggaccgaaaacaccttctgcagttacgcttactcctcccatgccaagaccagtgttacaatctgtaacctgtccaaaaattgaacctggtacataaacatgcattgtgttaaatacactatcagataatctagctgggtcattggtctcaatgttaagccactcatcatatgatcctgctgggaatccagctgaactataagtaaccattacatccaatgtacctcctgctgggatttgtccagctgctggttctacatctactatgtaacttggctgtggacatgttccataaacaactccaactggtaaacttacgttacccgctgaatagattacgttaccatctccatctaaaaagtcataagaacactcatatgaccaaccacctggtgtaaaaacagtactaatatcatcaccagtctctgcagggaatccaaaacattcaggaccactaccacttgccaatgtaatgttatctaatacaatgttgccatttacaaatacactaagggtaccgccatt

SEQ ID NO: 1499 - DNA, 4000 bp, Escherichia coli
  misc_feature (360)..(360): n is a, c, g, or t
  misc_feature (798)..(798): n is a, c, g, or t
  misc_feature (952)..(952): n is a, c, g, or t
  misc_feature (1011)..(1011): n is a, c, g, or t
  misc_feature (1398)..(1399): n is a, c, g, or t
  misc_feature (1987)..(1987): n is a, c, g, or t
  misc_feature (2049)..(2049): n is a, c, g, or t
  misc_feature (2591)..(2591): n is a, c, g, or t
  misc_feature (2753)..(2753): n is a, c, g, or t
  misc_feature (2813)..(2813): n is a, c, g, or t
  misc_feature (2870)..(2870): n is a, c, g, or t
  misc_feature (2900)..(2900): n is a, c, g, or t
  misc_feature (2933)..(2933): n is a, c, g, or t
  misc_feature (3047)..(3047): n is a, c, g, or t
  misc_feature (3083)..(3083): n is a, c, g, or t
  misc_feature (3095)..(3095): n is a, c, g, or t
  misc_feature (3128)..(3128): n is a, c, g, or t
  misc_feature (3164)..(3164): n is a, c, g, or t
  misc_feature (3207)..(3207): n is a, c, g, or t
  misc_feature (3325)..(3325): n is a, c, g, or t
  misc_feature (3713)..(3713): n is a, c, g, or t
  misc_feature (3823)..(3823): n is a, c, g, or t
cggcgatcctgaaaacgtccagattcgggtacgacggcaagggccaggtgcgtgtcgatgaggtcggcgatcttgccgccgcgtgggacagcatcggcaacgcgccggcggtgctcgaaggcttcgtcgatttcgagcgggaaatttccgtcatcgtcgcccgcgggatcgacggcgcgacccagagctacgtgccggtcgacaacgtgcaccgcaaccacatcctgtacaccaccacggcaccgtcgacggtgacagaaaatatcgcgaatgaagcccggcgcatcgcggcggaggtggtcaacgcgctcgatctgatcggccttctggcggtggaaatgtttgtgttgcgcggcggcnaagtgctggtcaacgagatcgctccccgtccccacaattccggacactggacgctggacgcatgcgccgtcagtcagttcgaacagtttatccgcgccgtggcgggcctgccgctgggcgacccgtcccggcactcggatgcggtaatgaccaatctgatcggcgacgaggcagattcatgggcggaactggccgccgaaccgggcgcctgtctgcatctctacggcaaggctgaaagccgccccggccgcaagatgggtcacgtcacccggctgtcgcctgtatcgggccgcccgtagcgcttttcgacaacatctttcaggatgcccagcgggccgagcacccggtcgcgggacccctcgatgcgtttgcgggcgccgtgaattttcatgacatcggcgaggcggcgatggaggaaggccgtcgtctccgccccgncctcgctgcgatcgtccagccagaacagcgtagtcgacccgaccacaccggccagcaggccgcgcttggtatagaacgagaaatcggccgaccggtcgccgacggcgtaccagatatcgtcgacggtgcgatacagcagccgcgcccccagcancgcgttttgcggcagggccagccaggtcagtccgcgatgcaccgcttcccgatggggcncgaggaacgccagccgggtttccacggccagggcgacgcgctcatgaatgcgcaaatctccaaggtccgcctgttccatcccggcgagcatatgccggtcggccatgcgtgaaaaatgccggatcgcatccgcgacgccacggggaaattcctgtgtgacgatttcgggaccgaaacccgaatcccgggcgccgtcccgcaaggcctgcatcgaccagccgtcgaacggcacatgggcgagtgtcgcctcgatcagcctgtctcgaaggagggggtgccggtcagtcacgcgccggcgtcttccccgttcgaattggccgccgcctgcgccgaggcatgctccatgaaagctttcagttcctcgttgaaactgagcagggacagatnngtcatgcgcatgggaaacagaaccccgtcgagatgatctatttcatgctggacgacgcgggcatggaaattggtggcctcgcgttcgaccggctgaccgttgggcagatagccgcgataaacgatacgggaataacggggcaccgcacccgtcaggccgggaatcgacaggcagccttcccagccaagcgccagttcgtcctctaccggctcgaattccgggttgatcagcgccgtcaggggcgaaaaatcggtttccgcgccgtcttcctcgccgcgctcgcggggcgatttgaagatgatcacgcgcttgccctcatacacctgcggcgcggccaggccgacgccggacgcatcttccatggtctcgaccatgtcttccagcagacgccctacatcgcgcgacgtcggatcggcgatcgcctcggctgcctgtaaaagaacgggatggcccatgcgggcgattttgagcagtgtcatgtcgaaacgcagtcctgacgcgggttacggttgattttgcgggtatagcaccataattgagacaatggcgttaaggactttaaaatcaagtcctgtttatgctataagncgccatcaaaccggtggaaacgccggttttcgctgtttttgacaattcgtttttcgcttcancgagcgatcatacgtacccgactggagatggtttaaccgtggaagtatccgtaagagacaacgacgtcgatcaggcactgcgcgcgctgaaaaagaaaatgcagcgcgagggcattttccgggaaatgaaaatgcgccggtcctatgaaaagccgtccgagcgccgcgcccgcgaaaaggcggaagcgatccgccgcgcccgcaagctggaacgcaagcgtctggaacgcgaaggcttctgagcccgcgtcacaatacgatctgaaaggccgcttttcgcggccttttttgatgcgtagattcagggacgatttttttcgcgcacttcacttttggcgggctgcccgatgaccaatgacaacaccggccagatcgaattctggaacagcgatcacggcctcgcctgggcacgttatgccgatgcggtggatacgatgttttccgacatcaccgacgccgtgctggatgcggcggaggttggcgttggagaccgggttctcgatctgggctgcggcaatgggggcaccacgctggcggcggcngcgcgcgtcacggcgatcggcacagtcacggcgatcgacgtttccggcccgatgatcgaccgcgcccgtgaacgcgccgatgccgccgatctggtcaacgtcaccttcatactgggcgacgcggcggattatcccttcgcaggcggatccttcgacaaactnatttcccgcctcggcgtcatgtttttcgacgacccggcggacgccttcgcccggctcggnccggcgctggacaccggcgggcgtgtcgcgctgggggtgtggcgcgggccgcgcganaatccgtgggcaatggaaccggtggccgcngccaggccgttcctggacatgccgccgcggccnggaccggaagacccgggacctttttccttcgccgatccggaccgcgtacgccgcgtgctggccgactccggctggcggaatatcgatctggcgccgctggatttccatatcccnctgggacacacaatggaagacgcgctggccttcgtnatggaaatgggncccctgtcggcgccgctgggcaaagtgacgggngggaaccgcaccagggcgatagacgcgatcaccaangtgctggaagaaaacaccggcgacgacggcatcgtccgccttnccggcgcctgctggatcgttacggcgcgggcgggctgaagcccaccgttttcagcggcacgtcgcccacgaacctctccagggcatcccgcgtttcggtaagcgggatattgctgtcntcggtctcgttcacgacgatcttttcaaccggaatatcccggacgcggagcgcctccagcgccgtcagggcgtggctcaggctgccgagatagctgccgaccaccaggacgacggggatgcccagcgcccctatcagatcgcgcatggtgcgggtcgcgtcgagcggcaccatgacgccccccgccccttcgatcagcagatgcgcgcccgacgcatccgccttttcgatggcggcccggcagtagtcggcgatttcgtcgaccggaacgccccgcccctccagcgcggctgccatatccggcgacagcggcgcggcatagcgccagggcgaaacgcggtcgatggcatcgggcgatatcgtttctccgagtgcacgcagcagttttncggtatcggacccgcaggcctccgacgggtcgaacccgctgatcaccggtttcagcgcccgcaccgcctcgccgttcgcccgccagtcgcggatcatcttttcggagacntaggtcttgccgcggccggtgccgcaggaggtcacgaagatggcggccatgtcagccgtccgcggcccgcagcgctgtcccgtgatcgaccgacagcgcattgacggcgtcggccagcgccgcgacctgtgcgtcggtatgttcggcggtaaacgtaaaccgcaggcgcgacgtccc

SEQ ID NO: 1500 - DNA, 4000 bp, Escherichia coli
  misc_feature (519)..(519): n is a, c, g, or t
  misc_feature (552)..(552): n is a, c, g, or t
  misc_feature (1190)..(1190): n is a, c, g, or t
  misc_feature (2269)..(2269): n is a, c, g, or t
  misc_feature (2658)..(2658): n is a, c, g, or t
  misc_feature (3214)..(3214): n is a, c, g, or t
  misc_feature (3245)..(3245): n is a, c, g, or t
  misc_feature (3298)..(3298): n is a, c, g, or t
  misc_feature (3349)..(3349): n is a, c, g, or t
aatatgaccacatctcatggttacgctcatcccaatagagttcattgctatagaaattaagcccttgcgctgtaaggattcttacacgccctcttagttcccaacgacggtccttatcaaagtaaacagcagagtcacattgaatataacccactacatgtttcttcaaatcaaactgagtaagtaggattcctttattgaaagtccagcgcgaaggtcttctattctcattaatttcccaacgctcagtaacaatacgatatttgataacgcctgaatctgagataagtgtattgacaccatatgtagtcataaccggcacagagtcacggtcatgaatagcaggagcggtatgctcacgttcctccgaacaggaaaccatagcatagctcgctgtaaataatactaatccaataaaaaatgaataaaggcttgaacgcatattattcaaccttgaacttagcaaaccagcgctcattaaatgtgaaaccaacgttgatacggaacatattttccttnatcattcccgtaacactctggttcacccactcngcactgatattcaacatactgcgattattgtaagcattgaggattggaataccaactccaaggcttgcagaaagctcgcgtggaccgtctacaccattaatctttagataaggactggcatagctaaaacctgctcgatagtgcatacgactaaagaaaccacgatagcgttcgcccttgcagtagtcaccacctaatgtgaacttatgacgatcattgaattgtccatcaacgagattatagcttgttgtaccattgactgtggttaattgtgggtactttagcttagcccacttctgcaactgatagtcaacaccgaacttcagacggttattatgattccacatcaaaccaactccgaaagtatgaggcagttcaagagagtttgatacaacataacgagttgtatcagaaacgcttgtttgtgaatttgttgaaatcaaattacactcagcctctgtccctaaattatgtccaagagagtaagtaagacccaaggtcagctcattcttcttatctacagcataagtatattgtgcaccgaagtcaaccttgtagctttttacctgtgcagagtaattctttgacaatgtattaacataactgtcactataggtatttgtcgaattacgattcantgttccccacaagtaaccaatattcgcaccaaatgagaaacccttaaaaggctcccaaccagcacctaaataaacaagatgtaaaccaccactaccattataagcattggaatacgtagcatttacagaagatgtacttgggaaagcattgacattttgagtgttactaaagttgtaacctacatttgtataaggtaaaagaccaaagctaacacccacatgcttaaaagctctgaatgacgcaacaacgtattcaatatcagcattcttagcatttaccttgttaccattttcctcaaaattagtcaactgaaggctaacacctgcatcaaatatgaatgaaagagagtcaacagaagcgtatgaagcagggttcgcatagttcacctgattacgctcatgaaatccgtatgccaatccgttcataccacgattaaaacttgttgcctgagatgccaaagcacctaatccatactgactatatggagagttagttccgctttgagctgacacctgtactgcaagacctgcaaggaacgctgctgcaattatctttttcattcgctttctttttcttattctgacgatatgtctaaacaatatattggcgcaaagttattaaaaaaaatctatattgcagaaaaacaataaaggattttgatttttaataagctttctttgtgctctcatgcttttttactacctttgcggagaaaatgaaaaagggattattatatattgtactgactttcatcctgtctgttgttaacgctacagcgggggctcagtctatgactaatcctgatcgtattcagatatcccttttgacttgttcacctggtaaagaagtttgggcacaatatggtcataccgctattcgatattacgacaaagaaagcggagaagaccttgccatcaactatggtattttctccctcgaccaaacctactttatccctcgttttgttcttggtatgacagactatcgcatgggagttcaacctatggatatgttccttgctcaatatagttatgaagggcgaggagttgtcgaacaggttcttaatttatcagctgangataaagaggttatctataaagctttgcaggagaacatgaagcctgaaaatgtagtttatcgctacaactacttctttgacaactgtaccacaagggcacgtgatatgctcgtcaatcacctccatggaaaggttgtttatccaccagcagaagaagatgcaacgttccgttctatgatacataaatggaacaataaatatgaatggtcacaattcggagaagacctcctactcggtgtgaatgctgatcgtaagacaacaaagtctgaacagcagtttcttccagagaacttaaggagtgactttgacaaagcaagatacaacggaaagcctttagtaaaggaaactaacgtactattggatgctgaaacagaagtggcagaaccagnttttccactttctccgctatctatagcactcatatttgcagttatcagtcttgtaatgatgctctttagctatcgtagacagcaggtttattgggcgtgggacttagctttaatgcttacatcggggctcatgggaattatcttcttcgttatgattttctcacaacatccatgtgttagcttgaatttcatcctattattctttaatcctttaccattgttcttcctttatagtacaattaaaaagaagaaggtaatatggtggaaaatatggggagtccttatcattttaggacttttcggaagtttattccaagaaataccactgccaatattaattgtggcatcattcttgctattacattgtatagtacatttgcggattaataaagcggttgcaccaaccgtgagtagttcaaagaaataaaagataatgaataaatacatcaccgctttacttgtcgtacttgcggcaacaggagtcgaggcgcagagctatcagtctgcgctaaagattgcgttgggtgatgtcaacatcgaagatctttgccataancaagcgtttaagggcgttgaacaggagattntgtcagttcttgaagcctttaagcagattaaagaagacgaagaaacagagccngcacaaagcaaagcagtctttgtgacagacttatacgacaattattccatngctttaacatctcaatcaaataataatcaggaatcacaactattccttcctaatccttccttaaggactggaatcaagattcgtgcccccagtttacttcctttagcgtaataaacaatattacaaaacatagatatatagaagtaaacaaagagggagaacctctaatataaataacaaactcaattagaataaatgaatttcaataagatattaaaggcacttttcggagataagtcaacacgtgatatgaagcttatacagccatacgtagataaggtaaaggctacatatccagagattaaagcactcagcaatgacgaattgcgtgcaaagacaaaggaaatccagaagtatgtccaggatgcaggtaaggaacaacgtgagaagataaccgaacttcgtacaacaattgaagctacaccgattgaagatcgtgaagctattttcaatcaaatagataaacttgagaaagaagctcttgacaactatgagaaggctctcgatgaggttatgccagtagcattctctattgtcaaagatacagcacgtcgtttctctgagaatgaggaaacaatcgtaacagcaaccgacttcgatcgtgagttggctgcagacccttcaaaggactttatcactattgatggcgac

SEQ ID NO: 1501 - DNA, 4000 bp, Escherichia coli
  misc_feature (404)..(404): n is a, c, g, or t
  misc_feature (904)..(904): n is a, c, g, or t
  misc_feature (996)..(996): n is a, c, g, or t
  misc_feature (1179)..(1179): n is a, c, g, or t
  misc_feature (1383)..(1383): n is a, c, g, or t
  misc_feature (1386)..(1386): n is a, c, g, or t
  misc_feature (1434)..(1434): n is a, c, g, or t
  misc_feature (1485)..(1485): n is a, c, g, or t
  misc_feature (1487)..(1487): n is a, c, g, or t
  misc_feature (1617)..(1617): n is a, c, g, or t
  misc_feature (1938)..(1938): n is a, c, g, or t
  misc_feature (1943)..(1943): n is a, c, g, or t
  misc_feature (2486)..(2486): n is a, c, g, or t
  misc_feature (2552)..(2552): n is a, c, g, or t
  misc_feature (2857)..(2857): n is a, c, g, or t
  misc_feature (3076)..(3076): n is a, c, g, or t
  misc_feature (3668)..(3668): n is a, c, g, or t
  misc_feature (3775)..(3779): n is a, c, g, or t
  misc_feature (3782)..(3782): n is a, c, g, or t
  misc_feature (3785)..(3790): n is a, c, g, or t
  misc_feature (3793)..(3793): n is a, c, g, or t
  misc_feature (3795)..(3796): n is a, c, g, or t
  misc_feature (3798)..(3798): n is a, c, g, or t
  misc_feature (3803)..(3803): n is a, c, g, or t
  misc_feature (3805)..(3805): n is a, c, g, or t
  misc_feature (3863)..(3869): n is a, c, g, or t
  misc_feature (3875)..(3877): n is a, c, g, or t
  misc_feature (3880)..(3881): n is a, c, g, or t
  misc_feature (3884)..(3888): n is a, c, g, or t
  misc_feature (3892)..(3892): n is a, c, g, or t
  misc_feature (3894)..(3900): n is a, c, g, or t
  misc_feature (3903)..(3904): n is a, c, g, or t
  misc_feature (3907)..(3907): n is a, c, g, or t
  misc_feature (3909)..(3915): n is a, c, g, or t
  misc_feature (3918)..(3920): n is a, c, g, or t
  misc_feature (3924)..(3928): n is a, c, g, or t
  misc_feature (3931)..(3931): n is a, c, g, or t
  misc_feature (3934)..(3951): n is a, c, g, or t
  misc_feature (3954)..(3957): n is a, c, g, or t
  misc_feature (3960)..(3964): n is a, c, g, or t
  misc_feature (3967)..(3968): n is a, c, g, or t
  misc_feature (3971)..(3981): n is a, c, g, or t
  misc_feature (3986)..(3988): n is a, c, g, or t
  misc_feature (3991)..(4000): n is a, c, g, or t
ttacggatgccgccggagagttgaagtctccgctgattctgcaggtctccgcaggtgcacgcaagtacgcccgtcatgagtaccttgtccatctcgtcaaggcagcacttgaaatcaatgatattcccatcgcacttcacctcgaccacggcgcagattttgacatctgcaaggcgtgcatcgatggcggtttcacctccgtcatgatcgacggctcgcatctcccctacacagaaaacgtggcacttgctaagcgcgttgccgagtatgcacatgcacacggcgttgttgtcgaggcagaacttggtcagctggcaggtatcgaagacgatgtcaatgtctcggcagaagatgcttcctacacgaagccggaggaagtacaggactttgtcgagaagacgggngttgactccctcgctatcgcgatcggcacgtcgcacggcgcatttaagtttacgccggagcagtgcacgcgcaatgcggacggcgttcttgtaccgcccccgctccgctttgatattcttgaggagatcgagaagcgtatcccgggattccccatcgtgctccatggtgcgtcctctgttattccgaagtacgtcaagatcatcaacgagaacggcggtcacatgccggatgcggtcggcattcccgaggatcagctccgccgtgctgcaaagtcggccgtctgcaagatcaacatcgattccgatctgcgtcttgcgatgacggcaggcatccgcgagcacttccataaggagccgtcgcactttgacccgcgtcagtacctgtccgatggtcgtaactacatcaaggagctcgttgctcacaagatcaaggaagtcctcggctcggatggaaaggcacccgaagttcaggctctcatcgaccagaacaagtaattctncgacttaagcagtacaaaatagctcatccgtatggatgagctatttttatattgtttcatcaggaatcacagatgaattacgttcaaatcanccgcgcacggctttgacaacaacggaaagcaatttatcctcggatgaaacttcagtaaatgacagacccgcagcatcctttggcacggctcgatcacgacgattgtaccaaacagcactccagcctgcctctatcgcacctttcacatccatctcaaacgcatcaccgacatagagaagcccngccttgtccagatccatacgttcctccatcagttggaaaatacgagggtctggtttacgaaacttgtagtcacctgatacgatcgttgtctcttccggcatccattttgacagaccaagagaagctatcttttttctctgatgtgcagattcgccgttggtaatcacaccgagtttggcgcgcgaacggagctcgttgaacatncgnatcatcattggcgagagccgaatctgatactggagccccatatagacncgctgaaacgccaacgcctgcgcatccgtcgtctgaacgtcagcttcttcnancgttttttggatgcgataaatatagaattgctccatactgattttccctgtttgcgactcctcaaaccgctcatcgctgtggcgacgaaaggacagaaagagagatggcaagtcgaactcactgcgctcnccatagagtcttcgtaatgcagcatagaatggctgagccatatcatacagcgtgtcatcaacatcaaacactacgccctgtattctcataacatcctcatttcatataactcttatgactcttattcctattataagggaaaaaggaatatcgtgcaatctaggaaagcacggataaaacaaaagatgttctccaatgaaagagaacatcttctgcattgatattattttcccgccagcgtgcgtgccgcctcggcaatgtggtcagcagtcagaccgaactccttcaggagctctgccgcagggccagagtgtccgaacncatcnttgacaccgacacggcggacaggaacgggacatccttccgcaagcgcagcgcagaccgcttcgccaagtccgccgatgatgttatgctcctctaccgtgacaatcttcccgcattcacgcgctgcacgaagaacgatctctgtatcgagcggcttgatcgtcgccatattgatcacacgtgtgctgatgccctcggccgcaagacgttttcctgcctcgatcgcctccggcacgagaatccctgtggcaatgaccgcgacatccgtgccatcctgcagcacctctcctttgccaacgacaaaaggaaaatcctccgcatggtagaccggcgttgctgcacgtccgaagcggatgtagacaggaccatccatctcgtaggcagcatgcagcattttgcgcgcctccacatcatccgaagggcacatgaccgtcatgccgggaatcgtacgcatgagagcaaaatcctcacagcactgatgcgatgcaccatcttcgccgacggagatgccgccgtgcgtggcacagatcttgacgttcagatgngggtatccgatcgtattgcgcacctgctcataggcacgccccgccgcaaacatggcaaacgtcganacaaacggcacgagtcccatggtcgacagacctgcgccgacatccaccagattgcactctgcaataccgcagttgaagtgacggtcagggaacgccttcttaaagattgccgtcttggttgcaccggcaagatccgcatccagcacgacgacgttatcgtgttcttttcctaattccaccaatccgttgccgtagctctcacgggttgcaattttctttacctctgccatgctcatgcctcctcgatgctcttccgaaccgcagccaagtcctccagtccctgggcaagctcggcatcgttgggngctttgccatgccagcccgcctgattctccataaaggagacatccttgcccttgaccgtcttcatcagaatcaccgtcggtttcttgctgccctgattcgcatggaaggtgtggaatgccgacgcaagagcagtgaaatcatgtccgtcaatccactgaacggcacagccgaacgcctcgaatttcttgtccacgggggcgctattcatgacatctgcngtttttccgtcgatctgaagcccattgacatccacggcgatgcagagattgtccagtccatagtgcgcggcgaacatcgtcgcctcccagatctgtccttcggcaagctcaccgtcgccgagcagtgtgtagacgttgatgtccttgccaagatacttcgcgccctttgccatgcccgcagccgtcgaaagcccctgaccaagcgagcctgtagacatgtcgatgccgggcgtgaggttcatattcggatgcccctgcaggcgcgagccgatatgacggagggtcagcagttcctccacggggaaaaatccgcagttcgccagtgtcgcatagagccccggtgcaacgtgccccttggaaagaacaaagcggtcgcggttcggatcatgcgggtttttcggatcgacacgaatttccttcttgtagagataggtgaaatagtccgctgacgaaagtgatccacctggatgcccgcttttcgccgcatgcgtgccgcgcagaattccctcgcgcaccttcactgcaaagagccgcagctctttctgttcagccgccgtcataaaactcctcctcatccacatcaaaaaagacnataaaccatgattattctatctcattttgtgaacaactgcaagccgccaatacagcaatatcatcaaaatattactattgctttgcctttgtggtacgatactcgcnnnnnccnaannnnnnggntnngnggaangnaatacacaaatggggccattatacgaagttcgcttcttcgcataacaaccccatatannnnnnnttaaannnccnnaannnnngggngnnnnnnnggnnggngnnnnnnnttnnnaaannnnnaanggnnnnnnnnnnnnnnnnnnttnnnnttnnnnnccnnccnnnnnnnnnnnttttnnnccnnnnnnnnnn

SEQ ID NO: 1502 - DNA, 4000 bp, Escherichia coli
  misc_feature (24)..(24): n is a, c, g, or t
  misc_feature (1278)..(1278): n is a, c, g, or t
ttagagcgcattgaggtagccttngggccaacctccaatgcgtacggtagcgatgctatgggtggggtgattcatttcatgacgaagacccccatgttctcgcaaaaaaggcagttgcatggccaggcctatgccaaatacagcaccgcacttcagagttgggtgaagcatgcggagcttacaggtacatctttgcactggggatttttcacttcgttaacggaatccaattttggggaacttcgtggcggacgacgcatcaacccattttacggtgaattgtatggcatgcgcgaggtgtatgccgtccgaactttatcgggggattccctggtggcaaacccagagccgtggattcaaaaggggagtgggtacacccaatacgactttgttcagaaagtgctgtatcgtgcgcgttccgaccgccgaaacaccctaaatattcagggctctacctccagcaatattccccgctacgatcgaatgaccgatcccagttccaccacagggcttaaatatggagattggtactatggaccccaaaagcgcttgatggcgagcttcaaacatgaggcattggacgtcttaggttttgatggcgtaagtgtgacggtgtaccaccagaatgtagaggaaagccgcatgactcgaaaattcaatcgctccagtcttcagcaacgcgtggagaatgtcatggtaaacggttttaactcagacgcaatgaagcgctggggtaacaataccttgcgtgcgggcgtcgatggatggtatcaaaccgttcagtcgagaggtatggagtccgatgtatttaacggtggaccagaaacccctattgattcgcgctatcccggtggacggaatgaaatgtattcacttgcggcatttgccacccacattaaccgtgtgacggatgaagtgaccatcacagagggttttcgcgtaggcaattcggtgttgtttagcgagttcacggataaaacatatttcccctttccttttgaatacatctaccagcggatgccggtcgcttcagggagcatagggttgatctacaacccaaatgagggcaacaaatattctttcaccgtttcaacggcctaccgtgtacccaacattgatgacctttccaaggtttttgaaatggctccaggcatgctgatagtgcccaacccgcacttgcgtcccgaacaggctttcactgcggaacttgggaacatccgaattttcaaagccggccacagcctggaatggaacctgtatacgacctcgttgaccgangccctaatggtacagcccttccgtgtagatggttcggattctgtcttctatgacggcgccatggtaggcgtttatgcccagcaaaacgtgcagagggcggtcattatggggtactccattcgtggtaacgtggttctgagcggtccttggacgatgaatggcgtgctgcaggggacacaggggatgttgggatatccgatcatggggaacctggaccacattcctccagtttcaggcaggcttgccctgaactggcagcacaaagcctggtcttgggaattctttggtttaggcaatggatggaagcacatcaaagcatatcaactaaacggtgaggacaatgagcaatatgccacacctgagggaatgcctgcttgggtgacctggaatagctccttgacctttgccagtaaacagggcttgtccatgcaattaggggtctacaaccttttggatacgcagtaccgaacctttgcctctgggatcaacgctcctggtcgaaacattcaaacggccctgcgctacaccttctaggccttctcctgtgtacctttaggggaaacccaaggtatccatgaagaaattcttgcctcttttcgccttttggctgctgttggcctgcgaatcgcccgagctcacggaagccgtttcattggattcgctggtgcctcttccctcaaggatggatgttcccgacgatagaggctttaccgcggttcaaggctccgtccggtttgttggaattccagaagatgactttgccgaaatggaggaatggccgcagtcagcggatggcttacctatcatttggaggaaagaggaaggcgatgccctgagtcttcaagggtattggctcgatatttctgccgattctgtggtcattctcgcagctggagatgcaggggtgcatgcggccttatccaccttaaagcaattagtgcccacctcccattggcctgaaaaaaagggggatccaattcggcttggatttgcatggccccaagtgcatatagaggatgaacctgcctttgaataccgaggtatgcacttggatgtgtgccgccactttatgcccattgaatttatcgagaagtacctagataaccttgcattgcacaagttcaaccggtttcactggcaccttacagaggaccaaggctggcgtattgaaatcaagaaatacccaaagttgacggaggtaggagcttggcgttcagcgtcgcaaaccggtgcctacagcgagcagcgtttcgacagcacgcgttatggtgggttttacacccaagaagaagcgcgtcacatagtggactatgcccgccgacgcggaattacggtgattccagaaatcgaaatgccgggtcactctttagctgcattggcggcttaccctgagctatcctgtaccggaggtcccattgaagtggctcatggatggggagtctttgacgatgtgtattgcgcagggaacccagaggtgtacacttttttagaaggcgttttggacgaagtcatggatatcttcccgtcgcctttgattcatatcggtggcgatgagtgcccaaaaacccgatgggagtcctgttccaagtgccagctggagatggagcgaaacaaactcaaggacgaacacgcgcttcaatctcatttcatcacccgaatggaacgctatctcaatgcccatggtcgaaacatcattggctgggacgaaatcctagaaggcgggttggccccaaatgccgcggtgatgtcttggcgtggcacggcaggaggcatacaagctgcctccatggagcacgaggtggtcatgacccctggcaagccgctctattttgaccattaccagtttaacccaggcgaagagccggtagccattggggggttcaattccttgatggatgtctatgcattcaatccagttgccggcgtgccggccgaataccaccggtacatcttaggcgctcaagccaatgtgtggaccgaatacatggaaacctcggaccatgtcgagcacatggttcagccacgcgcttcggctttgtcggaagttttgtggcttgggggaaagcgccccggtgaagatgcggccttccgacaagcgatggactaccacatccaacgcctccaggccatgggctggaagtacgcaccctatgaattcaaaaaaatagccaccgatgaagcgcagtgattttcttaagattgtaggaggtggggcggccatgacggccatactgccctcaaccctacgcgcgaaggatgccgcacgctctaacgagtatatagaacccgtttccatcgctacctggcgctttggcttggagaccacggccgaggccatgaaggtcttacgtgctggcggatctgccctggatgccacggaagccggggtgaagctttgtgaggcggaccccaaggagcgttccgtgggattgggtgggcgtccagaccgcgatggatttgttaccctggattcatgctgtatggaccacttgggcaacatcggatcggtggccgcagtcgagaacgtggtgcacgtgagctcgttggctcgggccgtgatggaaaagaccccacacgtgatgcttgtgggggagggcgcacgccagtttgcccaagaaatgggctttccactccaagatctaatggtaccggattccaaacgcgaatgggagaaatggcgggagaaatcggactaccagcccatcgtaaacattgaaaacca

SEQ ID NO: 1503 - DNA, 4000 bp, Escherichia coli
  misc_feature (2)..(2): n is a, c, g, or t
  misc_feature (28)..(29): n is a, c, g, or t
  misc_feature (115)..(115): n is a, c, g, or t
  misc_feature (214)..(214): n is a, c, g, or t
  misc_feature (316)..(316): n is a, c, g, or t
  misc_feature (778)..(778): n is a, c, g, or t
  misc_feature (964)..(964): n is a, c, g, or t
  misc_feature (3011)..(3011): n is a, c, g, or t
  misc_feature (3028)..(3028): n is a, c, g, or t
  misc_feature (3176)..(3176): n is a, c, g, or t
cntgagaatctgctcttttatttcttcnntccaaggtgaaattatttagaaagcattgtgcgaatatacataataaagttcgctcaattcatccatttttttactcatcaagacntgcaaatccgaagccgtgtcatagtcttcttccgacaaggcccgtttgatttgcgtaaagagagacaaattcttatccgtatctctccccagttcagtncgcaaagcattaatttgctgccaccgttcttcttccaaaggattcgcatcgctatctaaatgcaatgccttagcattaattaccctttccagattatcaggnacaatacggtactgaagttcaagagcccaccgtttcaaagctccttctcggaaggaatccataacacgtcttgcaaagttatcgcaagccagggtttccagtttatggggatatacttcccatgacttgaaattttcccaaaccgtcgccggagccttgccgaacatagtattgcgttcttcttccgtgaaggcttcaaacacatccacttccgaacgataagcacgatccgcagccaggtagtctgccttatctcccaccttcttggaaatttcagccaataattcagccggtgcttttttattcttcaaagcataacgaatgccgtccaaggctgccaagtagaagagagcaatagcgatataagtattggtaaacggattgggagcccgcatttccacacgcgtcgcattagggcttgctacgttacgaatcaagccggccaaaacggaacgatttcgngtcggcacgtcggggctttcaccgcccaaagaggttacaatgcagaccggtgcttcaaatcccggtttcaaacgattcaacgaatccgtcgtagacgatacaaaaggattaatgacttcataatgtttaagaatacccattaaggccccataccctacagatgaaaggaactctttcatcatgtcntccggattgaacaggttaacgtacttaccgtttttcataatggcgcctataccgatatgggtatgttcaccgctaccggcaacccccgatatcggtttggccttaaaggtgacttccaagccgttttcacgaaaggcttcgcgaataataatacgggcctgaatttcgttatctgctgtctgaacaggatcggacgagaacttccagtctacttccagctgttcaagaacgaagataagtttacccgaatcatcaatatgagccttaataccgcctacttccttgtgccccatttccggctcaaggccgtatttttcaaggcgttcaactgcctgttccaaggccgtgcgtacaacaccgtgtgtccgttgccaatattgttcctgcaatttttgcgatgtggacaaaaggcgagaagccacgtcctgactgggcgacttaacccaaaactccaattccgtagctgtcgtaagtaccagtttctctatatcatttacattgatattcaacccgggaacaccgtattccttaaccagcttgagaacttcatcgcctacatagtcggtcgtattgcgcaaaatagatcgggaatctataaagcccgtagcatgttcaaggaaactcggtatacgcaaagtccctacaggctttccagtagcttcatctatatttccgtcgttatagtcaacaaaccagttaacgcccggatccgccttaatatctacacgagcattgtctaaggtggcaatccccggcaggactacggaagaaccgtccgtctggaaggccgagccgtcaaagaaactttcatagtcgtcaaagaagacggagatagggatcttttcatccgtatcattgcccgccaaatcgacacctaccaaagatacgaatttaatttccggatgttgttccaaaagtgccagaatgccttcttttccgtactgcccggcagggattacataaagcaagttttccgtattcatactgttcctccttagaactaaaaaactccgcacctctaccggtgcggagtcccctttgactcggtcatattcttttgtccgaattacagttacattatatgagtaaccgactcgtctgtcaactcgacgatataaaatctatctgctttgcagagttttctttaccgcatcggaaatgacctttccgtcagccttgccttgaagctgcggcataaccgccttcatgacatcacccatttttaaagcaccttcgcccataccggccactatgtcggaaacaattttaaacacttcttccgacgacagctgagcaggcatgtatttttcgagaactgcaatttccgcacgaacttgtgcagctaaatcttcccgaccgcctttgacaaagtcttccagcgattctttgcgttgcttcatttctttggcgatgaccttgcttacaccggcgtcatcgagctcgcactttccgtcgatttccacgttcttgatggaagaacgtactgagcgaataacggcaagttcaatcttgcccgcttcttttttcttcatcgccgacttcatgtcctgcgataattcttcctttaaagacactgtatcaaccttctcggattatgctttaaatttacgtttacgtgccgcttcggactttttctttctccgtacgctgggtttttcataatgttcgcgtttacggacttcggaaagaacacctgccttttggcaagagcgcttgaaacgacgcaatgcgctgtccaaagtttcatttttaccaactctgatttctgccattctgtatccctccctccaaaattatcgttagggagtgctgttttgcacacatgaaaattatacttaaaaagcgtcgttttgtcaattacatgcccttttatcctatgcaaaaacattctctcgtgttttatctcaaaaagcggctgaacacatagtttccataaagaagcccctggcttgtaaggcaatatccccactcggtcttttccaggaaacctcgcagtaccaaatcctctattaccgtgccgaaagcatctgtcaccgttctcttaaancactgctcaaaccgttnattatcaattcctttcatggttctcagccctaaaaaacaaaagtcttcttctcctctttccttgccgattagttcatgttctgccaggaccgatgtttttcctgcattttttatatattccggcaaagaacgtatatttgaaaaacgntaggtgccgtcaaaggagtggctcgaagcgccgaacccgatatacggctcatactgccaatacttaagattatgctttgattgaaaaccctccgccgcataggctgaaatttcataacgcttcaagccgcccttctccagagtatgacataccctttctccggcttcttccgtaacacgatcttccggaaggaggatttcccctttccggacaagacgcttcagcatcgtaccttcttcaacaataagactgtatgccgaagcgtgtgtaacacccagttcgattaagatacgggcatcggtctcggcgtcctcgggtgattgtcccggcaggccgtaaatgaggtctgccgatacattcgtcacaccgcctgtacgtacggcttccaaggccgcaaaggcttccgccgacgtatgaaccctccttaacaattgcaacaatcgatcgtcaaaggactggattcccatgctgattctattaacgccaatttttacaagatcgcatatataatcggacttaattccgtccggatttacttcaaacgtaatttcgctatctgcgtctatccgaaaggtatctgtcagtgccgacattattttttcgccttgccgtgccgtcaaaagcgagggagtaccgccgccgaaatagacggtatccgccgcctccccaatgtatgaagttgcgcgtatttctcgacacagggcctctacatagtcatctaaatacgacgaaatgcctccgtacgacggaaagtcgcagtagaggcacttacgtacgcaaaaaggaatatgaacatacaggcccgtcatcagttatcatccacc

SEQ ID NO: 1504 - DNA, 4000 bp, Escherichia coli
  misc_feature (144)..(144): n is a, c, g, or t
  misc_feature (193)..(193): n is a, c, g, or t
  misc_feature (208)..(208): n is a, c, g, or t
  misc_feature (259)..(259): n is a, c, g, or t
  misc_feature (262)..(262): n is a, c, g, or t
  misc_feature (366)..(366): n is a, c, g, or t
  misc_feature (385)..(385): n is a, c, g, or t
  misc_feature (1171)..(1171): n is a, c, g, or t
  misc_feature (1725)..(1725): n is a, c, g, or t
  misc_feature (1785)..(1785): n is a, c, g, or t
  misc_feature (1987)..(1987): n is a, c, g, or t
taaccataaaaacaattaaaaaaaaacttaattttttcatgaattttcaattgttggtattcttatattctcaactaaatcttgaacctcttttgaaggttctttagttaaatggcaaacagttaatgaaactacaaaattaantaacattgcaaatgttccgaagccttcaggcgatattccaaaccaccantctgcttcagttccnccaccaaaccatccaaatttaaattttgtcatataaaaaagcattaaaagnagnccagtaatcattccagaaatcgctccttctttgttcattcttttgtaaaaaatacccatgactatagcaggaaaaaatgaagctgcagccagaccaaaagctanagccacaactgctgctacnaatcctggtggatttattccgaaatatccagctaataaaactgcaaaaaatgcagaaactctagctgcaatcaattctcctttttcactaacatcgggttttataatttttttaataagatcatgagatacagatgaagaaataactagcagtaatccagcagctgtagaaagtgctgctgctagagcaccagctgcaagtaatgctatcacccagtttggaagttcagcaatttctggatttgccataaccattatgtctctgtcaattgttaactcatttaattgtgggtctgcaacatattgaataaggccatcgtcatttttatctgtaaaagttaaaagcccagttttttcccaattttcaaaccacactggcatttcatcatattttttttcactaaccgtttcaattaaattagttctagcaaaaactgcaattgcaggtgcagtagtgtataaaatcgctataaataaaagagcccaacctgcagattttcttgcatcgctaactttttttactgtaaaaaacctaacaataacatgaggaagaccagctgttccaatcattagagctgctgtgatgaaaaacacatcaagtttagattttgatccagttgtatattcgtgaaaccctaagtccctacttaatccgtctaatttttctaaaagataaactccatctgtccctatagatccaaaacctaattgaggaattggatttccggtcatttgcatcgaaataaaaatagcaggcaccataaaggcaaatattagaacacaatantgagctacttgtgtgtatgtaattcctttcatccctcctaaaacagcataaaataaaacaattgccattccaatgacaacaccagtatttatatcaacttctaaatatctcgaaaagacaagtccaacacctctcatttgacctgcaacatatgtgaaagaaattataagcgcacaaaagaccgcaacaagtcttgctgtatcagagtaatatctatctccaataaaatcaggaacagtaaattttccaaattttcttaaatacggagccaacaataaagctaataaaacatatcccccagtccatcccataagatatactgaaccgtcataacccataaaagatatcaaccctgccattgaaataaatgatgctgctgacatccagtctgcagcagttgccattccatttgctattggagatacaccagagcctgctacataaaattcttttgttgatccagcctttgaccaaatggcaatgcctatatataacgaaaaagttataccaatcattaaccatatccatagttgtaaatccataattattttttngaatgatatttcttatctagtctgttcataagaccaatataaataaatattaacgttacnaaaacgtaaatagaaccttgttgagcaaaccagaatccaagtttaaatccaccaatttttatttgatttaattcatcaattaatattataccaaatccaaaggaaacggtaaaccaaattgataaaagaattaatagatatttaagattttttttccagtactcttctgctaaatttttactcataataatagttgttgttnactctaatttaaaaaaattaatctctaagtttgtcttaaaaaggattaaagccttaatttatattattaatcatttaatttaatggattaaataattcttgttattaaatattgaccctatctaatgaaaaaaatagtcttctttttaattttatgtttaaatttttcttgtaataatttagaaaaaaaacaaagtaaagttgaaattccaactggaatgattttcatacagggaggtgaatttttgatgggagctgataataaacaagcgatgagagatgaatatcctcaacataaagttttgatcaattcttttttaatggacgaaaccgaagttactaatgctgactttaaaaaattcatagaatctactggctatttgactactgctgaaagaaaaatagattgggatgacttaaaaaaatatttaccgcctaatactccaaaacctcacgacagtttgttagcaccttcctctcttgttttttttgagtcacaaacgaaaaatttaaatgatttttctcaatggtggaaacttcaaaaagaagttaactggaagcatccttatggcaaagaaagtactattgatacaattttagatcatcctgttattcatgttagctgggacgacgctgtagcttattgtaattggaaaggaagaagattgccaactgaagctgaatatgaatatgcaatgagatcaggtaattcaaatactatttatacctggggaaatgagccagtcggaactggtacacaaaaagctaatatttggcaaggaaattttccttcaaataatatttcatccgatgaattttattatacttcacctgtaaaatcatttgaaaaaaatgattttggtttatatgatatttctggaaatgtttgggaatggtgttctgatttatatcacagcgattattattcaactatttcaaatgggttggcaaacaatcctaaaggaccaataaaaagctatgatcctaatgatccatttagttctaaaagagtgatgagaggaggaagttttctttgtaacgactcttattgtagtggctttagaaattcaatgagaatgaaaagcacacctgatagtagttcgcaacacgttgggtttagaacagtcttagatatataataaaacaaaaatgctcagctttaggaaactgagcattttaacaacaactaaccaaaaatattatgtgttaattattttacattaatcgtgccaaactttttaatcattaaaatatttcattataattaaaaactgttttatagccttttttgttaaaataatttttagaattaattggtccagcagctaaaacaaaatcccctccccatgctcctaagctttttatttcgccattataatctttaaaatatttattttttactgtttcggtttttaaagtttttgaaattatagtttcatgctctattatacaattttgaaaatttaatagtgtttgtgaatttacaaactccattgtaagattagacaatatgttaatagttgaattagtgatttttcttttagaaaacttatctatttctgtattactatcctgttttttatttaggtaaataaaaaatagattattaatatatttaggattgaatttaactggattaactattgggatattattttttagctgatataaaactggtccttttgccaatgcgcatgctatgtcgtaaccacttcctttataattggtccacaataattcaaatggatcaatattagcccattttgaaatattattaattaaagttgatgaagttccaagcccccattttctagaaaaattaagatgagttgataccaaacctccagtgtttttctttaaaaattctgaatttattttgttagcagaaattaataaagactgtagtgttttgctaaatttatttatgttttttgtaatccttaagtcagaaagatcaaattcgcaactcagccaaacttcattttttctatcataacttttccattctagttta

SEQ ID NO: 1505 - DNA, 4000 bp, Escherichia coli
  misc_feature (369)..(369): n is a, c, g, or t
  misc_feature (869)..(869): n is a, c, g, or t
  misc_feature (1202)..(1202): n is a, c, g, or t
  misc_feature (1284)..(1284): n is a, c, g, or t
  misc_feature (1451)..(1451): n is a, c, g, or t
  misc_feature (1475)..(1475): n is a, c, g, or t
  misc_feature (2409)..(2409): n is a, c, g, or t
  misc_feature (2698)..(2698): n is a, c, g, or t
  misc_feature (3081)..(3081): n is a, c, g, or t
  misc_feature (3601)..(3601): n is a, c, g, or t
  misc_feature (3999)..(3999): n is a, c, g, or t
gcttcgatcaggctaaggcgtgaaccggcggcgctggtcaatccggcaagaacatcggcggcgcggcgatctttttcaatggcgatcacatgatcggcaccttcaagaagcagggcgcgggttaatccgcccggacccgggccaatctcgatcgttgttcccgataaagtgccagccgaacgcgcaatcctgcgagtcagattcaggtcaaacaggaaattctgcccaagcgatttccgcgcgcgcatatccattgaatcaacaagctggcgcaagggctgtaaagcctcgatccgctcgaccatctgttgcttatcagtcatctattccaatcattgatccatttatccggatcatcttgtgctgggngtaatcgggcattaacccgccttctggttctggcggttatccgcgaaattgcgcgccattttgattgccgcgatcaggctgtcagcacgggcaatgccgcggccggcaatatcaagtccagtgccgtgatctggcgatgttcggatgaaatcaaggccaagtgtcacattaactccaccaaaaaaatcaattgttttcagtggaataagaacttgatcatgatacatgcccaaaaccgcatcataggttttgcgcgcttcgctgtgaaataaagtatcggctggatgcggtcctgtcgcattgattcccgcggcctgaagcttggtaatcgcaggtaggataatttgggtgtcttcattccccatattgccgttttcaccagcatgcgggttgaggccacaaaccgcaatatgcggattagcaatgccgaaattggcctttagacaggcatgaagcagctggcatttttcgatgatcagcgctgttgaaatggcggcggnaactttgtttagcgcgatatggatggtcgcaggcacaacccgcaattcatcacaagcaagcatcataagcggcgcaccagcaacaggttttgataggctggcgagaaattcagtatggccaggataggcaaagccagcatcataaaggcttgatttctgtatggggttggtcacgatcccggcggcggttcctgattggctccaaaacgcggcttgccgtatggcgtcgatgacctgcggcgcgttagccggatcaggggtgccagcaacgggcgttgttttccatgaaacggggatgacatgcagatcttggctggtgctgtcaaaagacgncggatcgttaatttcccgaatcttggcggtgatgccaagtgacgctgccatttgcgcgatttgcgctggctgttcaatcagncaaatatcgctgatcccaccttgccatgcttttagcgcaatttcagacccaatacctgcaggttcgccgggggtgataagcaaagggcggtttgtcatcggattatgaattggtttcgataattgctgaacgacgcagccgcagcagatagcgttcggcaagcgatncgaaaatcttgtcaaattcaaccngcaatacctcgtcacgtggcggcagggtgatttttggcgatatgcgatcgcacagcatgaaaacactgatgccttcagtgaatgacaggggcttgcttggaacgccggctttcaggtcattgaccaaagcctgcaaggggcggttgaaagagccaaggttgatattcttgattaacccttgaatgcctgaaccatagctttggttcagcgctacaagaccgtcacagctattaatcgatgcggtgtctcgctcaagctttgctgcagcttccagcttgtcagcattgctggcatccttagcaagcggataaaccgcccgtgcaagggtgatcatatcctgacttggatcggcaacgccatcctgacgacggccttcattgcgaatcaaaataaccagcccatcacgttgaattggtgcgctgaccgcgccaatcttggtcattttcacctgatcttgaatatcatcaggcaattgatcaagcataacccagccaagctggccgccatttgtggtggctcctgatgcggaatattgtttggcaatggcgttgaagttagcgccgttattcactgccttgataatttcattggccagaacaagggtgcggtcaagcgggcgatttggttcgggaagaagaatgatttcgcttagcttgacttgtggctgtcttgcgttggcttcgatgcggctaagcgccttgtcgacaatcgtgtctaattcagcaaatttggtttgaaatttgaaccggatgacctcgccccatacgatatcggtgatgaatttttgttggatattgctgctatcaataccttgttcgcgcagactttgcgaaccggtcttgccatttgccgcaaaattctcgtcaaccagcttgcgggcggtttcacggcttctttgggcaagggtcgggtcaagcgcagcggcggcatccantttcaagatttcgtcaatcagcatctgggttgcatcttgtttgatctgggcgcgattttccacggtatcttccagattcgttaccatgcgtaaaaaggcggcgcgctggtcaacctgataattagtaatggccttgccatttaccttggcaacaatttccagcgcagcattggcttgcgacatgccggtgcccagcataaatagcacgcaaaaggcagacatcaggtttgtttttttcagcatcgcaatcatggtttctaatttgtccaagacgttacagattgagggnggcaaagcccgccggatcgcatcaatttttaccactataaatcagctttcatcggttcgggcaaggataatggcaccaatcaaagagatggcaattgccggtgtccaggccgcaaccgacattggcacttgcaaggatgatcccaaaatttgcatgaaatagctgaagatgaaaatcacaattgccagaaacgcgccgcgcagaaacaaccggcttcgccgaccgcgcgaaacattggtcaaggtcacgcgcgctgcaagcatggcaatgccaatcatcaataatggcactgatagggtcttataaaggtgaaaccgatattcgcttgccggaattcctgcccgttcaagcgcgtcgataaagcccggtaacagatagaccgnaattgattgggggcgaaggccggattgtcgcagatcaagtgcatcaagtccggttggtaaaagcaaattgccaagatcggtcttttgcccatcggtctgccatcgtgacgcccgatccagcatccagcccttatcggtcaattgcatgctgctggctttatacagcgctttcatgtggatattgtcatggtagagataaatgaccggattaataatgcttgccgtttcggcatttaaggcgtcaccgcgaataatcaattttccgctttccagcttatcgcgaagccatatcccactggttgagaccgaaaaattactgtctgattcaccaaaaactttggccatttgcgcctcatggcgtttcgatgtaacggctccgatggggttgattacggtgacaagaagcatgccgatgataaaggctgaaaacagcgctggccctaaagcggcccagaccgattgaccgaaaccacgaaccgcaacaaattcattactgcggttccatgatgaaaaacacagnatcgcccctgccaacatggcaaagggcaggatcatttcaatgaccgctggcaagtttaacagcgccattttgaggaaattaatatcgggcgggggagatgttaaaacacttacgcggcggacaagttcgaccgtttgaattaggctgatgatcgaggcgaggccgagaaggcaaagcgtgatccagccgacaaaacgcaaggcgaaatagcgaaacagggttccaaatggcgcaaattggctcatgtcagcgcctcattttgccctgttgcatcgatcgtttcacgcggttggcgaagcagccaaaatgcgatgatgattggcgctaaaacgcttagatggataaagggccaaagattggcattattggttacccagccgcgcgatatcaccacggcna

SEQ ID NO: 1506 - DNA, 4000 bp, Escherichia coli
  misc_feature (1)..(2): n is a, c, g, or t
  misc_feature (6)..(6): n is a, c, g, or t
  misc_feature (10)..(15): n is a, c, g, or t
  misc_feature (19)..(20): n is a, c, g, or t
  misc_feature (22)..(27): n is a, c, g, or t
  misc_feature (29)..(30): n is a, c, g, or t
  misc_feature (34)..(35): n is a, c, g, or t
  misc_feature (37)..(37): n is a, c, g, or t
  misc_feature (40)..(40): n is a, c, g, or t
  misc_feature (42)..(43): n is a, c, g, or t
  misc_feature (46)..(48): n is a, c, g, or t
  misc_feature (51)..(51): n is a, c, g, or t
  misc_feature (54)..(59): n is a, c, g, or t
  misc_feature (61)..(64): n is a, c, g, or t
  misc_feature (68)..(68): n is a, c, g, or t
  misc_feature (70)..(70): n is a, c, g, or t
  misc_feature (72)..(76): n is a, c, g, or t
  misc_feature (78)..(78): n is a, c, g, or t
  misc_feature (80)..(83): n is a, c, g, or t
  misc_feature (85)..(87): n is a, c, g, or t
  misc_feature (89)..(91): n is a, c, g, or t
  misc_feature (94)..(94): n is a, c, g, or t
  misc_feature (96)..(98): n is a, c, g, or t
  misc_feature (100)..(101): n is a, c, g, or t
  misc_feature (105)..(105): n is a, c, g, or t
  misc_feature (109)..(109): n is a, c, g, or t
  misc_feature (111)..(112): n is a, c, g, or t
  misc_feature (114)..(115): n is a, c, g, or t
  misc_feature (120)..(121): n is a, c, g, or t
  misc_feature (123)..(123): n is a, c, g, or t
  misc_feature (127)..(127): n is a, c, g, or t
  misc_feature (130)..(133): n is a, c, g, or t
  misc_feature (136)..(137): n is a, c, g, or t
  misc_feature (140)..(140): n is a, c, g, or t
  misc_feature (142)..(142): n is a, c, g, or t
  misc_feature (144)..(147): n is a, c, g, or t
  misc_feature (154)..(155): n is a, c, g, or t
  misc_feature (157)..(157): n is a, c, g, or t
  misc_feature (159)..(159): n is a, c, g, or t
  misc_feature (161)..(161): n is a, c, g, or t
  misc_feature (163)..(163): n is a, c, g, or t
  misc_feature (166)..(170): n is a, c, g, or t
  misc_feature (172)..(172): n is a, c, g, or t
  misc_feature (174)..(176): n is a, c, g, or t
  misc_feature (181)..(183): n is a, c, g, or t
  misc_feature (186)..(189): n is a, c, g, or t
  misc_feature (191)..(195): n is a, c, g, or t
  misc_feature (197)..(198): n is a, c, g, or t
  misc_feature (200)..(200): n is a, c, g, or t
  misc_feature (202)..(203): n is a, c, g, or t
  misc_feature (205)..(205): n is a, c, g, or t
  misc_feature (213)..(213): n is a, c, g, or t
  misc_feature (217)..(217): n is a, c, g, or t
  misc_feature (451)..(451): n is a, c, g, or t
  misc_feature (530)..(530): n is a, c, g, or t
  misc_feature (971)..(971): n is a, c, g, or t
  misc_feature (1083)..(1083): n is a, c, g, or t
  misc_feature (1115)..(1115): n is a, c, g, or t
  misc_feature (1163)..(1163): n is a, c, g, or t
  misc_feature (1655)..(1655): n is a, c, g, or t
  misc_feature (1667)..(1667): n is a, c, g, or t
  misc_feature (1784)..(1784): n is a, c, g, or t
  misc_feature (1991)..(1991): n is a, c, g, or t
  misc_feature (2350)..(2350): n is a, c, g, or t
  misc_feature (2502)..(2502): n is a, c, g, or t
  misc_feature (2743)..(2743): n is a, c, g, or t
  misc_feature (2955)..(2955): n is a, c, g, or t
  misc_feature (3027)..(3027): n is a, c, g, or t
  misc_feature (3078)..(3078): n is a, c, g, or t
  misc_feature (3093)..(3093): n is a, c, g, or t
  misc_feature (3126)..(3127): n is a, c, g, or t
  misc_feature (3130)..(3130): n is a, c, g, or t
  misc_feature (3134)..(3134): n is a, c, g, or t
  misc_feature (3138)..(3138): n is a, c, g, or t
  misc_feature (3140)..(3140): n is a, c, g, or t
  misc_feature (3155)..(3155): n is a, c, g, or t
  misc_feature (3202)..(3206): n is a, c, g, or t
  misc_feature (3208)..(3208): n is a, c, g, or t
  misc_feature (3211)..(3211): n is a, c, g, or t
  misc_feature (3213)..(3215): n is a, c, g, or t
  misc_feature (3217)..(3219): n is a, c, g, or t
  misc_feature (3221)..(3224): n is a, c, g, or t
  misc_feature (3226)..(3226): n is a, c, g, or t
  misc_feature (3229)..(3234): n is a, c, g, or t
  misc_feature (3236)..(3237): n is a, c, g, or t
  misc_feature (3241)..(3241): n is a, c, g, or t
  misc_feature (3243)..(3247): n is a, c, g, or t
  misc_feature (3249)..(3253): n is a, c, g, or t
  misc_feature (3255)..(3260): n is a, c, g, or t
  misc_feature (3262)..(3262): n is a, c, g, or t
  misc_feature (3264)..(3264): n is a, c, g, or t
  misc_feature (3266)..(3268): n is a, c, g, or t
  misc_feature (3270)..(3274): n is a, c, g, or t
  misc_feature (3276)..(3279): n is a, c, g, or t
  misc_feature (3284)..(3284): n is a, c, g, or t
  misc_feature (3286)..(3288): n is a, c, g, or t
  misc_feature (3290)..(3290): n is a, c, g, or t
  misc_feature (3292)..(3301): n is a, c, g, or t
  misc_feature (3303)..(3304): n is a, c, g, or t
  misc_feature (3306)..(3307): n is a, c, g, or t
  misc_feature (3309)..(3330): n is a, c, g, or t
  misc_feature (3332)..(3333): n is a, c, g, or t
  misc_feature (3335)..(3339): n is a, c, g, or t
  misc_feature (3341)..(3341): n is a, c, g, or t
  misc_feature (3344)..(3352): n is a, c, g, or t
  misc_feature (3354)..(3355): n is a, c, g, or t
  misc_feature (3357)..(3357): n is a, c, g, or t
  misc_feature (3359)..(3364): n is a, c, g, or t
  misc_feature (3368)..(3375): n is a, c, g, or t
  misc_feature (3377)..(3377): n is a, c, g, or t
  misc_feature (3381)..(3382): n is a, c, g, or t
  misc_feature (3384)..(3384): n is a, c, g, or t
  misc_feature (3387)..(3389): n is a, c, g, or t
  misc_feature (3392)..(3396): n is a, c, g, or t
  misc_feature (3398)..(3401): n is a, c, g, or t
  misc_feature (3403)..(3406): n is a, c, g, or t
  misc_feature (3409)..(3410): n is a, c, g, or t
  misc_feature (3412)..(3413): n is a, c, g, or t
  misc_feature (3415)..(3418): n is a, c, g, or t
  misc_feature (3421)..(3421): n is a, c, g, or t
  misc_feature (3423)..(3429): n is a, c, g, or t
  misc_feature (3432)..(3437): n is a, c, g, or t
  misc_feature (3442)..(3448): n is a, c, g, or t
  misc_feature (3450)..(3450): n is a, c, g, or t
  misc_feature (3453)..(3459): n is a, c, g, or t
  misc_feature (3461)..(3462): n is a, c, g, or t
  misc_feature (3465)..(3467): n is a, c, g, or t
  misc_feature (3469)..(3470): n is a, c, g, or t
  misc_feature (3472)..(3473): n is a, c, g, or t
  misc_feature (3476)..(3476): n is a, c, g, or t
  misc_feature (3478)..(3478): n is a, c, g, or t
  misc_feature (3482)..(3482): n is a, c, g, or t
  misc_feature (3484)..(3488): n is a, c, g, or t
  misc_feature (3490)..(3496): n is a, c, g, or t
  misc_feature (3498)..(3499): n is a, c, g, or t
  misc_feature (3501)..(3504): n is a, c, g, or t
  misc_feature (3507)..(3507): n is a, c, g, or t
  misc_feature (3510)..(3513): n is a, c, g, or t
  misc_feature (3515)..(3517): n is a, c, g, or t
  misc_feature (3519)..(3519): n is a, c, g, or t
  misc_feature (3521)..(3525): n is a, c, g, or t
  misc_feature (3528)..(3528): n is a, c, g, or t
  misc_feature (3530)..(3538): n is a, c, g, or t
  misc_feature (3540)..(3549): n is a, c, g, or t
  misc_feature (3551)..(3552): n is a, c, g, or t
  misc_feature (3554)..(3559): n is a, c, g, or t
  misc_feature (3561)..(3562): n is a, c, g, or t
  misc_feature (3566)..(3570): n is a, c, g, or t
  misc_feature (3572)..(3577): n is a, c, g, or t
  misc_feature (3580)..(3582): n is a, c, g, or t
  misc_feature (3585)..(3585): n is a, c, g, or t
  misc_feature (3587)..(3591): n is a, c, g, or t
  misc_feature (3593)..(3601): n is a, c, g, or t
  misc_feature (3603)..(3605): n is a, c, g, or t
  misc_feature (3607)..(3612): n is a, c, g, or t
  misc_feature (3615)..(3616): n is a, c, g, or t
  misc_feature (3618)..(3623): n is a, c, g, or t
  misc_feature (3625)..(3625): n is a, c, g, or t
  misc_feature (3627)..(3628): n is a, c, g, or t
  misc_feature (3630)..(3630): n is a, c, g, or t
  misc_feature (3633)..(3637): n is a, c, g, or t
nnggcnagcnnnnnnccgnngnnnnnngnngggnncngcncnncgnnnccnggnnnnnngnnnncccncngnnnnngncnnnncnnnannncgncnnngnncgcntccncnncnngcccnntncgcngcnnnncgnnctncncnnnncgccccnncngntncnggnnnnncngnnncggcnnnccnnnncnnnnncnncngnngnctgagcanccgngtggcctgcccgtgcgggaaatgcctttgccgtggggcggagggtctcgggtaggctggaaccatgcaaccgctcctggtgtgacgggccgccatgggtcctgtgtggacgtgtggtctctggtgtccgttctatactgttatggagcatttctccgatgatccgggttgatgatgttgagctgcgcgccggtgcgcagctgctgctggccggcgcgacgtttcaggtggcgcncggcgacaagataggcctggtcggccgcaacggcgcgggcaaaaccacgctggcgcgggtgctcgccggcgagtcggcnccggccgcgggatcggtccgcagcagcgggtccgttgggtacctgccccaggacacgatggtcggcgacctggcaggcctggccgtcgaccgggtgctgtcggcccgtggcctggatacgctgctggcgggcctgcgcgaggccgaggtcgccatggccgactccgatccggccaggcgcgacgccgcggtgcgcaggtacggccagctcgaggagcggctcacggtgctgggcgggtacgcggccgaggccgaggcggcgtcgctggcatcgagcctggggctgccgccgcaggtgctcaggcagcagctgcggaccctgtccggcgggcagcgccgccgcatcgagctggcccggatcctgttcggcgggtcggacaccatgctgctcgacgagcccaccaaccacctcgacgcggattcggtgtcctggctgcgcgancacctgcgggccttccgcggcgggctggtggtgatcagccacgacaccgcgctgctcgaggccgtcgtcaacaaggtgttctatctcgacgccgaccgctgcgaactcgacntctacaacctcggctggaagaactacctggancagcgggacaccgacgcacggcgccgcaggcgtgagcgcgtgaacgcncagcgccaggcgaccgcgctgcagtcgcaggccgacaagatgcgggccaaggcgaccaaggcgagggcggcgcacaacatggagcgccgggcggaacggctgctcgccagcgtcagcgcggaccgtgcgccggaccgggtggcccggatcaggttcccggttcccgcgcactgcgggcgcaccccgctcgccgctcagggcctgaccaagtcgtacggctcaaacgaggtgttcaccggcgtggacgtggcggtcgaccgcggcgcgcgggtggtcgtcctcggcctgaacggcgcgggcaagaccacgctgctccggctgctgtccgggctcgaggagccggacgctggcgaggtcaaacccggccacggcctgcggctcgggtattacgcgcaggagcacgagaccctggacaccgggcggaccgtgctcgagaacatgcggtcggcagccccggacctcaccgaggccgagcagcgccgggtcctcggntcgttcctgttntccggcgacgaggtggccaagccgaccagcgtgctgtccggcggcgagaagaccaggctcgcgctcgcgctgctggtcgtgtcgggcgcgaacgtactgctgctcgacgagccgacnaacaacctggatccggggagccgggcggagatcctgtccgcgctgcgccggttccagggagcgatcgttctggtcacgcacgacgagggtgccgtcgaggcgctcgcgcccgaacgggtcgtgctgctccccgacggggtcgaggatgcgtggagcgaggagtttaccgaccttgtggcgctggcctgaaacagcgccggcaagccnccgggaacggtcttcagcggcgctgaaaaagaggagatcttttgatggcgtgtgggtagccgatcacgagttcttgcgtgatcatggcgagagacggtaacgcaccggtcacttaagttcaccgggaggtacccgtgaccgaaaccctcaagaaaggcacccgggtgaccggtgccgatcgcaccaagctggcggctgatctgaagaagagatacaacgccggcgagagcatccgctcactggccggctcgaccggcaggtcctacggcttcgtgcaccggatcctgaccgagaccggggtgtcgctgcgcggccgcggcggcgccaccaggggtaaggccaagcgctgaacaacggcnccgctctttcctctgccgagcttgccgcgagcgggctgcgccttgacatcgacgacgcggtcgccacggtcacgctgagcaggcccgagcgccggaacgcgatgaccccgcaggtctggcgcggccttgcggcgatcggggccgacctggantcccgggtccgcgtggtggttgtgcgcggcgccgggccatccttctgctccgggatcgacctgcgcatgttctcggctgagggggttccgggcgaggacccgccgccaagcgccgccgaccccgggttcgagtcgtggatcgccagctgccaagagggctacctgtggctgcgcgatcccggcatcgtgtcgatcgccgcggtgcagggacacgccatcggcgcaggattccagctcgccntggcgtgtgatctgcgcattctggccgacgacgcgaagctgtgcatgaaggagcccgccctggggctggttcccgacctcaccgggaccaagccactcgtcgacatcgtggggctgccgcgggcaatcgagctgtgcctcaccgcgcgcacgctgtcggcggccgaagccgggtctctgggcctggccgagctgctggttccggtggccganctggacgccgcggtggcggatctgaccgcggcactgctggagatcgacaccgagaccgcgcgggccaccaancggctgctgctccaggccggcgcgaatacgctggagcagcaggcagccgcngagcgcgcggcgcangccgcgctgctgcgagcgcgccttgcgcgctcnnagncttnggtntnaccccaacgggcggntggttttgactttggggggttcgcggggggtgtccccccgcgggggnnnnnanttngnnngnnncnnnngnggnnnnnncnngcgngnnnnngnnnnncnnnnnntnangnnngnnnnncnnnngcaancnnngngnnnnnnnnnncnngnncnnnnnnnnnnnnnnnnnnnnnngnngnnnnncncgnnnnnnnnnanngncnnnnnngcgnnnnnnnncnggcnngntcnnncgnnnnncnnnntnnnngcnncnntnnnngcngnnnnnnncgnnnnnnatccnnnnnnncncgnnnnnnncnntgnnnanngnntcntncccnannnnncnnnnnnngnncnnnnacnagnnnntnnngncnnnnngcncnnnnnnnnngnnnnnnnnnncnngnnnnnncnncggnnnnncnnnnnncgnnncgntnnnnncnnnnnnnnngnnntnnnnnnccnngnnnnnngncnngngcnnnnnctacgatctgcgcactcaggtattcagccacgtgcagcggcagccgatcgcgtttttcaccagggcgcagaccggctcgctggtcagccggctgaacagtgacgtgatcggcgcccagcaggcgctcacctccacgctgtcgtcggtggtgtccagcgcgctgcagctggtcctggtgctgatcgcgctgttctactactcatggctggtcacggtcatcgcactggtgctgctcccggtgttcctggtccccgcgcgcttggtcgggcgcaggctgcagcggctgaccagggagggaatgcagctcgacgccgcgatggggacgacgatgaccgagcgcttcaacgtcgccggggcgatgct

SEQ ID NO: 1507 - DNA, 4000 bp, Escherichia coli
  misc_feature (1987)..(1987): n is a, c, g, or t
tgggatgtttggttacgacttgaataaaaaggggacggagcgcgagagggatcagattccggaggggtgtgggttggccgcggggtgcgcatacgcgacggcgttaacgatgacgcagttggcgcagcgcgttgttcgatggtattttagtcagagctatggcgtcacgtcggattcgtgggccttagagcaaaatagcgcgctcgcatgcgtcggatttatgatttttctcggtttcgtcgacgacgtgctcgatttgccgtggcgggtgaagattatcatgcccggatttgcggcgcttccgttgctgttgtcttatagcggcggcacgactgttttggtaccgtcaccgctgagaaagcttttacacttgtcagaagtagtgcgttcgatcgacgtgggaccgctttatcactgctacatgtggttactcgtggtattttgctcgaattcaatcaacattcacgccggattgaatgggctcgaggcggggcagtcgctcgtcattgccggcgcgatattgctgttgaacgtcatgtcgctcgcgaatgatccgtccgtcgatcccatgacttctggttcgcacttgtttagcttgtttctcacgatgccgttcttcgcaacgacgttgggtttgctcgagcacaactggtatcccgcgagcgtctttgtcggcgatacgtacacgtactttgctggaatgacgctcggcgtcgtgggcacgctaggacactttagcgagactttattgctctttttccttccgcaaatgctcaactttctgtacagcacgccgcagctcttcaaaattgtccactgtccgaagcaccgcttgccgattcgcgatgcgagcaccggcttgctccatccttccaaggcgacagagacgagatacaacatgaatctagtcaatctcttcttgaggctttttggcccatgcacggaaaagcaactctgtcgacgactgatggcgtttcagtttgcatcgtgtgcattcgcattcggcgctcgctacgtgttgacagggatttggaagtgagagtgtctttggtttcttcgaggcgacggatggcgtcggcggcgtcttcttcccagcgaagtagtctatagtctgcgctacttacaacatattttaaacactagtcatctcacgatattcgatcgtcatcgattcccgggtaattttttgtgtcgaatgtcatgtagctcagtcgcaagcgaatccgcgcgcgcccgacattccttcaaatcctcttcacactcccctcccgctccgtcttcgcaatccctactctcgcctccgacaacgtacgtcgcctcaatctccaccctactgacgggcatgacaaagatgccgttctttgtcgtctccacttgttcaattttacgcatcgttgtctccatcccgtcgacgacttcaccaaaaatcgcatactttccatccaagtgcggcgcctttccaagcatgacgctaaagctactcgtcccactgtttggatcgtcgtacctcgccatcgataaccgccctcgctcgtgtttcaacgattcactgaactcccctggcaccgtccgctcggccaactgtcgttgcgcttcgttcaacgcgactctccgtccactcttcacatccgcaatctgcgccacgaacccggcatcgacgcggaaaaagtgattcgtcgcgtacattccactcgtcagcatctccttgacgtgcgccgtcgtcgccgacgcgacgccgtcgtacaacgccagagtgatgtcaccaaagctcgtttgtaaaacgaaccgctcgtcgccgagtttcggtgtcatcgggtccgcgcgcgcgacattgaacagcgtcgacggcatacatagcaccgcgacgaccacgaggagaacgcgtctcggcgacgacgccatcgcgcgcgcgtcggtgtgtccggactcgtcggtacagcgggtccgaaatctcaatagaaatcaacattgtatgtgtaagtagtgngcagggtttagaaatacgtaggcacccagttgatgcgtgcgtgtcgtcattaaacacctcgaggtcgtttccagtcacgccgacgacgggcgtcgacgacgtcgcgtttgagaccaggggctgcgcgcttcgcgatccaccgcatctcactgaatagggctggataaacccacgggtgaagagcgagcgagcgtaggatacgatacgaagggaacaaagccctcgaaaattcagtgaatttttcgatccaaccatgtcttcttccgtcgatatccacggcgcgttcaagggcgaaggcgaagatatgattgcggcgttgatcgcggcgagtgcggcgcgaccgggggataaagcaccggcgcgcgcgacgacgggaaacggcgcgggaacgttcgacgtggacgcggaggtgatcaaggagaaaaagtctttcgagcgtgaactcgtaccttttgatttcggggataacgacgcgtcggtggtcaccgcgccggtggttcccgtggcggtaacgccgtcgtcgttgatgcggattccgactccgaaattggtcggagaggcaaagccggagaacgcgaacggggaggccgcggcgacgtcgtcgtcgaggcgtcagagaggaaagaaaaagtccaagggtacggtgaagacgttgccgacgccgaaaactgggggtcaatccaaggatccggcagttcgggcgaacgaggtgtgcgcgccgcaaaaaccagcgctaacggcggagcaacaatcggcggttttgaaccaagtggagacgacgggaaggaagcaacgaggggcgggtaaaggtatcatcgctacaaatgatgaacgatgggcaaactcgagctttcaaaacgcgccggctccggatcaattgccgatgccgtcgtttttgaaggacatgccgccggtgcccgttgagccgaagaaaaatccggcacctttgagcggcggcgcttcggcgaacgccgccgggttgaaaaacttgcttggcatgtcggctccggttccggttcgaccagttccagacgcgcctcaacaaaacaagggccagcagctcttcaaaagcattctttcaagcgcacaggcaccggcgccgccggcgccgcaacaacaacacccgatgcccccgccgggaatgatcccgccaccgggaatgatcccgcaatacccaccgcataaccacccaccaccggtgcaacaaaagctgaacgccatctttggtgtcacaccgcaaccaccgcaaccgttcccaccggcgcaaccgtatccgacggcgccagaaacgagtggtggtaacttccaaatgctcatgtccaagctttcgcatcgagcgtaagcgcgactcgagagcgtcttgtaccaatagcaccgtgtataccaactagtttgatgagtctccgctctgtgaaacgttccagagcgcgtttgacgcacccaactcgcgaacataaccgttcgcaaaacggccgaagagtgccggagcgcgttttaaaagctctcaatctcacaacaaaattcgagccaacagacgagtttcgcagaggaaatttttcctactttgtggaaccctttagcgcggtcattcgaccgcgcgcttctcaagacttcaagatccatgcgccgataaagggcggcgccaaccatacgaaccgttcattagtgttgtttgtgattctacttacaatgtttgctaactatcgcctactttttttggcgacgggctcttcttcggcaacgcgtccaaacgcgtccccctcgaccccatcttcaaaatcgtcaaaatcgtcttcgaagtcatccacttggtcgagcatggcgtcgagcgcctcttcgacggcgtcttcgtcgtcgtcgccgccgttatcgtcatcatcgctgtcggcggcttcttggttggcggccgccaacgcggcgttggcgaactcaaaattcacctttttcacgtagctcgggtgaaacttgtgcttgacgttgccaaagagcttcttcatcaccgccaactggcgc

SEQ ID NO: 1508 - DNA, 4000 bp, Escherichia coli
  misc_feature (342)..(342): n is a, c, g, or t
  misc_feature (452)..(452): n is a, c, g, or t
  misc_feature (462)..(462): n is a, c, g, or t
  misc_feature (547)..(547): n is a, c, g, or t
  misc_feature (549)..(549): n is a, c, g, or t
  misc_feature (627)..(627): n is a, c, g, or t
  misc_feature (660)..(660): n is a, c, g, or t
  misc_feature (825)..(825): n is a, c, g, or t
  misc_feature (888)..(888): n is a, c, g, or t
  misc_feature (993)..(993): n is a, c, g, or t
  misc_feature (1017)..(1017): n is a, c, g, or t
  misc_feature (1020)..(1020): n is a, c, g, or t
  misc_feature (1101)..(1101): n is a, c, g, or t
  misc_feature (1176)..(1176): n is a, c, g, or t
  misc_feature (1462)..(1463): n is a, c, g, or t
  misc_feature (1875)..(1875): n is a, c, g, or t
  misc_feature (2026)..(2026): n is a, c, g, or t
  misc_feature (3398)..(3398): n is a, c, g, or t
  misc_feature (3410)..(3410): n is a, c, g, or t
  misc_feature (3412)..(3412): n is a, c, g, or t
  misc_feature (3414)..(3414): n is a, c, g, or t
  misc_feature (3451)..(3454): n is a, c, g, or t
  misc_feature (3462)..(3463): n is a, c, g, or t
  misc_feature (3465)..(3465): n is a, c, g, or t
  misc_feature (3469)..(3469): n is a, c, g, or t
  misc_feature (3472)..(3472): n is a, c, g, or t
  misc_feature (3474)..(3474): n is a, c, g, or t
  misc_feature (3476)..(3476): n is a, c, g, or t
  misc_feature (3478)..(3478): n is a, c, g, or t
  misc_feature (3481)..(3487): n is a, c, g, or t
  misc_feature (3489)..(3501): n is a, c, g, or t
  misc_feature (3503)..(3512): n is a, c, g, or t
  misc_feature (3514)..(3517): n is a, c, g, or t
  misc_feature (3519)..(3536): n is a, c, g, or t
  misc_feature (3538)..(3538): n is a, c, g, or t
  misc_feature (3540)..(3541): n is a, c, g, or t
  misc_feature (3543)..(3548): n is a, c, g, or t
  misc_feature (3550)..(3550): n is a, c, g, or t
  misc_feature (3553)..(3555): n is a, c, g, or t
  misc_feature (3558)..(3562): n is a, c, g, or t
  misc_feature (3564)..(3564): n is a, c, g, or t
  misc_feature (3567)..(3569): n is a, c, g, or t
  misc_feature (3571)..(3572): n is a, c, g, or t
  misc_feature (3575)..(3587): n is a, c, g, or t
  misc_feature (3589)..(3589): n is a, c, g, or t
  misc_feature (3591)..(3598): n is a, c, g, or t
  misc_feature (3601)..(3610): n is a, c, g, or t
  misc_feature (3612)..(3613): n is a, c, g, or t
  misc_feature (3615)..(3625): n is a, c, g, or t
  misc_feature (3627)..(3633): n is a, c, g, or t
  misc_feature (3635)..(3641): n is a, c, g, or t
  misc_feature (3643)..(3651): n is a, c, g, or t
  misc_feature (3654)..(3659): n is a, c, g, or t
  misc_feature (3661)..(3661): n is a, c, g, or t
  misc_feature (3663)..(3678): n is a, c, g, or t
  misc_feature (3680)..(3680): n is a, c, g, or t
  misc_feature (3682)..(3697): n is a, c, g, or t
  misc_feature (3699)..(3701): n is a, c, g, or t
  misc_feature (3704)..(3709): n is a, c, g, or t
  misc_feature (3711)..(3711): n is a, c, g, or t
  misc_feature (3713)..(3721): n is a, c, g, or t
  misc_feature (3723)..(3727): n is a, c, g, or t
  misc_feature (3730)..(3740): n is a, c, g, or t
  misc_feature (3742)..(3748): n is a, c, g, or t
  misc_feature (3750)..(3750): n is a, c, g, or t
  misc_feature (3753)..(3753): n is a, c, g, or t
  misc_feature (3755)..(3757): n is a, c, g, or t
  misc_feature (3760)..(3763): n is a, c, g, or t
  misc_feature (3765)..(3765): n is a, c, g, or t
  misc_feature (3767)..(3773): n is a, c, g, or t
  misc_feature (3775)..(3775): n is a, c, g, or t
  misc_feature (3778)..(3791): n is a, c, g, or t
  misc_feature (3793)..(3801): n is a, c, g, or t
  misc_feature (3803)..(3811): n is a, c, g, or t
  misc_feature (3813)..(3815): n is a, c, g, or t
  misc_feature (3817)..(3817): n is a, c, g, or t
  misc_feature (3820)..(3829): n is a, c, g, or t
  misc_feature (3831)..(3831): n is a, c, g, or t
  misc_feature (3833)..(3840): n is a, c, g, or t
  misc_feature (3842)..(3846): n is a, c, g, or t
  misc_feature (3848)..(3855): n is a, c, g, or t
  misc_feature (3857)..(3859): n is a, c, g, or t
  misc_feature (3861)..(3883): n is a, c, g, or t
  misc_feature (3885)..(3887): n is a, c, g, or t
  misc_feature (3889)..(3893): n is a, c, g, or t
  misc_feature (3895)..(3898): n is a, c, g, or t
  misc_feature (3901)..(3901): n is a, c, g, or t
  misc_feature (3903)..(3905): n is a, c, g, or t
  misc_feature (3907)..(3911): n is a, c, g, or t
  misc_feature (3913)..(3919): n is a, c, g, or t
  misc_feature (3922)..(3922): n is a, c, g, or t
  misc_feature (3924)..(3936): n is a, c, g, or t
  misc_feature (3938)..(3940): n is a, c, g, or t
  misc_feature (3942)..(3946): n is a, c, g, or t
  misc_feature (3948)..(3961): n is a, c, g, or t
  misc_feature (3963)..(3974): n is a, c, g, or t
  misc_feature (3977)..(3986): n is a, c, g, or t
  misc_feature (3988)..(3989): n is a, c, g, or t
  misc_feature (3991)..(3994): n is a, c, g, or t
  misc_feature (3997)..(3997): n is a, c, g, or t
  misc_feature (3999)..(3999): n is a, c, g, or t
gacggcgcttccaccatggactggatggctcaggagcaggagcgaggtattaccattacctccgcagcaaccacctgcttctggaaggacaaccagatcaacattatcgacacccccggtcacgtcgacttcaccgttgaggttgagcgctccctgcgcgtcctcgacggcgcagttgctgtgttcgacggcaaggaaggtgttgagccccagtctgagaccgtttggcgccaggctgacaagtacgatgtcccccgtatctgcttcgtcaacaagatggacaagatgggtgctgacttctacttcaccgttcagaccatcatcgaccgcctgggcgcacgnccgctggttgttcagctccccatcggcgctgagagcgacttcctcggtgttgttgacctgctcgaaatgaaggcatacgtctggcccggcgacgccaagggtgacgtgancatgggtgcntcttacgaggttcaggacattcctgctgacctggttgagaaggctgagcagtaccgcgctgagctggttgaggctgttgctgagncnagcgaagagctcatggagaagtacctcgaagagggcgagctgaccatccccgagattaaggctggtatccgtcagctngttatctccggcgaggcattccccgttctctgnggttctgcattcaagaaccgcggtgttcagcccatgctggacgctgtgattgagtacctgccctccccgctggacgttccggacgttgtcggctccaacccctccaacgaggaagagaagctgacccgtaaggcatccgctgacgagcccttcgcagcactggcnttcaaggttgcagctcacccgttctacggtcagctgacctacacccgtgtgtactccggtgtngcagctcagggccagcaggttctgaactccaccaagggtaagaaggagcgcatcggtaagctcttccagatgcactccaacaaggagaaccctgttgaggagatnaccgcaggtcacatttacgctgcnatnggtctgaaggacaccaccaccggtgacaccctgtgcgaccccgcacacccgattgttctcgagtcgatgaccttccccgancccgtgatcttcgtggctatcgagcccaagaccaagggtgaccaggagaagatgtccaccgctatccagaagctntccgctgaggaccccaccttcaccgtttcgctgaacgaagaaaccggtcagaccgaaattggtggtatgggtgagctgcacctggacatcatcgttgaccgtatgaagcgtgagttcaaggttgaggctaacgttggtaagcctcaggttgcttaccgcgagaccatcaagaaggcagtcgagaaggtcgactacacccacaagaagcagaccggtggttccggtcagttcgcaaaggtgcaggtctccttcgagcccctgcccctggatggcgaagagctgtacnngttcgaggacaaggtcaccggtggccgcgttcctcgcgagtacatcccctcggtcgacgctggtatccaggacgctatgaagttcggtgtcctcgctggctacccgatggtgggcgtgaaggcaaccctgatcgacggtgcttaccacgacgtcgactcctccgaaatggcgttcaagatcgctggttcgatggtcttcaaggaaggcgctaagcgcgctaacccggtcctgctcgagccgctgatggacgttgaggttcgtacccccgaggagtacatgggcgacgttatcggcgacctgaactcccgccgtggccaggttcgttccatggaggacgcatccggcgttaagatcatcaaggctatcgtgcccctgaccgaaatgttcggttacattggcgacctgcgtggnaagacccagggtcgtgcagtgttctcgatggcattcgatagctacggcgaggttcccaagaacgtcgctgacgagatcatccagaagagccgcggcgagtaattttcgcgtctcacccgtgggccacgggctaaaaacctgtggcccacgncaaaattttcaattaaatccattattgagagcatgaacagtttcatctctgcggcgtaatccgctattgtagacgctagaccgttttataacgggatgcgccggagcgaagatccgcgtgcatgttttcaatcgttctaggaggaacactcttggctaaggctaagttcgagcgctccaagcctcacgttaacgtcggtaccattggtcacgttgaccacggtaagaccaccctgaccgcagcaatctccaaggttctggctgacaagtacccggacctgaacgagaagcgcgacttcggtatgatcgactccgctcccgaggagcgccagcgcggtattaccattaacattgctcacatcgagtaccagaccgagaagcgccactacgcacacgttgacgctcccggccacgctgactacgtcaagaacatgattaccggtgcggctcagatggacggcgcaatcctcgtggttgcagctaccgacggccccatggcacagacccgcgagcacgttctgctcgctcgccaggttggcgtccccaccctgctggttgcactgaacaaggcagacatggttgacgacgaagagctcctcgacctcgtcgagatggaggtccgtgacctcctctcctcgcaggagttcgacggcgacaacgctcccgttgttcgcgtttccgcactgaaggctctcgaaggcgaccccgagtgggttgctaaggtcgaggagctcatggacgcagtcgacacctacattccggaccccgtgcgtgagaaggacaagcccttcctcatgcccatcgaggacgtcttcaccatcaccggtcgtggcaccgttgttaccggtcgtgcagagcgcggtaccctgaagatcaactccgaggtcgagatcgtcggtatccgcccgatccagaagaccaccgttaccggtatcgagatgttccacaagcagctcgacgaagcatgggcaggcgagaactgtggtctgctgctgcgtggtctgaagcgtgacgatgttgagcgtggtcaggttgtcgtggagccgggctccatcaccccccacaccgagttcgaggcaaacgtctacatcctctccaaggatgagggtggccgtcacaaccccttctactccaactaccgtcctcagttctacttccgtaccactgacgtgaccggcgttatcaccctccccgagggcaccgagatggttatgcccggtgacaacaccgagatgaccgttaccctgatccagcccatcgcaatggaagagggcctcggcttcgctatccgtgagggtggccgcaccgttggttcgggtcgcgttaccaagatcatcaagtaattgccgtaaatttacgacaattcgctaaanatctgccggagngnanactctccatcaggtagcgatactcaaggacccccgcnnnngcgggggnncntttnttntncncnttnnnnnnngnnnnnnnnnnnnncnnnnnnnnnnannnngnnnnnnnnnnnnnnnnnncnanncnnnnnngngcnnnatnnnnncntcnnngnnccnnnnnnnnnnnnngngnnnnnnnngannnnnnnnnngnnannnnnnnnnnnannnnnnnannnnnnngnnnnnnnnnccnnnnnngngnnnnnnnnnnnnnnnncntnnnnnnnnnnnnnnnnannnctnnnnnntngnnnnnnnnngnnnnnggnnnnnnnnnnngnnnnnnngnagngnnnctnnnncntnnnnnnntnagnnnnnnnnnnnnnngnnnnnnnnngnnnnnnnnngnnnancgnnnnnnnnnngngnnnnnnnnannnnncnnnnnnnngnnnannnnnnnnnnnnnnnnnnnnnnnannngnnnnnannnngangnnngnnnnncnnnnnnngantnnnnnnnnnnnnnannnannnnngnnnnnnnnnnnnnngnnnnnnnnnnnnatnnnnnnnnnncnngnnnngancng

SEQ ID NO: 1509 - DNA, 4000 bp, Escherichia coli
  misc_feature (224)..(224): n is a, c, g, or t
  misc_feature (1980)..(1980): n is a, c, g, or t
  misc_feature (1985)..(1985): n is a, c, g, or t
  misc_feature (1992)..(1992): n is a, c, g, or t
  misc_feature (2038)..(2039): n is a, c, g, or t
  misc_feature (2310)..(2310): n is a, c, g, or t
  misc_feature (2582)..(2582): n is a, c, g, or t
  misc_feature (2670)..(2670): n is a, c, g, or t
  misc_feature (2911)..(2916): n is a, c, g, or t
  misc_feature (2919)..(2920): n is a, c, g, or t
  misc_feature (2923)..(2923): n is a, c, g, or t
  misc_feature (2930)..(2930): n is a, c, g, or t
  misc_feature (2932)..(2932): n is a, c, g, or t
  misc_feature (2934)..(2935): n is a, c, g, or t
  misc_feature (2938)..(2940): n is a, c, g, or t
  misc_feature (2942)..(2943): n is a, c, g, or t
  misc_feature (2945)..(2947): n is a, c, g, or t
  misc_feature (2951)..(2955): n is a, c, g, or t
  misc_feature (2957)..(2957): n is a, c, g, or t
  misc_feature (2960)..(2960): n is a, c, g, or t
  misc_feature (2964)..(2966): n is a, c, g, or t
  misc_feature (2971)..(2971): n is a, c, g, or t
  misc_feature (2974)..(2975): n is a, c, g, or t
  misc_feature (2979)..(2979): n is a, c, g, or t
  misc_feature (2983)..(2986): n is a, c, g, or t
  misc_feature (2988)..(2988): n is a, c, g, or t
  misc_feature (2990)..(2990): n is a, c, g, or t
  misc_feature (2992)..(2994): n is a, c, g, or t
  misc_feature (2997)..(2997): n is a, c, g, or t
  misc_feature (3000)..(3000): n is a, c, g, or t
  misc_feature (3003)..(3003): n is a, c, g, or t
  misc_feature (3006)..(3012): n is a, c, g, or t
  misc_feature (3014)..(3014): n is a, c, g, or t
  misc_feature (3017)..(3017): n is a, c, g, or t
  misc_feature (3019)..(3019): n is a, c, g, or t
  misc_feature (3022)..(3022): n is a, c, g, or t
  misc_feature (3024)..(3026): n is a, c, g, or t
  misc_feature (3029)..(3029): n is a, c, g, or t
  misc_feature (3031)..(3032): n is a, c, g, or t
  misc_feature (3035)..(3035): n is a, c, g, or t
  misc_feature (3038)..(3041): n is a, c, g, or t
  misc_feature (3045)..(3046): n is a, c, g, or t
  misc_feature (3049)..(3054): n is a, c, g, or t
  misc_feature (3056)..(3057): n is a, c, g, or t
  misc_feature (3059)..(3059): n is a, c, g, or t
  misc_feature (3061)..(3061): n is a, c, g, or t
  misc_feature (3065)..(3065): n is a, c, g, or t
  misc_feature (3069)..(3071): n is a, c, g, or t
  misc_feature (3073)..(3074): n is a, c, g, or t
  misc_feature (3079)..(3079): n is a, c, g, or t
  misc_feature (3084)..(3084): n is a, c, g, or t
  misc_feature (3087)..(3088): n is a, c, g, or t
  misc_feature (3090)..(3090): n is a, c, g, or t
  misc_feature (3092)..(3093): n is a, c, g, or t
  misc_feature (3096)..(3102): n is a, c, g, or t
  misc_feature (3104)..(3105): n is a, c, g, or t
  misc_feature (3107)..(3108): n is a, c, g, or t
  misc_feature (3110)..(3115): n is a, c, g, or t
  misc_feature (3120)..(3120): n is a, c, g, or t
  misc_feature (3122)..(3123): n is a, c, g, or t
  misc_feature (3127)..(3127): n is a, c, g, or t
  misc_feature (3131)..(3131): n is a, c, g, or t
  misc_feature (3133)..(3136): n is a, c, g, or t
  misc_feature (3138)..(3138): n is a, c, g, or t
  misc_feature (3141)..(3141): n is a, c, g, or t
  misc_feature (3145)..(3145): n is a, c, g, or t
  misc_feature (3147)..(3148): n is a, c, g, or t
  misc_feature (3153)..(3155): n is a, c, g, or t
  misc_feature (3157)..(3160): n is a, c, g, or t
  misc_feature (3163)..(3163): n is a, c, g, or t
  misc_feature (3165)..(3166): n is a, c, g, or t
  misc_feature (3168)..(3168): n is a, c, g, or t
  misc_feature (3170)..(3170): n is a, c, g, or t
  misc_feature (3172)..(3172): n is a, c, g, or t
  misc_feature (3174)..(3177): n is a, c, g, or t
  misc_feature (3179)..(3181): n is a, c, g, or t
  misc_feature (3199)..(3201): n is a, c, g, or t
  misc_feature (3203)..(3203): n is a, c, g, or t
  misc_feature (3206)..(3206): n is a, c, g, or t
  misc_feature (3208)..(3209): n is a, c, g, or t
  misc_feature (3211)..(3211): n is a, c, g, or t
  misc_feature (3215)..(3216): n is a, c, g, or t
  misc_feature (3218)..(3218): n is a, c, g, or t
  misc_feature (3220)..(3220): n is a, c, g, or t
  misc_feature (3222)..(3223): n is a, c, g, or t
  misc_feature (3230)..(3232): n is a, c, g, or t
  misc_feature (3234)..(3239): n is a, c, g, or t
  misc_feature (3241)..(3241): n is a, c, g, or t
  misc_feature (3243)..(3244): n is a, c, g, or t
  misc_feature (3246)..(3246): n is a, c, g, or t
  misc_feature (3252)..(3252): n is a, c, g, or t
  misc_feature (3255)..(3256): n is a, c, g, or t
  misc_feature (3259)..(3259): n is a, c, g, or t
  misc_feature (3261)..(3262): n is a, c, g, or t
  misc_feature (3264)..(3265): n is a, c, g, or t
  misc_feature (3267)..(3269): n is a, c, g, or t
  misc_feature (3271)..(3271): n is a, c, g, or t
  misc_feature (3278)..(3278): n is a, c, g, or t
  misc_feature (3280)..(3280): n is a, c, g, or t
  misc_feature (3282)..(3282): n is a, c, g, or t
  misc_feature (3284)..(3284): n is a, c, g, or t
  misc_feature (3288)..(3288): n is a, c, g, or t
  misc_feature (3290)..(3291): n is a, c, g, or t
  misc_feature (3293)..(3296): n is a, c, g, or t
  misc_feature (3299)..(3301): n is a, c, g, or t
  misc_feature (3303)..(3303): n is a, c, g, or t
  misc_feature (3307)..(3307): n is a, c, g, or t
  misc_feature (3310)..(3310): n is a, c, g, or t
  misc_feature (3312)..(3315): n is a, c, g, or t
  misc_feature (3317)..(3322): n is a, c, g, or t
  misc_feature (3325)..(3325): n is a, c, g, or t
  misc_feature (3328)..(3328): n is a, c, g, or t
  misc_feature (3330)..(3333): n is a, c, g, or t
  misc_feature (3336)..(3339): n is a, c, g, or t
  misc_feature (3342)..(3342): n is a, c, g, or t
  misc_feature (3344)..(3344): n is a, c, g, or t
  misc_feature (3346)..(3346): n is a, c, g, or t
  misc_feature (3351)..(3352): n is a, c, g, or t
  misc_feature (3354)..(3354): n is a, c, g, or t
  misc_feature (3358)..(3358): n is a, c, g, or t
  misc_feature (3361)..(3362): n is a, c, g, or t
  misc_feature (3368)..(3370): n is a, c, g, or t
  misc_feature (3376)..(3379): n is a, c, g, or t
  misc_feature (3381)..(3381): n is a, c, g, or t
  misc_feature (3384)..(3384): n is a, c, g, or t
  misc_feature (3387)..(3387): n is a, c, g, or t
  misc_feature (3393)..(3393): n is a, c, g, or t
  misc_feature (3395)..(3398): n is a, c, g, or t
  misc_feature (3401)..(3401): n is a, c, g, or t
  misc_feature (3404)..(3404): n is a, c, g, or t
  misc_feature (3406)..(3407): n is a, c, g, or t
  misc_feature (3410)..(3410): n is a, c, g, or t
  misc_feature (3412)..(3413): n is a, c, g, or t
  misc_feature (3416)..(3416): n is a, c, g, or t
  misc_feature (3421)..(3427): n is a, c, g, or t
  misc_feature (3432)..(3434): n is a, c, g, or t
  misc_feature (3437)..(3437): n is a, c, g, or t
  misc_feature (3439)..(3439): n is a, c, g, or t
  misc_feature (3444)..(3448): n is a, c, g, or t
  misc_feature (3453)..(3453): n is a, c, g, or t
  misc_feature (3457)..(3457): n is a, c, g, or t
  misc_feature (3459)..(3461): n is a, c, g, or t
  misc_feature (3463)..(3463): n is a, c, g, or t
  misc_feature (3469)..(3472): n is a, c, g, or t
  misc_feature (3474)..(3475): n is a, c, g, or t
  misc_feature (3482)..(3487): n is a, c, g, or t
  misc_feature (3491)..(3491): n is a, c, g, or t
  misc_feature (3494)..(3495): n is a, c, g, or t
  misc_feature (3497)..(3501): n is a, c, g, or t
  misc_feature (3503)..(3503): n is a, c, g, or t
  misc_feature (3508)..(3509): n is a, c, g, or t
  misc_feature (3511)..(3511): n is a, c, g, or t
  misc_feature (3514)..(3515): n is a, c, g, or t
  misc_feature (3517)..(3519): n is a, c, g, or t
  misc_feature (3522)..(3524): n is a, c, g, or t
  misc_feature (3526)..(3527): n is a, c, g, or t
  misc_feature (3535)..(3537): n is a, c, g, or t
  misc_feature (3539)..(3539): n is a, c, g, or t
  misc_feature (3541)..(3541): n is a, c, g, or t
  misc_feature (3544)..(3544): n is a, c, g, or t
  misc_feature (3547)..(3547): n is a, c, g, or t
  misc_feature (3554)..(3555): n is a, c, g, or t
  misc_feature (3557)..(3558): n is a, c, g, or t
  misc_feature (3565)..(3565): n is a, c, g, or t
  misc_feature (3572)..(3574): n is a, c, g, or t
  misc_feature (3578)..(3578): n is a, c, g, or t
  misc_feature (3580)..(3581): n is a, c, g, or t
  misc_feature (3584)..(3584): n is a, c, g, or t
  misc_feature (3590)..(3590): n is a, c, g, or t
  misc_feature (3594)..(3594): n is a, c, g, or t
  misc_feature (3597)..(3600): n is a, c, g, or t
  misc_feature (3602)..(3603): n is a, c, g, or t
  misc_feature (3606)..(3611): n is a, c, g, or t
  misc_feature (3613)..(3613): n is a, c, g, or t
  misc_feature (3615)..(3616): n is a, c, g, or t
  misc_feature (3618)..(3618): n is a, c, g, or t
  misc_feature (3620)..(3620): n is a, c, g, or t
  misc_feature (3624)..(3625): n is a, c, g, or t
  misc_feature (3629)..(3629): n is a, c, g, or t
  misc_feature (3637)..(3640): n is a, c, g, or t
  misc_feature (3642)..(3642): n is a, c, g, or t
  misc_feature (3649)..(3649): n is a, c, g, or t
  misc_feature (3654)..(3654): n is a, c, g, or t
  misc_feature (3657)..(3657): n is a, c, g, or t
  misc_feature (3661)..(3662): n is a, c, g, or t
  misc_feature (3664)..(3665): n is a, c, g, or t
  misc_feature (3667)..(3667): n is a, c, g, or t
  misc_feature (3669)..(3669): n is a, c, g, or t
  misc_feature (3671)..(3671): n is a, c, g, or t
  misc_feature (3677)..(3677): n is a, c, g, or t
  misc_feature (3680)..(3685): n is a, c, g, or t
  misc_feature (3687)..(3691): n is a, c, g, or t
  misc_feature (3694)..(3694): n is a, c, g, or t
  misc_feature (3696)..(3698): n is a, c, g, or t
  misc_feature (3700)..(3700): n is a, c, g, or t
  misc_feature (3705)..(3706): n is a, c, g, or t
  misc_feature (3709)..(3709): n is a, c, g, or t
  misc_feature (3713)..(3713): n is a, c, g, or t
  misc_feature (3715)..(3719): n is a, c, g, or t
  misc_feature (3721)..(3721): n is a, c, g, or t
  misc_feature (3724)..(3729): n is a, c, g, or t
  misc_feature (3731)..(3731): n is a, c, g, or t
  misc_feature (3734)..(3737): n is a, c, g, or t
  misc_feature (3739)..(3740): n is a, c, g, or t
  misc_feature (3742)..(3742): n is a, c, g, or t
  misc_feature (3744)..(3744): n is a, c, g, or t
  misc_feature (3746)..(3748): n is a, c, g, or t
  misc_feature (3750)..(3750): n is a, c, g, or t
  misc_feature (3753)..(3754): n is a, c, g, or t
  misc_feature (3757)..(3758): n is a, c, g, or t
  misc_feature (3761)..(3762): n is a, c, g, or t
  misc_feature (3765)..(3765): n is a, c, g, or t
  misc_feature (3770)..(3772): n is a, c, g, or t
  misc_feature (3774)..(3777): n is a, c, g, or t
  misc_feature (3779)..(3785): n is a, c, g, or t
  misc_feature (3788)..(3789): n is a, c, g, or t
  misc_feature (3791)..(3792): n is a, c, g, or t
  misc_feature (3797)..(3797): n is a, c, g, or t
  misc_feature (3800)..(3801): n is a, c, g, or t
  misc_feature (3803)..(3804): n is a, c, g, or t
  misc_feature (3810)..(3810): n is a, c, g, or t
  misc_feature (3812)..(3813): n is a, c, g, or t
  misc_feature (3821)..(3821): n is a, c, g, or t
  misc_feature (3825)..(3825): n is a, c, g, or t
  misc_feature (3827)..(3829): n is a, c, g, or t
  misc_feature (3831)..(3832): n is a, c, g, or t
  misc_feature (3836)..(3836): n is a, c, g, or t
  misc_feature (3839)..(3839): n is a, c, g, or t
  misc_feature (3842)..(3842): n is a, c, g, or t
  misc_feature (3844)..(3845): n is a, c, g, or t
  misc_feature (3847)..(3853): n is a, c, g, or t
  misc_feature (3855)..(3855): n is a, c, g, or t
  misc_feature (3858)..(3858): n is a, c, g, or t
  misc_feature (3861)..(3861): n is a, c, g, or t
  misc_feature (3864)..(3864): n is a, c, g, or t
  misc_feature (3869)..(3870): n is a, c, g, or t
  misc_feature (3873)..(3873): n is a, c, g, or t
  misc_feature (3877)..(3877): n is a, c, g, or t
  misc_feature (3880)..(3883): n is a, c, g, or t
  misc_feature (3886)..(3887): n is a, c, g, or t
  misc_feature (3894)..(3894): n is a, c, g, or t
  misc_feature (3896)..(3898): n is a, c, g, or t
  misc_feature (3900)..(3900): n is a, c, g, or t
  misc_feature (3903)..(3904): n is a, c, g, or t
  misc_feature (3907)..(3910): n is a, c, g, or t
  misc_feature (3912)..(3912): n is a, c, g, or t
  misc_feature (3915)..(3920): n is a, c, g, or t
  misc_feature (3923)..(3923): n is a, c, g, or t
  misc_feature (3926)..(3926): n is a, c, g, or t
  misc_feature (3928)..(3931): n is a, c, g, or t
  misc_feature (3936)..(3936): n is a, c, g, or t
  misc_feature (3938)..(3939): n is a, c, g, or t
  misc_feature (3941)..(3955): n is a, c, g, or t
  misc_feature (3958)..(3959): n is a, c, g, or t
  misc_feature (3962)..(3962): n is a, c, g, or t
  misc_feature (3964)..(3964): n is a, c, g, or t
  misc_feature (3966)..(3966): n is a, c, g, or t
  misc_feature (3968)..(3970): n is a, c, g, or t
  misc_feature (3972)..(3972): n is a, c, g, or t
  misc_feature (3974)..(3977): n is a, c, g, or t
  misc_feature (3979)..(3980): n is a, c, g, or t
  misc_feature (3982)..(3984): n is a, c, g, or t
  misc_feature (3986)..(3987): n is a, c, g, or t
  misc_feature (3989)..(3989): n is a, c, g, or t
  misc_feature (3991)..(3992): n is a, c, g, or t
  misc_feature (3994)..(3994): n is a, c, g, or t
  misc_feature (3998)..(4000): n is a, c, g, or t
agtccacatcattggaagttgctttataataaggtgacttctgtaccagcgcatctacctcgtcctgggtgtagtgcttggcaggatcgtatccttgcgcctgcatccaggtgacgaacttgggatggaatacgatgtattcctcgaatgcgtctccggtttcatccacgaaatccacatgtacgttggcgtcattcggattgactttgcgacgtcgcttgtanaccggcaggaatacgggttcgatgccggaagtggtttgcgtcatcaggcttgtcgtgcctgtcggtgcgatggtgagacaggcaatgttgcggcggccgtatttcttcatttcctcgtacagttccgggtctgcttcgcgcaggcggttgatgaacgggttgttcttttcgcgttcgctgtcgtatacttcgaaagcgccgcgttctttagccatttccacagaagagcggtatgcactcagtgctacggtctggtgtactttctctgcaaattcggtagcctcttcagtgccgtaacgcagtcccaatgctgcaagcatgtcgccttcggcggtgatgcctacgccggtgcggcggccttgtccgctctttttgtagattttctgccacaaaacgctttcggtatgctttacatcttcgttttccggatcggagtcaattttggccatgatacgttctatcttctcaagttccaggtcgatgatgtcgtccatgatgcgctgggcgagtgctacgtgcttcttgaacaaatcgaaatcgaagtaggcatccggtttgaacggattgactacatatgaatataggttaatggccagcaaacggcaggagtcgtaggggcacaagggaatttcaccgcaagggttggtcgacacggtacggtaacccaggtctgcgtagcaatcgggtacggactctcttaatatggtgtcccagaagagtacgccgggctcggcggacttccatgcgttgtgcacgatttttttccacaaatcggtggcgctgatttctttcttgaacagaggttcgtccgcgtcaatgggatattgctgtacgaatggcttgccgtcgatggctgcctgcataaatgcgtcggtcagcttgacggatacattggcccccgtaactttaccttctgtcatttttgcatctataaaggcttccgaatccggatgcttgatggatacgcttaacatcagcgcaccccggcggccgtcttgggctacttcacgggtggagttggagtagcgttccatgaagggaaccagtccggttgatgtcagggcggaattttttaccggagaacctttcgggcggatgtgtgacaagtcgtgtcctacaccgccgcggcgtttcatcagttgtacctgctcttcatcaatcttgaagattgcaccgtatgagtcggcctcgccatccacacctatcacaaaacagttggaaagggaagctacctggtagttgtttccgattccggtcatcgggctgccttgcggaacgatgtatttgaagtggtccaacaagccgaagagttcttcggaagtcagtgcgttggggtacttggcttcgatgcgggctacttcattggctattctccaatgcatgtcttccggagatttttcgtaaatatttccgaaagaatctttgactgcgtatttgttcacccaaacccttgcagccagttcgtcgccttggaagtatcgtaaagattcttcgtaggcttcgtcataagaataaactttcttttccacgatgcgataactcttagatttaattatgaataagtaaaagtgtagaagttgtacttattgctaacaaatgtggctgcaaatctatgaatgttttttgttatggcaaaataaaaattgatgtttttattaaccggttgttagttttcagttttaatcggttaatttgttggtttataataaaatggctttttgtaaattaacaaaaagttttctaaaaagaaaattcnataangaatacngttcgggtagtttgtcctttttagaaaacatgcctgcacatattcnnaactattggatgatattctgtgtttcttttcatatatttgcagaaaaaagaaagaatggaaagtctaaaacaaaggagaacaatccgtaagtatcagcagaaagatatttcttctgatttgttaaatgatttgcttgaaacctctttccgtgcttctacggttggaaacatgcaggtgtatagcgtaattgtaacccgtgacgctgaccggaaagccaggttggcaccggcgcatttcaatcagcctatggtgaagacggcgccggcagtncttactttttgcatcgacttgcgccgttttagcaaatggtgcgagcagcggaaggcagaaccgggatataacaattttgaatggtttgttaccggagctgtggatgctttgttggttgcgcaaacattctgtgtggcagccgaagaaaaaggtttgggcatctgctatctgggtactaccacctacaacccccaaatgattattgaggcattggagttgcccgaattggtcttccctatcactaccgttaccgtaggctggccggcagagantcctgcacaggtagaccgcctgcctttggaagccattgtccatgaagaaacttatcatgattatactcctgaggatatcgaccgtctntatgcctataaggagtctttgcctgagaataaacagtttatcgcagaaaataataaagaaacattggctcaggtctttacggatgtacgctatacaaagaaagacagcgaggctatgtccgagaacctttggaaagtaatgaaacaacagggattttaatttgagtataacgtatgaggtataaagcgtatccatgcagttttttgcatgatgactttatacctcataccttatacttttnnnnnntannttntactttntncnnggnnntnngnnnttcnnnnntntcngcgnnnaatgnttnntccncctnnnncngntnnntgnttnttntgnnnnnnngnagnanggngnnntgntnnttnttnnnnattnncgnnnnnntnntngntgtngagnnntnngtatnttttntgnntnannacnnnnnnntnngnngnnnnnncaccncnncgcntttncnnnntnttntatntnnggcgnnntnnnncanannanantntnnnnannnggtggtgatgatgtcgtnnntngtnanngntttnntntngnngttcacnnntnnnnnnangnngngttgtnccnnctncnngnngnnntncttgttntntntngtananngnnnnatnnngnaganganannnncnnnnnngtngcncnnnntgnnnnctncntnctctnntntatnatnnattacnnncggcgnnnntngtnaancgtcangnnnnatnttntnncgnannatnttttnnnnnnnttctnnngtngnctttnnnnnttccnccancnnncnccattnnnnanntgtaatnnnnnnttcntcnntnnnnngnagcannanggnngnnnggnnngnngtgagaannngntnttngcngttttgnngnnggtggtngaagatnnngaananngtnttctgngttntgnnnncnnctnnnnnntncnnantntcgnnaatnatcaatannnnantagtctngtagnagntgannanntngntngtcgtnttnnnnnntnnnnngtngnnntnttgtnnttngaanannnnngnagnnnnnnanaannnncnntncncnnnanatnnttnnttnnttnttgtnnngnnnncnnnnnnnagnngnnttttnccnncnnctgatncnncatacaanaacngnnnanngaanatngtntnngnnnnnnngngcnccnctncttcnncancacnacnnnngannttattgntnnntnctnnaannnncntgnnnnnnttntantnnnnattcngnngnnnnnnnnnnnnnnnaannggnancngnnnantnnnntnntnnntnntntnntnttgnnn

SEQ ID NO: 1510 - DNA, 4000 bp, Escherichia coli
  misc_feature (585)..(585): n is a, c, g, or t
  misc_feature (588)..(588): n is a, c, g, or t
  misc_feature (590)..(590): n is a, c, g, or t
  misc_feature (592)..(594): n is a, c, g, or t
  misc_feature (597)..(597): n is a, c, g, or t
  misc_feature (600)..(600): n is a, c, g, or t
  misc_feature (603)..(604): n is a, c, g, or t
  misc_feature (607)..(608): n is a, c, g, or t
  misc_feature (610)..(610): n is a, c, g, or t
  misc_feature (612)..(612): n is a, c, g, or t
  misc_feature (616)..(617): n is a, c, g, or t
  misc_feature (620)..(623): n is a, c, g, or t
  misc_feature (625)..(625): n is a, c, g, or t
  misc_feature (628)..(630): n is a, c, g, or t
  misc_feature (633)..(633): n is a, c, g, or t
  misc_feature (638)..(638): n is a, c, g, or t
  misc_feature (640)..(645): n is a, c, g, or t
  misc_feature (647)..(648): n is a, c, g, or t
  misc_feature (654)..(654): n is a, c, g, or t
  misc_feature (657)..(660): n is a, c, g, or t
  misc_feature (665)..(666): n is a, c, g, or t
  misc_feature (669)..(669): n is a, c, g, or t
  misc_feature (672)..(672): n is a, c, g, or t
  misc_feature (674)..(676): n is a, c, g, or t
  misc_feature (682)..(684): n is a, c, g, or t
  misc_feature (687)..(687): n is a, c, g, or t
  misc_feature (689)..(689): n is a, c, g, or t
  misc_feature (693)..(693): n is a, c, g, or t
  misc_feature (696)..(696): n is a, c, g, or t
  misc_feature (698)..(700): n is a, c, g, or t
  misc_feature (703)..(703): n is a, c, g, or t
  misc_feature (705)..(705): n is a, c, g, or t
  misc_feature (710)..(712): n is a, c, g, or t
  misc_feature (715)..(718): n is a, c, g, or t
  misc_feature (720)..(721): n is a, c, g, or t
  misc_feature (724)..(724): n is a, c, g, or t
  misc_feature (726)..(728): n is a, c, g, or t
  misc_feature (731)..(732): n is a, c, g, or t
  misc_feature (736)..(744): n is a, c, g, or t
  misc_feature (746)..(749): n is a, c, g, or t
  misc_feature (752)..(752): n is a, c, g, or t
  misc_feature (754)..(756): n is a, c, g, or t
  misc_feature (758)..(758): n is a, c, g, or t
  misc_feature (760)..(763): n is a, c, g, or t
  misc_feature (766)..(766): n is a, c, g, or t
  misc_feature (769)..(772): n is a, c, g, or t
  misc_feature (775)..(775): n is a, c, g, or t
  misc_feature (777)..(778): n is a, c, g, or t
  misc_feature (780)..(781): n is a, c, g, or t
  misc_feature (785)..(785): n is a, c, g, or t
  misc_feature (788)..(789): n is a, c, g, or t
  misc_feature (791)..(792): n is a, c, g, or t
  misc_feature (794)..(795): n is a, c, g, or t
  misc_feature (797)..(801): n is a, c, g, or t
  misc_feature (806)..(808): n is a, c, g, or t
  misc_feature (810)..(810): n is a, c, g, or t
  misc_feature (812)..(813): n is a, c, g, or t
  misc_feature (815)..(816): n is a, c, g, or t
  misc_feature (818)..(818): n is a, c, g, or t
  misc_feature (820)..(821): n is a, c, g, or t
  misc_feature (823)..(823): n is a, c, g, or t
  misc_feature (825)..(827): n is a, c, g, or t
  misc_feature (831)..(832): n is a, c, g, or t
  misc_feature (834)..(834): n is a, c, g, or t
  misc_feature (836)..(838): n is a, c, g, or t
  misc_feature (840)..(846): n is a, c, g, or t
  misc_feature (848)..(853): n is a, c, g, or t
  misc_feature (855)..(857): n is a, c, g, or t
  misc_feature (859)..(859): n is a, c, g, or t
  misc_feature (862)..(863): n is a, c, g, or t
  misc_feature (866)..(870): n is a, c, g, or t
  misc_feature (872)..(872): n is a, c, g, or t
  misc_feature (874)..(876): n is a, c, g, or t
  misc_feature (878)..(878): n is a, c, g, or t
  misc_feature (881)..(884): n is a, c, g, or t
  misc_feature (889)..(895): n is a, c, g, or t
  misc_feature (897)..(913): n is a, c, g, or t
  misc_feature (916)..(917): n is a, c, g, or t
  misc_feature (920)..(926): n is a, c, g, or t
  misc_feature (928)..(930): n is a, c, g, or t
  misc_feature (932)..(934): n is a, c, g, or t
  misc_feature (936)..(936): n is a, c, g, or t
  misc_feature (938)..(948): n is a, c, g, or t
  misc_feature (950)..(956): n is a, c, g, or t
  misc_feature (958)..(962): n is a, c, g, or t
  misc_feature (965)..(965): n is a, c, g, or t
  misc_feature (970)..(972): n is a, c, g, or t
  misc_feature (976)..(978): n is a, c, g, or t
  misc_feature (981)..(981): n is a, c, g, or t
  misc_feature (983)..(984): n is a, c, g, or t
  misc_feature (987)..(993): n is a, c, g, or t
  misc_feature (995)..(995): n is a, c, g, or t
  misc_feature (998)..(999): n is a, c, g, or t
  misc_feature (1002)..(1008): n is a, c, g, or t
  misc_feature (1010)..(1010): n is a, c, g, or t
  misc_feature (1012)..(1012): n is a, c, g, or t
  misc_feature (1015)..(1019): n is a, c, g, or t
  misc_feature (1021)..(1024): n is a, c, g, or t
  misc_feature (1026)..(1027): n is a, c, g, or t
  misc_feature (1031)..(1033): n is a, c, g, or t
  misc_feature (1036)..(1039): n is a, c, g, or t
  misc_feature (1042)..(1045): n is a, c, g, or t
  misc_feature (1047)..(1047): n is a, c, g, or t
  misc_feature (1050)..(1051): n is a, c, g, or t
  misc_feature (1055)..(1056): n is a, c, g, or t
  misc_feature (1059)..(1064): n is a, c, g, or t
  misc_feature (1066)..(1068): n is a, c, g, or t
  misc_feature (1070)..(1072): n is a, c, g, or t
  misc_feature (1074)..(1078): n is a, c, g, or t
  misc_feature (1082)..(1082): n is a, c, g, or t
  misc_feature (1084)..(1085): n is a, c, g, or t
  misc_feature (1087)..(1087): n is a, c, g, or t
  misc_feature (1089)..(1090): n is a, c, g, or t
  misc_feature (1092)..(1092): n is a, c, g, or t
  misc_feature (1097)..(1101): n is a, c, g, or t
  misc_feature (1104)..(1107): n is a, c, g, or t
  misc_feature (1114)..(1116): n is a, c, g, or t
  misc_feature (1118)..(1121): n is a, c, g, or t
  misc_feature (1128)..(1133): n is a, c, g, or t
  misc_feature (1135)..(1136): n is a, c, g, or t
  misc_feature (1139)..(1139): n is a, c, g, or t
  misc_feature (1142)..(1143): n is a, c, g, or t
  misc_feature (1145)..(1145): n is a, c, g, or t
  misc_feature (1147)..(1149): n is a, c, g, or t
  misc_feature (1155)..(1156): n is a, c, g, or t
  misc_feature (1158)..(1159): n is a, c, g, or t
  misc_feature (1161)..(1162): n is a, c, g, or t
  misc_feature (1164)..(1165): n is a, c, g, or t
  misc_feature (1168)..(1168): n is a, c, g, or t
  misc_feature (1171)..(1174): n is a, c, g, or t
  misc_feature (1176)..(1176): n is a, c, g, or t
  misc_feature (1178)..(1178): n is a, c, g, or t
  misc_feature (1181)..(1181): n is a, c, g, or t
  misc_feature (1184)..(1186): n is a, c, g, or t
  misc_feature (1188)..(1191): n is a, c, g, or t
  misc_feature (1193)..(1194): n is a, c, g, or t
  misc_feature (1197)..(1198): n is a, c, g, or t
  misc_feature (1200)..(1200): n is a, c, g, or t
  misc_feature (1202)..(1202): n is a, c, g, or t
  misc_feature (1204)..(1204): n is a, c, g, or t
  misc_feature (1206)..(1207): n is a, c, g, or t
  misc_feature (1209)..(1209): n is a, c, g, or t
  misc_feature (1213)..(1213): n is a, c, g, or t
  misc_feature (1215)..(1216): n is a, c, g, or t
  misc_feature (1220)..(1220): n is a, c, g, or t
  misc_feature (1222)..(1223): n is a, c, g, or t
  misc_feature (1240)..(1240): n is a, c, g, or t
  misc_feature (1242)..(1242): n is a, c, g, or t
  misc_feature (1246)..(1247): n is a, c, g, or t
  misc_feature (1251)..(1251): n is a, c, g, or t
  misc_feature (1254)..(1257): n is a, c, g, or t
  misc_feature (1259)..(1259): n is a, c, g, or t
  misc_feature (1261)..(1261): n is a, c, g, or t
  misc_feature (1263)..(1264): n is a, c, g, or t
  misc_feature (1267)..(1270): n is a, c, g, or t
  misc_feature (1274)..(1274): n is a, c, g, or t
  misc_feature (1279)..(1280): n is a, c, g, or t
  misc_feature (1284)..(1284): n is a, c, g, or t
  misc_feature (1287)..(1287): n is a, c, g, or t
  misc_feature (1294)..(1296): n is a, c, g, or t
  misc_feature (1298)..(1298): n is a, c, g, or t
  misc_feature (1301)..(1304): n is a, c, g, or t
  misc_feature (1315)..(1315): n is a, c, g, or t
  misc_feature (1317)..(1317): n is a, c, g, or t
  misc_feature (1320)..(1321): n is a, c, g, or t
  misc_feature (1323)..(1325): n is a, c, g, or t
  misc_feature (1328)..(1328): n is a, c, g, or t
  misc_feature (1331)..(1337): n is a, c, g, or t
  misc_feature (1340)..(1341): n is a, c, g, or t
  misc_feature (1345)..(1345): n is a, c, g, or t
  misc_feature (1348)..(1350): n is a, c, g, or t
  misc_feature (1352)..(1352): n is a, c, g, or t
  misc_feature (1357)..(1359): n is a, c, g, or t
  misc_feature (1364)..(1364): n is a, c, g, or t
  misc_feature (1368)..(1369): n is a, c, g, or t
  misc_feature (1371)..(1373): n is a, c, g, or t
  misc_feature (1379)..(1380): n is a, c, g, or t
  misc_feature (1382)..(1386): n is a, c, g, or t
  misc_feature (1390)..(1391): n is a, c, g, or t
  misc_feature (1393)..(1395): n is a, c, g, or t
  misc_feature (1397)..(1399): n is a, c, g, or t
  misc_feature (1402)..(1405): n is a, c, g, or t
  misc_feature (1407)..(1409): n is a, c, g, or t
  misc_feature (1412)..(1413): n is a, c, g, or t
  misc_feature (1415)..(1420): n is a, c, g, or t
  misc_feature (1422)..(1422): n is a, c, g, or t
  misc_feature (1424)..(1426): n is a, c, g, or t
  misc_feature (1430)..(1435): n is a, c, g, or t
  misc_feature (1442)..(1442): n is a, c, g, or t
  misc_feature (1444)..(1445): n is a, c, g, or t
  misc_feature (1449)..(1453): n is a, c, g, or t
  misc_feature (1461)..(1461): n is a, c, g, or t
  misc_feature (1463)..(1463): n is a, c, g, or t
  misc_feature (1468)..(1468): n is a, c, g, or t
  misc_feature (1470)..(1471): n is a, c, g, or t
  misc_feature (1477)..(1477): n is a, c, g, or t
  misc_feature (1480)..(1481): n is a, c, g, or t
  misc_feature (1483)..(1485): n is a, c, g, or t
  misc_feature (1489)..(1493): n is a, c, g, or t
  misc_feature (1495)..(1496): n is a, c, g, or t
  misc_feature (1498)..(1500): n is a, c, g, or t
  misc_feature (1503)..(1503): n is a, c, g, or t
  misc_feature (1505)..(1507): n is a, c, g, or t
  misc_feature (1509)..(1509): n is a, c, g, or t
  misc_feature (1511)..(1511): n is a, c, g, or t
  misc_feature (1514)..(1515): n is a, c, g, or t
  misc_feature (1517)..(1517): n is a, c, g, or t
  misc_feature (1519)..(1520): n is a, c, g, or t
  misc_feature (1523)..(1524): n is a, c, g, or t
  misc_feature (1526)..(1527): n is a, c, g, or t
  misc_feature (1531)..(1533): n is a, c, g, or t
  misc_feature (1535)..(1536): n is a, c, g, or t
  misc_feature (1539)..(1541): n is a, c, g, or t
  misc_feature (1543)..(1548): n is a, c, g, or t
  misc_feature (1550)..(1550): n is a, c, g, or t
  misc_feature (1552)..(1552): n is a, c, g, or t
  misc_feature (1555)..(1555): n is a, c, g, or t
  misc_feature (1558)..(1560): n is a, c, g, or t
  misc_feature (1563)..(1563): n is a, c, g, or t
  misc_feature (1565)..(1565): n is a, c, g, or t
  misc_feature (1568)..(1570): n is a, c, g, or t
  misc_feature (1572)..(1573): n is a, c, g, or t
  misc_feature (1575)..(1575): n is a, c, g, or t
  misc_feature (1577)..(1578): n is a, c, g, or t
  misc_feature (1580)..(1581): n is a, c, g, or t
  misc_feature (1584)..(1588): n is a, c, g, or t
  misc_feature (1592)..(1592): n is a, c, g, or t
  misc_feature (1594)..(1595): n is a, c, g, or t
  misc_feature (1598)..(1598): n is a, c, g, or t
  misc_feature (1601)..(1601): n is a, c, g, or t
  misc_feature (1603)..(1604): n is a, c, g, or t
  misc_feature (1606)..(1606): n is a, c, g, or t
  misc_feature (1613)..(1613): n is a, c, g, or t
  misc_feature (1615)..(1615): n is a, c, g, or t
  misc_feature (1621)..(1621): n is a, c, g, or t
  misc_feature (1623)..(1625): n is a, c, g, or t
  misc_feature (1627)..(1629): n is a, c, g, or t
  misc_feature (1633)..(1633): n is a, c, g, or t
  misc_feature (1636)..(1636): n is a, c, g, or t
  misc_feature (1638)..(1638): n is a, c, g, or t
  misc_feature (1640)..(1641): n is a, c, g, or t
  misc_feature (1652)..(1652): n is a, c, g, or t
  misc_feature (1658)..(1658): n is a, c, g, or t
  misc_feature (1662)..(1662): n is a, c, g, or t
  misc_feature (1664)..(1664): n is a, c, g, or t
  misc_feature (1667)..(1667): n is a, c, g, or t
  misc_feature (1669)..(1669): n is a, c, g, or t
  misc_feature (1674)..(1674): n is a, c, g, or t
  misc_feature (1681)..(1681): n is a, c, g, or t
  misc_feature (3019)..(3019): n is a, c, g, or t
ttgttggaatgggcattcagtcggagattctaattggaaaggctggtcaaacaggattaaaacagcaagagcaagttgaagtagtacaaagatttcgagatgggataacaagggttcttgttgcaaccagagttggtgaagagggtttagatatttcagaggttaatttagtagttttttatgataatgtaccgagctcaattagatttgtgcaaagaaaaggtaggactggcagaaaaaacactggtcgattaatagtgttaattgcaaaagatactattgatgaggcgtattactggattggtaagcgaaaaatcaaattagcggataacatggctgataagctcactaagcatcttgaaaagactgagcaggtaatggatgactttttttagttacgaaagtcttttgattatgtggtaaccatactgggtttttactggctctgaaatttgacccgcttgtagattaaatgcagtagtttcaaactctttcaccatttttccccttccaaaatagcccaagttgccatccctttttgcacttcccgaatcaatagagagttcttttgccagttttccaaanttntnannnttnttnatnntcnntnanacgnntannnncncannntgnttctncnnnnnnanntgagancannnnatctnnttnganannnccatcnnnccnancaanaanannnatnantagtnnnatnnnnannganannnctnngtannnnnnnnntnnnnaancnnntnannnnttnttnnnnagntnntnntttnatnnanntnntnnnnnttttnnntnannannangnntnannnttcnnanannntnnnnnnnannnnnnannnanttnntgnnnnngntnnntntgnnnnttttnnnnnnnannnnnnnnnnnnnnnnntgnntannnnnnntnnnannntntnnnnnnnnnnntnnnnnnntnnnnnaanaactnnnatannntcncnnaannnnnnnanatnncannnnnnntnanatnnnnntnnnnannattnnntannnntannnntnatnnaatnngtnnnnnnannntnnnannnnntaananngnanntnttttnnnnnagnnnnaaagatnnntnnnnatagatnnnnnngnnttnaanntnannngtcttnnanntnntnnagnttnnnnancntanaannnannnntnnagnncnantncnntnattntnnggangnnatttgtctttctgtttntnattnnattnacnnnnantntnngtnnnnagangaatnntttngtnaataagnnntntannnnttttaattttnanatnncnnngtnttnnnnnnntcnnatantcnnnanaaaannnaaatntcannannntaaaanntnnnnnaaanncnnnannnatnnnnannnttnntnnnnnngngnnnaaannnnnnaaaaatnanntttnnnnntacggtgntnattanannttttanganntnnngtannnnntnnannnttnannntncntgnnangnnaanntnntcannntnnacnnntnnnnnntngnacnttnnnttncnaannnanngnanntnngtnnnnnctcngnnaanaantnncnaggcttngngagaantnnnannnttanttnanannaattcgtcaanttgtgncgtntntcntnaaaanactcgantaatcatgcaaaaaactatttgatcatgtgaataattcatgccaaaatcatcacatcaagttctttcataaagaagaaataggtagtataattatcgtaattcaatatggaaggtgatccgacaggaggcatgtggatatatcttatctttttcgcgattccactagtaagaataattccgcgtattttaagaaagtatagacgcaaaaatgccggattggaaccggaaccagctgaaaaagatcatgcaggacagtttttcactagtgaacgaatgccagaaccaccaaaatacagggaaccacctccatcggaaccacagtcaaaacctgacagtaaagatggttgggtcggcaaagacgattttaaacgataagattgttcatgctttaaattattcatgttttaatcctgtttattgacatcatacttcactgttaacgaagcaaacaaaattcttcctacagttattgagaaatttaactatgcaaaaaagctaaaggatgagattgttaagacggagcaagaattagccacaaacgtatcagcaaccagctctttagcagaatacgccactttgaagcaaaaattaaactctatagtttccaaattttatcaatcaatagaggatcttgaaagtacgggcgttatactaaaaggacttgatgagggtttacttgattttcctgcaagacgctttaacgaggaaatttggctttgttggaaagaaggggaaactgagattaaattttggcatgaaaaggatgttggatttatgggaagaaaaccaattagtgtaagtactgaatctttagtgtaatgatttctgtctggttacgtgtgattcgcatccgttttttattagcatcagtgatagcagtatccgtaggtttagcaattacttggtggcatactggaagcataacagtatttgatgcagcattaacaatgggtggcgtgcttgcccttcatgcaagtgttgatttgcttaacgattattgggattttaagcgtaaaatagacacagtaactcaaaggacaaaaatgagtggtggttctggtgttctacctgagggtttgttaaaacctggacaagtttatgcagcaggcattgcttttttggtacttggcactgtaattggaatatattttgttattacatatggcataattattggggcaatacttggttttgcagtagtgtcgatttatttttactcaactaaaattgttgattggggcctggcggaagtttttgttgccataaagggaactatgattgttataggaacttactttgttcaaacatctcagatttcagaatccgtcatattgggnggaattgttgtaggagcattatcatcacttgtgttatttattacctcatttccagatcatgatgcggataaatcaaaaggaagaaaaacacttgtcataaatctgggaaaacaaaaagcatgcacatttttttggatatttccaataattatttacagtgtaactatagtcgccgtcataatcagtgtttttcctattttctgtctaatcatccttggaactattcccatggtgataaaatcaggcaaaaaactaaaacatgggtataatgaattgaataaaattattccagtcatgagttctactctagtttttagtagacttactggtgtattgcttgtttttggtttcattataaatataggctaacaaaaattttatttttactaatgacacaaaatatgattaataagaaaatatacttatagattacatgaaggtgattacttgtgccagttgatcctgtttgtggaatagaaatggatgaagatattgcagtagttcatgaattagatgggaaaaaatactttttttgttgtgatggttgcagaaaaatttttgtgaaaaagccaaaaaaatacaaaaaaaatgtttagataggaaatgaaccgcacatacgacaaaattttgaatctggttttatcttatacctgcaattaggacacttgaatttagaagaatgaagatttattggagcatcaaaatattttctgtatctcatgtaataatacaaagattcttttgatttgatcaaaactttatcagcagcagcgattttttttgtttcttccttaaaaaatttatcagatattgtattattaaacatgctaattagtccagatgtacctgccccatcttgcatggctgctttttttctccaaacaactgattttggaatcttgttttcaaataatttacgcagtatccattttccatatttttgaccattttcaactttaactttataatttacaggtaaag

SEQ ID NO: 1511 - DNA, 4000 bp, Escherichia coli
  misc_feature (1989)..(1989): n is a, c, g, or t
aacttattgccctctttgatcagacccatcgcaatacctgccacatgggccttcatcggcacacctgcatccatcagcgcgaggctgccgccgcagaccgacgccatcgatgacgaaccattcgactcggtgatctcggacaccaaacgcacggagtagctgaactcgtcggagccaggcaatgcggcgatcagcgcacgcttggccagacgaccgtgaccaatttcgcgacgctttggcgagccgacgcgacctgtctcaccagtagcaaacggcggcatgttgtagtgaagcatgaagcgatcactgtactcaccggtcagcgcatcaattttctgctcgtcgcgtgccgtgcccagtgtggccaccaccagcgcctgcgtctcaccgcgggtaaacaaggcagaaccatgagtgcgcggcagcacgctgctacgaatcgaaatcgggcgaacagtgcgcgtatcgcggccatcaatccgtggctcaccgtcaagaatctgcgagcgaacaatcttcgactcaagaccaaacatgatgtcgccgacttccgcagaatctggtgtcgatgtgccggaagcagcagcttcctcagccagcttggctgaaacttcggcgtgaatcgagcgcagcttgtcggaacgcgcttgtttttctttggtgcggaatgcatcgcgcagtttttcttctgccagcgcagtgacacgcgcaatcagcgcctcgttctgcgagggcgctatccatggcacctctggcttaccgccatcgcgtaccagatcatgaatggcgtcgatcactgccttcatctgctcatggccgtaaacaacggcacccagcatgacttcttcggacagttcttgcgcttcggactccaccatcagtaccgcagcctcggtacccgcaaccacgagatccattttcgagtgaggcatctgcgaaacagtcgggttcaacacgtactggccatcgatataaccaacgcgcgctgcaccgatcgggccgttaaaaggaatgccagcaacgcacagcgccgctgatgcgccgatcatcgaagggatatcggggtcgatttccgggttgactgacaacacatgaatgatgacctgcacttcattcaggtaaccctcagggaatagcgggcgaatcgggcgatcaatcaggcgcgacgtcagcgtctctttttcggacgggcgtccttcgcgcttgaagaaaccaccgggaatacgtccggcagcataagttttttcgacgtagtcgacggtcagcgggaaaaaatcttgaccgggcttggcttctttacgagcaaccacggtcgcgagtacgacagtatcttcaaccgttaccatcacggcacctgacgcttggcgagcaatctcgccagtttccagcgttactgtgtgttggccatattggaagctctttgtgactttgttaaacattgggtccatcctttcattttttgccgacagagtttcaggcgctgtcgttcacctcaccaccggcgggcattgccagcccaccgcacgactttagggttaccgctacctgcgagtttatgcaggcttcaaaaacgcgaaatgcccgcatcagttggctgatacaggcatttgcagatagatcgtttgggcaaaggcttacttgcgcagacccagtttttcgatcagagcacggtaacggtccgtgtccttgcgcttcaggtaggccagcaggctcttacgacggttgaccatcatgatcagaccacgacgcgaatgatgatctttggcgtgggccttgaaatggccattcaactcattgatgcgtgcagtcagcaacgccacctgcacttcgggggacccggtgtcgttttgaccccgagcatttgcagcgatgaccgctgccttgccttctttggacactgccatgataaaaaccctttcacatgcggcattcggagtcgcaaccccagaaaccgtgacaacattgataacttcgcctttcgaggccaangcaagattatagcctaaaccgactccccgacggctaagccatttggcaaagcctcacagctgcggattcagcttctcattctttgattgcaatttatttaacgctgacaagtaagccttggccgaggccaccacgatatccagatcagcgccgacgccgttcacgatgcggccattcttcgataaacgcatggtcacctccccctgcgactgcgtgcctgtggtgatggcattcaccgagaacagcagcagctcggcgccgctggccgtgtgcgactcgatcgcattcacgatggcgtcgaccgggccgttgccctcgccctcgcatttgatctccttgccctccgccgcgaacactaccttggccgtgggcttttcaccggtctctgagtgctgcgacaaggacacgaacttgtagaactctttctcatgcgcgctctgctcgtccgacaccagtgccatgatgtcctcatcaaagatatccgacttgcgatccgccagttctttgaaccgagcaaacgcagcattcacctcagactcggaatccaaggcgatacctaattcatccaggcgctgcttgaacgcattgcgacccgagagcttgccgagcacaatcttgttcgcgctccaacctacatcttcggcgcgcatgatctcgtaggtatcccgcgccttgaggatgccgtcttggtgaatgcccgaggcatgcgcaaatgcattagcacccaccaccgccttgttgggctgtactgcgaaaccggtgatctgagacaccagcttggaggtcggcacgatctgagacgtatcaatacccacgtccagcttgaaatgatccctacgggtttttactgccatcacgatttcttccagcgcggtgttgcccgcacgctcgcccaagccgttgatggtgcactcgatctggcgagcgccaccgatcatcactgcggccaaggagttggccacggccatgccaaggtcgttatggcaatgtacggaccataccgccttatcggaattagggatgcgttcacgcagggttttgagcgtatgcccgatcatctccggcacgccgtaaccgacagtgtcagcaaagttaatcgtagtcgcaccctcatcaatcacaccctcgagcacacgacacagaaagtcgagatccgagcggcttccatcttccgggctgaactcgacatcatccgtgaactgacgcgcaaaccggaccgccagacgggcttgctcgaccacctggtccggcgacatccgcagctttttttccatgtgcagcggcgatgttgcgatgaaggtgtgaatgcgctttctggctgctggctcaagtgcctccgctgcgcgcgcgatgtctcgatcattggcacgtgacagcgagcaaacaatcgactccttgactgtgcccgcaatagcacgaatagcatcaaaatcgccgggcgaagaggccgcgaaacccgcctcaatcacatccaccttcaggcgctctagctgacgagcgatgcgaattttctcttcgcgcgtcatggacgcgccgggcgactgctcgccatcgcgaagggtggtatcaaaaataatcagcttgttcgaatcgggcattttgtgctcccgggatattgaatcagtgggttgggcatattttcgcctaccctcgcatttattgcgcgggttgggcaaagctcaggttggggggaaaagagtgtctgcgccttagcgcagtaggtatagcagcagcaggccgaacgggctgccgagggaaagaaactgaggctggtggctgttgatcaacatgcaggtaagaatacgggggaatgccgcaaagtgcaaccgagagatttctattgccccgatagccggcgttactacttatcgtcgccgggctcggagcttgtctgcaccagactgaccgggttgcccttggcccagaaccagagcgctacaccgtaacccgacaagccatacacgacaaacagaccgaacagcaccttcggcgggtcgctcgacaccgccac

SEQ ID NO: 1512 - DNA, 4000 bp, Escherichia coli
  misc_feature (232)..(232): n is a, c, g, or t
  misc_feature (234)..(235): n is a, c, g, or t
  misc_feature (238)..(238): n is a, c, g, or t
  misc_feature (244)..(244): n is a, c, g, or t
  misc_feature (262)..(262): n is a, c, g, or t
  misc_feature (265)..(265): n is a, c, g, or t
  misc_feature (270)..(270): n is a, c, g, or t
  misc_feature (273)..(274): n is a, c, g, or t
  misc_feature (276)..(276): n is a, c, g, or t
  misc_feature (283)..(283): n is a, c, g, or t
  misc_feature (287)..(287): n is a, c, g, or t
  misc_feature (298)..(298): n is a, c, g, or t
  misc_feature (306)..(307): n is a, c, g, or t
  misc_feature (309)..(310): n is a, c, g, or t
  misc_feature (313)..(314): n is a, c, g, or t
  misc_feature (322)..(322): n is a, c, g, or t
  misc_feature (324)..(324): n is a, c, g, or t
  misc_feature (331)..(331): n is a, c, g, or t
  misc_feature (333)..(336): n is a, c, g, or t
  misc_feature (340)..(340): n is a, c, g, or t
  misc_feature (351)..(352): n is a, c, g, or t
  misc_feature (354)..(356): n is a, c, g, or t
  misc_feature (360)..(360): n is a, c, g, or t
  misc_feature (367)..(367): n is a, c, g, or t
  misc_feature (370)..(371): n is a, c, g, or t
  misc_feature (1986)..(1986): n is a, c, g, or t
  misc_feature (1989)..(1989): n is a, c, g, or t
  misc_feature (2331)..(2331): n is a, c, g, or t
  misc_feature (2338)..(2338): n is a, c, g, or t
  misc_feature (2923)..(2923): n is a, c, g, or t
  misc_feature (2938)..(2938): n is a, c, g, or t
  misc_feature (2944)..(2945): n is a, c, g, or t
  misc_feature (3584)..(3584): n is a, c, g, or t
  misc_feature (3593)..(3593): n is a, c, g, or t
  misc_feature (3595)..(3595): n is a, c, g, or t
  misc_feature (3605)..(3605): n is a, c, g, or t
  misc_feature (3608)..(3608): n is a, c, g, or t
  misc_feature (3638)..(3638): n is a, c, g, or t
  misc_feature (3704)..(3704): n is a, c, g, or t
  misc_feature (3729)..(3729): n is a, c, g, or t
  misc_feature (3832)..(3832): n is a, c, g, or t
  misc_feature (3891)..(3892): n is a, c, g, or t
  misc_feature (3918)..(3918): n is a, c, g, or t
  misc_feature (3925)..(3925): n is a, c, g, or t
  misc_feature (3931)..(3931): n is a, c, g, or t
  misc_feature (3942)..(3942): n is a, c, g, or t
  misc_feature (3949)..(3949): n is a, c, g, or t
  misc_feature (3952)..(3952): n is a, c, g, or t
tacacctgcaacttttgcagttgttacactcataactgcagaagcaatatgagcatatcttccagcagggacataacatccagctgtgttaacaggaattaatctttgacctgcaaataatccttcagaaagctcaacttcaaaatcttgtccatagttttttaattgtgcttcagcaaatttttttactctctcatgagcaaattgaacatcatctttagttttttgatcnanngtntttttnatttcttcaattctttcnttngaaanaannanatcaccntcanatttatcaaanttttttgnnanntcnntacaaccntnttctttngnnnnttcnatatcttttannannncttnaactatnccnnttgtttttgtgtcgtctgttgatgatgtttttggtgatttttttaaatattgtattgccattgattatttcctttgttttaagagcatcttaataaagtaaaaatgaattttattcaatgatttaaaagtaaaatctataggccatatttacactagctacacaaagaatgattactaaaagatacaaacttatataatcgaatggtttcataaattttgtttagaattaatctaaggcaactacagctgctgcaatagacgctagtcttgcttgagcttcatcagatctgcttgtaattacaactggaactttgccaccaactacaactccagcagcacaagctcccataaaataaatcatcattttaactaaaccatttccagtctcaacacttggaactaacaaaacatcagcttctccagctactacatttttaattccttttatagcagctgatttttttgaaatactattatcaaacgctagtggcccaaaaacatcggcctctaaattttcttcttttgcaagttttgttaattcagcagcatctaaagaacttggaacactatctaagacttcttctgtagccgataaaactgcaatttttggtctagatattcctattctattcgaaaaattaattacgtttttaagaatatgcatctttgttttaacatttggcaaaacatttaaagcaccgtctgtaatgattaatggtttactatctttttcagtagtcatatgccaaatatgacttaatcgagttttacctaacaaattatattcacgttttaaaacttctttcattaggacatctgtatgaatatgacctttaacaattatttttattttatcttcactagcaagtttagctgcaatttttgcagtagcattctcaataggctcatttattatttcatattttgaaatatcccattttaaatcctcagcacattttagaatttctttttcatcaccgataaaaataggttcaattaaattttcattaactgcatcttgaacagaaagcattggtaaaggtttgcctgcatttacaactgcaacttttacacctttttttttatgtgctacatctagcaagttgtttggacaaataatttctttattcgaaagcataaacaatgattataattaaattttaaaatgtatatagtagattttattattttagatattaaatttattaaatgattaaagaattcaacattaattttactaaagaagaaatatctttgatttatcaaaaagtaaaagactatccttgggattccatagctaatttggaaaattgggatcatggaaccaataaagagtatttaaaagaattgtgcaattattgggttaaagattttgattggggtaaacacgaattagaacttaataaattttctaactttactacaaatgtagatggagaagaaattcattttattaaagaaaaaggaagtagtccaaattctgttccattacttttaatgcatgggtggccaggatctgttattgaatttttagacatcattgaaaaacttgctcatcctgaaaaatttggaggaaataaaaaagactcttttgatgtaatagttccttcattnccnggatttggtttttctagcaaaccatcgaaacctcttggcccaagaaaaatggctaaaatatttaacaaactcatgacagacaatcttgaatataaaaattacattgttcaaggaggtgattggggtgcaactattgcaaactggattggctatgattattctaatttttgtaaagcaattcatataaattgtcttaccatgcgtcacccagatggccctcaatctactgaagaaaaagattggcaagtaagatttgataaagatcaaattatacaagatggatatagaacacagcaagcaactaaacctcaaactttaagttatggaatgatggatagcccngttggtntagctgcatggataattgaaaaaatgcatgcttggtctgacttaaaaaataataaaattgaaagcgtttattcaaaagataaattgctggcaaacattatggtttatattttgactaaaacctttgatacagcaacctggatatattatggaagaagagaagagggtggaaggttttttccaaaaaattttaaaaagatagaaattccaacagctatagcaatatttcctgctgaaatgtctgaatggccaccaagatcttatgttgagagaatatttaatgttcaacaatggactgaaatgtcagcaggtggtcactttgcagctttagaacagccagatctacttgttaacgatataagaaaatttttaagaagtttaagatatgatccttatgatgaaaggggtggtcaatttaatctttaagaactctaatatctttttcattaagacttaaaaataccttttcaccaacttcaaacacatcatttgtatcattagaaataacgtataatttacctatctcagagtttaaaatatattggtaactactaccaacaaaagaagcattatttactgttgcgtnaatacaattcttgtnatcaannctttcaattttaattttttcaggtcttaaggctactgaaactgttttagtaaaatcattatcactttcaattttcacttttatctctgctaattttaattcataaatatttgattgtttatttattatttctgctttaaccacatttgcatcaccaataaaattagctacaaatttattttttggaaaattataaagatctttaggacttccttgttgagcaattacagctttattcataacgatcactttatcagatattgctagtgcttcttcttgatcatgtgttacataaattgcggttactccaagtttttgttgaatttctcttatatcttcacgaacttgtcttctaagttttgcatccaaatttgaaagaggttcgtcaaataataacactttaggttttagtacaattgctcttgccacagctactctttgttgttgtcctccagataattctgatggcattctgttttcatatccatctaagtttactaattttaaagtttctaatgctttttctgtatattcttctttatttacgttgatcatttttaatccataagaaacattttcaataacactcatatgtggaaataaagcataagactggaataccatcgaaacatccctgtcngttgctggnantatagtaacntcntcattatcaactaaaatttttccttcggtngctctttcaagtcctgcaattattcttaatgatgtagtttttccacacccagatggaccaagtaangtagttaaagttccagcttcaaaantacaactgacattatcaacagctacagtttcattaaatttttttgtaatattttcaaattttacttcagcttttttcattatcctaagtttccttgtaatatncctgcagattgatctcttcttcctaatttacgtttgcctattattaattgcataagtannattgtaaacaacataacaactattantgcagangaatanactattgctanaccaaantcnttattttctaatcttcctaaaatgtatgaaacagctaagtcataattt

SEQ ID NO: 1513 - DNA, 4000 bp, Escherichia coli
  misc_feature (1191)..(1191): n is a, c, g, or t
  misc_feature (1985)..(1985): n is a, c, g, or t
acctttgatcaagcgcgcaatttctctcgcaaagtaggtcagcacgccatctgcgccggcacgtttgaagcacagcattgcctccatcatggttttgtcatggtcgagccagccgttttgtgctgccgccttgatcatggcgtactcgccactcacctgatacgcaaatgtcggtactttgaattcctgttttacgaggcgcacaatgtcgagatacggcataccgggcttaaccatcaccatatccgcaccctcagcaaggtcgagtgcaacttcacgcaaggcttcatttgaattgcctgggtccatttggtaagtggccttattgcctttccccagattggccgccgagcccaccgcgtcgcggaaaggtccgtaaaacgccgaggcgtattttgccgagtaggccatgatgcgcgtgtagatccggccgcgttcctcaagcgcgctgcggatcgcgccgatacggccatccatcatgtcggacggcgcgacgatatcaacccccgctgctgcttgggttagcgcctgctgtaaaagaattttggtggtttcgtcattcagtacatagccgtctgcattcagcacaccatcctgaccatggctggtgtacgggtctagcgcgacatcggttagtacgcccaactccggaaagcgtcgcttcagttcatgcactgcgcgcggtaccaaaccattcgggttggtagcctctataccgtcgggggttttcagctgcggatcgatcaccgggaacagagccagcacgggtataccaagcgacatacattcttcggcaactggcatcaacaggtcgacggataaacgctcgacaccgggcatggatggcacggcttcgcgctttttttcaccgtcgagaataaagacgggataaatcaaatcagccggtgtaacaacatgctcgcgcatcatcgcgcgcgagaatgcatctttgcgcatgcggcgcatacgcgtggcaggaaagcgggcaagtggatcgtggctcatgatgaatctcatgcaagtgttgttgtcaatatttttagcagcgagacgctttttgtatcgatgaacttcctgataaagcggtgctcctagccataggtgttgatcacctcccgcttatcctccctgagcgggactggctcaaacgagtcagtgtttggaccctggaggcatctcccgcgctccagnggttttttccgtggatacggtttgttcttcttcatgatcgacgctcgtctcgagctgcaacaggctacagatggtgcgatctgcctcatccagaccgatccgcttgagcgccgagaatagctgaacggagaatggcagaggctggccttgctcgtcaacatagctggccagaacggtcttggcgagccggatcgcacccgattgctcttgtcggttgagcttgtctgctttgctcaagaggcagtggataggcttgccggtcggcgcgaaccactccagcatctcaatgtccagctcggtaaatgggcggcgcgcatccatgatcagcaccaagcccaccagcggctgcctgacctgaacatagcggccgagcagctgctgccagtggtgcttggccgtcccagccacttcggcatagccgtagccgggtaaatccaccaaaaacgcccgaatctcttcgctgcgggcgatgtcgcggcggtgctggccaacatgagcgccgccgatcgagaaatagttgatgtgctgggtccgaccgggcgtcttggaggcaaatgccagttttttctggttgcagagcaggttgattgcggtcgatttgcccgcattcgagcgtccggcgaaggccaattcagggacttggtattttggcaaatcctgtagtcgattcacggtcgtgaagaagcgggcttgccaaagaatggacatcgggaatgggtgcaggtggggccggcaaacgcggcggctgtcagcaggatagcgaaaaatcgctgatgggcattgtagtacaatgncaggctgtatttcgcgaccaactcaatcaattattgcccgggtgtttgaatgaatcgagtgctctcgttgtgtttaaaagtgtccgctgttgcgttgttctccacgcttcttactgcaggggcgacagaacaaaagtcagcagcagctgatcccgccaaaggcgccacgctgtactccggtggtgacccagcgcgcggcattaccgcttgtattgcttgccatggcgcagagggtaactcgggcattccgcaaaaccccaaactcggcggtcaacatgctgcctatatcaagaaacagttgcatgattttcaggggccggatcgcaataacgcgatcatgaccacgatcgccaaagcgatgacacctgaagatatcgacaacgtagcagcctatttggccacgcaaaaagcgacggccaatgtcgccaaggtcaaagaaaccgctgatctgggccgcaagatttaccgcgccggcatcgctgaaaaaaatgtaccggcttgcgcaggctgccacagccccaatggcgctggcattccggcacagtacccgcgtatcgctggtcagcaccaggattatgcggtgacgcagctaaccaacttccgtggcggcgtgcgtggtaattcggctcagatggtcgcaattagtaagcgcctaaccgacgatgaaatgaaggcggtatccgattacatcgccgggttgcggtgaatctcaatctcccggaacaagcgccaagaacctatctcaaacgtcaattacaaggcggttgcaccgtagacggtacaagacgtacataaggcgaaatgcgaccaaggtagtaagacgccgaatgagatggttggttatcgggtgaagtgaaccaataccggggggtggcggtgagccgcccctttttgttgatacaggcagatatggacgctctcgatacaagccaacaatcctcgcctagtacgcacggcatgctgctaacgaaccgtggacgctttgtcaccgagatggttgagctggtgtcttcgatgcgttttgcgatcagtttgttgaccgtaatctcgattgcctcggtcgtgggcacggtggtgttgcaaggcgagccgatgccaaactacgtcaaccagtttggcccgttctggtttgaagtattcgctcggttctctgtctactcggtgtattcagcctggtggttcttgttgatcatggcgtttctggtcacctcgacctcgctctgcatcattcgcaatgcgccgaaaatgatcgctgacatgaagagctggcgggcgaatgtccgtgagcagtcgcttcgaaattttcatcatcacgccgaatggactgctgatcgcgatatgacgcagctcgcgcgagcgtatgcgcagcagatcgcggcagccgggtatcaggtaaagcagataagtaaagatgacgcaattttgctgagtgcaaagcagggtggcgccaacaagctcggttatatcttcgcgcactcagcgattgtgattatctgcgtcggcggcttgcttgactccaatctggccattcgcgcgcagcaatggttacttggtaaagagacctttaaaggcagtggtgtaattgccgaaatcccggagaaacacagactcggaaccggaaacattaccttccgcggtaataccttggtgcccgagggtcagagcagtgacaccacgattctgcagatgggcgatggtgtgctgatccaggacttgccgttcacgctgcagttagaaaaatttatcgttgatttttattcaacgggtatgccgaagctatttgccagcaatgtcatcgttactgacaaagaaacgggtaacagtttcagggccacgatcaaggtgaatgagccgttgatttacaaaggtctggcggtttaccagtcgagctttgaagatggtggcagtcgtttgaagctgaccggctacccaatggcaggcgctggccatgcgcagtttgcgttggatgggcaagtggggaaagcctcacgcttggcgggtaatgcgggtgacta

SEQ ID NO: 1514 - DNA, 4000 bp, Escherichia coli
  misc_feature (167)..(167): n is a, c, g, or t
  misc_feature (1038)..(1038): n is a, c, g, or t
  misc_feature (1677)..(1677): n is a, c, g, or t
  misc_feature (1680)..(1680): n is a, c, g, or t
  misc_feature (1786)..(1786): n is a, c, g, or t
  misc_feature (1968)..(1968): n is a, c, g, or t
  misc_feature (1985)..(1985): n is a, c, g, or t
  misc_feature (2245)..(2245): n is a, c, g, or t
  misc_feature (2272)..(2272): n is a, c, g, or t
  misc_feature (2292)..(2292): n is a, c, g, or t
  misc_feature (2451)..(2451): n is a, c, g, or t
  misc_feature (2482)..(2482): n is a, c, g, or t
  misc_feature (2602)..(2602): n is a, c, g, or t
  misc_feature (2706)..(2706): n is a, c, g, or t
  misc_feature (2737)..(2737): n is a, c, g, or t
  misc_feature (2753)..(2753): n is a, c, g, or t
  misc_feature (2778)..(2778): n is a, c, g, or t
  misc_feature (2826)..(2826): n is a, c, g, or t
  misc_feature (2838)..(2838): n is a, c, g, or t
  misc_feature (2857)..(2857): n is a, c, g, or t
  misc_feature (2869)..(2869): n is a, c, g, or t
  misc_feature (2872)..(2872): n is a, c, g, or t
  misc_feature (2947)..(2947): n is a, c, g, or t
  misc_feature (2988)..(2988): n is a, c, g, or t
  misc_feature (3007)..(3007): n is a, c, g, or t
  misc_feature (3009)..(3009): n is a, c, g, or t
  misc_feature (3015)..(3015): n is a, c, g, or t
  misc_feature (3069)..(3070): n is a, c, g, or t
  misc_feature (3099)..(3099): n is a, c, g, or t
  misc_feature (3102)..(3102): n is a, c, g, or t
  misc_feature (3104)..(3105): n is a, c, g, or t
  misc_feature (3247)..(3247): n is a, c, g, or t
  misc_feature (3250)..(3250): n is a, c, g, or t
  misc_feature (3257)..(3257): n is a, c, g, or t
  misc_feature (3345)..(3345): n is a, c, g, or t
  misc_feature (3544)..(3544): n is a, c, g, or t
  misc_feature (3632)..(3632): n is a, c, g, or t
  misc_feature (3769)..(3769): n is a, c, g, or t
  misc_feature (3805)..(3805): n is a, c, g, or t
  misc_feature (3957)..(3957): n is a, c, g, or t
gaacatcggtgcgaatggtagccaagaacttcgacattttaatatcgtctacggcagcttccactttctctcttagctttccttttatctggttggtatgttcgagcatattatctatagacccaaactggttgataagctttgctgcagttttttctcctacgccnggacagccaggaaaattgtcggctgtatcgcccataagtgccaataggtctattacttgagctggggtgggaatgccatatttggcttccacctcttgcgtacctataatatcgtatcctccaccgtgtcgtgggcgatacatatatacattttcttgaatgagctgaccataatccttgtcgggtgtaagcatatatgtgctgataccctttttgccagcttgagttgcaatagtgcctataatatcatcggcttcgaagccatctacctgtaagataggtatatgcatagctccaagaatttgttttatgtagggaacagacagctttatgtcttctggtgtttcctctctttgcgccttgtattcgggatatgcctcgtggcgaaaagtgagtccgtggtcgaaagccactgcaatgtgtgttggattttcttttgttaaaacttcgtttagtgtattgcaaaaacccataattgccgatgtattcaatccttttgatgtgatacgagggttacgaataagggcatagtacgaccgaaagatgagtgcgtacgcatcgatgagaaacaatttgtccattgtataaatcttatttatgggtaaaattactaaaaaaataccataattaccgatataattcattatttttgtatcaaaatagttttccaatggattatctgtcgattataaaaaaaccaattagtcaggaattaaacgaatttatctcactgtttaacaagtcgttaacgcacagcgatggcttacttgcacgtgtgttagaacatattcgtaacaggggagggaagcgtatgcgacctatattaacactactaatagcgaagaattttggtgcagtaacgtttgttgcncaacatgctgcagtagggttagaacttcttcatacagccagtttagtacacgatgacgttgtggacgagagtggagaacgcagaggacaggcatctgtgaatgccatatataacaataaggtgtcggtattggtaggcgattatattctttcgacggcactattgaatgtggcttatacaaaatctgatgaaattgtaggcgaccttgcagaattgggacgtacactttcgaatggagaaatattgcagttgactaatatttcgaaccaaaagatatcggaagaggtgtattacgaggtgataaaacagaagactgctgccttgtttgaaacctgtgcagagattggagcaaaggctggaggagcatcaaatgaggctattaaggctgcaaaacagttcggtcagcatatcggaataatattccaaatacgcgatgatatattcgattattacgattcaaccgagataggaaaacccacaggcaacgatatgttggaaggaaaactgactctacccattatttatgcattgaaatctactggtaataaagatatgcttaacttggctatgaaggtgaaagaaggaacagtaagtgccgatgaaatagcccagttggtagcttttgcaaaagaaagtggnggnatagaatatgcagaaaagaagatgttggaattgcacaacgaggctttacaatttatttctgactatgtctgcaacgaagaaatatcagatgcgttgaaagcttacntggattttgtgattcaacgcaagagttaagtatgtgccatagctgcttactattttgtgagaaatatgctttaattttgtaaatattatttatacagaaacggtagataccatttggcgttgcaaaagtgggtgttttggagcacaaaacacccacttttgctgtgtaaaaaccatactttnggaatgcaaaatagtgnttttcacaatgcgttgatagtcaaaccgttatacgaatattatatttgtgaaagatttttacaacatttatgatgttttctataagtaatcctcttacagcaatcgtagcaagatactatacagatgaacttattatgtattgcaataacaccaaaagatagccttcaaagaataagagaaagatacgcaaaaacggtgttaggactatgaaaatatttagattctattcttcaaatcgtaatattctacttatctttgnccttaagattttaatataatactaatnagttataattaaaaaaaacnaaaatgaaattagcaaaactcttatttggcagtatgtttatgctttctactttattctttgcttcatgtaataagaaaggagaatttgatagccaccctccagcagtaaataaagaggattttaaattatctacttcacagtcgggcaaagatactctntatgttacgaataaagaagattttaagttgnatgctgtagaattgctaaataaggcagacaggaaactgctttgcagagtaaatcttaatgacgtaaaaaacactaagttagaggctgaaggtgtaacttatggtgaagtaaaatatacangaggtgaagcttctataataaagattaataattggggaaccatcgaaaaaactactattgcacgccacaaaaaagcttatgctatggcttatattggcaaaagnccctcggatatagaattaactctctttgttntaggagtgaatggtgncacagttgtaacggtaaaataaccntttatggtatataccagcaattgtagaaagatgtaaatcgtacatttngcaagtgaaaanaatattggtaggaggtagncgtctatgatanatntttacttcctatctttttaaatatttaatagtgttcagttgattgtattgaaactattatggtaagagagattgntgtatttttggttttatgaaattccaataaaatcaattgcnatgttatggtttcttctgntnaatgtntatataaagcaatgctgttctattgaatttaagaaataaaaaatcctgatttcnncgttgaaatcaggattttcgtattgtttnaangnnggtttagaagaacttaacctctttgccttcaatgtcgctgagcagcaaattggtgagacgactggtaccaagacggaaccaatagttggtgagccacttctcgccgagaacttctttgtagatggtatagaagataacggcntcnataacgntgtttatgcctcctgcaggctttagtcctacctgtacgccagttctgtcgtagaactccttaatagccgtacacataatgtaaacagnctctggggttgcgctaattttctctttacccgtgcttgttttaatatagttagcacctgcaaacatagagagtagggcagctgcctttatgttgcgagcattttttaagtcgccagtttcgagtataaccttcattgggacatcgccacaagtctgcttcaattcactaatttggtcgtaaacatcttcataatcgccngaaaggaatttgccaacgggtaatacaatatcaatctgtgtggcaccgtccttgatggcaagtgccgtttcgatggtcttaacttcgnggaatgtttgagaagatgggaagtttcctgttacgtttgttatgtctacaccatctatttctaagctatcggcaatcagttttgtgaagcacggataagcacaaacagctccaacgtgtggaagagtagggtattcntgtgcaaatttgttcactttctcgaccattgcgagnacttcttcttctgtgtctgtggtcttgagagtagttaattctacacttccgaggaggaatttcttgacctctacgttattgttttctgcaactttctcttcaataatcttctttactgctgcttttacttcctcgtctgttatgtcgaggtngtattgtttcagcatctcatcgtacttacttgtgtatccaata

SEQ ID NO: 1515 - DNA, 4000 bp, Escherichia coli
  misc_feature (473)..(473): n is a, c, g, or t
  misc_feature (514)..(514): n is a, c, g, or t
  misc_feature (548)..(548): n is a, c, g, or t
  misc_feature (589)..(589): n is a, c, g, or t
  misc_feature (594)..(594): n is a, c, g, or t
  misc_feature (611)..(611): n is a, c, g, or t
  misc_feature (618)..(618): n is a, c, g, or t
  misc_feature (780)..(780): n is a, c, g, or t
  misc_feature (821)..(821): n is a, c, g, or t
  misc_feature (824)..(824): n is a, c, g, or t
  misc_feature (842)..(842): n is a, c, g, or t
  misc_feature (875)..(875): n is a, c, g, or t
  misc_feature (886)..(886): n is a, c, g, or t
  misc_feature (889)..(889): n is a, c, g, or t
  misc_feature (896)..(896): n is a, c, g, or t
  misc_feature (901)..(901): n is a, c, g, or t
  misc_feature (906)..(906): n is a, c, g, or t
  misc_feature (946)..(946): n is a, c, g, or t
  misc_feature (959)..(959): n is a, c, g, or t
  misc_feature (989)..(989): n is a, c, g, or t
  misc_feature (994)..(994): n is a, c, g, or t
  misc_feature (1012)..(1012): n is a, c, g, or t
  misc_feature (1025)..(1025): n is a, c, g, or t
  misc_feature (1141)..(1141): n is a, c, g, or t
  misc_feature (1448)..(1448): n is a, c, g, or t
  misc_feature (1475)..(1475): n is a, c, g, or t
  misc_feature (1478)..(1478): n is a, c, g, or t
  misc_feature (1480)..(1481): n is a, c, g, or t
  misc_feature (1517)..(1517): n is a, c, g, or t
  misc_feature (1592)..(1592): n is a, c, g, or t
  misc_feature (1695)..(1695): n is a, c, g, or t
  misc_feature (1716)..(1716): n is a, c, g, or t
  misc_feature (1721)..(1721): n is a, c, g, or t
  misc_feature (1727)..(1727): n is a, c, g, or t
  misc_feature (1730)..(1730): n is a, c, g, or t
  misc_feature (1779)..(1779): n is a, c, g, or t
  misc_feature (1842)..(1842): n is a, c, g, or t
  misc_feature (1985)..(1985): n is a, c, g, or t
  misc_feature (2160)..(2160): n is a, c, g, or t
  misc_feature (2165)..(2165): n is a, c, g, or t
  misc_feature (2863)..(2863): n is a, c, g, or t
  misc_feature (3566)..(3566): n is a, c, g, or t
  misc_feature (3928)..(3928): n is a, c, g, or t
gcagtccatggaggttgccgaagtcgaagaacatgagtttgccgatggaggcaaatgctagaacaagcccaacaatgagggatgcctgcctgctgaggaaccgtgcgcgaagcaagacgtagcaagccaagagcatccataagacggacaccgtggcgtggccgataaggtaaccacccttcacgttgcctgatagtccacccaggtaggtggctatggacacgatggccagcatggaaagatgaaggctgaccagcgcaagcccagattgagcggtgccggaaagatgcgttaggccggagcggcgtcgtaaagcaaccagcagcaggatgatgatggcgacggcttgggcagtagcccaggaagtgccaagccacagaaaggtaccgctaagtacgccgtctgtgaccatataggtgaggataagtgctgttgctgcccagcagaaccaaacaccgccgcggaactttatnccggaggtcatccaccaggtgacacctacggctgtgaggangaaaatgcacaccaccattggtttattcagcagnacatcagcgccgagtggcgcggccataacatacacaggcangaagntgagggccaggaagacngaaccgnattggatcagtgctttattgtgattgactatcgcgatggcgatgtagcagattgatcccgcaatgagaacccagctcagggggcgtgtggagacgtgggtagacaacgatggcatggtttcgagtccaagggcaccgaggccaaacagcacggcaggtgcgncgatggtcagtaggggattccacggcatacgctcggtgttngcncccattgcgacaaatatnacggcggtgataaccacaacgggggttgtgggnaggatcatggnagntgaatcnctgancaatncgtagaagaaggccgtaatcagcgtaaagatgacagcaanatcaatacccttngaccacttccgaatgtaggcagcgatggcnagggntgtgggtgcgagtgtgcnaggaagagtcganaattcggcgtagttaacgcatgaggcaaagtagatgctacctactatcgacgccccgatacccaaagcaattgccacaccttcctcgttccacacggtggctagtgctatgaaacngatggtaagcgcgatgattgttgctgttccagcaggttctggccaccattcgagtatgaccacaaggctaaataccgtggccatcgcgctgaggagagatgtggtgcaaaaggcgccgaccgctgctttatgcgcgtgacgcttatgggctacgacaccaattccacccatcacggcggagaaaacgctggccaggatgactcggccgagggggccgagcaggccattttgaatggcaaggaccaccaggaagaacacaccggcaatggtgatcagcgtgcctagcgtggcaatgaccctcacaacnatctgttccgatgtccaccatctggancgngnnggaagaacctggtccgcttgcgaacctggttgcccnggtggctgaatatttgcttgtgcactgtacacaggcgttggttgaattgggggtctcgtgagcggcgcgggttgnacaggtggattcgcagccccaggattgatatgaggtacgccaggattgatgcgtggcccggctggattgacgatgccggacggctgtggggctggcgcagagngtgcagaaggcatggcagccngttgntctgcngcntgttgttctgtggtggactgaccgacagattcccccgactgttctggtnctgagagctgttgccgctggaggagcagcatgtgcatgtccatgcgggcttcgcccagtgccntttcggcctgactcagcttttccagtgtcctttcgaagagaagtttttctgtatgcgaaatctccatggttttgatcctaaggaacccacagcgtacgcagctaaaaagttatcaacttgcaacgttatggggttagtgatanattgatgtgcgctaccgcctagaaactgtgctgtgcatggattttaggccgcaagtggagatccctcccaccagaagccgccacattgtggcaggataatggttattgtgaagttcacctcactgctacgcgcagtgtagatgcttcttggcacgatggatctcccgctttcacngaatnatggaagcgggtttttgtgtgtcatgtagggaaaactagttgcggtacggtgcgtacattatctctatcactgcaacttaggagtacacatcagcgctgaagctcgcattaatgagcgtattcgagttcccgaggtccgtcttgtgggccccagtggcgaacaggtgggcatcgtccgcattgaggatgctcgcaagttagcgtatgaggctgatcttgatttggttgaggttgccccgaacgctaaacctccggtctgcaaaatcatggactacggcaagttcaagtatgaagctgcacagaaggcacgcgaggctcgtaagaaccagcagcagactgttgtcaaggagcagaagcttcgtcccaagattgatgatcacgattatgagacgaagaaaggtaatgtgatccggttcttggagaagggttccaaggtgaaggtgacaatcatgttccgtggtcgtgagcaatcacgtcccgagcttggttaccgtctcttggaccgtttggcagccgacgtcgccgattacggcgttgttgaaaccaaggcaaagcaggatggccgcaatatgaccatggtcatcggcccggtgcgcaagggcaagaagtaaagacacattctagggttttaaggactaaatctcatgaagcaaaagacccacaagggcaccgcaaagcgtgtaaaggtaaccggttcnggcaagctccgtcgcgagcaggcgaaccgccgccacctcctcgaaggcaagccgtccacccgtactcgtcgcctgaagggcacgacggaagtggctaaagctgacaccaagcgtgttaagcggctgctcggccaggcttaatcgccgcctgttcacccctccaccaactctcaaagatttaaggaagtattactgtggcacgtgtcaagcggtcagtaaacgccaagaagaagcgtcgtacaattctgaagtccgcgaagggctaccgcggccagcgttctcgcctgtaccgcaaggctaaggaacagtggttgcactccatgacttacgcctaccgcgaccgccgtgcgcgtaagcgtgagttccgtcgtctgtggatccagcgcatcaatgctgccgcccgcatgaacggcatcacctacaaccgtctcatccagggcctgcgccttgccgagattgaggtggaccgtaagattcttgcggagctggctgtcaacgatttcgctgcgttctccgcaatttgcgaggccgccaaggctgccctgccggaggacgttaacgcccctaaggctgcgtaagtaatattgtgccttttatggcaagaaggtcctggtgtcatatcattgccaccagggccttccgcttgtattgaggattttcggtagcatgggtatgtttacagaattcttagtgttctacaagngtctaggcgggagataaggcatgacttttgatttcggtggtcggcagtacgataaagacgggctgcctattgaaaagacaccgccaccagcagcaacgccccaggtcaatccatcaccgtcctaccagcatccgcagcagcaggcaccgttcgcacaaccccagcagcagacgcctgggtttgctacgccaacgcctcagtctcagccagctccttttgcacaaccgctgatgcaacaacctgggtatggtgtggcggccccagttcctgtgggctaccagcagaagtcgtgggttgcatccttcctgcttgcctttttccttgggtcttttggggtccacaacttttacctcggttactcnagccgtgcgaaggttcaactgctactgggggtcggtggtatcgtgacctcacctttcatcattgggtttctt

SEQ ID NO: 1516 - DNA, 4000 bp, Escherichia coli
  misc_feature (1985)..(1996): n is a, c, g, or t
  misc_feature (1998)..(2004): n is a, c, g, or t
  misc_feature (2006)..(2007): n is a, c, g, or t
  misc_feature (2009)..(2014): n is a, c, g, or t
  misc_feature (2051)..(2054): n is a, c, g, or t
  misc_feature (2057)..(2060): n is a, c, g, or t
  misc_feature (2062)..(2070): n is a, c, g, or t
  misc_feature (2073)..(2075): n is a, c, g, or t
  misc_feature (2077)..(2079): n is a, c, g, or t
  misc_feature (2118)..(2121): n is a, c, g, or t
  misc_feature (2123)..(2123): n is a, c, g, or t
  misc_feature (2125)..(2132): n is a, c, g, or t
  misc_feature (2134)..(2135): n is a, c, g, or t
  misc_feature (2137)..(2139): n is a, c, g, or t
  misc_feature (2141)..(2144): n is a, c, g, or t
  misc_feature (2146)..(2146): n is a, c, g, or t
  misc_feature (2183)..(2190): n is a, c, g, or t
  misc_feature (2192)..(2192): n is a, c, g, or t
  misc_feature (2194)..(2196): n is a, c, g, or t
  misc_feature (2198)..(2199): n is a, c, g, or t
  misc_feature (2201)..(2201): n is a, c, g, or t
  misc_feature (2203)..(2205): n is a, c, g, or t
  misc_feature (2207)..(2208): n is a, c, g, or t
  misc_feature (2210)..(2210): n is a, c, g, or t
  misc_feature (2212)..(2212): n is a, c, g, or t
  misc_feature (2249)..(2249): n is a, c, g, or t
  misc_feature (2251)..(2251): n is a, c, g, or t
  misc_feature (2253)..(2253): n is a, c, g, or t
  misc_feature (2256)..(2256): n is a, c, g, or t
  misc_feature (2258)..(2262): n is a, c, g, or t
  misc_feature (2264)..(2266): n is a, c, g, or t
  misc_feature (2271)..(2271): n is a, c, g, or t
  misc_feature (2275)..(2275): n is a, c, g, or t
  misc_feature (2277)..(2277): n is a, c, g, or t
  misc_feature (2316)..(2317): n is a, c, g, or t
  misc_feature (2319)..(2324): n is a, c, g, or t
  misc_feature (2326)..(2326): n is a, c, g, or t
  misc_feature (2328)..(2332): n is a, c, g, or t
  misc_feature (2334)..(2334): n is a, c, g, or t
  misc_feature (2336)..(2336): n is a, c, g, or t
  misc_feature (2341)..(2342): n is a, c, g, or t
  misc_feature (2344)..(2344): n is a, c, g, or t
  misc_feature (2382)..(2383): n is a, c, g, or t
  misc_feature (2385)..(2393): n is a, c, g, or t
  misc_feature (2398)..(2402): n is a, c, g, or t
  misc_feature (2404)..(2410): n is a, c, g, or t
  misc_feature (2447)..(2447): n is a, c, g, or t
  misc_feature (2450)..(2451): n is a, c, g, or t
  misc_feature (2453)..(2459): n is a, c, g, or t
  misc_feature (2461)..(2462): n is a, c, g, or t
  misc_feature (2465)..(2465): n is a, c, g, or t
  misc_feature (2467)..(2471): n is a, c, g, or t
  misc_feature (2473)..(2473): n is a, c, g, or t
  misc_feature (2475)..(2475): n is a, c, g, or t
  misc_feature (2514)..(2514): n is a, c, g, or t
  misc_feature (2516)..(2517): n is a, c, g, or t
  misc_feature (2519)..(2521): n is a, c, g, or t
  misc_feature (2523)..(2523): n is a, c, g, or t
  misc_feature (2525)..(2525): n is a, c, g, or t
  misc_feature (2528)..(2535): n is a, c, g, or t
  misc_feature (2538)..(2540): n is a, c, g, or t
  misc_feature (2579)..(2584): n is a, c, g, or t
  misc_feature (2588)..(2591): n is a, c, g, or t
  misc_feature (2594)..(2599): n is a, c, g, or t
  misc_feature (2602)..(2603): n is a, c, g, or t
  misc_feature (2606)..(2606): n is a, c, g, or t
  misc_feature (2608)..(2608): n is a, c, g, or t
  misc_feature (2641)..(2641): n is a, c, g, or t
  misc_feature (2645)..(2648): n is a, c, g, or t
  misc_feature (2651)..(2651): n is a, c, g, or t
  misc_feature (2653)..(2653): n is a, c, g, or t
  misc_feature (2655)..(2657): n is a, c, g, or t
  misc_feature (2660)..(2662): n is a, c, g, or t
  misc_feature (2666)..(2666): n is a, c, g, or t
  misc_feature (2668)..(2668): n is a, c, g, or t
  misc_feature (2670)..(2673): n is a, c, g, or t
  misc_feature (2711)..(2711): n is a, c, g, or t
  misc_feature (2714)..(2716): n is a, c, g, or t
  misc_feature (2718)..(2727): n is a, c, g, or t
  misc_feature (2729)..(2729): n is a, c, g, or t
  misc_feature (2731)..(2731): n is a, c, g, or t
  misc_feature (2734)..(2735): n is a, c, g, or t
  misc_feature (2737)..(2737): n is a, c, g, or t
  misc_feature (2740)..(2740): n is a, c, g, or t
  misc_feature (2777)..(2778): n is a, c, g, or t
  misc_feature (2782)..(2784): n is a, c, g, or t
  misc_feature (2786)..(2788): n is a, c, g, or t
  misc_feature (2791)..(2794): n is a, c, g, or t
  misc_feature (2799)..(2799): n is a, c, g, or t
  misc_feature (2801)..(2801): n is a, c, g, or t
  misc_feature (2803)..(2804): n is a, c, g, or t
  misc_feature (2806)..(2806): n is a, c, g, or t
  misc_feature (2843)..(2843): n is a, c, g, or t
  misc_feature (2845)..(2848): n is a, c, g, or t
  misc_feature (2850)..(2850): n is a, c, g, or t
  misc_feature (2852)..(2854): n is a, c, g, or t
  misc_feature (2857)..(2859): n is a, c, g, or t
  misc_feature (2866)..(2867): n is a, c, g, or t
  misc_feature (2869)..(2869): n is a, c, g, or t
  misc_feature (2871)..(2872): n is a, c, g, or t
  misc_feature (2909)..(2909): n is a, c, g, or t
  misc_feature (2911)..(2911): n is a, c, g, or t
  misc_feature (2914)..(2914): n is a, c, g, or t
  misc_feature (2916)..(2919): n is a, c, g, or t
  misc_feature (2921)..(2921): n is a, c, g, or t
  misc_feature (2923)..(2925): n is a, c, g, or t
  misc_feature (2930)..(2930): n is a, c, g, or t
  misc_feature (2932)..(2933): n is a, c, g, or t
  misc_feature (2936)..(2938): n is a, c, g, or t
  misc_feature (2975)..(2980): n is a, c, g, or t
  misc_feature (2983)..(2984): n is a, c, g, or t
  misc_feature (2987)..(2992): n is a, c, g, or t
  misc_feature (2994)..(2994): n is a, c, g, or t
  misc_feature (2996)..(2996): n is a, c, g, or t
  misc_feature (2998)..(2998): n is a, c, g, or t
  misc_feature (3001)..(3002): n is a, c, g, or t
  misc_feature (3041)..(3044): n is a, c, g, or t
  misc_feature (3046)..(3052): n is a, c, g, or t
  misc_feature (3056)..(3057): n is a, c, g, or t
  misc_feature (3061)..(3063): n is a, c, g, or t
  misc_feature (3065)..(3065): n is a, c, g, or t
  misc_feature (3067)..(3070): n is a, c, g, or t
  misc_feature (3096)..(3096): n is a, c, g, or t
  misc_feature (3098)..(3103): n is a, c, g, or t
  misc_feature (3106)..(3108): n is a, c, g, or t
  misc_feature (3110)..(3110): n is a, c, g, or t
  misc_feature (3112)..(3112): n is a, c, g, or t
  misc_feature (3115)..(3115): n is a, c, g, or t
  misc_feature (3121)..(3122): n is a, c, g, or t
  misc_feature (3124)..(3124): n is a, c, g, or t
  misc_feature (3127)..(3127): n is a, c, g, or t
  misc_feature (3131)..(3131): n is a, c, g, or t
  misc_feature (3133)..(3137): n is a, c, g, or t
  misc_feature (3140)..(3153): n is a, c, g, or t
  misc_feature (3155)..(3158): n is a, c, g, or t
  misc_feature (3160)..(3162): n is a, c, g, or t
  misc_feature (3165)..(3167): n is a, c, g, or t
  misc_feature (3169)..(3172): n is a, c, g, or t
  misc_feature (3174)..(3175): n is a, c, g, or t
  misc_feature (3177)..(3181): n is a, c, g, or t
  misc_feature (3183)..(3184): n is a, c, g, or t
  misc_feature (3189)..(3189): n is a, c, g, or t
  misc_feature (3192)..(3195): n is a, c, g, or t
  misc_feature (3197)..(3197): n is a, c, g, or t
  misc_feature (3202)..(3211): n is a, c, g, or t
  misc_feature (3213)..(3214): n is a, c, g, or t
  misc_feature (3216)..(3218): n is a, c, g, or t
  misc_feature (3220)..(3220): n is a, c, g, or t
  misc_feature (3222)..(3223): n is a, c, g, or t
  misc_feature (3226)..(3226): n is a, c, g, or t
  misc_feature (3229)..(3229): n is a, c, g, or t
  misc_feature (3231)..(3232): n is a, c, g, or t
  misc_feature (3234)..(3237): n is a, c, g, or t
  misc_feature (3239)..(3239): n is a, c, g, or t
  misc_feature (3241)..(3242): n is a, c, g, or t
  misc_feature (3247)..(3249): n is a, c, g, or t
  misc_feature (3251)..(3253): n is a, c, g, or t
  misc_feature (3255)..(3255): n is a, c, g, or t
  misc_feature (3258)..(3260): n is a, c, g, or t
  misc_feature (3263)..(3263): n is a, c, g, or t
  misc_feature (3265)..(3265): n is a, c, g, or t
  misc_feature (3267)..(3267): n is a, c, g, or t
  misc_feature (3270)..(3271): n is a, c, g, or t
  misc_feature (3274)..(3274): n is a, c, g, or t
  misc_feature (3279)..(3281): n is a, c, g, or t
  misc_feature (3283)..(3285): n is a, c, g, or t
  misc_feature (3287)..(3287): n is a, c, g, or t
  misc_feature (3289)..(3289): n is a, c, g, or t
  misc_feature (3291)..(3291): n is a, c, g, or t
  misc_feature (3293)..(3296): n is a, c, g, or t
  misc_feature (3298)..(3298): n is a, c, g, or t
  misc_feature (3300)..(3300): n is a, c, g, or t
  misc_feature (3302)..(3302): n is a, c, g, or t
  misc_feature (3304)..(3304): n is a, c, g, or t
  misc_feature (3306)..(3306): n is a, c, g, or t
  misc_feature (3308)..(3311): n is a, c, g, or t
  misc_feature (3313)..(3313): n is a, c, g, or t
  misc_feature (3315)..(3315): n is a, c, g, or t
  misc_feature (3317)..(3317): n is a, c, g, or t
  misc_feature (3319)..(3322): n is a, c, g, or t
  misc_feature (3324)..(3329): n is a, c, g, or t
  misc_feature (3331)..(3333): n is a, c, g, or t
  misc_feature (3337)..(3337): n is a, c, g, or t
  misc_feature (3340)..(3340): n is a, c, g, or t
  misc_feature (3344)..(3344): n is a, c, g, or t
  misc_feature (3348)..(3348): n is a, c, g, or t
  misc_feature (3352)..(3353): n is a, c, g, or t
  misc_feature (3356)..(3360): n is a, c, g, or t
  misc_feature (3362)..(3363): n is a, c, g, or t
  misc_feature (3365)..(3366): n is a, c, g, or t
  misc_feature (3369)..(3373): n is a, c, g, or t
  misc_feature (3377)..(3378): n is a, c, g, or t
  misc_feature (3381)..(3381): n is a, c, g, or t
  misc_feature (3384)..(3384): n is a, c, g, or t
  misc_feature (3388)..(3388): n is a, c, g, or t
  misc_feature (3390)..(3391): n is a, c, g, or t
  misc_feature (3393)..(3393): n is a, c, g, or t
  misc_feature (3399)..(3399): n is a, c, g, or t
  misc_feature (3404)..(3404): n is a, c, g, or t
  misc_feature (3407)..(3411): n is a, c, g, or t
  misc_feature (3413)..(3414): n is a, c, g, or t
  misc_feature (3418)..(3420): n is a, c, g, or t
  misc_feature (3422)..(3422): n is a, c, g, or t
  misc_feature (3425)..(3425): n is a, c, g, or t
  misc_feature (3427)..(3428): n is a, c, g, or t
  misc_feature (3430)..(3430): n is a, c, g, or t
  misc_feature (3433)..(3438): n is a, c, g, or t
  misc_feature (3442)..(3442): n is a, c, g, or t
  misc_feature (3444)..(3444): n is a, c, g, or t
  misc_feature (3448)..(3448): n is a, c, g, or t
  misc_feature (3450)..(3450): n is a, c, g, or t
  misc_feature (3453)..(3453): n is a, c, g, or t
  misc_feature (3456)..(3458): n is a, c, g, or t
  misc_feature (3460)..(3460): n is a, c, g, or t
  misc_feature (3462)..(3462): n is a, c, g, or t
  misc_feature (3467)..(3475): n is a, c, g, or t
  misc_feature (3477)..(3479): n is a, c, g, or t
  misc_feature (3481)..(3482): n is a, c, g, or t
  misc_feature (3484)..(3484): n is a, c, g, or t
  misc_feature (3486)..(3488): n is a, c, g, or t
  misc_feature (3490)..(3490): n is a, c, g, or t
  misc_feature (3493)..(3494): n is a, c, g, or t
  misc_feature (3498)..(3498): n is a, c, g, or t
  misc_feature (3501)..(3503): n is a, c, g, or t
  misc_feature (3505)..(3506): n is a, c, g, or t
  misc_feature (3509)..(3512): n is a, c, g, or t
  misc_feature (3515)..(3515): n is a, c, g, or t
  misc_feature (3517)..(3518): n is a, c, g, or t
  misc_feature (3520)..(3521): n is a, c, g, or t
  misc_feature (3527)..(3529): n is a, c, g, or t
  misc_feature (3531)..(3531): n is a, c, g, or t
  misc_feature (3533)..(3534): n is a, c, g, or t
  misc_feature (3536)..(3540): n is a, c, g, or t
  misc_feature (3542)..(3542): n is a, c, g, or t
  misc_feature (3544)..(3545): n is a, c, g, or t
  misc_feature (3547)..(3547): n is a, c, g, or t
  misc_feature (3550)..(3551): n is a, c, g, or t
  misc_feature (3553)..(3553): n is a, c, g, or t
  misc_feature (3555)..(3556): n is a, c, g, or t
  misc_feature (3558)..(3564): n is a, c, g, or t
  misc_feature (3567)..(3567): n is a, c, g, or t
  misc_feature (3571)..(3571): n is a, c, g, or t
  misc_feature (3573)..(3576): n is a, c, g, or t
  misc_feature (3579)..(3580): n is a, c, g, or t
  misc_feature (3582)..(3586): n is a, c, g, or t
  misc_feature (3588)..(3588): n is a, c, g, or t
  misc_feature (3590)..(3591): n is a, c, g, or t
  misc_feature (3594)..(3594): n is a, c, g, or t
  misc_feature (3596)..(3599): n is a, c, g, or t
  misc_feature (3601)..(3602): n is a, c, g, or t
  misc_feature (3605)..(3605): n is a, c, g, or t
  misc_feature (3608)..(3610): n is a, c, g, or t
  misc_feature (3612)..(3612): n is a, c, g, or t
  misc_feature (3614)..(3614): n is a, c, g, or t
  misc_feature (3616)..(3618): n is a, c, g, or t
  misc_feature (3620)..(3621): n is a, c, g, or t
  misc_feature (3623)..(3628): n is a, c, g, or t
  misc_feature (3631)..(3634): n is a, c, g, or t
  misc_feature (3636)..(3636): n is a, c, g, or t
  misc_feature (3638)..(3638): n is a, c, g, or t
  misc_feature (3641)..(3642): n is a, c, g, or t
  misc_feature (3646)..(3647): n is a, c, g, or t
  misc_feature (3649)..(3650): n is a, c, g, or t
  misc_feature (3652)..(3653): n is a, c, g, or t
  misc_feature (3656)..(3656): n is a, c, g, or t
  misc_feature (3659)..(3660): n is a, c, g, or t
  misc_feature (3662)..(3668): n is a, c, g, or t
  misc_feature (3670)..(3670): n is a, c, g, or t
  misc_feature (3672)..(3672): n is a, c, g, or t
  misc_feature (3674)..(3681): n is a, c, g, or t
  misc_feature (3683)..(3686): n is a, c, g, or t
  misc_feature (3689)..(3692): n is a, c, g, or t
  misc_feature (3694)..(3695): n is a, c, g, or t
  misc_feature (3697)..(3701): n is a, c, g, or t
  misc_feature (3705)..(3707): n is a, c, g, or t
  misc_feature (3709)..(3710): n is a, c, g, or t
  misc_feature (3712)..(3713): n is a, c, g, or t
  misc_feature (3717)..(3718): n is a, c, g, or t
  misc_feature (3722)..(3722): n is a, c, g, or t
  misc_feature (3725)..(3725): n is a, c, g, or t
  misc_feature (3729)..(3730): n is a, c, g, or t
  misc_feature (3732)..(3733): n is a, c, g, or t
  misc_feature (3735)..(3737): n is a, c, g, or t
  misc_feature (3739)..(3741): n is a, c, g, or t
  misc_feature (3745)..(3745): n is a, c, g, or t
  misc_feature (3748)..(3748): n is a, c, g, or t
  misc_feature (3750)..(3757): n is a, c, g, or t
  misc_feature (3759)..(3759): n is a, c, g, or t
  misc_feature (3761)..(3763): n is a, c, g, or t
  misc_feature (3766)..(3766): n is a, c, g, or t
  misc_feature (3768)..(3768): n is a, c, g, or t
  misc_feature (3771)..(3771): n is a, c, g, or t
  misc_feature (3773)..(3773): n is a, c, g, or t
  misc_feature (3776)..(3776): n is a, c, g, or t
  misc_feature (3778)..(3778): n is a, c, g, or t
  misc_feature (3780)..(3783): n is a, c, g, or t
  misc_feature (3786)..(3789): n is a, c, g, or t
  misc_feature (3793)..(3794): n is a, c, g, or t
  misc_feature (3797)..(3799): n is a, c, g, or t
  misc_feature (3802)..(3802): n is a, c, g, or t
  misc_feature (3805)..(3805): n is a, c, g, or t
  misc_feature (3808)..(3809): n is a, c, g, or t
  misc_feature (3811)..(3811): n is a, c, g, or t
  misc_feature (3813)..(3813): n is a, c, g, or t
  misc_feature (3815)..(3815): n is a, c, g, or t
  misc_feature (3817)..(3817): n is a, c, g, or t
  misc_feature (3819)..(3820): n is a, c, g, or t
  misc_feature (3822)..(3822): n is a, c, g, or t
  misc_feature (3824)..(3828): n is a, c, g, or t
  misc_feature (3830)..(3830): n is a, c, g, or t
  misc_feature (3832)..(3832): n is a, c, g, or t
  misc_feature (3837)..(3837): n is a, c, g, or t
  misc_feature (3839)..(3840): n is a, c, g, or t
  misc_feature (3842)..(3842): n is a, c, g, or t
  misc_feature (3847)..(3847): n is a, c, g, or t
  misc_feature (3854)..(3855): n is a, c, g, or t
  misc_feature (3857)..(3857): n is a, c, g, or t
  misc_feature (3859)..(3861): n is a, c, g, or t
  misc_feature (3863)..(3864): n is a, c, g, or t
  misc_feature (3868)..(3870): n is a, c, g, or t
  misc_feature (3872)..(3872): n is a, c, g, or t
  misc_feature (3874)..(3882): n is a, c, g, or t
  misc_feature (3886)..(3887): n is a, c, g, or t
  misc_feature (3889)..(3890): n is a, c, g, or t
  misc_feature (3892)..(3892): n is a, c, g, or t
  misc_feature (3898)..(3898): n is a, c, g, or t
  misc_feature (3902)..(3902): n is a, c, g, or t
  misc_feature (3904)..(3905): n is a, c, g, or t
  misc_feature (3907)..(3907): n is a, c, g, or t
  misc_feature (3909)..(3909): n is a, c, g, or t
  misc_feature (3911)..(3915): n is a, c, g, or t
  misc_feature (3919)..(3919): n is a, c, g, or t
  misc_feature (3921)..(3921): n is a, c, g, or t
  misc_feature (3923)..(3924): n is a, c, g, or t
  misc_feature (3929)..(3929): n is a, c, g, or t
  misc_feature (3931)..(3931): n is a, c, g, or t
  misc_feature (3933)..(3937): n is a, c, g, or t
  misc_feature (3939)..(3940): n is a, c, g, or t
  misc_feature (3948)..(3948): n is a, c, g, or t
  misc_feature (3954)..(3959): n is a, c, g, or t
  misc_feature (3963)..(3964): n is a, c, g, or t
  misc_feature (3966)..(3966): n is a, c, g, or t
  misc_feature (3969)..(3970): n is a, c, g, or t
  misc_feature (3972)..(3973): n is a, c, g, or t
  misc_feature (3976)..(3976): n is a, c, g, or t
  misc_feature (3978)..(3979): n is a, c, g, or t
  misc_feature (3983)..(3984): n is a, c, g, or t
  misc_feature (3986)..(3986): n is a, c, g, or t
  misc_feature (3988)..(3988): n is a, c, g, or t
  misc_feature (3990)..(3991): n is a, c, g, or t
  misc_feature (3995)..(3995): n is a, c, g, or t
  misc_feature (4000)..(4000): n is a, c, g, or t
aaagcacggctggaaacacataaagacgatccggccaaagcctttgccgagccgttttacaaatacgataaagcaggcaaccgcacccaacaggtaaaagccgtacgcgtagagcaagtacagaaaaccggcgtatgggtgcgcaaccataacggtattgccgacaacgcaaccatggtgcgcgtagatgtgtttgagaaaggcggcaagtattatctggtaccgatttacagttggcaggtcgcaaaagggattttgccgaatagggctgttgtacaaggaaaagatgaagaagattggacggtaatggatgatagttttgagtttaagtttgtactttatgcgaatgatctgattaagctaaccgctaagaaaaatgaatttttaggctatttcgtcagcctaaatagagctacaggagcaattgatattcgtacacatgatacggatagcaccaaagggaaaaacggcattttccaaagtgttggtgtcaaaaccgccctttcattccaaaaataccaaatcgacgaattgggcaaagaaatcagatcatgccgtctgaaaaaacgcccgcctgttcgttaaataaacctatccctgtttcagacgacatgaaacagggattttttgtataaaaataaggggaagaaacatgacttggcgcagtctgcttattcaaaacggcggtaaattatccttgcaacgccggcaactgctgattcaacaaaacggcgagtcccataccgtaccattagaagacatcgccgttatcatcatcgaaaaccgcgaaaccctgattactgccccgctcctatcagccttagccgaacatggctcaaccctgctgacatgtgacgaacagttcctaccctgcggacaatggctgccttatgcccaatatcaccgccaacttaaaatcctcaagctgcagctgaatataagcgaacccttaaaaaagcaactctggcaacatatcatccgccaaaaaatcctaaatcaagcatttgtcgcagacgaaacaggcaatgatcttgccgccaaacggctgcgcactttggcagtcgaagtccgttcgggcgatacaggaaaccgtgaagcccaagctgccgccctctacttccaagccctctttggagaaaagtttactcgcaatgacaacaatgccgtcaatgccgcattgaactacacctacgccgtactccgtgcagcagttgcacgcgccctgactttatatggatggttgcctgcattaggcttgtttcatagaagcgaactaaatccattcaacctcgccgatgactttatcgaacccttacgcccattggccgacctggtcgttatacatttgcatgaacaaggccgtctgaaaactgatctgacccctaatatcaaacaaaaccttatcaagacccttcactgtcaaatctgcatcgaacggcaatacttcagcaccttggctgccatagacaaaatgatttcctcatttcaagccagcgtaactgacaaaaatgccaaacagctgaaactgcctgaaatcttgccattgaaagaataccaatatgagtgaggccaaatttatgaggattattgtcttcttcgacctaccggttaccacagcggcaaagcgcaaagctgccaatcaattccgccagtttctattaaaagatggataccaaatgctccagctttccgtatacagccgtattgtcaaaggtcgagattcgttgcaaaaacaccacaacaggctatgtgcaaacctaccgcaagaagggtcaatccgctgtttggaagtaacggaaaagcaatatgccaccatgaaactactattgggagagctaaaaacccaagaaaaaagagtaaattcagaccaactattattattttaagctcattttttagacaaaataaaacgggaaacccttataaaataaggatttcccgttgaggtattgtagcactgcgaaatgagaaagggagctacaacnnnnnnnnnnnnannnnnnntnntnnnnnnattgtagcactgcgaaatgagaaagggagctacaacnnnnccnnnntnnnnnnnnncgnnntnnngattgtagcactgcgaaatgagaaagggagctacaacannnngntnnnnnnnngnngnnnannnnanattgtagcactgcgaaatgagaaagggagctacaacnnnnnnnntntnnnanngntnnntnntntnattgtagcactgcgaaatgagaaagggagctacaacngngnttntnnnnnannntcgancatntngattgtagcactgcgaaatgagaaagggagctacaactnntnnnnnnanannnnnangngtatnnanattgtagcactgcgaaatgagaaagggagctacaaccnntnnnnnnnnntattnnnnnannnnnnnattgtagcactgcgaaatgagaaagggagctacaacnggnnannnnnnncnnttnannnnnananaattgtagcactgcgaaatgagaaagggagctacaactngnngnnncncntannnnnnnnaannnggattgtagcactgcgaaatgagaaagggagctacaacnnnnnnaggnnnntannnnnnttnnacntnattgtagcactgcgaaatgagaaagggagctanaacnnnncanantnnnctnnncaancncnnnnaattgtagcactgcgaaatgagaaagggagctacaacntgnnntnnnnnnnnnngntngcnntnganattgtagcactgcgaaatgagaaagggagctacaacnngtcnnntnnnttnnnnctcanancnncnattgtagcactgcgaaatgagaaagggagctacaacncnnnntntnnnccnnngcattcnnantnnattgtagcactgcgaaatgagaaagggagctacaacntnatnannnnancnnnaaacncnnagnnnattgtagcactgcgaaatgagaaagggagctacaacnnnnnnaanngannnnnncnancnttnnggattgtagcactgcgaaatgagaaagggagctacaacnnnnannnnnnncgtnncttnnngnannnnattgtagcactgcgaaatgagaaagngnnnnnncannnananaancaccanntnaanaggnannnnnttnnnnnnnnnnnnnntnnnnannngannnannnncnntnnnnncnnattcnacnnnngncaaannnnnnnnnncnncnnnangnnaancgnanntnnnnanannaacannncnnncnttnnnagnancnaanngtngaccnnntnnntnananannnnancnanancntnnnnancncnannnngnnnnnnannnaaanganggtntgcnaaannagnnnnntnncnnaannnnntcannggntcnactncnngncgcaantcttntgnnnnngnnaaannngncangnngnttnnnnnngtcnanaagnanttngcnnnantncgcannnnnnnnncnnngnngntnnnantanngttnaannngnngtnnnnatnannannacgcannncntnntnnnnnantnntnaanntnanngnnnnnnnaancctncnnnnggnnannnnncnannttngnnnntnntgncannncntnannngnnannnnnnctnnnntntnatnnaaanntnnannacncanntnnnnnnncntnannnnnnnngnnnnagnnnntnnannnnnatcnnnannanngtanntatnttnagcnntnngnnnannngctnaangnnnnnnnnantnnnaancntcnanagnangnnnnaannnngganngannngangcnctnntncntnancnncntnnnnngnantaccntnnanatctncaaaaanngncnnntnntcannnangnnnnnnnnngcannanntncagctncttntnnancnannnnnccantngnntcaanancnnnnncnnatttatcnaaatcnnnnnnttgnncnacnngnncangnncaanntnananntaanacgan

SEQ ID NO: 1517 - DNA, 4000 bp, Escherichia coli
  misc_feature (1948)..(1948): n is a, c, g, or t
  misc_feature (1969)..(1970): n is a, c, g, or t
  misc_feature (1972)..(1972): n is a, c, g, or t
  misc_feature (1982)..(1982): n is a, c, g, or t
  misc_feature (1987)..(1987): n is a, c, g, or t
  misc_feature (1990)..(1990): n is a, c, g, or t
gacagaatccgaatgatgctctatcggaacacccttacaaacgcttggcttgtgaatcgtctcgaagaaagaggtattaacaccgaaaaaaccgagatgagttctgtccttcgtggagttcgtaagggtgctaaagcggaaagcattatcgtaacttcccttgacatcctcgaaaactatgagcgagtaatgggaagttcggtgtgagtaccgcagctcaattagagagttggacacaacacagtttgagccgacttctcgcaaaaactgttgcccggtattttgaagatgaagagcatcgccgggaatttgaagaatggtacttcaaccgatatggtcgtgagtaccaatggaagaaaggaggtaaaagaggtgactcaaacacgcagacgaaagaaaggtcttaaaagatggctgagacgaaatcttctctcaatcatccttgcagttctcatcgtgatattctccgtttggacattcgtaatcattgtgaatgcgttttgcccggatgaagtcaaagtcgaggacaagcctgttgtatccaccactcttcctccgctcgtaactacgacaccccttgtggatgtaccgttggaaaccccaaccgtagaaactgtcgaagagaaaactttttacttcgatgttgctcttgattgcgacctacaagactacataagggacttgtgcgaaacctatgatgtcccaatggaacttgtaatcgcaatgattcatcaagaaagttcgtttagagcaaatgttgtgagcggtagtaatgattatggtttgatgcaaattaacaccatcaatcacgagtggctgcaaaaggagcctggagtaacagattttctcgacccgtaccaaaatgttctgtgcggtatctatatcatctcaggacatcttgaaaaaaccgatggtgacatcgaactcgccctaatgcgatacaactgtggagcaaccggggcaaagcgtttgtgggacaaagggatatacgaaacagattatactcgaaagattatgtcctattatgagttctacaaagaagaaagccgccctacggactgcactccgtaagacggcaaggtaaagtttaccatacctattatagcacagaaaggaggaaaaatcaatgtgcgaaatttgtttacagagtccctgtcatccgagatgtcctaacgcacctgaccctcctgttgtatgtctctgctgtcaatgcggaaatgagatttacgagggagacgaggtttacgacatcaacgatgagaaatggtgtgaatcctgtgtgaaggaatgttgctatatcgctgagttggatgagcctgattgggatgaccgatgatttgcccttgtaaagattgtcccaaacgacatcccggctgtcactctacttgttccgactacaaagcgtggaaagaagaacacgagagattgaaagccttggaaagacaacgcaaagaaatggacgaactcggatggcgttcaaactatgtacgaaaaaggagattctgatatatgaacacaatcagaaattttatcgctaaccccggcagcgtgattatgttcggcggtatcgactgtgttgttctcgatgttcacgatgacaaaatgctcgtgattactaaagatgctgtttgcgaaagagcatttgatgagagcaacaagaacaatttcaacatttcctctctccgcacttggctcaatactgagttcattgagatgctgagaaacggtggagcggatgtaaatgccctcgtggaatttaccattgaccttacctcggacgatggattgaaggattatggcgtaagcacgaacaaggttgctttgctgacctgtgatatgtaccgtcagttccgcagctatatccccaaccttgatagttggtggtggcttgctacaccttactctactgagtctaatgggtacgattctcttgctcgctatgtcagcncggatggtagtctgaacgacnncnatgcttacantggtnacngtggcgttcgtcccgcttttgtccttgactcttccatctttgaatctcgtaatctgaatctcagcgagtattctaccgaggagttgcttctcgaactcatcgcacgagaaaaggaatcgaataatgcgtgagttcacattctcgtggaacaacggtcgaggacgaatgaccctcaatctcgattaccttttagagagaaagagcaacaaatttgttcacacaacgaagcctgatgtattgaagataatgaagtacataatcacctcagacgagcctgagaaaatcagcgacttccttcattatctcgactcaaacggttgtgcagacattgctcaacggttccgggagaagcatcatatcgaacaaggaggtatttcaaaatgacactttatgaactgcaaaacaagctcggtgagcagattgacctcatcaccgataagaccaaaccgcccgaagagcgaaagaaattggctgagaccgctatgaccgtttcgagtcttgcaaaacagatgattaacaacgcagatgtcgttcttcgtactgagaaactgattgccgaaggtaagttgaaagacagcgttatcaagaagattgtcggtagcaactgatgagaggtagtcattacaccgaagagcaaaacgcattcattgccgaaaactatatgcggatgacttatcatcaactgaccgagtgttataacaagcgatttaacgctcagatgaatgtttctgcaatgacgaagaagattcattatatgggtctaccgaaaaagccgaaacttttccctacaatgtttacgccggaggttgatgcttatttaatagagaacgcatataactacacttcttccgacctcgcacagaaagtgcaagaaaagttcggcatcacacctgcaacacagaccattaccgaacggctgaataatttgggcgttcaccgtggtagcacttatctcccggatgggtacatcccacgagcgagtaagccgattggcacggaacgcatagacaaaggacgaacggttatggtgaaggtggctcaacccaatgtttggaaaccgaaagttcaagtcgtgacaggatacgaccctaaaaaaagtcaagcaattttcctcgatggaaactctctgaatgtcacgcctgagaacattgtaattgtgagcaagaaagttcacgctcggttagccaaaaatggttggctgaatagcaacaatgaggttttgatggcaggtattaagtggagtgaattgcactacgctcttcgagaaatggaggtaacaatcaatgagtaaccgaaagctcggtaacagctttgaacaagaattttgcgagacccttgcgtttcacggcttttgggtacacaacctcgcacaaaatcaggcaggacaacctgccgatgtaatcgccgtgaaaaacaaaaaggcatacctcatcgactgtaaggtatgctccgggaagactttcccactcagtcgagtcgaagagaatcaggacttggcgatgagcctttggaaagactgtggcaacggagagggttggtttgccattaagattagtgaggctgtttatatgatacctcactttacagtaatggcacacaagaacgctcaacctgctatgagtatttccgaaatcgtagagtgcggaaaacctctcgataaatggattgccaaatgcaaataaccgtaggcagcactattgcagtcgagaatccaaccgaagagttgattcgatggtgcagtcaaaacttaaaaatccgaaacccggattatgtcaaaaaggtaagaatgaacttttggttaggcgatacacctgagttcttgtacctttacgagatacacggaaacactcttgtcgttccctttggtacgctacgcacacttgctccaatgtttcaagggtgtcctacaatcaaggactttggcgatgcggaagtaattgacttctcctgcaaagttcctctgtatgattatcaggagacagcggtcaacgaagtagctgcacaacatta

SEQ ID NO: 1518 - DNA, 4000 bp, Escherichia coli
  misc_feature (1877)..(1877): n is a, c, g, or t
  misc_feature (1992)..(1992): n is a, c, g, or t
  misc_feature (1999)..(1999): n is a, c, g, or t
  misc_feature (2193)..(2193): n is a, c, g, or t
  misc_feature (3033)..(3033): n is a, c, g, or t
  misc_feature (3210)..(3212): n is a, c, g, or t
  misc_feature (3219)..(3219): n is a, c, g, or t
  misc_feature (3222)..(3222): n is a, c, g, or t
  misc_feature (3225)..(3225): n is a, c, g, or t
  misc_feature (3663)..(3663): n is a, c, g, or t
  misc_feature (3665)..(3666): n is a, c, g, or t
  misc_feature (3674)..(3674): n is a, c, g, or t
  misc_feature (3676)..(3677): n is a, c, g, or t
  misc_feature (3679)..(3679): n is a, c, g, or t
  misc_feature (3681)..(3681): n is a, c, g, or t
  misc_feature (3683)..(3684): n is a, c, g, or t
  misc_feature (3687)..(3687): n is a, c, g, or t
  misc_feature (3692)..(3697): n is a, c, g, or t
  misc_feature (3700)..(3700): n is a, c, g, or t
  misc_feature (3705)..(3710): n is a, c, g, or t
  misc_feature (3712)..(3713): n is a, c, g, or t
  misc_feature (3715)..(3716): n is a, c, g, or t
  misc_feature (3718)..(3718): n is a, c, g, or t
  misc_feature (3721)..(3721): n is a, c, g, or t
  misc_feature (3723)..(3723): n is a, c, g, or t
  misc_feature (3726)..(3731): n is a, c, g, or t
  misc_feature (3734)..(3743): n is a, c, g, or t
  misc_feature (3745)..(3745): n is a, c, g, or t
  misc_feature (3747)..(3747): n is a, c, g, or t
  misc_feature (3749)..(3752): n is a, c, g, or t
  misc_feature (3754)..(3754): n is a, c, g, or t
  misc_feature (3756)..(3757): n is a, c, g, or t
  misc_feature (3760)..(3761): n is a, c, g, or t
  misc_feature (3763)..(3763): n is a, c, g, or t
  misc_feature (3766)..(3767): n is a, c, g, or t
  misc_feature (3769)..(3769): n is a, c, g, or t
  misc_feature (3771)..(3771): n is a, c, g, or t
  misc_feature (3773)..(3777): n is a, c, g, or t
  misc_feature (3779)..(3783): n is a, c, g, or t
  misc_feature (3785)..(3786): n is a, c, g, or t
  misc_feature (3788)..(3788): n is a, c, g, or t
  misc_feature (3790)..(3792): n is a, c, g, or t
  misc_feature (3794)..(3797): n is a, c, g, or t
  misc_feature (3799)..(3799): n is a, c, g, or t
  misc_feature (3805)..(3805): n is a, c, g, or t
  misc_feature (3807)..(3807): n is a, c, g, or t
  misc_feature (3813)..(3814): n is a, c, g, or t
  misc_feature (3816)..(3816): n is a, c, g, or t
  misc_feature (3819)..(3820): n is a, c, g, or t
  misc_feature (3822)..(3824): n is a, c, g, or t
  misc_feature (3826)..(3826): n is a, c, g, or t
  misc_feature (3829)..(3829): n is a, c, g, or t
  misc_feature (3831)..(3831): n is a, c, g, or t
  misc_feature (3833)..(3834): n is a, c, g, or t
  misc_feature (3837)..(3838): n is a, c, g, or t
  misc_feature (3840)..(3840): n is a, c, g, or t
  misc_feature (3842)..(3843): n is a, c, g, or t
  misc_feature (3845)..(3845): n is a, c, g, or t
  misc_feature (3849)..(3849): n is a, c, g, or t
  misc_feature (3851)..(3862): n is a, c, g, or t
  misc_feature (3866)..(3866): n is a, c, g, or t
  misc_feature (3868)..(3870): n is a, c, g, or t
  misc_feature (3873)..(3874): n is a, c, g, or t
  misc_feature (3876)..(3876): n is a, c, g, or t
  misc_feature (3879)..(3880): n is a, c, g, or t
  misc_feature (3882)..(3884): n is a, c, g, or t
  misc_feature (3886)..(3890): n is a, c, g, or t
  misc_feature (3892)..(3896): n is a, c, g, or t
  misc_feature (3899)..(3899): n is a, c, g, or t
  misc_feature (3901)..(3901): n is a, c, g, or t
  misc_feature (3903)..(3905): n is a, c, g, or t
  misc_feature (3907)..(3909): n is a, c, g, or t
  misc_feature (3912)..(3914): n is a, c, g, or t
  misc_feature (3916)..(3920): n is a, c, g, or t
  misc_feature (3922)..(3923): n is a, c, g, or t
  misc_feature (3925)..(3928): n is a, c, g, or t
  misc_feature (3930)..(3933): n is a, c, g, or t
  misc_feature (3936)..(3941): n is a, c, g, or t
  misc_feature (3943)..(3943): n is a, c, g, or t
  misc_feature (3945)..(3951): n is a, c, g, or t
  misc_feature (3955)..(3957): n is a, c, g, or t
  misc_feature (3959)..(3965): n is a, c, g, or t
  misc_feature (3967)..(3967): n is a, c, g, or t
  misc_feature (3969)..(3969): n is a, c, g, or t
  misc_feature (3971)..(3971): n is a, c, g, or t
  misc_feature (3973)..(3973): n is a, c, g, or t
  misc_feature (3975)..(3975): n is a, c, g, or t
  misc_feature (3977)..(3977): n is a, c, g, or t
  misc_feature (3979)..(3980): n is a, c, g, or t
  misc_feature (3982)..(3982): n is a, c, g, or t
  misc_feature (3984)..(3986): n is a, c, g, or t
  misc_feature (3989)..(3991): n is a, c, g, or t
  misc_feature (3993)..(3994): n is a, c, g, or t
  misc_feature (3996)..(3998): n is a, c, g, or t
  misc_feature (4000)..(4000): n is a, c, g, or t
gagcccagcaaaccagttacagaataggtattagtctgcactgccccactataaacatttgtagtgctatcaccattaactgtcagattcgctttagcgatattcaaggacccatttacaaatgtgacgttagagtaatcactattactaccgcctacagtattcacgtaagagccaacgttcgttctactcgcgcccgaagccgtgatacctgctaatgaagttggagatgcagcatcggcacctactaaaccggtaatactgtagccacttacactttgagcactagccgtgtaagttacgttactactattacccgtaaccactaccgctccggtatatggcgttatggtgagtgagccattgacatttaccaaagtgtagtttggtgagccaatcgatgtatttaagttatctgtatagacaccaacgtgcacaccagttgatgagccagaaactgccaatgctgtagttattgctgtatcaccacctaagaatccagaaacattgtaagtatttgattgggtagtaccgttatatacggctgtagcagtagcgccagttactgtcaaagtagctggagtgatatttaatgagccattaataaaagtgatattggaatagtcgctattactaccacttggcgtattggtatagctacctacgtttgttgcgctggcgccagaggcaaagatgcccgctagatttgatggggtaatagcatcaactccgagaaggcctgtagaggtatagccactcacggattgtgtagctgctgtataggtcgttgtagagctattgccagtgatgactaccgctccagcgtatggagaaatcgtcaagcttgctgggttatagctgatgctgtaatttgttaaaccactaccaactgcatttgaaagtgtgcccgtgtagctaccagcatgtaaaccgctagcagagccagttacaccagttacagcgtccgttccaagcaaacctgacactgaatagttggcattcgtctgagtggcaccgctgtagatagaggagacattagtgccagaaattactaatgctgccttattgatcgtcaagctgccattagtaaccgtaaagttatagttgctagctaatgtacccgttgcagataatgattcagaatatggtgtagcagaggccaacgttccagttgcatagccagatacgccaatacttgcagcatcattaccctgcaaacccacaaatacagcacctgtattagtttgcgatgtgccgttataggtaacaacgttattcgccccaatcaagctagcactcgccttagtaatggtcattgacccattcacataggtaattgcatagtcagatgattgagttgtcccgttagcggcagcagttaaagcatcactataaggtccgccggcattaatacctgaagccaaaccagtaactgtaaaagtatcgccatttttaagaccaacaacacttgctgcagcattagtttgggtattggcgttgtataccaagttattagtagtcgcaccagtgatagtcagcggtgctggcgtaatagttagattggcattaataacctgaacagagctaaagtgcccttgtgagttagtaaggcctgaattagtagctgttactgcattttggtacaaaccaacgtgtgaggtaatcggcactccagtaatgctcggattgaccgtaatactgccacccagaccatcagaccatgtgccgccaccatcgcttgatgtcagagtgtgtaccagtacggtatttccagagggggtcgcatactgaactgacactacattaccgttactactagagaagctggtagcacttccataagtagtagttgcattattcatcgtaataacggctgnaccagcaggactgattgttaaagtccccggcaaataagtaattgtgtaatttgtcgatgttgcattaccactcggtgtgattgtgtagggtcctggcgtttcacctgccacgcgngtgttgntaacagtaccagctaccgaggacaaggtatcactacccaataaaccacttacagtattagtaaaggttggatctgacagagtaataaatttttgctcattgttggcagcaattaccaagctagccttggtgatagttaggctaggattatttgatgtgatcacatagtttccagcatctacaccagatttggtntagcttgcgttatatgttccaacgcttacccctgatgcgccaccggcaacagttacgttatcacccgcaataatcccactgacagttggtgtagctaatgattgagttgctgcatcataggtagtcgatgctgatgtcccagtaatcgtaatggttgctggcgtaatgttggcagtagtggtgacatttaaaccgccagagagctgataatttgagctggcagttcctagaattgccacaccagaaatattgacagtcttagttgtacccacatttttatcaacaaagttgccaactaaatttccagtattgatagatacactattttgatcggcaggtaatacaccactaaacgaaatagtaccaacattcaaggtagctgccgtagttgcgtcatataccttgttattagcagtaatgccactaaccgtaatgattgccggggtaatcgttaaggagccattagaagtagtgatcttatagtcgctagcattgcccgaggtaaaggcataacttaaattatcgctgtaagttcctgcgttatacccaccagcgcgcccagtcgttgatagtgcatcactacccaagagaccggttaccgttggcaaagaatttgtctgtgttgttgcgttataggctgtactgatatttgcgccaacaatacttaagttagcttgtgtaatggtcatactgccattgacataattgatagcgtaatttgacaaaccactaccttgtgcgccacttaaagcatcagcatatacaccaacgtgtgtgccagaactttgtccaagtacagatgttactgaagcgccatctgccaacaacccactagtagtnaatgctgtggagttggtttgtgcagatccactataaacactagtagttgtgctaccagtaatcgttaatggtgctggtgtgatattggctgttgctgtaataccagtagtggctagctgatagtcgctagcagatgccccgccaatagcaacgccactaaagctcactgtcttcgcnnngcctacnttngcnttggcaaagctagcactgccataggtaatcgataaactatcaccagggaataagtttgctgcattaatggcgcctgttgctgcagtagtagtgtcatacaccctgtcattagccgtggctactaaagacgggctattagcagccccattgggcccaatgatgtaaggggtaatggtcaaagcccggtttacatatgcaatggtgtagtttgataagccagtaccttgagcattggtgaggacatcggcatacgtaccgacgtgtttaccactaccctgacctgttactgaagtaaccgtatctgaacctaataaaccactagttgtaaaggtcgttgcattagtttgggttgcaccgttatatacggtactggtattaacaccggtaattgtcaggctagctggcgtaatcgttaatgagccgttggtgtaggagaantnntagttagncnnancngnnccngctgnnnnnnatngagannnnnnannannancancnttnnnnnnggnnnnnnnnnntncnannnnantnncannancannantnannnnncnnnnngnngnannngnnnnantttgantngcgccnntntanncnnnantantngnngcnncngnnanagtnannnnnnnnnnnntaancnnnaanncnccnntnnnannnnnannnnnatngntnnnannnctnnngnnnnnanntnnnntnnnnacnnnnnnancnnnnnnngtcnnnannnnnnngncncnancntnannantnnntgnnncnntnnnan

SEQ ID NO: 1519 - DNA, 4000 bp, Escherichia coli
  misc_feature (5)..(5): n is a, c, g, or t
  misc_feature (25)..(25): n is a, c, g, or t
  misc_feature (34)..(34): n is a, c, g, or t
  misc_feature (85)..(85): n is a, c, g, or t
  misc_feature (88)..(88): n is a, c, g, or t
  misc_feature (91)..(91): n is a, c, g, or t
  misc_feature (97)..(97): n is a, c, g, or t
  misc_feature (124)..(124): n is a, c, g, or t
  misc_feature (133)..(133): n is a, c, g, or t
  misc_feature (139)..(139): n is a, c, g, or t
  misc_feature (144)..(144): n is a, c, g, or t
  misc_feature (146)..(146): n is a, c, g, or t
  misc_feature (151)..(151): n is a, c, g, or t
  misc_feature (160)..(160): n is a, c, g, or t
  misc_feature (163)..(163): n is a, c, g, or t
  misc_feature (187)..(187): n is a, c, g, or t
  misc_feature (220)..(220): n is a, c, g, or t
  misc_feature (232)..(232): n is a, c, g, or t
  misc_feature (235)..(235): n is a, c, g, or t
  misc_feature (242)..(242): n is a, c, g, or t
  misc_feature (247)..(247): n is a, c, g, or t
  misc_feature (301)..(301): n is a, c, g, or t
  misc_feature (307)..(308): n is a, c, g, or t
  misc_feature (319)..(319): n is a, c, g, or t
  misc_feature (322)..(322): n is a, c, g, or t
  misc_feature (328)..(328): n is a, c, g, or t
  misc_feature (343)..(343): n is a, c, g, or t
  misc_feature (355)..(355): n is a, c, g, or t
  misc_feature (358)..(358): n is a, c, g, or t
  misc_feature (361)..(361): n is a, c, g, or t
  misc_feature (367)..(367): n is a, c, g, or t
  misc_feature (385)..(385): n is a, c, g, or t
  misc_feature (409)..(409): n is a, c, g, or t
  misc_feature (418)..(418): n is a, c, g, or t
  misc_feature (424)..(424): n is a, c, g, or t
  misc_feature (445)..(445): n is a, c, g, or t
  misc_feature (469)..(469): n is a, c, g, or t
  misc_feature (480)..(481): n is a, c, g, or t
  misc_feature (483)..(483): n is a, c, g, or t
  misc_feature (487)..(488): n is a, c, g, or t
  misc_feature (492)..(493): n is a, c, g, or t
  misc_feature (495)..(506): n is a, c, g, or t
  misc_feature (509)..(514): n is a, c, g, or t
  misc_feature (516)..(516): n is a, c, g, or t
  misc_feature (518)..(518): n is a, c, g, or t
  misc_feature (522)..(527): n is a, c, g, or t
  misc_feature (530)..(540): n is a, c, g, or t
  misc_feature (545)..(546): n is a, c, g, or t
  misc_feature (555)..(556): n is a, c, g, or t
  misc_feature (559)..(559): n is a, c, g, or t
  misc_feature (563)..(563): n is a, c, g, or t
  misc_feature (570)..(571): n is a, c, g, or t
  misc_feature (573)..(575): n is a, c, g, or t
  misc_feature (577)..(577): n is a, c, g, or t
  misc_feature (579)..(580): n is a, c, g, or t
  misc_feature (588)..(588): n is a, c, g, or t
  misc_feature (590)..(591): n is a, c, g, or t
  misc_feature (597)..(597): n is a, c, g, or t
  misc_feature (600)..(600): n is a, c, g, or t
  misc_feature (610)..(610): n is a, c, g, or t
  misc_feature (612)..(613): n is a, c, g, or t
  misc_feature (660)..(660): n is a, c, g, or t
  misc_feature (667)..(667): n is a, c, g, or t
  misc_feature (698)..(698): n is a, c, g, or t
  misc_feature (711)..(711): n is a, c, g, or t
  misc_feature (1989)..(1989): n is a, c, g, or t
  misc_feature (2067)..(2067): n is a, c, g, or t
  misc_feature (2263)..(2263): n is a, c, g, or t
  misc_feature (2359)..(2359): n is a, c, g, or t
  misc_feature (2509)..(2509): n is a, c, g, or t
  misc_feature (2560)..(2560): n is a, c, g, or t
  misc_feature (2635)..(2635): n is a, c, g, or t
  misc_feature (2656)..(2656): n is a, c, g, or t
  misc_feature (2704)..(2704): n is a, c, g, or t
  misc_feature (2710)..(2710): n is a, c, g, or t
  misc_feature (2875)..(2875): n is a, c, g, or t
  misc_feature (2911)..(2911): n is a, c, g, or t
  misc_feature (2928)..(2928): n is a, c, g, or t
  misc_feature (2965)..(2965): n is a, c, g, or t
  misc_feature (2983)..(2983): n is a, c, g, or t
  misc_feature (2986)..(2986): n is a, c, g, or t
  misc_feature (3054)..(3054): n is a, c, g, or t
  misc_feature (3100)..(3100): n is a, c, g, or t
  misc_feature (3127)..(3127): n is a, c, g, or t
  misc_feature (3192)..(3192): n is a, c, g, or t
  misc_feature (3269)..(3269): n is a, c, g, or t
  misc_feature (3272)..(3272): n is a, c, g, or t
  misc_feature (3296)..(3296): n is a, c, g, or t
  misc_feature (3389)..(3389): n is a, c, g, or t
  misc_feature (3555)..(3555): n is a, c, g, or t
  misc_feature (3587)..(3587): n is a, c, g, or t
  misc_feature (3671)..(3671): n is a, c, g, or t
  misc_feature (3683)..(3683): n is a, c, g, or t
  misc_feature (3692)..(3692): n is a, c, g, or t
  misc_feature (3719)..(3719): n is a, c, g, or t
  misc_feature (3725)..(3725): n is a, c, g, or t
  misc_feature (3779)..(3779): n is a, c, g, or t
  misc_feature (3809)..(3809): n is a, c, g, or t
  misc_feature (3842)..(3842): n is a, c, g, or t
  misc_feature (3890)..(3890): n is a, c, g, or t
  misc_feature (3935)..(3935): n is a, c, g, or t
  misc_feature (3944)..(3944): n is a, c, g, or t
tcacnttcctttccgtagagaaganggacgttcntgcggttgcggtagaacaggttgtttagaaacttattgttctgcaacaggngtngcnagaacngctcgtgagttcttacaaaattctgangaggattcnttattncgtgnantaaanccagaaaanatnacttctttagatgttagtattgcngctagcaaaggtgacaaacttgcaaaaagagtntatgactttacnggngaaatgntaggngaagcatgtgcagactttgcagctttctcttcacctgaagcttttatcttcttnggtggnntaacaaaagcnggngacttnctaatggaacctttnaaaagaagcttngangancatgtnttgaagatttataagaanaaagcaaaattcttaattagcggnctagaaggntcttcngctgctgtattaggtgcatcngctgtaggatgggatctataattntttaagaatannanattnnaaannannnnnnnnnnnnttnnnnnnantnaaannnnnntannnnnnnnnnnttttnnttaaccttnntcntttnaatccanncnnntntnnaataaagnannccttantanggattggatntnnaaatattttaatgttgtttctttttgagtaggagataggttacaaanccaatanagacaaataagaaacctgcaataatgcaaanattcttatatccnctcataaattgaaaaacactcaatatttgtagcagtacccctatatatataaggtgtaaaccaaaagcattatatatatattctttcattcgcctataataatcttttacgaagcacaaaaatataactatcacttgggatagacaagaattttcaatctattaatttgttaattaaagataattcttcgattattataaaacaccatgtgcgatattcataaaaaagtactaactttgcacctcgaattaataaacatatttttcaataaatttaaagtagtatgaatcattacgaaaccgttttcattttaactcccgttttatctgatgaacagatgaaggaagcggtcgctaagttcaaaaagcttcttaccgataatggtgctgagattttgaacgaagaggcatggggattaaagaagatggcttatgctatcgacaaaaaatctacaggtttttattgcttgttagagttcaaggctgagcctacaattgttaatactctcgaaattggctatcgtcgcgacgagagaattatccgtttcattactgttaagcttgataagtatgcagcagagtatgctatcaagagaaagaataaatacgctaaaaaacaggaggcttaatcatggcagaacaacaaagcgaaattcgttatttaaccccaccatcagttgacaataagaaaaagaaatactgtcgcttcaaaaagagtggtattaagtatattgactataaggatcctgaattcttgaagaagttcttaaacgaacaaggaaagatcttacctcgtagaattacaggtacatctttgaaattccaaagacgtgttgcgcaagcagttaagcgtgctcgccaaattgccttgcttccttatgtaacagatttaatgaaataaaaaggaggtaacgaaatggaaattatacttagagaagatattataggtttaggctataagaatgatatcgtaaacgtaaaatcaggttatggccgtaactaccttatcccaacaggaaaagctatcattgcttcagaatcagcaaagaaagtattagcagaaaacctaagacaacaagctcacaaacttgcagctattaaagctaacgcagaaaagagagctgctgaattagaaggtgttgagctaactatcgaagttaaagtatctgcaacaggtgctacttatggttctgtaaacgctgcaatcgtagcagaagaattaaagaaaaaaggtttcgaaattgaccgtaagatcatcacaatgagtgatatcaagcangtaggtgattttgaagcaactgttcacttccacaaagaagttgaagcaatcgtaccagttaaggttgtagctgagacngcaaaggaagagaaagaaacagctgagaaataataatttattgtaacaattataactatacagttgtagtaatataaaatatcccgataactttatgtttttcgggatattttattcttgtaaatataacataaatattcttttatctaaacgaatttaagaaaaagatgttatatttgtatctccaaatattatnataaataaatagaacatgaaagcatttgtttttccaggtcaaggagctcaatacgtaggaatgggtaaagagttatacaactcaagtgcccttgcnaaagaactattcgacaaagcgaatgaaattcttggcttcaatattacagaaataatgtttaatggtacagatgaggaacttaaacaaaccaaagtaactcagccagccgtattcttagacagcgttataactgcattatctctagaaganaagctagatgcagaaatggttgcaggtcactctttaggtgagttctctgcnttagttgttgcaggagtactttcttttgaagatggtcttagacttgttgcagcacgtgctaacgcaatgcaaaangcttgcgaagctacaaaaggnaccatggctgcaatcattggacttgcagatgagaaggtagaagaaatntgttcntctgtatctacaccagaaaatatcgtagttgcagcaaactataactgtccaggtcaattagttatttctggtagtatcgacgcaatcaatactgcatgtgagaagatgaaagaagcaggagctaagagagcacttcctttacctgtatctggtgcattccattcnccattaatgcaaccagcaaaagatgaacttcaagcngctattgagagtgtaantttcaatacacctcgtatccctgtttatcaaaacgtngatgcattagcacacacngangcagaagaaattaagaaaaaccttgttgctcaattaacaggagcagtacgttggaccgcaactatcantaatatgatagcaaacggagctaatgattttacagaatgtggaccnggaaaagcactacaaggaatgattggncgcatcgataagactgttgctgcccacggagtagaataatataaatcctaaaagattagaagacnatataaaggtgaataagaaattaattatttatcaagtctttactcgccttttcggtaatcgcaatcacaataatatngtnaatggttcgattaccgaaaatggngttggtaaaatgaatgactttaatacatcaaccctgaaacgcattaaaagcatgggatgtacccatgtttggtataccggaataattagacangcaagcacaacttcatacgaagagtatggaattcctacacaacatccagcaattgtaaaaggtaaggcaggttctccatatgcgattgtcgattactatgatgtagatccagatttagcagaaaacgttccagacagaatgcaagagttcgaagctcttctttctngaacaagtaaggttggtttaaaaaccattatngattttgtccccaaccatgtagcacgccaatacaaatcaacaacaaaaccagaaggagtcgaagatttaggtgaaaacgatganaccaccaagaanttcgatgcnaacaataacttttattattgtaatggncttccntttgctccatcttttagtttgtattctgaagctacagacacaacttattttgancaaccagcaaaagctacgggcaatgatcgntttgataatgcaccaaataaagatgattggtangaaaccattaaacttaattatggtgtagattattgcaatccatgtggngaacgtactgaacattttgatcctattccttctacttggaagaanatgaccganatacttctattctgggcaagaaaaggagttgatggatttagatgtgatatggcaga

SEQ ID NO: 1520 - DNA, 4000 bp, Escherichia coli
  misc_feature (3)..(3): n is a, c, g, or t
  misc_feature (5)..(9): n is a, c, g, or t
  misc_feature (11)..(17): n is a, c, g, or t
  misc_feature (19)..(23): n is a, c, g, or t
  misc_feature (25)..(27): n is a, c, g, or t
  misc_feature (29)..(30): n is a, c, g, or t
  misc_feature (32)..(32): n is a, c, g, or t
  misc_feature (34)..(35): n is a, c, g, or t
  misc_feature (37)..(40): n is a, c, g, or t
  misc_feature (42)..(45): n is a, c, g, or t
  misc_feature (47)..(47): n is a, c, g, or t
  misc_feature (49)..(50): n is a, c, g, or t
  misc_feature (52)..(60): n is a, c, g, or t
  misc_feature (63)..(63): n is a, c, g, or t
  misc_feature (68)..(69): n is a, c, g, or t
  misc_feature (71)..(71): n is a, c, g, or t
  misc_feature (73)..(77): n is a, c, g, or t
  misc_feature (79)..(80): n is a, c, g, or t
  misc_feature (82)..(83): n is a, c, g, or t
  misc_feature (85)..(85): n is a, c, g, or t
  misc_feature (87)..(89): n is a, c, g, or t
  misc_feature (91)..(92): n is a, c, g, or t
  misc_feature (94)..(95): n is a, c, g, or t
  misc_feature (97)..(100): n is a, c, g, or t
  misc_feature (103)..(109): n is a, c, g, or t
  misc_feature (111)..(112): n is a, c, g, or t
  misc_feature (114)..(114): n is a, c, g, or t
  misc_feature (116)..(129): n is a, c, g, or t
  misc_feature (133)..(134): n is a, c, g, or t
  misc_feature (136)..(136): n is a, c, g, or t
  misc_feature (138)..(140): n is a, c, g, or t
  misc_feature (143)..(154): n is a, c, g, or t
  misc_feature (156)..(158): n is a, c, g, or t
  misc_feature (161)..(166): n is a, c, g, or t
  misc_feature (168)..(173): n is a, c, g, or t
  misc_feature (175)..(176): n is a, c, g, or t
  misc_feature (180)..(180): n is a, c, g, or t
  misc_feature (182)..(184): n is a, c, g, or t
  misc_feature (765)..(765): n is a, c, g, or t
  misc_feature (782)..(782): n is a, c, g, or t
  misc_feature (1014)..(1014): n is a, c, g, or t
  misc_feature (1842)..(1842): n is a, c, g, or t
  misc_feature (1990)..(1990): n is a, c, g, or t
  misc_feature (2158)..(2158): n is a, c, g, or t
  misc_feature (2462)..(2462): n is a, c, g, or t
  misc_feature (2609)..(2609): n is a, c, g, or t
  misc_feature (2696)..(2696): n is a, c, g, or t
agnannnnntnnnnnnnannnnntnnngnngntnntnnnntnnnntntnntnnnnnnnnntgntgatnntntnnnnnannannangnnntnntnntnnnncannnnnnnannantnnnnnnnnnnnnnntatnntngnnnaannnnnnnnnnnngnnnaannnnnnannnnnnannaatnannngttatcgtgtaagtgcaaaaaagaaagcttgtgtaaggtttgaaatatcgccactggcagttgctagattatttacagctgattttgcaacttcgaaatagactgaaccaccaatttccggattttcctttacaatatttgtaaaatcatctaggcttaaaattccatattgtactggcgtagtggaatgaacatgggctgtacgtattgcattatccaaaactagtgagaattctccaattccaaatgctggcgcttctactacgaacacggtagattctgtttctggttctgatgccgggggaggatcagttgtttctaaacgaatgataggtttccttgacgttgcaataccactggcagtttttaccatcatatttttagatacttctacctggccttgaaaaacaagtaccatggtatcgcctgtatccccttcagtgagtagctgttctttgggaccgcactcctgtatttctaccacactggcgatctttgcacacatatctatatgtaccttgctgaaatgattgatcttttgaatttgttctgctgatggattcatactctacctcaatacnagtgcgctgtgtttttnatcaatcttgtaatcatccggaggattaatttcaacaacaacatgctcatcgctggtcaggtttattcccgcaccatccagctgttctttaatcatattccgaataagcgggctgccactttctcccatttgttcatccaggctaaaccctgccttacggatcgcatatccaaccagtaaccagccatatttgaatttataaaaagcagatatcttattatgggtttgcccntttaatgtcctggggatttttacctcctgaagacctttatcatcttcttccttcaaaataagatcatcaaaaaattgcggtacgcccggatctgtaacgtgttttgccaacagatgcggcacatgttcatccggaataacaatctcatttgcattggcgcgttgaaggtgggatacattttctacatctagaacatgcgcaacaacattgcaagattcagaaattgactttgcagtgagacaggtcaaaacagttttatcttcatcgggctcttcatggggcagtaatccggaattatccggcagaatcatgaatgttcctgctttttccaaaaacgcttttcttaaaacagactcgtgagtgaagttttctgatatatgggtaatatccaatctttcatagcctgtcatggcccgttgtataatatctcgatccgttacattcaccaagattactacgtctgtagaatcttcatttgcatcgataagtttcaaaatggatggaaccgttgcgttccatcctgcgatgaccaggtggtcattaaatttgctctcgtccaaggtatcatctccttttaatcgttcagcaaccaatacggatgctacagccccgccgagtaaggtgacgacgccaaagtttaataacatgattattattgtgagaaatttcccaaggtgggttatggggcttacatcaccatatcccacggtagtaaatgttacgactgaccaccagaatgtatgaaaaaaagtgtccagccagttaggttctgttttaccaaatataaaacttccatccacatcttcagccaaattactattgaacatntcgtactcaagaattgtcagggcagttgtggatatcaggatcattaccatggcccatgctgcatatctgaccagatcattttctgtgtataaagattttattttatgtacaacatccaataatggatgagtttcatcaccctcttttncactctcctcatcttcctctaatacagtacccaaggcttcaatctcaggaatcttattcagtttatcaaagagatccttgtttgcaccaataacttcatccaattctgaagtggaaacttctggttcttgtatctggtctagtggcgggtcgttattcattattattntttatttctctcgttctaaattgaacggatgatgataaaaatactatcgaattattttagaataagcaaacatgaagtttaggcatgatattcctgtattgattgtacctgtattggtttcgccgctaaacgaatagccctcacagctgcgcttgcccctgataatgtagtaatcgccacaattcctttttggatacaggcacggcctattgattcttcgtcgtatctcgcctgggcacccattggcgtattgattactaggtttatttcaccatttttaattccatccacaacattggggcgnccctctccaactttaaacacagaagttacttgtaggccgttccttttcagctgccttgccgttcccgaagttgctaccagtttaaatccaatttcaatcatatccctggcaatgggaatcacatccagtttatctgcgttgttgacngaaataaatactatacctgtactgggaataatattgcctgcactgatggatgcccgtcgaaacgattctcctaatgttttagaaatncccatgacttctccggtggatttcatttccggactcaagaagatcgactcttcaggaaatttattaaacggcaatacggcttcttttacggccacataggggtttctatcccagggttttagagcaaattgagatagggtggctccagttgctaattgtgctgcaatccgtgctaagggtgtattcgttgttttacttacaaagggaattgttcgactggctcttgggtttacttccaagacgtagacctgaccatccttatatgcgaattgcaggttaatcaggccaacaacatttaattttagagccagagcttctgtaatccggattatttcttccaatgcctctgtcgtgattcgatagggaggtaaaacacaggcagaatcgccagaatgaatccctgcttcctcaatatgctgcataacagcaccaatatgaactgattttccatcacataacgcatcaacatcaaactcaaaagcatcttctaagaattcatcaatcaagattggatgtccttctgtaacatctgcggagcgagcgatataatcaatcaattgtttcttagaatacacaatttccatggcccgcccgcccagaacataactgggacgagccaaaacagggaatcctatcttttctgccacagtaataacctcatccagagtgcgccctgtcccatactgtggacagacaacatctaatttctgaaggattgctccaaacttttcacgatcttccgcaaggtcaatattttcaggagaggtgccaatgattggaactcctgaattctttagcgcatttgctattttaagcggtgtttgtccaccaaattgaactaacacaccatcaggattttcaaattcaacaatatttaatacatcttcgaacgtcactggctcaaaataaagcctgtctaccaaatcaaaatctgtgcttactgtttctggattacaattgaccataatggttttaaagttctgatctttcaagccaaatacagcttggacacaacaataatcaaattcaatgccctgaccaatgcgattaggcccgctgccgagaatgatcacttttttaccttccagaggttcaatttcattctctttatcataagtggaataacaatagggtgtttgtgcaacaaattccgctgcacaggtgtccacaactttatatgcaggaaaaacagctgttctttttcgcatctctcgaatttcaagttctgtcttatccatcatgcgtcctatctgacagtcagagaatccattatgttttaattcatacaatgaattctgatctgt

SEQ ID NO: 1521 - DNA, 4000 bp, Escherichia coli
  misc_feature (3)..(8): n is a, c, g, or t
  misc_feature (10)..(10): n is a, c, g, or t
  misc_feature (12)..(24): n is a, c, g, or t
  misc_feature (27)..(29): n is a, c, g, or t
  misc_feature (31)..(32): n is a, c, g, or t
  misc_feature (35)..(37): n is a, c, g, or t
  misc_feature (40)..(45): n is a, c, g, or t
  misc_feature (47)..(54): n is a, c, g, or t
  misc_feature (56)..(57): n is a, c, g, or t
  misc_feature (59)..(60): n is a, c, g, or t
  misc_feature (63)..(64): n is a, c, g, or t
  misc_feature (66)..(66): n is a, c, g, or t
  misc_feature (69)..(70): n is a, c, g, or t
  misc_feature (72)..(75): n is a, c, g, or t
  misc_feature (78)..(80): n is a, c, g, or t
  misc_feature (83)..(85): n is a, c, g, or t
  misc_feature (88)..(88): n is a, c, g, or t
  misc_feature (90)..(106): n is a, c, g, or t
  misc_feature (108)..(110): n is a, c, g, or t
  misc_feature (114)..(114): n is a, c, g, or t
  misc_feature (116)..(120): n is a, c, g, or t
  misc_feature (122)..(123): n is a, c, g, or t
  misc_feature (125)..(126): n is a, c, g, or t
  misc_feature (129)..(129): n is a, c, g, or t
  misc_feature (132)..(133): n is a, c, g, or t
  misc_feature (135)..(135): n is a, c, g, or t
  misc_feature (137)..(138): n is a, c, g, or t
  misc_feature (140)..(142): n is a, c, g, or t
  misc_feature (145)..(145): n is a, c, g, or t
  misc_feature (147)..(150): n is a, c, g, or t
  misc_feature (152)..(154): n is a, c, g, or t
  misc_feature (156)..(156): n is a, c, g, or t
  misc_feature (158)..(158): n is a, c, g, or t
  misc_feature (160)..(160): n is a, c, g, or t
  misc_feature (162)..(163): n is a, c, g, or t
  misc_feature (166)..(172): n is a, c, g, or t
  misc_feature (175)..(175): n is a, c, g, or t
  misc_feature (177)..(183): n is a, c, g, or t
  misc_feature (186)..(187): n is a, c, g, or t
  misc_feature (190)..(190): n is a, c, g, or t
  misc_feature (194)..(194): n is a, c, g, or t
  misc_feature (196)..(197): n is a, c, g, or t
  misc_feature (199)..(199): n is a, c, g, or t
  misc_feature (201)..(206): n is a, c, g, or t
  misc_feature (208)..(210): n is a, c, g, or t
  misc_feature (212)..(214): n is a, c, g, or t
  misc_feature (216)..(216): n is a, c, g, or t
  misc_feature (218)..(222): n is a, c, g, or t
  misc_feature (227)..(229): n is a, c, g, or t
  misc_feature (231)..(234): n is a, c, g, or t
  misc_feature (237)..(241): n is a, c, g, or t
  misc_feature (244)..(244): n is a, c, g, or t
  misc_feature (246)..(251): n is a, c, g, or t
  misc_feature (253)..(253): n is a, c, g, or t
  misc_feature (255)..(261): n is a, c, g, or t
  misc_feature (264)..(264): n is a, c, g, or t
  misc_feature (268)..(269): n is a, c, g, or t
  misc_feature (271)..(271): n is a, c, g, or t
  misc_feature (273)..(276): n is a, c, g, or t
  misc_feature (278)..(283): n is a, c, g, or t
  misc_feature (285)..(288): n is a, c, g, or t
  misc_feature (292)..(292): n is a, c, g, or t
  misc_feature (298)..(298): n is a, c, g, or t
  misc_feature (301)..(311): n is a, c, g, or t
  misc_feature (313)..(313): n is a, c, g, or t
  misc_feature (315)..(316): n is a, c, g, or t
  misc_feature (320)..(321): n is a, c, g, or t
  misc_feature (323)..(325): n is a, c, g, or t
  misc_feature (334)..(339): n is a, c, g, or t
  misc_feature (343)..(343): n is a, c, g, or t
  misc_feature (345)..(345): n is a, c, g, or t
  misc_feature (347)..(347): n is a, c, g, or t
  misc_feature (353)..(355): n is a, c, g, or t
  misc_feature (357)..(358): n is a, c, g, or t
  misc_feature (360)..(360): n is a, c, g, or t
  misc_feature (362)..(363): n is a, c, g, or t
  misc_feature (367)..(368): n is a, c, g, or t
  misc_feature (371)..(371): n is a, c, g, or t
  misc_feature (373)..(374): n is a, c, g, or t
  misc_feature (378)..(378): n is a, c, g, or t
  misc_feature (380)..(381): n is a, c, g, or t
  misc_feature (383)..(383): n is a, c, g, or t
  misc_feature (385)..(385): n is a, c, g, or t
  misc_feature (387)..(389): n is a, c, g, or t
  misc_feature (393)..(393): n is a, c, g, or t
  misc_feature (395)..(395): n is a, c, g, or t
  misc_feature (398)..(401): n is a, c, g, or t
  misc_feature (403)..(403): n is a, c, g, or t
  misc_feature (405)..(405): n is a, c, g, or t
  misc_feature (407)..(407): n is a, c, g, or t
  misc_feature (409)..(411): n is a, c, g, or t
  misc_feature (413)..(413): n is a, c, g, or t
  misc_feature (415)..(417): n is a, c, g, or t
  misc_feature (419)..(425): n is a, c, g, or t
  misc_feature (427)..(427): n is a, c, g, or t
  misc_feature (430)..(432): n is a, c, g, or t
  misc_feature (434)..(434): n is a, c, g, or t
  misc_feature (436)..(443): n is a, c, g, or t
  misc_feature (447)..(449): n is a, c, g, or t
  misc_feature (451)..(456): n is a, c, g, or t
  misc_feature (458)..(458): n is a, c, g, or t
  misc_feature (462)..(464): n is a, c, g, or t
  misc_feature (467)..(467): n is a, c, g, or t
  misc_feature (469)..(471): n is a, c, g, or t
  misc_feature (474)..(475): n is a, c, g, or t
  misc_feature (478)..(483): n is a, c, g, or t
  misc_feature (487)..(487): n is a, c, g, or t
  misc_feature (489)..(489): n is a, c, g, or t
  misc_feature (491)..(494): n is a, c, g, or t
  misc_feature (496)..(499): n is a, c, g, or t
  misc_feature (501)..(501): n is a, c, g, or t
  misc_feature (503)..(506): n is a, c, g, or t
  misc_feature (508)..(511): n is a, c, g, or t
  misc_feature (513)..(513): n is a, c, g, or t
  misc_feature (515)..(518): n is a, c, g, or t
  misc_feature (520)..(522): n is a, c, g, or t
  misc_feature (524)..(524): n is a, c, g, or t
  misc_feature (526)..(527): n is a, c, g, or t
  misc_feature (530)..(531): n is a, c, g, or t
  misc_feature (533)..(536): n is a, c, g, or t
  misc_feature (538)..(538): n is a, c, g, or t
  misc_feature (543)..(551): n is a, c, g, or t
  misc_feature (553)..(558): n is a, c, g, or t
  misc_feature (561)..(561): n is a, c, g, or t
  misc_feature (564)..(566): n is a, c, g, or t
  misc_feature (568)..(569): n is a, c, g, or t
  misc_feature (572)..(573): n is a, c, g, or t
  misc_feature (576)..(576): n is a, c, g, or t
  misc_feature (580)..(580): n is a, c, g, or t
  misc_feature (582)..(584): n is a, c, g, or t
  misc_feature (586)..(586): n is a, c, g, or t
  misc_feature (588)..(588): n is a, c, g, or t
  misc_feature (590)..(595): n is a, c, g, or t
  misc_feature (597)..(597): n is a, c, g, or t
  misc_feature (599)..(600): n is a, c, g, or t
  misc_feature (603)..(603): n is a, c, g, or t
  misc_feature (606)..(606): n is a, c, g, or t
  misc_feature (611)..(611): n is a, c, g, or t
  misc_feature (615)..(615): n is a, c, g, or t
  misc_feature (617)..(618): n is a, c, g, or t
  misc_feature (621)..(623): n is a, c, g, or t
  misc_feature (626)..(626): n is a, c, g, or t
  misc_feature (628)..(644): n is a, c, g, or t
  misc_feature (646)..(647): n is a, c, g, or t
  misc_feature (649)..(650): n is a, c, g, or t
  misc_feature (652)..(652): n is a, c, g, or t
  misc_feature (656)..(659): n is a, c, g, or t
  misc_feature (662)..(664): n is a, c, g, or t
  misc_feature (666)..(667): n is a, c, g, or t
  misc_feature (670)..(670): n is a, c, g, or t
  misc_feature (672)..(672): n is a, c, g, or t
  misc_feature (675)..(686): n is a, c, g, or t
  misc_feature (688)..(689): n is a, c, g, or t
  misc_feature (691)..(691): n is a, c, g, or t
  misc_feature (695)..(696): n is a, c, g, or t
  misc_feature (698)..(699): n is a, c, g, or t
  misc_feature (701)..(701): n is a, c, g, or t
  misc_feature (703)..(705): n is a, c, g, or t
  misc_feature (709)..(712): n is a, c, g, or t
  misc_feature (715)..(715): n is a, c, g, or t
  misc_feature (717)..(717): n is a, c, g, or t
  misc_feature (721)..(733): n is a, c, g, or t
  misc_feature (735)..(735): n is a, c, g, or t
  misc_feature (740)..(742): n is a, c, g, or t
  misc_feature (744)..(744): n is a, c, g, or t
  misc_feature (746)..(746): n is a, c, g, or t
  misc_feature (748)..(752): n is a, c, g, or t
  misc_feature (755)..(757): n is a, c, g, or t
  misc_feature (759)..(760): n is a, c, g, or t
  misc_feature (763)..(767): n is a, c, g, or t
  misc_feature (769)..(769): n is a, c, g, or t
  misc_feature (771)..(775): n is a, c, g, or t
  misc_feature (777)..(777): n is a, c, g, or t
  misc_feature (779)..(779): n is a, c, g, or t
  misc_feature (782)..(787): n is a, c, g, or t
  misc_feature (790)..(791): n is a, c, g, or t
  misc_feature (793)..(796): n is a, c, g, or t
  misc_feature (798)..(799): n is a, c, g, or t
  misc_feature (801)..(804): n is a, c, g, or t
  misc_feature (806)..(809): n is a, c, g, or t
  misc_feature (812)..(812): n is a, c, g, or t
  misc_feature (815)..(815): n is a, c, g, or t
  misc_feature (820)..(822): n is a, c, g, or t
  misc_feature (824)..(824): n is a, c, g, or t
  misc_feature (826)..(832): n is a, c, g, or t
  misc_feature (834)..(835): n is a, c, g, or t
  misc_feature (840)..(845): n is a, c, g, or t
  misc_feature (850)..(850): n is a, c, g, or t
  misc_feature (852)..(856): n is a, c, g, or t
  misc_feature (860)..(860): n is a, c, g, or t
  misc_feature (862)..(863): n is a, c, g, or t
  misc_feature (865)..(865): n is a, c, g, or t
  misc_feature (867)..(871): n is a, c, g, or t
  misc_feature (873)..(875): n is a, c, g, or t
  misc_feature (877)..(877): n is a, c, g, or t
  misc_feature (879)..(881): n is a, c, g, or t
  misc_feature (884)..(887): n is a, c, g, or t
  misc_feature (889)..(891): n is a, c, g, or t
  misc_feature (893)..(894): n is a, c, g, or t
  misc_feature (896)..(897): n is a, c, g, or t
  misc_feature (899)..(903): n is a, c, g, or t
  misc_feature (906)..(906): n is a, c, g, or t
  misc_feature (908)..(908): n is a, c, g, or t
  misc_feature (911)..(914): n is a, c, g, or t
  misc_feature (916)..(917): n is a, c, g, or t
  misc_feature (919)..(924): n is a, c, g, or t
  misc_feature (926)..(929): n is a, c, g, or t
  misc_feature (932)..(937): n is a, c, g, or t
  misc_feature (939)..(945): n is a, c, g, or t
  misc_feature (947)..(949): n is a, c, g, or t
  misc_feature (954)..(956): n is a, c, g, or t
  misc_feature (958)..(959): n is a, c, g, or t
  misc_feature (961)..(961): n is a, c, g, or t
  misc_feature (964)..(964): n is a, c, g, or t
  misc_feature (967)..(974): n is a, c, g, or t
  misc_feature (976)..(979): n is a, c, g, or t
  misc_feature (981)..(987): n is a, c, g, or t
  misc_feature (989)..(990): n is a, c, g, or t
  misc_feature (992)..(992): n is a, c, g, or t
  misc_feature (994)..(999): n is a, c, g, or t
  misc_feature (1001)..(1006): n is a, c, g, or t
  misc_feature (1008)..(1011): n is a, c, g, or t
  misc_feature (1013)..(1014): n is a, c, g, or t
  misc_feature (1017)..(1018): n is a, c, g, or t
  misc_feature (1020)..(1021): n is a, c, g, or t
  misc_feature (1024)..(1029): n is a, c, g, or t
  misc_feature (1031)..(1035): n is a, c, g, or t
  misc_feature (1037)..(1037): n is a, c, g, or t
  misc_feature (1039)..(1039): n is a, c, g, or t
  misc_feature (1041)..(1041): n is a, c, g, or t
  misc_feature (1043)..(1043): n is a, c, g, or t
  misc_feature (1046)..(1049): n is a, c, g, or t
  misc_feature (1051)..(1056): n is a, c, g, or t
  misc_feature (1058)..(1059): n is a, c, g, or t
  misc_feature (1062)..(1063): n is a, c, g, or t
  misc_feature (1067)..(1068): n is a, c, g, or t
  misc_feature (1073)..(1073): n is a, c, g, or t
  misc_feature (1075)..(1075): n is a, c, g, or t
  misc_feature (1077)..(1078): n is a, c, g, or t
  misc_feature (1080)..(1084): n is a, c, g, or t
  misc_feature (1086)..(1086): n is a, c, g, or t
  misc_feature (1089)..(1089): n is a, c, g, or t
  misc_feature (1092)..(1092): n is a, c, g, or t
  misc_feature (1094)..(1094): n is a, c, g, or t
  misc_feature (1096)..(1100): n is a, c, g, or t
  misc_feature (1103)..(1111): n is a, c, g, or t
  misc_feature (1115)..(1115): n is a, c, g, or t
  misc_feature (1211)..(1211): n is a, c, g, or t
  misc_feature (1218)..(1218): n is a, c, g, or t
  misc_feature (1985)..(1985): n is a, c, g, or t
  misc_feature (1988)..(1988): n is a, c, g, or t
  misc_feature (2168)..(2168): n is a, c, g, or t
  misc_feature (2177)..(2177): n is a, c, g, or t
  misc_feature (2331)..(2331): n is a, c, g, or t
  misc_feature (2549)..(2549): n is a, c, g, or t
  misc_feature (2576)..(2576): n is a, c, g, or t
  misc_feature (2597)..(2597): n is a, c, g, or t
  misc_feature (2636)..(2636): n is a, c, g, or t
  misc_feature (2651)..(2651): n is a, c, g, or t
  misc_feature (2708)..(2708): n is a, c, g, or t
  misc_feature (2888)..(2888): n is a, c, g, or t
  misc_feature (3188)..(3188): n is a, c, g, or t
  misc_feature (3191)..(3191): n is a, c, g, or t
  misc_feature (3198)..(3198): n is a, c, g, or t
  misc_feature (3209)..(3209): n is a, c, g, or t
  misc_feature (3332)..(3332): n is a, c, g, or t
  misc_feature (3365)..(3365): n is a, c, g, or t
  misc_feature (3390)..(3390): n is a, c, g, or t
ttnnnnnngngnnnnnnnnnnnnnctnnnanngannnagnnnnnnannnnnnnnanngnnaannantgnngnnnnttnnnttnnnganannnnnnnnnnnnnnnnngnnnaaanannnnnannannttnaanntnanncnnnaanannnntnnnantnanannaannnnnnngancnnnnnnnaanncantaanannanannnnnnannnannnantnnnnnctctnnnannnnttnnnnnaanannnnnngntnnnnnnntanattnngncnnnnannnnnngnnnnatgnttttanttnnnnnnnnnnnanannagtnnannnattctacannnnnnattntntnttattnnncnnantnncttnntgntnnattntnngnantnnntttnanttnnnngnananannngntnnntnnnnnnntntannnantnnnnnnnntttnnnannnnnnanaaannnatntnnnttnnttnnnnnnttgnanannnntnnnnantnnnnannnntntnnnntnnncntnnttnntnnnnanatagnnnnnnnnntnnnnnntanatnnnannaanntanttcntnnnanancnnnnnnananntcnttnttgtntttnannaannnaanannnnnnnnnnnnnnnnnanncnnanaatnnnnttnnnannaantnaannnnnnnnnnnntnntnaaanngnnanannnaatnnnnaananaatnnnnnnnnnnnnnanattannnantngnnnnntcnnncnnttnnnnntntnnnnntnanaannnnnnaannannnntnnannnntnnnnatnatnctttnnncntnnnnnnntnnagatnnnnnnttaanannnnnaaantnnantnnnnntnnnantnnnttnnnntnnncnngnnannnnntcntnagnnnntnngnnnnnnannnncannnnnnannnnnnncnnnttttnnngnnanctnatnnnnnnnntnnnnannnnnnngnntnannnnnntnnnnnncnnnntnnttnncnnttnnnnnntnnnnncntntnanccnnnnannnnnntnnttnnttcnnttttntntnntnnnnncntcntancnannnnnaannnnnnnnntttngtgctacatacatcgtatgtagcgtaaaaattacatttttgctcttagaatcatgcatgctcacacgcaaagaaacttctctatatgcaccaacangctaacnatctataaacaagaaagagaactttgtttccaaaattctctttccttgtagtggtgattccgttgggattcgaacccaagacccacagcttagaaggctgttgctctaatccaactgagctacggaacccctacatataaaacgtgtgcaaaagtaatcttttctattgagatatgcaaatcttttgaaaagtttttctaactttgcaaacatattagaattaaaaagataacaaaatgcaatactttattattgaaaatggtgcacaagcagggcctttctcaccagaagaacttgtcaacacaaagaatatatctgctgaaactttagtttggactgagggactaaaagattggacgcctgcatggcaaattgaggagataagacaagccttagagaatcgtataaacactcaacagactccgccacctgttcccgaagcaatacaaaataatacaaaggaggaaaagccacaaaatgaaaagaaatgtcataaagcatggtggtttattctcgcgacgatatttgtgattttaattatactgatggttagtaacccaaacaaacaagatcataaagaggctattaaaacagaagttacaacggctatcaataaattggctgataaggacaatgacgaagatgacctcctcacaatgggagttaaaacgctaatgcgcttatttgctggcacaactgttgatgtaacactcgatcagattcttaattatcacaattatcttatttattcttcaacagatgtcacnttngatggagagcaacacaaggtttcttatggtattcttggccatgtattcacattcaacgcagatgatgtggtaaggagttatgaagactatagcaagacaacgaatgaagcttcttcaaccgacaatgaagaacaaacaaccaataatattgatagtttaaagagcaatattgataaaacngtaagcaangaagctggaaaactcgtagataaagttagtaagaaggttgaggataaattaaacaaagagcttgacagcaaacttgatgaggtttctgatagtgcagagaatgttatcgacaaaattatcaaggctttaggactttaatctttcaaatataatnggaaaagaatgattgacagttctgcttttcaaggtaagaaagcaacatattacacactgggttgtaaactcaatttttcagagacatctacctttggcaagatgttatctgatatgggagtagtcactgtagacaagggcgaaaaggctgatatttgtcttatcaatacgtgtagcgtcacagaagtggctgaccataaatgcaggcaggccatccanagaatggcacgtgagaatccaggtgcnttcattattgtgacaggttgntatgcccagcttgaatctgagaaagtaagtaagattccnggtgtagatctcgtnttaggttcaaacgagaaagcaaatctcattcaatatctaaacgaagcctttacaaanagggaaacaggcgaaacacttcatcaattccattctgtaaagacaaaagacatcaagacttttcaagcttcatgctcgaagggtaatcgcactcggtatttcttgaaagtacaagatggatgcaactatttttgcacttattgtactattccctatgcgcgtggattctcaagaaatccnacgatttcatcgctaattaaacaggccgaagaagctgcagctgagggaggtaaagaaattgttttaactggtgtcaacataggtgatttcggagagaccacgcatgaaagatttatagatttagtaaaagccttagacaaggttgaaggcatcaaacgattccgaatcagtagtttggaaccagatttaattgatgacgagttaattgctttttgcgcagaaagtcgggctttcatgcctcatttccacattccattgcaaagtggaagtgataccgttttgaaactgatgcacaggcgntangatacanctttgtttgcncataaaataaaacttattaaagaattgatgcctgatgcctttattggtgtagatgtcatggttggtagtagaggtgaaaaacctgaatacttcgaagaatgttataacttcttagaacaactncccatcacacaattgcatgtcttcccttatagngaacgtccaggaactacagcattancaattccttacgttgtaaatgagaaagataagaaactacgttcaaaacgcttgttagaattaagcgataaaaagacccagctcttttatcagaagtttattggctcagaacgagaagttttgtttgaaaaggcaccacgcggtaaagctatgcatgggtttacagacaactatatccgtgttgaacttccagcatcacttgcaaaggaagagtatgacaacgaacttatacgcgttaagttgggtgacttcaatcacgacaaatccgctcttaaagtagaacttatttagacatgtaagcatgaaacttgcaatagtgattttaaattggaatgggaaaaagatgttagaacaatatctgccaagtgtaatcaaatactcttctaactatgcagatatatttgttgcagataatgcctctacagatgattccataaaaatattggaaagcaaattccctgaaataaaaatcattgcattaaacaagaacttcggttttgcggaaggttataatcaagcattaaaagaaattgaagcagaatactttcttttattaaattcggatgttagggtgaccgaaagttggcttgttccacttatagattatatgg

SEQ ID NO: 1522 - DNA, 4000 bp, Escherichia coli
  misc_feature (2)..(5): n is a, c, g, or t
  misc_feature (7)..(10): n is a, c, g, or t
  misc_feature (13)..(18): n is a, c, g, or t
  misc_feature (20)..(21): n is a, c, g, or t
  misc_feature (23)..(26): n is a, c, g, or t
  misc_feature (29)..(32): n is a, c, g, or t
  misc_feature (34)..(36): n is a, c, g, or t
  misc_feature (38)..(38): n is a, c, g, or t
  misc_feature (40)..(40): n is a, c, g, or t
  misc_feature (42)..(47): n is a, c, g, or t
  misc_feature (50)..(51): n is a, c, g, or t
  misc_feature (54)..(57): n is a, c, g, or t
  misc_feature (59)..(60): n is a, c, g, or t
  misc_feature (62)..(67): n is a, c, g, or t
  misc_feature (70)..(70): n is a, c, g, or t
  misc_feature (72)..(72): n is a, c, g, or t
  misc_feature (74)..(74): n is a, c, g, or t
  misc_feature (77)..(77): n is a, c, g, or t
  misc_feature (79)..(79): n is a, c, g, or t
  misc_feature (82)..(82): n is a, c, g, or t
  misc_feature (86)..(86): n is a, c, g, or t
  misc_feature (88)..(89): n is a, c, g, or t
  misc_feature (91)..(92): n is a, c, g, or t
  misc_feature (94)..(96): n is a, c, g, or t
  misc_feature (98)..(98): n is a, c, g, or t
  misc_feature (100)..(100): n is a, c, g, or t
  misc_feature (104)..(104): n is a, c, g, or t
  misc_feature (106)..(106): n is a, c, g, or t
  misc_feature (109)..(110): n is a, c, g, or t
  misc_feature (112)..(113): n is a, c, g, or t
  misc_feature (115)..(119): n is a, c, g, or t
  misc_feature (121)..(122): n is a, c, g, or t
  misc_feature (124)..(128): n is a, c, g, or t
  misc_feature (130)..(132): n is a, c, g, or t
  misc_feature (134)..(134): n is a, c, g, or t
  misc_feature (136)..(155): n is a, c, g, or t
  misc_feature (157)..(161): n is a, c, g, or t
  misc_feature (163)..(178): n is a, c, g, or t
  misc_feature (180)..(180): n is a, c, g, or t
  misc_feature (182)..(185): n is a, c, g, or t
  misc_feature (187)..(189): n is a, c, g, or t
  misc_feature (191)..(193): n is a, c, g, or t
  misc_feature (195)..(197): n is a, c, g, or t
  misc_feature (199)..(203): n is a, c, g, or t
  misc_feature (206)..(207): n is a, c, g, or t
  misc_feature (209)..(210): n is a, c, g, or t
  misc_feature (212)..(212): n is a, c, g, or t
  misc_feature (214)..(215): n is a, c, g, or t
  misc_feature (218)..(218): n is a, c, g, or t
  misc_feature (221)..(221): n is a, c, g, or t
  misc_feature (223)..(226): n is a, c, g, or t
  misc_feature (229)..(240): n is a, c, g, or t
  misc_feature (242)..(243): n is a, c, g, or t
  misc_feature (245)..(246): n is a, c, g, or t
  misc_feature (248)..(248): n is a, c, g, or t
  misc_feature (250)..(251): n is a, c, g, or t
  misc_feature (254)..(255): n is a, c, g, or t
  misc_feature (257)..(263): n is a, c, g, or t
  misc_feature (266)..(267): n is a, c, g, or t
  misc_feature (270)..(272): n is a, c, g, or t
  misc_feature (274)..(275): n is a, c, g, or t
  misc_feature (277)..(277): n is a, c, g, or t
  misc_feature (279)..(281): n is a, c, g, or t
  misc_feature (284)..(284): n is a, c, g, or t
  misc_feature (286)..(287): n is a, c, g, or t
  misc_feature (289)..(290): n is a, c, g, or t
  misc_feature (293)..(299): n is a, c, g, or t
  misc_feature (305)..(306): n is a, c, g, or t
  misc_feature (308)..(308): n is a, c, g, or t
  misc_feature (310)..(314): n is a, c, g, or t
  misc_feature (318)..(319): n is a, c, g, or t
  misc_feature (322)..(349): n is a, c, g, or t
  misc_feature (352)..(355): n is a, c, g, or t
  misc_feature (357)..(357): n is a, c, g, or t
  misc_feature (360)..(361): n is a, c, g, or t
  misc_feature (363)..(364): n is a, c, g, or t
  misc_feature (366)..(366): n is a, c, g, or t
  misc_feature (372)..(379): n is a, c, g, or t
  misc_feature (381)..(384): n is a, c, g, or t
  misc_feature (386)..(392): n is a, c, g, or t
  misc_feature (396)..(401): n is a, c, g, or t
  misc_feature (404)..(404): n is a, c, g, or t
  misc_feature (406)..(407): n is a, c, g, or t
  misc_feature (409)..(410): n is a, c, g, or t
  misc_feature (413)..(414): n is a, c, g, or t
  misc_feature (417)..(421): n is a, c, g, or t
  misc_feature (423)..(423): n is a, c, g, or t
  misc_feature (426)..(428): n is a, c, g, or t
  misc_feature (431)..(452): n is a, c, g, or t
  misc_feature (455)..(455): n is a, c, g, or t
  misc_feature (457)..(465): n is a, c, g, or t
  misc_feature (467)..(467): n is a, c, g, or t
  misc_feature (472)..(476): n is a, c, g, or t
  misc_feature (479)..(480): n is a, c, g, or t
  misc_feature (482)..(485): n is a, c, g, or t
  misc_feature (487)..(487): n is a, c, g, or t
  misc_feature (491)..(492): n is a, c, g, or t
  misc_feature (494)..(497): n is a, c, g, or t
  misc_feature (500)..(500): n is a, c, g, or t
  misc_feature (503)..(506): n is a, c, g, or t
  misc_feature (508)..(510): n is a, c, g, or t
  misc_feature (512)..(513): n is a, c, g, or t
  misc_feature (515)..(517): n is a, c, g, or t
  misc_feature (520)..(524): n is a, c, g, or t
  misc_feature (526)..(529): n is a, c, g, or t
  misc_feature (531)..(532): n is a, c, g, or t
  misc_feature (534)..(534): n is a, c, g, or t
  misc_feature (536)..(537): n is a, c, g, or t
  misc_feature (539)..(548): n is a, c, g, or t
  misc_feature (551)..(555): n is a, c, g, or t
  misc_feature (557)..(560): n is a, c, g, or t
  misc_feature (562)..(564): n is a, c, g, or t
  misc_feature (567)..(567): n is a, c, g, or t
  misc_feature (569)..(573): n is a, c, g, or t
  misc_feature (575)..(576): n is a, c, g, or t
  misc_feature (578)..(580): n is a, c, g, or t
  misc_feature (582)..(582): n is a, c, g, or t
  misc_feature (584)..(584): n is a, c, g, or t
  misc_feature (586)..(588): n is a, c, g, or t
  misc_feature (590)..(593): n is a, c, g, or t
  misc_feature (595)..(597): n is a, c, g, or t
  misc_feature (603)..(608): n is a, c, g, or t
  misc_feature (610)..(612): n is a, c, g, or t
  misc_feature (614)..(615): n is a, c, g, or t
  misc_feature (617)..(621): n is a, c, g, or t
  misc_feature (624)..(626): n is a, c, g, or t
  misc_feature (631)..(633): n is a, c, g, or t
  misc_feature (635)..(641): n is a, c, g, or t
  misc_feature (643)..(643): n is a, c, g, or t
  misc_feature (645)..(646): n is a, c, g, or t
  misc_feature (648)..(648): n is a, c, g, or t
  misc_feature (651)..(655): n is a, c, g, or t
  misc_feature (657)..(659): n is a, c, g, or t
  misc_feature (661)..(661): n is a, c, g, or t
  misc_feature (664)..(664): n is a, c, g, or t
  misc_feature (667)..(667): n is a, c, g, or t
  misc_feature (669)..(669): n is a, c, g, or t
  misc_feature (673)..(673): n is a, c, g, or t
  misc_feature (675)..(675): n is a, c, g, or t
  misc_feature (681)..(681): n is a, c, g, or t
  misc_feature (690)..(691): n is a, c, g, or t
  misc_feature (696)..(700): n is a, c, g, or t
  misc_feature (703)..(703): n is a, c, g, or t
  misc_feature (707)..(707): n is a, c, g, or t
  misc_feature (709)..(709): n is a, c, g, or t
  misc_feature (711)..(711): n is a, c, g, or t
  misc_feature (715)..(716): n is a, c, g, or t
  misc_feature (718)..(718): n is a, c, g, or t
  misc_feature (721)..(721): n is a, c, g, or t
  misc_feature (725)..(726): n is a, c, g, or t
  misc_feature (728)..(728): n is a, c, g, or t
  misc_feature (731)..(731): n is a, c, g, or t
  misc_feature (734)..(735): n is a, c, g, or t
  misc_feature (737)..(738): n is a, c, g, or t
  misc_feature (740)..(740): n is a, c, g, or t
  misc_feature (743)..(743): n is a, c, g, or t
  misc_feature (745)..(745): n is a, c, g, or t
  misc_feature (747)..(747): n is a, c, g, or t
  misc_feature (756)..(756): n is a, c, g, or t
  misc_feature (761)..(763): n is a, c, g, or t
  misc_feature (765)..(767): n is a, c, g, or t
  misc_feature (770)..(770): n is a, c, g, or t
  misc_feature (772)..(772): n is a, c, g, or t
  misc_feature (774)..(774): n is a, c, g, or t
  misc_feature (778)..(780): n is a, c, g, or t
  misc_feature (783)..(784): n is a, c, g, or t
  misc_feature (791)..(791): n is a, c, g, or t
  misc_feature (794)..(794): n is a, c, g, or t
  misc_feature (796)..(799): n is a, c, g, or t
  misc_feature (801)..(801): n is a, c, g, or t
  misc_feature (808)..(812): n is a, c, g, or t
  misc_feature (814)..(814): n is a, c, g, or t
  misc_feature (818)..(818): n is a, c, g, or t
  misc_feature (826)..(826): n is a, c, g, or t
  misc_feature (832)..(832): n is a, c, g, or t
  misc_feature (834)..(834): n is a, c, g, or t
  misc_feature (836)..(836): n is a, c, g, or t
  misc_feature (838)..(838): n is a, c, g, or t
  misc_feature (841)..(842): n is a, c, g, or t
  misc_feature (844)..(845): n is a, c, g, or t
  misc_feature (848)..(848): n is a, c, g, or t
  misc_feature (854)..(855): n is a, c, g, or t
  misc_feature (859)..(859): n is a, c, g, or t
  misc_feature (867)..(867): n is a, c, g, or t
  misc_feature (869)..(870): n is a, c, g, or t
  misc_feature (874)..(876): n is a, c, g, or t
  misc_feature (878)..(883): n is a, c, g, or t
  misc_feature (885)..(885): n is a, c, g, or t
  misc_feature (887)..(887): n is a, c, g, or t
  misc_feature (893)..(893): n is a, c, g, or t
  misc_feature (898)..(899): n is a, c, g, or t
  misc_feature (901)..(902): n is a, c, g, or t
  misc_feature (904)..(904): n is a, c, g, or t
  misc_feature (910)..(912): n is a, c, g, or t
  misc_feature (915)..(915): n is a, c, g, or t
  misc_feature (917)..(917): n is a, c, g, or t
  misc_feature (921)..(922): n is a, c, g, or t
  misc_feature (924)..(924): n is a, c, g, or t
  misc_feature (928)..(928): n is a, c, g, or t
  misc_feature (930)..(930): n is a, c, g, or t
  misc_feature (935)..(935): n is a, c, g, or t
  misc_feature (938)..(938): n is a, c, g, or t
  misc_feature (941)..(941): n is a, c, g, or t
  misc_feature (943)..(943): n is a, c, g, or t
  misc_feature (952)..(952): n is a, c, g, or t
  misc_feature (954)..(954): n is a, c, g, or t
  misc_feature (957)..(960): n is a, c, g, or t
  misc_feature (964)..(964): n is a, c, g, or t
  misc_feature (966)..(966): n is a, c, g, or t
  misc_feature (968)..(974): n is a, c, g, or t
  misc_feature (976)..(977): n is a, c, g, or t
  misc_feature (986)..(987): n is a, c, g, or t
  misc_feature (990)..(990): n is a, c, g, or t
  misc_feature (993)..(993): n is a, c, g, or t
  misc_feature (995)..(995): n is a, c, g, or t
  misc_feature (997)..(998): n is a, c, g, or t
  misc_feature (1002)..(1003): n is a, c, g, or t
  misc_feature (1010)..(1011): n is a, c, g, or t
  misc_feature (1021)..(1022): n is a, c, g, or t
  misc_feature (1029)..(1029): n is a, c, g, or t
  misc_feature (1031)..(1032): n is a, c, g, or t
  misc_feature (1036)..(1036): n is a, c, g, or t
  misc_feature (1038)..(1038): n is a, c, g, or t
  misc_feature (1043)..(1046): n is a, c, g, or t
  misc_feature (1049)..(1049): n is a, c, g, or t
  misc_feature (1051)..(1052): n is a, c, g, or t
  misc_feature (1057)..(1057): n is a, c, g, or t
  misc_feature (1059)..(1061): n is a, c, g, or t
  misc_feature (1063)..(1064): n is a, c, g, or t
  misc_feature (1067)..(1070): n is a, c, g, or t
  misc_feature (1073)..(1075): n is a, c, g, or t
  misc_feature (1079)..(1079): n is a, c, g, or t
  misc_feature (1084)..(1086): n is a, c, g, or t
  misc_feature (1089)..(1091): n is a, c, g, or t
  misc_feature (1300)..(1300): n is a, c, g, or t
  misc_feature (1987)..(1989): n is a, c, g, or t
  misc_feature (2725)..(2725): n is a, c, g, or t
  misc_feature (2975)..(2978): n is a, c, g, or t
  misc_feature (2981)..(2982): n is a, c, g, or t
  misc_feature (2985)..(2985): n is a, c, g, or t
  misc_feature (2989)..(2990): n is a, c, g, or t
  misc_feature (2993)..(2993): n is a, c, g, or t
  misc_feature (2996)..(2996): n is a, c, g, or t
  misc_feature (3000)..(3000): n is a, c, g, or t
  misc_feature (3003)..(3004): n is a, c, g, or t
  misc_feature (3007)..(3007): n is a, c, g, or t
  misc_feature (3009)..(3018): n is a, c, g, or t
  misc_feature (3020)..(3020): n is a, c, g, or t
  misc_feature (3027)..(3027): n is a, c, g, or t
  misc_feature (3029)..(3030): n is a, c, g, or t
  misc_feature (3033)..(3033): n is a, c, g, or t
  misc_feature (3037)..(3037): n is a, c, g, or t
  misc_feature (3043)..(3043): n is a, c, g, or t
  misc_feature (3047)..(3050): n is a, c, g, or t
  misc_feature (3052)..(3058): n is a, c, g, or t
  misc_feature (3061)..(3062): n is a, c, g, or t
  misc_feature (3064)..(3067): n is a, c, g, or t
  misc_feature (3069)..(3071): n is a, c, g, or t
  misc_feature (3073)..(3076): n is a, c, g, or t
  misc_feature (3078)..(3095): n is a, c, g, or t
  misc_feature (3097)..(3099): n is a, c, g, or t
  misc_feature (3101)..(3107): n is a, c, g, or t
  misc_feature (3109)..(3109): n is a, c, g, or t
  misc_feature (3113)..(3114): n is a, c, g, or t
  misc_feature (3116)..(3116): n is a, c, g, or t
  misc_feature (3118)..(3118): n is a, c, g, or t
  misc_feature (3122)..(3122): n is a, c, g, or t
  misc_feature (3125)..(3125): n is a, c, g, or t
  misc_feature (3127)..(3130): n is a, c, g, or t
  misc_feature (3133)..(3134): n is a, c, g, or t
  misc_feature (3136)..(3137): n is a, c, g, or t
  misc_feature (3139)..(3154): n is a, c, g, or t
  misc_feature (3157)..(3157): n is a, c, g, or t
  misc_feature (3159)..(3159): n is a, c, g, or t
  misc_feature (3161)..(3161): n is a, c, g, or t
  misc_feature (3163)..(3172): n is a, c, g, or t
  misc_feature (3175)..(3176): n is a, c, g, or t
  misc_feature (3178)..(3182): n is a, c, g, or t
  misc_feature (3184)..(3185): n is a, c, g, or t
  misc_feature (3187)..(3191): n is a, c, g, or t
  misc_feature (3194)..(3194): n is a, c, g, or t
  misc_feature (3196)..(3196): n is a, c, g, or t
  misc_feature (3198)..(3203): n is a, c, g, or t
  misc_feature (3206)..(3207): n is a, c, g, or t
  misc_feature (3210)..(3216): n is a, c, g, or t
  misc_feature (3218)..(3220): n is a, c, g, or t
  misc_feature (3225)..(3226): n is a, c, g, or t
  misc_feature (3228)..(3230): n is a, c, g, or t
  misc_feature (3233)..(3238): n is a, c, g, or t
  misc_feature (3241)..(3241): n is a, c, g, or t
  misc_feature (3247)..(3252): n is a, c, g, or t
  misc_feature (3254)..(3255): n is a, c, g, or t
  misc_feature (3257)..(3257): n is a, c, g, or t
  misc_feature (3259)..(3264): n is a, c, g, or t
  misc_feature (3266)..(3270): n is a, c, g, or t
  misc_feature (3273)..(3273): n is a, c, g, or t
  misc_feature (3275)..(3276): n is a, c, g, or t
  misc_feature (3278)..(3280): n is a, c, g, or t
  misc_feature (3282)..(3283): n is a, c, g, or t
  misc_feature (3285)..(3285): n is a, c, g, or t
  misc_feature (3287)..(3287): n is a, c, g, or t
  misc_feature (3290)..(3294): n is a, c, g, or t
  misc_feature (3297)..(3297): n is a, c, g, or t
  misc_feature (3299)..(3301): n is a, c, g, or t
  misc_feature (3304)..(3304): n is a, c, g, or t
  misc_feature (3307)..(3307): n is a, c, g, or t
  misc_feature (3312)..(3315): n is a, c, g, or t
  misc_feature (3318)..(3319): n is a, c, g, or t
  misc_feature (3324)..(3324): n is a, c, g, or t
  misc_feature (3326)..(3330): n is a, c, g, or t
  misc_feature (3332)..(3332): n is a, c, g, or t
  misc_feature (3334)..(3335): n is a, c, g, or t
  misc_feature (3337)..(3339): n is a, c, g, or t
  misc_feature (3341)..(3343): n is a, c, g, or t
  misc_feature (3345)..(3345): n is a, c, g, or t
  misc_feature (3347)..(3347): n is a, c, g, or t
  misc_feature (3350)..(3351): n is a, c, g, or t
  misc_feature (3353)..(3362): n is a, c, g, or t
  misc_feature (3364)..(3364): n is a, c, g, or t
  misc_feature (3366)..(3366): n is a, c, g, or t
  misc_feature (3368)..(3372): n is a, c, g, or t
  misc_feature (3375)..(3378): n is a, c, g, or t
  misc_feature (3380)..(3381): n is a, c, g, or t
  misc_feature (3383)..(3384): n is a, c, g, or t
  misc_feature (3387)..(3396): n is a, c, g, or t
  misc_feature (3399)..(3400): n is a, c, g, or t
  misc_feature (3402)..(3403): n is a, c, g, or t
  misc_feature (3405)..(3405): n is a, c, g, or t
  misc_feature (3407)..(3408): n is a, c, g, or t
  misc_feature (3410)..(3411): n is a, c, g, or t
  misc_feature (3413)..(3413): n is a, c, g, or t
  misc_feature (3415)..(3422): n is a, c, g, or t
  misc_feature (3425)..(3426): n is a, c, g, or t
  misc_feature (3428)..(3432): n is a, c, g, or t
  misc_feature (3434)..(3439): n is a, c, g, or t
  misc_feature (3443)..(3444): n is a, c, g, or t
  misc_feature (3446)..(3452): n is a, c, g, or t
  misc_feature (3454)..(3456): n is a, c, g, or t
  misc_feature (3458)..(3458): n is a, c, g, or t
  misc_feature (3460)..(3461): n is a, c, g, or t
  misc_feature (3465)..(3473): n is a, c, g, or t
  misc_feature (3475)..(3475): n is a, c, g, or t
  misc_feature (3480)..(3481): n is a, c, g, or t
  misc_feature (3483)..(3495): n is a, c, g, or t
  misc_feature (3497)..(3501): n is a, c, g, or t
  misc_feature (3503)..(3503): n is a, c, g, or t
  misc_feature (3505)..(3512): n is a, c, g, or t
  misc_feature (3515)..(3516): n is a, c, g, or t
  misc_feature (3519)..(3520): n is a, c, g, or t
  misc_feature (3522)..(3522): n is a, c, g, or t
  misc_feature (3524)..(3528): n is a, c, g, or t
  misc_feature (3531)..(3531): n is a, c, g, or t
  misc_feature (3533)..(3538): n is a, c, g, or t
  misc_feature (3540)..(3541): n is a, c, g, or t
  misc_feature (3543)..(3546): n is a, c, g, or t
  misc_feature (3548)..(3548): n is a, c, g, or t
  misc_feature (3550)..(3551): n is a, c, g, or t
  misc_feature (3554)..(3556): n is a, c, g, or t
  misc_feature (3558)..(3558): n is a, c, g, or t
  misc_feature (3560)..(3566): n is a, c, g, or t
  misc_feature (3568)..(3573): n is a, c, g, or t
  misc_feature (3575)..(3576): n is a, c, g, or t
  misc_feature (3579)..(3581): n is a, c, g, or t
  misc_feature (3583)..(3584): n is a, c, g, or t
  misc_feature (3587)..(3589): n is a, c, g, or t
  misc_feature (3593)..(3599): n is a, c, g, or t
  misc_feature (3601)..(3604): n is a, c, g, or t
  misc_feature (3606)..(3608): n is a, c, g, or t
  misc_feature (3610)..(3611): n is a, c, g, or t
  misc_feature (3613)..(3613): n is a, c, g, or t
  misc_feature (3617)..(3617): n is a, c, g, or t
  misc_feature (3621)..(3622): n is a, c, g, or t
  misc_feature (3624)..(3624): n is a, c, g, or t
  misc_feature (3627)..(3627): n is a, c, g, or t
  misc_feature (3631)..(3631): n is a, c, g, or t
  misc_feature (3636)..(3636): n is a, c, g, or t
  misc_feature (3643)..(3650): n is a, c, g, or t
  misc_feature (3652)..(3660): n is a, c, g, or t
  misc_feature (3662)..(3664): n is a, c, g, or t
  misc_feature (3666)..(3667): n is a, c, g, or t
  misc_feature (3669)..(3674): n is a, c, g, or t
  misc_feature (3676)..(3677): n is a, c, g, or t
  misc_feature (3679)..(3682): n is a, c, g, or t
  misc_feature (3684)..(3685): n is a, c, g, or t
  misc_feature (3687)..(3694): n is a, c, g, or t
  misc_feature (3696)..(3704): n is a, c, g, or t
  misc_feature (3706)..(3707): n is a, c, g, or t
  misc_feature (3709)..(3710): n is a, c, g, or t
  misc_feature (3712)..(3716): n is a, c, g, or t
  misc_feature (3719)..(3721): n is a, c, g, or t
  misc_feature (3723)..(3730): n is a, c, g, or t
  misc_feature (3732)..(3739): n is a, c, g, or t
  misc_feature (3742)..(3742): n is a, c, g, or t
  misc_feature (3745)..(3745): n is a, c, g, or t
  misc_feature (3749)..(3749): n is a, c, g, or t
  misc_feature (3751)..(3753): n is a, c, g, or t
  misc_feature (3755)..(3773): n is a, c, g, or t
  misc_feature (3775)..(3781): n is a, c, g, or t
  misc_feature (3783)..(3783): n is a, c, g, or t
  misc_feature (3785)..(3789): n is a, c, g, or t
  misc_feature (3791)..(3792): n is a, c, g, or t
  misc_feature (3796)..(3803): n is a, c, g, or t
  misc_feature (3806)..(3806): n is a, c, g, or t
  misc_feature (3808)..(3809): n is a, c, g, or t
  misc_feature (3811)..(3811): n is a, c, g, or t
  misc_feature (3813)..(3813): n is a, c, g, or t
  misc_feature (3815)..(3815): n is a, c, g, or t
  misc_feature (3818)..(3819): n is a, c, g, or t
  misc_feature (3823)..(3825): n is a, c, g, or t
  misc_feature (3827)..(3827): n is a, c, g, or t
  misc_feature (3829)..(3840): n is a, c, g, or t
  misc_feature (3842)..(3843): n is a, c, g, or t
  misc_feature (3845)..(3847): n is a, c, g, or t
  misc_feature (3849)..(3856): n is a, c, g, or t
  misc_feature (3858)..(3859): n is a, c, g, or t
  misc_feature (3861)..(3866): n is a, c, g, or t
  misc_feature (3868)..(3871): n is a, c, g, or t
  misc_feature (3875)..(3877): n is a, c, g, or t
  misc_feature (3880)..(3880): n is a, c, g, or t
  misc_feature (3883)..(3884): n is a, c, g, or t
  misc_feature (3886)..(3888): n is a, c, g, or t
  misc_feature (3894)..(3894): n is a, c, g, or t
  misc_feature (3896)..(3896): n is a, c, g, or t
  misc_feature (3899)..(3901): n is a, c, g, or t
  misc_feature (3905)..(3906): n is a, c, g, or t
  misc_feature (3908)..(3909): n is a, c, g, or t
  misc_feature (3911)..(3912): n is a, c, g, or t
  misc_feature (3914)..(3921): n is a, c, g, or t
  misc_feature (3923)..(3925): n is a, c, g, or t
  misc_feature (3927)..(3933): n is a, c, g, or t
  misc_feature (3936)..(3940): n is a, c, g, or t
  misc_feature (3943)..(3943): n is a, c, g, or t
  misc_feature (3945)..(3946): n is a, c, g, or t
  misc_feature (3948)..(3950): n is a, c, g, or t
  misc_feature (3953)..(3953): n is a, c, g, or t
  misc_feature (3955)..(3957): n is a, c, g, or t
  misc_feature (3959)..(3963): n is a, c, g, or t
  misc_feature (3965)..(3965): n is a, c, g, or t
  misc_feature (3967)..(3976): n is a, c, g, or t
  misc_feature (3978)..(3978): n is a, c, g, or t
  misc_feature (3984)..(3987): n is a, c, g, or t
  misc_feature (3989)..(3990): n is a, c, g, or t
  misc_feature (3994)..(3994): n is a, c, g, or t
  misc_feature (3997)..(4000): n is a, c, g, or t
gnnnncnnnncgnnnnnngnngnnnncgnnnncnnngngngnnnnnncgnnggnnnngnngnnnnnngcncngnggngntcnccgngnncnncnnncngncgtncnccnngnncnnnnngnngnnnnngnnnangnnnnnnnnnnnnnnnnnnnngnnnnngnnnnnnnnnnnnnnnncngnnnncnnngnnncnnngnnnnngcnncnngncnncgncgncnnnngcnnnnnnnnnnnncnncnngncnncgnngnnnnnnncgnnggnnncnncncnnncgncnncnncgnnnnnnncgacgnngncnnnnncgannccnnnnnnnnnnnnnnnnnnnnnnnnnnnnccnnnncntcnncnncntcgtcnnnnnnnntnnnncnnnnnnnggtnnnnnncgngnngnnggnngtnnnnntngtnnnggnnnnnnnnnnnnnnnnnnnnnncgncnnnnnnnnngncgtcnnnnncgnngnnnngnacgnngnnnncgnggnnnngnnngnngnnncgnnnnncnnnncnncngnngnnnnnnnnnncgnnnnncnnnncnnngancnnnnngnngnnnancncnnncnnnngnnngaagannnnnngnnngnngnnnnngannnggagnnngnnnnnnngnannanaannnnnannntnacnaananaacnancaaaanaaccaaaannaccannnnnccnccgngntntccnncnttnttcnngnccncgnncnngngtncnangcgggggtntgggnnnannnacngngngagnnnganncgacgangangnnnntnctcttcnnnnntncgtncccgctgntggtgncngngnacnncnnggnggaggnngagnacgacgangnngcgnnngnnnnnntntncccggnggggnncnncnactgcnnnaanangagnngncaanangaggnggnggngnggctgtggnantcnnnnatcnancnnnnnnnanngctgcacgnncgngancncnncttnngccgcgnngactacttannagagggngnngggnanggggnnnncgngnnggggnannncnncgnnnngcnnngccncgccnnnaannnttagcgactttagcttgatatagacaggacctggaccttacaaaggtattcacagctacgctcgttggcgtaaaggtatgtagtatcacgatcattccgccgcgggctcgggcgcggcgtcgccggcgccctcgtctccctcgtctccctcgtcgccgagaaccgggggctcaacctcggggggaaaacccgcggcttgctcctcctgnagcgccctcaccgccatctcgagctccttgatctcctcgaggtacttcttcttacctctcagcacgttgagctgctcgagcatctccttggggaccgggagatcctcggacgcgacctcgtccgcctccgtcgcgggctcgacgccgtcatccgcgggggcggccggggcatccccggtcgctccatccgccgccccatccgccgggccctctccgttcgcggcagcctcctccgcgaggaccctgtccgcgatcgcctgcgcgtcttcctcgtccgtcgtcttcccttccagccggttcatgtagccggtcaggttggcgaggttggcggtgagggacgtcatgttatcccactccgccttgggcttcatcccctccatcatggcgacggcgtcttggagctgatcgtcggaggggttggagagcatcaacttcatgagcttatcctgcatgccggacggtccgttcccggcgttgacgtcgtcgttaccggagcccttcgaggcgcccggacggccctccatctgctccacggtgtcctgctcgatgtgatccacgagtttcagcacgacggaatccagcgcgtcgccgctcttcttgaccatctcgagcgacgccgcgatgaggttggcgagctgcgagacacgcgaggtcctcgcctcgcggacagcctcggcggctaccttnnncgcgaggacctcgcgcttgtgctgcgcgatggccgcctccgccatctgcttgtccagctccccgagcttgtcttcgtaatccttgcggagggaatccttgtggccgtgcatggcggcgactttggccgcgaggtcgccgttgcggccgacgtcgaagcccttgagctcgccgtcggcggggtcatcgtcgccggggggctcgccgggctgagcggcggcggcggcggcggcggcgtcgtcatccgcggcggtggcggcgactgcgggtgggtcatccggggattcctgtcgatccccgacgttggctccgatctcgttggagaccttcatggacgccatcttggcctggaccttgccgggcgggatggccaccatcatggagtcggacacctggaggccgggggcggccttcggggcgggcgggggcggcggcgggggattgaggagcgccctctgcttcgcctccctctcggcgagctcgagctcgcgctccttgatcttgagcgcgcgctcagcctgctggttggcgatgcgctccctgcgctccgcgaggtcgagctcgagcatcgcgagcttgagctgctccttcttcatctccagctcccgcgcagcctggctcgcgaatccccccagcgcgtcgggattcatctccgagacattgttccgcgccggcggtgggggcgagggcgggggcatgagcaccgcgctgtcgatgccgccgccgggcaggacctcngccccggacatggcgtcttgtgcgagactctggcttcaagcgacgcggtgtttggggacgccgtacgggggtgtgacctcgtacgcgccttcacgattgggcgacgaaccgcgtcggggatgaaaaacgctttcgtgacacgcttcctaaatcgggggtacgagcgttgacttgactaatgtgtgaccatttagtgagaagtatttattttgtccgaattagcgaaatatcaaaggcaaatggaatgttnnnnaannttntttnnacnttnaaanagnnagnannnnnnnnnncncggcgcngnntcncggngcgccngtgnnnncnnnnnnngcnncnnnntnnncnnnnannnnnnnnnnnnnnnnnncnnncnnnnnnncnccgnncntncccngcncnnnnccnngnncnnnnnnnnnnnnnnnnagngncncnnnnnnnnnnccnntnnnnncnngnnnnnacncnannnnnnacnnaannnnnnntnnncatanntnnncannnnnnaanaactcnnnnnnanncncnnnnnnannnnnagngnnannnanngncncgnnnnngcncnnntcntcncccgnnnncgnntgggnannnnngntnngnnncnnntngntcnngnnnnnnnnnncnanannnnncgnnnngnnanngcnnnnnnnnnnccnngnngntnncnncngnnnnnnnncgnncnnnnntnnnnnntcgnngnnnnnnnannncntnntaannnnnnnnnanaaaanngnnnnnnnnnnnnnannnnncnannnnnnnnaannatnnanannnnntcncnnnnnntnngnnnncncnngtnnncncnnnnnnncnnnnnncnncgnnncnncgnnncgcnnnnnnncnnnncnnncnntngcgncccnncncgncccnccccnccccggnnnnnnnngnnnnnnnnncnnncnngnnnnnncnngnnnnanncnnnnnnnncnnnnnnnnncnngnngnnnnncgnnnannnnnnnnannnnnnnncanacncgcncnnncnnnnnnnnnnnnnnnnnnncnnnnnnncncnnnnncnncgcnnnnnnnncgngnntncncncgnntatnnncncnnnnnnnnnnnncnngnnncnnnnnnnngnntnnnnnngnnnngcgnnngtntcnnannntttctnanaannntttnnanngnntnnnnnnnngnnnannnnnnntgnnnnnaananncnnnctnannncnnnnncncnnnnnnnnnnanaaagannnnannaaantcnnnn

SEQ ID NO: 1523 - DNA, 4000 bp, Escherichia coli
  misc_feature (325)..(325): n is a, c, g, or t
  misc_feature (372)..(372): n is a, c, g, or t
  misc_feature (623)..(623): n is a, c, g, or t
  misc_feature (626)..(626): n is a, c, g, or t
  misc_feature (692)..(692): n is a, c, g, or t
  misc_feature (708)..(708): n is a, c, g, or t
  misc_feature (765)..(765): n is a, c, g, or t
  misc_feature (775)..(775): n is a, c, g, or t
  misc_feature (931)..(931): n is a, c, g, or t
  misc_feature (1014)..(1014): n is a, c, g, or t
  misc_feature (1992)..(1992): n is a, c, g, or t
  misc_feature (2438)..(2438): n is a, c, g, or t
  misc_feature (2565)..(2566): n is a, c, g, or t
  misc_feature (2987)..(2987): n is a, c, g, or t
  misc_feature (3199)..(3199): n is a, c, g, or t
  misc_feature (3227)..(3227): n is a, c, g, or t
  misc_feature (3727)..(3727): n is a, c, g, or t
  misc_feature (3830)..(3830): n is a, c, g, or t
  misc_feature (3912)..(3912): n is a, c, g, or t
  misc_feature (3928)..(3928): n is a, c, g, or t
gaactgggaggagagctggctcatcacaatcagccgatctgaaagctcagcaatctgttccatgaccatcaactggtttgggtcgggctcgcggaggaccgtatgcaaggtggtcacgacgggcattttcagcccgcgcaacagatgcaaaatgtggcttccggcagggccgccaaagattccgtactcgtgctgcaggcagaccatgtcgatattgttgaagttcaggaaccgagcggcgtcttcgtacgacgcgacctcgttctggtcaagcgaccatcggacccgtgcgggatagtcatagccttgttctatgtcgtttacnggcagcgccaacaatcgagccgttccgtactccgcggcgatcgcgcnacaaaggtccgttgtgaacgtcgcaattccacactggcgcggcagatagttcccaatcacagcaattcggctcggcagggatggcttcggctgtagtctcaggcgagaatccaatcctccagcctgaaccagtggaagcgggtcgacgattttgagcggtgcccgggaaagcccggtgtttgcgagtgacatgagccccggattcgctggagatggagcgggtgaggtttcaggtgtgctcgatgccaatntgntgcgtagggcactaagttcggttgagcgcatccaagttgtacggacgattcgtgttttttctagtnttcaacgaaagggggntcgggaactggtcaaaattgaccacatgcgccttcggagcttcggtgctggcggctnacgtaaaacngaatacgcggaggtatgcctcgtgaagctaccaggggtgaaaccttgtgccccaaggctcccgggcgtacagtagggcggattcaacattgaaaccaaggtctcggattgatgcgatcgggcagaactgattccagggcgaagcttctcttcctcnctgttttgttggtttcgatagtccgtctcgtattggctcgacaggacaatgagaccaagccggaatcctggtccggcgtcctngtgtctagcgcctgcaacgcggacgaagcctttaacgaatctcccgagtgcaccaggaacgtccccggtgcgaagatcgcgctgtatgacgacacgaaccgggtcatctacggcatcgacgcgcaggaaaaagtaatcgcgcgcctgggcgacacggtcacagtccggggaacacttcatggcgataccattcagatggcttctatcgagttgatgtcgattggcctcgcggtgggcgagaaggcgccggccttttccgttcgcgaccagtttggccggacgcagagtctcgctgccttgaaaggcgccaacggcaccgttcttctctttttccggtccgccgactggtgacctttctgcaaagggcagctggtgcagctgcaaagtgcaattccgcgatttgagaaacaaggcgtcaagttggcagcgatcagctacgactccgaagaaatcctaaagttttttgctgagcggcacaaaatcgaattccctctgctcggcgaccccgactcgaagatcatcaaggcctacggcgtcttcaacgcggaagcgaccgggatgcagaaaggcttcgcgcgccccggctatttcttcatcgatgccaagggcacgattcgagaaaagttcttcgaggcgaaataccgcgagcggcttacgggaaatagtttgcttgcgaagctgtttccggaattgggccaggaggtcacagaaacgatcgaagccccgcaccttcaactggcgcttgagcaatccgatcacaccggtgttcccgggacacgcgttacgctggccgccgaagtgcgcctacccgtggacgtgcacgtgtatgcccctggcgctcagggctataagccgatcaagctcgtgattgacccgatgcccgaaatggagatgaagccggccctgtatccgctgtctaaaacccttttcttgccggtaatcaaccagcgcgttccggtgttcgacgggacgtttcgnatcagccaggatgtgagagtaagctccgggatggacttcgccgcctcgctcggaaaggatggaaaaacctttacgatcgcaggcaagctggagtaccaggcgtgcgaccagaccaagtgctacctgcccacgtcagttccggtgaaatggcaactgcaagtgtttcccctcgatcggacccgcgccccagtcgacgttcgacacaaatagccaggcgacttggaaatctggaacgtatttggaaccttaccccgatgaattcgtcgatggcaaaggccgtcgggcgcacatttgccgaacgtccacaatcgccaggccgtcagggacggtgatacgagctggcttgctgagaaacgcaactgaactatgctgatttcagtggaaactggatctcgagcatctgctcaaggtaaatctcacgtttcggacccgcgagctgatgatcngtgacattcatccattttcggatggcctcataaccccgctcggcgctctcgtcatccaacctggagtaggcacaggcgacggtggccgcgggaagctgcttcaggtcgtaaaaactccgaaacggtnnctggtgcttcagcgccacaaagggctcgccttccagcgaacccgagtccgcgcaactatgccagagaacgccccgggggctgccgatggattggggcgggagggcagccagcaactcctgctcgaactgcagaatgtccgcatagctccgcactttcgcgcgaacggacgcgataggagtggccggacgacgcttcaccaccacggcaatcgggtgtttcgaatcatccgtctcttccagcgccgcgtcgatgcatttcaaagattgcgtggccgtctggattgaccgctgaattgtccgtttgagtttggtgaggacgtctcggcgatgctcactagatcccactttatggatcagatcgcgggcatcggcgagcgatactcccagacttttgagggcgaggatcgcggccaactcttcnagttgctgcggacgatagttccggtaaccggtgcgagcgtccacgctggcgggccgcaataggccaatctggtcgtaaaagcggagcgtcttcgtggaaacaccgctcaaattcgagaactcaccgatgcggtactgcacgtccatgaaaatctctttccttggcaaggttgtttagaaacccgatgtcatttgcgtgggatcgcatcgcanccatatttagcttgatccttcccctgtnctggaatgttttactcgtaccgaggaggaaggctatgaactttctaccaaaaccagttggcttgcttctgatctctttgtttccgttcggcctcctacgacctgcaggggcacaaacacgggcgaaaccgggaacagaagaagaccctagggcagccatcgagggttacttcgccgcacatgctctaggcaacggcgagtttatcacgcagaccttcacgctcgacgccaaaatccaattcgtcgaaggcggtgaatcaaaggtgtggacacgcgacgagtttgcaaaacggttcttgcaacctgcgacggacgaataccggagggtgcgtcgcgtcgagaggctggatgttagcggcacggcggccagcgccgtggttacgctggactaccctcaggtactgttcaccgatcacatgtcgctgttgaagatcggcgggcggtggaagactgtgagcaaggtattttcagccgatcgaagggacgccgggcaagaagccntcaaggagacgctgcgggactggactcttccgtttgaaccaagaagaattgccggcaacatctattatgtgggcagcaacctgatcagctcattcctgattgngacccctgcaggaaacattctgctggatacaggccccattcaaatgctgccgcaagtgacagccaacatcgagaaacttggntttagaacgcgagacntgaagctcttgctgaacagccacgcacattttgaccactgtgggggcttcgcagagatgaaacgccgcacgg

SEQ ID NO: 1524 - DNA, 4000 bp, Escherichia coli
  misc_feature (1986)..(1986): n is a, c, g, or t
gtgtgggcggccttgcgggcggtcggatagagcgggttgaaatcgagacaggtgcgatgcgccacttcgaccgccacaaactgaaactcggcctgttcgggctgaactgttctggcgggctgtcggcgacgctggcgccggaacggtgggaagggacgtgggaggaaaaccttgccgccgccgggctggcggatcgcgcggggctcgatttcctgctgccgctggggcgctggaagggctatggcggcgagaccgatcacaacggcggcagcctcgagacgctgacctgggccgccggcattctagcggcgaccgagagcatcatggcgttcggcaccgtccatgtgccgctgttcaatcccgtcgtcgcggccaagcagatggtgaccgccgacctgatcggcggtgggcggttcgggctcaacatcgtgtgcggctggaacacggatgaattcgccatggcgggggtggagatgaacgcccatgaagcgcgctacgaacagggccaggaatgggtcgatatcgtcacgcgcgcatggacgtccgacgaagcgttcgattacgccggcgagcattattcggtgacaggcgcgctgttgaagccgaaaccggcttcggcggagcggccgatgatcgtcagcgccggcaattccgaccgggggcgggaattcgcggcgcgcaattccgacatgatgtttaccgggatccgcaccgtggaggacgagatcagcgacgatatcgcgtcgctgaaagcgctcgccgccggtcatggccgcgacatcgggatgttcaccaactgctacgtcgtctgccgcccgaccgcgaaggaggccgaggagtatcatcattactacgcggtcgagatggcggaccagggcgcggtggatgcgctggtcgcccgccgcgcccggcggggccggttcgacgatctgccggaagaaatgaaacgcaacctgcgccagcgcgccggcggcggcaacggcgcctatcccatcgtcggcgacccggatcaggtggccgcgcagttcctacgcctgcacgaagccggaattgacgccttcgcgatggggttcgcgaactacgtcgatcatttgccgtatttcagggacgaggtattgccgaggctggcggaagcgggggtgcgctagacgttctttctgcggcgcagatacacaagcccgcccattccgagacccaacaacgcaatcgcgcctggttcggggacgaccggggcatccaccagcacgatcgacgtcgtgaagttgaagttcgagcccgtggtctggcgttccgcatggaagatgtcgaggtcgtaggtctcgccgatggtcatgccaaggaacgcggccgtgcccgcattcagcgtgatgctgtcggatgccggtccgtgaacgccgcccaggtcaatagccaggatgccgttgatgaacacccacacgtcgtcgtcgccggtgaaggaaaacgtctcgtcgcccacgaaggtgaattcggtgttgatctctgtggtgaagtggaaattgccggcgcctgcggggaaatacgacccgttgatgtattcgtacaggcccgaccccgggctcgtttccgtcgcggtcagcgtcgtggtgaacgtggtgttgacgccgggggtgtcattgtaccactggttgaagttcgcggtgccgttcgtcgtcgtcgacgcggcgcccgtgatgcctttcacagcttcattatagaccggtttgccgtccgggcccaatgcgctgagcacgatacccgtctccgaagcggcgaagccctgctcgaaatcggcatgactgctcgaaaaatcgcggatcgtcgcagtgacggtgatgctggcggcgctggcggcttcggcctgcagaaacagggctgcgacgccgatgacggcgacccggctgaatgatttgggatcaaagcggggaaacttgagggcgaccgacatatttactctcctaccgaacaaaatggccttgtccgaaatanagcaattttcgtgccagaatatttttgcccataatatcagtatcttagtgggccagcggcgatgtttttgactgaagttgtcaaattttccgacagtcgccgaggcgcccggctcccgccctgaaggtgacggtcaggcggtcgcttcgccctcgaccgtggtccggtacagatgccggatgtcgggataggtgtatccgccggtcgcgcggtgattgacgcagcggttgtcccacatcaccacgtcgccgtcttcccatgtgtgtctgtacctgaactccgtcttgacggaatgcgcgatcagttcgtccagcagggcgtcggcttcgtcttcgtccagcccctcgccttttatcgcgatggtgaaacggggcgagcaatagagacttttgcgccccgtgaccggatgcacccgcacaagcggatgttcgacatccgggatctcccgttcctggcgtttgtagaattcgaccgcgtcttcccgcgcgcctgatatttccacccgcttgttcttcagcttgctgatggaatgaaccccgcgcaggcccgcgatttgggctttcatatcgtcggacagcgcgtcgtaggcggcgtacatgttggcgaaatccgtgtgcccgccctgcgacggatttttcagggaatggaggatcgtacagttcgccgggtgggtcttgaagctgtggtcgctgtgccaggcgtcgcccgcgtcgatgacgccgatctgattgccgtcttcgtccacgtcgttggacaggacgaggatcttgggctgttccttcagtgtgaatttgagattgtcgtgcggatacaccacaccgaagcgttccgaaaacgacaccatcgcatgcggttccagtttctggtcgcggaagcacagcatctgatgttccagataggcatcgttgatcagaccgaaggtggcgtcgtccagccggttcaggtcgacgccgataacctcggcgcccatcgcggcgctgagccggttgatttcaatggtatcgggcatcgtcacgcggtttcgcgcagccccgccgcttccgcctgttcgtcggcgatcagtccgtccatcaggcggcgcacctgaatgttgggcgcatcgccgttgatgtcgatctccggcgcgtccggcatggccgacatgcgtttctgctgctcgttcaggatgatctggtcttcctcgaacacctgggtgaactgggtgcggtaaatctcgtcccattcgggatcatccaccttgaagtgcctggcatgcgcatagaagtaatgcgtcgaggtttcggtttccggcgtcggcaggttcatgaccttcatctcgacgccgatatcctccgtcacttcgcccggctgggcgttgaggccgacctggtacgttcccgcatggttgacgatgtaacccggcatgtccgacgtcgtgaccaggaagcggtcgacattgccttcgaacccgccggctttcttgtagaacggcgccgggggccggtcggtgaccaggcgggtcatcttcacgccgcgctcgaagcgttcggtcttcggcgggaaatccacgatcgcgtcgttgccgatcgacgtgacatggacgtaggacagatgcgtgatgtcgaacagattgtcggatatcagcaggtaattcgcttccaccggcatgggcgtgccgccccggcccgggatcgttttccattccggactgtcgagccaccaccagtcgggcagcagatccgcatcggccttggcgggatcgcccgtccatatccagaccatgccccagcgttcgatcaccgggtaggaccgcaccgcggcgcccggcggaatcttcgactggcccggcaccttcacgcaatcgcccgccgcatcgaattccagcccgtgatagccgcactggatgttgtcgccgacaaccttgcccatcgacaggggcagcgcccggtggcagcagcggtcttccagcgccacgatgccgtccggggtgcgaaatatgacgacgggcttgttcaggatggtgcgcgaaaacggg

SEQ ID NO: 1525 - DNA, 4000 bp, Escherichia coli
  misc_feature (61)..(62): n is a, c, g, or t
  misc_feature (65)..(67): n is a, c, g, or t
  misc_feature (70)..(71): n is a, c, g, or t
  misc_feature (73)..(75): n is a, c, g, or t
  misc_feature (77)..(77): n is a, c, g, or t
  misc_feature (83)..(86): n is a, c, g, or t
  misc_feature (89)..(89): n is a, c, g, or t
  misc_feature (96)..(96): n is a, c, g, or t
  misc_feature (98)..(100): n is a, c, g, or t
  misc_feature (103)..(104): n is a, c, g, or t
  misc_feature (110)..(110): n is a, c, g, or t
  misc_feature (112)..(112): n is a, c, g, or t
  misc_feature (116)..(116): n is a, c, g, or t
  misc_feature (118)..(120): n is a, c, g, or t
  misc_feature (122)..(122): n is a, c, g, or t
  misc_feature (125)..(127): n is a, c, g, or t
  misc_feature (132)..(132): n is a, c, g, or t
  misc_feature (135)..(135): n is a, c, g, or t
  misc_feature (138)..(139): n is a, c, g, or t
  misc_feature (141)..(141): n is a, c, g, or t
  misc_feature (152)..(153): n is a, c, g, or t
  misc_feature (155)..(157): n is a, c, g, or t
  misc_feature (165)..(165): n is a, c, g, or t
  misc_feature (172)..(172): n is a, c, g, or t
  misc_feature (177)..(178): n is a, c, g, or t
  misc_feature (180)..(180): n is a, c, g, or t
  misc_feature (189)..(190): n is a, c, g, or t
  misc_feature (192)..(193): n is a, c, g, or t
  misc_feature (195)..(196): n is a, c, g, or t
  misc_feature (198)..(199): n is a, c, g, or t
  misc_feature (201)..(201): n is a, c, g, or t
  misc_feature (203)..(203): n is a, c, g, or t
  misc_feature (206)..(206): n is a, c, g, or t
  misc_feature (215)..(218): n is a, c, g, or t
  misc_feature (222)..(226): n is a, c, g, or t
  misc_feature (229)..(229): n is a, c, g, or t
  misc_feature (234)..(234): n is a, c, g, or t
  misc_feature (236)..(236): n is a, c, g, or t
  misc_feature (238)..(238): n is a, c, g, or t
  misc_feature (240)..(240): n is a, c, g, or t
  misc_feature (243)..(243): n is a, c, g, or t
  misc_feature (248)..(248): n is a, c, g, or t
  misc_feature (250)..(250): n is a, c, g, or t
  misc_feature (254)..(254): n is a, c, g, or t
  misc_feature (257)..(258): n is a, c, g, or t
  misc_feature (260)..(260): n is a, c, g, or t
  misc_feature (264)..(265): n is a, c, g, or t
  misc_feature (267)..(267): n is a, c, g, or t
  misc_feature (272)..(272): n is a, c, g, or t
  misc_feature (274)..(274): n is a, c, g, or t
  misc_feature (277)..(277): n is a, c, g, or t
  misc_feature (280)..(281): n is a, c, g, or t
  misc_feature (285)..(285): n is a, c, g, or t
  misc_feature (295)..(295): n is a, c, g, or t
  misc_feature (297)..(297): n is a, c, g, or t
  misc_feature (300)..(300): n is a, c, g, or t
  misc_feature (306)..(306): n is a, c, g, or t
  misc_feature (308)..(308): n is a, c, g, or t
  misc_feature (311)..(312): n is a, c, g, or t
  misc_feature (315)..(315): n is a, c, g, or t
  misc_feature (320)..(322): n is a, c, g, or t
  misc_feature (328)..(331): n is a, c, g, or t
  misc_feature (334)..(335): n is a, c, g, or t
  misc_feature (338)..(338): n is a, c, g, or t
  misc_feature (341)..(342): n is a, c, g, or t
  misc_feature (346)..(347): n is a, c, g, or t
  misc_feature (354)..(354): n is a, c, g, or t
  misc_feature (356)..(356): n is a, c, g, or t
  misc_feature (360)..(362): n is a, c, g, or t
  misc_feature (364)..(366): n is a, c, g, or t
  misc_feature (369)..(369): n is a, c, g, or t
  misc_feature (371)..(374): n is a, c, g, or t
  misc_feature (376)..(376): n is a, c, g, or t
  misc_feature (378)..(379): n is a, c, g, or t
  misc_feature (383)..(383): n is a, c, g, or t
  misc_feature (385)..(386): n is a, c, g, or t
  misc_feature (389)..(389): n is a, c, g, or t
  misc_feature (391)..(391): n is a, c, g, or t
  misc_feature (395)..(397): n is a, c, g, or t
  misc_feature (401)..(401): n is a, c, g, or t
  misc_feature (403)..(403): n is a, c, g, or t
  misc_feature (405)..(406): n is a, c, g, or t
  misc_feature (409)..(409): n is a, c, g, or t
  misc_feature (413)..(413): n is a, c, g, or t
  misc_feature (423)..(425): n is a, c, g, or t
  misc_feature (427)..(428): n is a, c, g, or t
  misc_feature (433)..(433): n is a, c, g, or t
  misc_feature (435)..(436): n is a, c, g, or t
  misc_feature (438)..(439): n is a, c, g, or t
  misc_feature (444)..(447): n is a, c, g, or t
  misc_feature (451)..(452): n is a, c, g, or t
  misc_feature (454)..(455): n is a, c, g, or t
  misc_feature (457)..(463): n is a, c, g, or t
  misc_feature (465)..(465): n is a, c, g, or t
  misc_feature (468)..(471): n is a, c, g, or t
  misc_feature (473)..(473): n is a, c, g, or t
  misc_feature (476)..(478): n is a, c, g, or t
  misc_feature (480)..(481): n is a, c, g, or t
  misc_feature (485)..(485): n is a, c, g, or t
  misc_feature (489)..(489): n is a, c, g, or t
  misc_feature (493)..(495): n is a, c, g, or t
  misc_feature (497)..(497): n is a, c, g, or t
  misc_feature (499)..(501): n is a, c, g, or t
  misc_feature (503)..(503): n is a, c, g, or t
  misc_feature (511)..(511): n is a, c, g, or t
  misc_feature (513)..(513): n is a, c, g, or t
  misc_feature (515)..(516): n is a, c, g, or t
  misc_feature (518)..(518): n is a, c, g, or t
  misc_feature (522)..(523): n is a, c, g, or t
  misc_feature (526)..(527): n is a, c, g, or t
  misc_feature (531)..(533): n is a, c, g, or t
  misc_feature (535)..(535): n is a, c, g, or t
  misc_feature (537)..(541): n is a, c, g, or t
  misc_feature (546)..(548): n is a, c, g, or t
  misc_feature (553)..(553): n is a, c, g, or t
  misc_feature (557)..(557): n is a, c, g, or t
  misc_feature (562)..(563): n is a, c, g, or t
  misc_feature (567)..(569): n is a, c, g, or t
  misc_feature (571)..(571): n is a, c, g, or t
  misc_feature (579)..(579): n is a, c, g, or t
  misc_feature (584)..(585): n is a, c, g, or t
  misc_feature (588)..(588): n is a, c, g, or t
  misc_feature (590)..(590): n is a, c, g, or t
  misc_feature (592)..(593): n is a, c, g, or t
  misc_feature (597)..(598): n is a, c, g, or t
  misc_feature (600)..(603): n is a, c, g, or t
  misc_feature (606)..(606): n is a, c, g, or t
  misc_feature (608)..(608): n is a, c, g, or t
  misc_feature (610)..(610): n is a, c, g, or t
  misc_feature (614)..(614): n is a, c, g, or t
  misc_feature (618)..(618): n is a, c, g, or t
  misc_feature (621)..(621): n is a, c, g, or t
  misc_feature (623)..(625): n is a, c, g, or t
  misc_feature (630)..(630): n is a, c, g, or t
  misc_feature (632)..(633): n is a, c, g, or t
  misc_feature (642)..(642): n is a, c, g, or t
  misc_feature (648)..(649): n is a, c, g, or t
  misc_feature (652)..(653): n is a, c, g, or t
  misc_feature (655)..(656): n is a, c, g, or t
  misc_feature (665)..(666): n is a, c, g, or t
  misc_feature (669)..(669): n is a, c, g, or t
  misc_feature (674)..(676): n is a, c, g, or t
  misc_feature (681)..(682): n is a, c, g, or t
  misc_feature (685)..(686): n is a, c, g, or t
  misc_feature (690)..(690): n is a, c, g, or t
  misc_feature (692)..(692): n is a, c, g, or t
  misc_feature (697)..(700): n is a, c, g, or t
  misc_feature (704)..(706): n is a, c, g, or t
  misc_feature (708)..(709): n is a, c, g, or t
  misc_feature (712)..(713): n is a, c, g, or t
  misc_feature (716)..(716): n is a, c, g, or t
  misc_feature (718)..(718): n is a, c, g, or t
  misc_feature (726)..(727): n is a, c, g, or t
  misc_feature (729)..(729): n is a, c, g, or t
  misc_feature (732)..(733): n is a, c, g, or t
  misc_feature (735)..(735): n is a, c, g, or t
  misc_feature (737)..(737): n is a, c, g, or t
  misc_feature (740)..(740): n is a, c, g, or t
  misc_feature (742)..(742): n is a, c, g, or t
  misc_feature (746)..(747): n is a, c, g, or t
  misc_feature (750)..(751): n is a, c, g, or t
  misc_feature (753)..(755): n is a, c, g, or t
  misc_feature (759)..(759): n is a, c, g, or t
  misc_feature (762)..(764): n is a, c, g, or t
  misc_feature (768)..(772): n is a, c, g, or t
  misc_feature (775)..(775): n is a, c, g, or t
  misc_feature (778)..(778): n is a, c, g, or t
  misc_feature (781)..(782): n is a, c, g, or t
  misc_feature (784)..(784): n is a, c, g, or t
  misc_feature (788)..(788): n is a, c, g, or t
  misc_feature (790)..(791): n is a, c, g, or t
  misc_feature (793)..(794): n is a, c, g, or t
  misc_feature (796)..(796): n is a, c, g, or t
  misc_feature (800)..(800): n is a, c, g, or t
  misc_feature (802)..(802): n is a, c, g, or t
  misc_feature (806)..(807): n is a, c, g, or t
  misc_feature (809)..(810): n is a, c, g, or t
  misc_feature (813)..(813): n is a, c, g, or t
  misc_feature (816)..(816): n is a, c, g, or t
  misc_feature (818)..(818): n is a, c, g, or t
  misc_feature (820)..(820): n is a, c, g, or t
  misc_feature (824)..(824): n is a, c, g, or t
  misc_feature (826)..(827): n is a, c, g, or t
  misc_feature (829)..(829): n is a, c, g, or t
  misc_feature (835)..(837): n is a, c, g, or t
  misc_feature (842)..(843): n is a, c, g, or t
  misc_feature (845)..(845): n is a, c, g, or t
  misc_feature (848)..(850): n is a, c, g, or t
  misc_feature (852)..(853): n is a, c, g, or t
  misc_feature (855)..(855): n is a, c, g, or t
  misc_feature (859)..(859): n is a, c, g, or t
  misc_feature (861)..(862): n is a, c, g, or t
  misc_feature (867)..(868): n is a, c, g, or t
  misc_feature (873)..(874): n is a, c, g, or t
  misc_feature (877)..(880): n is a, c, g, or t
  misc_feature (882)..(886): n is a, c, g, or t
  misc_feature (889)..(889): n is a, c, g, or t
  misc_feature (899)..(899): n is a, c, g, or t
  misc_feature (1090)..(1090): n is a, c, g, or t
  misc_feature (1199)..(1199): n is a, c, g, or t
ccgcagaagatcatcagggtgtcgaaccgctgcaacaacaaagccagctttcaccaggcgnnttnnnaanngnnnanggttcnnnncgnttccgcnannnccnngcgagntngcantnnntngannntggcntgncgnngncgcggaatttnngnnnaccgaganttcccanggtcnnanccttgtttnngnntnncnntnangcntcgggtagnnnncccnnnnnggngcctngntncntgnaactncngtgntgnngnggcnnangccgntnttntanncttntgcctgagcngngcnacaggncngcnncancaggnnngcaacnnnnaannacntcnnatcnncagcccngncctnnncnnngcntnnnncngnncagncnngcncngatnnncggncnanncgngtgnaaagccaatnnncnnggaananngnntgagnnnncaanntnntnnnnnnnangtnnnngntgnnntnnagangccntaannngncnnnantgccgtgngnanncngtgnngcnnccgnnngncnnnnnagcgnnncttgnactncccanncacnnntnaagacctntgcannccncngnngccnngnnnnaanantntgcncggnggnannnccggncnncgcctgccngccccnnggnngnngcattcacnntcngggcnnnctggnnccnntggngnctgcnnnnattnnncnnggnnttnancaccgctnncnggnncncnccnangccnncgnngnnntcanttnnngttnnnnnggngtnatnnanaggncnnanntnatgncnattnnannccnacnananagananntngcgaannnttggnnanggnnncnnangggngnnatctnntggcnntgnnnngnnnnngancctttcagtnacaggaagttaaggggtcagagtgacgctttgattggccgctgcattgtgatgtgtgatgcgcccgctgggccatgcgacggtgatctcggcctgggtcgcagcgccaaggccgaaatgcagcggaccggcttgtccgccggcatgtccgccaccgatgatcgtgcgctgcatatcgccgttgacggttanactcgcgccgatcgcatggcgattgccgcccggttgtaggagtgaaaccgccagccagtgaccggcatctggggtttcgttgcggtaaatttccaatggcgcgcggcgnttcagcaccacgacatccagccggccatcaccatcgaaatctgccagcgcagctccgcgcccgcgttccgtgctggccaagccggcactttggcccatttcccgaaaggtcccatccgcttgctgcatcaacagattattgggatctttgatcgcattggacggcatttgatccacattgcctttggagatgaacagatcaacccgcccgtcattgtccatatccccaaattgcgcatgccagccggttgaagggcgcccatcatcgccaaaataggggcgatgcgcataggttccgatggaaaacggagcactggcataggtgccgtcgggctgggctatttgcatcagctgatcgcccatggaggtgagcatgacctcttcgcgctggtcgccagtgatatcgcggctggcaatgcccatgccccagatagagattttttcccagccgtctggagcccccagaaaccggccttctttgagatcccacatttgctcatatccgccgcgcacatagtattgccggtcatttgagatacgcaggcgctgcgcaccgctggcatcctttgtggccaacatggataggctgcaaaatccgggttccagcggggtggagtgatacccatccgcaagcggcgtgagtagttcatggctgtcacaggcgaaaaacggaccctcggggttctttaaatccacataatttcccacggccatatgtgggcgtccgtcatccagccaccaggcgctaaaggctgtcgaccattgatcggcgggcaggagggggaattcgggggtggcctgggtaaagctgcagtctgggccacccataaggatcatgttttgcccaatgcgcagcacgaagagatccatgaagccatcggcattgatgtcgatgggataggcacctgtggtggcgcggatgtcgggcaaggggtgggcggtgaaggtgaaattgccttgattgacaaataggccggccggcccggtgccgccagcggcgaaaatatcgggcagcgcgtcgccattgcagtccaggaccgcgacaccgccgccgacaaaatggttccacccccccaaatagcggtgctcaggcaggcgatgtgagaggtcgcgaaacagcggctcggcctgtccaaccccggcgagaagacacaagattacccaaagagatttcacagtttttgacgcccttcgacaatgacagtgcgggtcaattcggtcaaagcaagggccgttgcgccgcgggcccaaaccatatccccccaagtttgcacctcaacccgcgtctcatggcggctgtgatagagtgcaagcgcgcgcatttcggcctgcatctctttggcattgaggaaatcatagcgcatcaattggcctgatagaataatcaattcaggatctaagagatggataatatttgataaagccaccgcgaggtagcggcctgcgcgcttgaaaatggtgcgaatatgcggatcactgctggcggccttttcgtagagcgatttgagcgcatcgggcaggttatggggcttttctggcgacaatccaaataccgtggaagcctcgcgggcgagggcgtaatcggccaaataggcctccaaacatccgcgctgaccgcatcggcacagcgcgccatcaagctgcactttcgtgtggccaagttccaaccccataccatgggcaccgcggaacaattggttgtcgctgacaaagcccatgccgacgccattttcaaccgtcaccacaacgaagttgctcaaagcgcgccccgcgccgaaccataattcggcaagggtcaaaacattggcgtcattgtcgatgcgcaccggggtttcgaagtgatcggcaaagatctggcccagcggtacatcggcgttttgcagcagcggtgaccaggcgaccatgccggattcgaaatccacgatcccagcaatcccgacgccaatggcggaaatcgtatccatggggatctcggctgcggtacaaagctgggtcactagattttctgtgtctttcagcaggtcttctgccgtcttcttgtctgtgttgcttcctagggcggcactggccagtagatttccggccagatcggtcaagaccgctgtgtgtgtttcgtcagagagtttcacgccgaccacgcgcagcgcttcgggcaccacctccagagcgaccggagggcggccccggctggtttcgcgtgcggcgccctcgacctcacgcaaaaatccatctgcgatcaattcagcggtgagtgcggtgaccgagcccgggctgacatcaaggcttcgggctatggttgcacgggcgacacggccactggcgcggacctgctcaaagatctgctggcgcagcgagaaagattcgcgcgccgaggtgcgtagaataggcccatagccggtggccagcgcagctgattcgatttcctcatgaaacccatcctcaaacataaattcaccctttgaactataagctaccgaatttctccagctatgccgcaaaacctgtatttatttgcgattggcaccgctgatatttgccattttacacattttgtcggctaaaaatagtaaattttaatttgacaactgaattaaatcgcgcagtatgtccaagtggctcagatctggcgtctgctcgatcgggctaaatttttgggaggactacaatgaataagctaatcatcgcagccgcagtcgcggcagctggttttacagggtccgctgctttggcagagggcatgtccatcggtgtgtcttgggcaagtttccaagaggagcgttggaaaatcgacgaagcggcaat

SEQ ID NO: 1526 - DNA, 4000 bp, Escherichia coli
  misc_feature (1)..(11): n is a, c, g, or t
  misc_feature (13)..(53): n is a, c, g, or t
  misc_feature (55)..(84): n is a, c, g, or t
  misc_feature (86)..(106): n is a, c, g, or t
  misc_feature (108)..(128): n is a, c, g, or t
  misc_feature (131)..(165): n is a, c, g, or t
  misc_feature (167)..(239): n is a, c, g, or t
  misc_feature (241)..(283): n is a, c, g, or t
  misc_feature (285)..(292): n is a, c, g, or t
  misc_feature (294)..(305): n is a, c, g, or t
  misc_feature (307)..(316): n is a, c, g, or t
  misc_feature (318)..(348): n is a, c, g, or t
  misc_feature (350)..(366): n is a, c, g, or t
  misc_feature (368)..(370): n is a, c, g, or t
  misc_feature (372)..(382): n is a, c, g, or t
  misc_feature (384)..(396): n is a, c, g, or t
  misc_feature (398)..(425): n is a, c, g, or t
  misc_feature (427)..(437): n is a, c, g, or t
  misc_feature (439)..(456): n is a, c, g, or t
  misc_feature (458)..(468): n is a, c, g, or t
  misc_feature (471)..(479): n is a, c, g, or t
  misc_feature (481)..(546): n is a, c, g, or t
  misc_feature (548)..(612): n is a, c, g, or t
  misc_feature (614)..(640): n is a, c, g, or t
  misc_feature (642)..(697): n is a, c, g, or t
  misc_feature (699)..(705): n is a, c, g, or t
  misc_feature (707)..(717): n is a, c, g, or t
  misc_feature (719)..(792): n is a, c, g, or t
  misc_feature (794)..(796): n is a, c, g, or t
  misc_feature (798)..(800): n is a, c, g, or t
  misc_feature (802)..(810): n is a, c, g, or t
  misc_feature (812)..(835): n is a, c, g, or t
  misc_feature (837)..(864): n is a, c, g, or t
  misc_feature (866)..(894): n is a, c, g, or t
  misc_feature (896)..(1032): n is a, c, g, or t
  misc_feature (1034)..(1046): n is a, c, g, or t
  misc_feature (1048)..(1140): n is a, c, g, or t
  misc_feature (1142)..(1159): n is a, c, g, or t
  misc_feature (1161)..(1162): n is a, c, g, or t
  misc_feature (1164)..(1170): n is a, c, g, or t
  misc_feature (1172)..(1175): n is a, c, g, or t
  misc_feature (1177)..(1183): n is a, c, g, or t
  misc_feature (1185)..(1197): n is a, c, g, or t
  misc_feature (1199)..(1219): n is a, c, g, or t
  misc_feature (1221)..(1224): n is a, c, g, or t
  misc_feature (1226)..(1296): n is a, c, g, or t
  misc_feature (1298)..(1307): n is a, c, g, or t
  misc_feature (1309)..(1331): n is a, c, g, or t
  misc_feature (1333)..(1335): n is a, c, g, or t
  misc_feature (1337)..(1344): n is a, c, g, or t
  misc_feature (1346)..(1361): n is a, c, g, or t
  misc_feature (1363)..(1364): n is a, c, g, or t
  misc_feature (1366)..(1366): n is a, c, g, or t
  misc_feature (1370)..(1402): n is a, c, g, or t
  misc_feature (1404)..(1416): n is a, c, g, or t
  misc_feature (1418)..(1431): n is a, c, g, or t
  misc_feature (1433)..(1433): n is a, c, g, or t
  misc_feature (1435)..(1457): n is a, c, g, or t
  misc_feature (1459)..(1474): n is a, c, g, or t
  misc_feature (1476)..(1494): n is a, c, g, or t
  misc_feature (1496)..(1499): n is a, c, g, or t
  misc_feature (1501)..(1507): n is a, c, g, or t
  misc_feature (1509)..(1520): n is a, c, g, or t
  misc_feature (1522)..(1550): n is a, c, g, or t
  misc_feature (1552)..(1563): n is a, c, g, or t
  misc_feature (1565)..(1565): n is a, c, g, or t
  misc_feature (1567)..(1567): n is a, c, g, or t
  misc_feature (1569)..(1569): n is a, c, g, or t
  misc_feature (1571)..(1571): n is a, c, g, or t
  misc_feature (1573)..(1579): n is a, c, g, or t
  misc_feature (1581)..(1581): n is a, c, g, or t
  misc_feature (1583)..(1630): n is a, c, g, or t
  misc_feature (1632)..(1632): n is a, c, g, or t
  misc_feature (1634)..(1634): n is a, c, g, or t
  misc_feature (1636)..(1636): n is a, c, g, or t
  misc_feature (1638)..(1638): n is a, c, g, or t
  misc_feature (1640)..(1643): n is a, c, g, or t
  misc_feature (1646)..(1646): n is a, c, g, or t
  misc_feature (1648)..(1648): n is a, c, g, or t
  misc_feature (1650)..(1678): n is a, c, g, or t
  misc_feature (1680)..(1691): n is a, c, g, or t
  misc_feature (1693)..(1697): n is a, c, g, or t
  misc_feature (1699)..(1700): n is a, c, g, or t
  misc_feature (1702)..(1702): n is a, c, g, or t
  misc_feature (1704)..(1704): n is a, c, g, or t
  misc_feature (1707)..(1711): n is a, c, g, or t
  misc_feature (1715)..(1757): n is a, c, g, or t
  misc_feature (1761)..(1761): n is a, c, g, or t
  misc_feature (1763)..(1764): n is a, c, g, or t
  misc_feature (1768)..(1768): n is a, c, g, or t
  misc_feature (1774)..(1776): n is a, c, g, or t
  misc_feature (1778)..(1778): n is a, c, g, or t
  misc_feature (1782)..(1784): n is a, c, g, or t
  misc_feature (1786)..(1824): n is a, c, g, or t
  misc_feature (1826)..(1827): n is a, c, g, or t
  misc_feature (1830)..(1831): n is a, c, g, or t
  misc_feature (1834)..(1834): n is a, c, g, or t
  misc_feature (1836)..(1836): n is a, c, g, or t
  misc_feature (1838)..(1838): n is a, c, g, or t
  misc_feature (1842)..(1842): n is a, c, g, or t
  misc_feature (1844)..(1845): n is a, c, g, or t
  misc_feature (1850)..(1850): n is a, c, g, or t
  misc_feature (1852)..(1859): n is a, c, g, or t
  misc_feature (1861)..(1883): n is a, c, g, or t
  misc_feature (1885)..(1888): n is a, c, g, or t
  misc_feature (1921)..(1953): n is a, c, g, or t
  misc_feature (1956)..(1956): n is a, c, g, or t
  misc_feature (1960)..(1960): n is a, c, g, or t
  misc_feature (1963)..(1963): n is a, c, g, or t
  misc_feature (1966)..(1970): n is a, c, g, or t
  misc_feature (1974)..(1977): n is a, c, g, or t
  misc_feature (1982)..(1986): n is a, c, g, or t
  misc_feature (1988)..(1993): n is a, c, g, or t
  misc_feature (1995)..(2008): n is a, c, g, or t
  misc_feature (2010)..(2022): n is a, c, g, or t
  misc_feature (2149)..(2149): n is a, c, g, or t
  misc_feature (3822)..(3822): n is a, c, g, or t
nnnnnnnnnnngnnnnnnnnnnnnnnnnnnnnnnnnnnnnnnnnnnnnnnnnngnnnnnnnnnnnnnnnnnnnnnnnnnnnnnntnnnnnnnnnnnnnnnnnnnnncnnnnnnnnnnnnnnnnnnnnnctnnnnnnnnnnnnnnnnnnnnnnnnnnnnnnnnnnntnnnnnnnnnnnnnnnnnnnnnnnnnnnnnnnnnnnnnnnnnnnnnnnnnnnnnnnnnnnnnnnnnnnnnnnnncnnnnnnnnnnnnnnnnnnnnnnnnnnnnnnnnnnnnnnnnnnntnnnnnnnntnnnnnnnnnnnnannnnnnnnnncnnnnnnnnnnnnnnnnnnnnnnnnnnnnnnntnnnnnnnnnnnnnnnnntnnncnnnnnnnnnnngnnnnnnnnnnnnnannnnnnnnnnnnnnnnnnnnnnnnnnnntnnnnnnnnnnncnnnnnnnnnnnnnnnnnngnnnnnnnnnnnaannnnnnnnntnnnnnnnnnnnnnnnnnnnnnnnnnnnnnnnnnnnnnnnnnnnnnnnnnnnnnnnnnnnnnnnnnnannnnnnnnnnnnnnnnnnnnnnnnnnnnnnnnnnnnnnnnnnnnnnnnnnnnnnnnnnnnnnnnntnnnnnnnnnnnnnnnnnnnnnnnnnnncnnnnnnnnnnnnnnnnnnnnnnnnnnnnnnnnnnnnnnnnnnnnnnnnnnnnnnnncnnnnnnncnnnnnnnnnnngnnnnnnnnnnnnnnnnnnnnnnnnnnnnnnnnnnnnnnnnnnnnnnnnnnnnnnnnnnnnnnnnnnnnnnnnnntnnnannntnnnnnnnnncnnnnnnnnnnnnnnnnnnnnnnnncnnnnnnnnnnnnnnnnnnnnnnnnnnnnannnnnnnnnnnnnnnnnnnnnnnnnnnnnannnnnnnnnnnnnnnnnnnnnnnnnnnnnnnnnnnnnnnnnnnnnnnnnnnnnnnnnnnnnnnnnnnnnnnnnnnnnnnnnnnnnnnnnnnnnnnnnnnnnnnnnnnnnnnnnnnnnnnnnnnnnnnnnnnnnnnnnannnnnnnnnnnnngnnnnnnnnnnnnnnnnnnnnnnnnnnnnnnnnnnnnnnnnnnnnnnnnnnnnnnnnnnnnnnnnnnnnnnnnnnnnnnnnnnnnnnnnnnnnnannnnnnnnnnnnnnnnnnanncnnnnnnngnnnncnnnnnnngnnnnnnnnnnnnncnnnnnnnnnnnnnnnnnnnnntnnnncnnnnnnnnnnnnnnnnnnnnnnnnnnnnnnnnnnnnnnnnnnnnnnnnnnnnnnnnnnnnnnnnnnnnnnncnnnnnnnnnncnnnnnnnnnnnnnnnnnnnnnnncnnnannnnnnnnannnnnnnnnnnnnnnnanncncacnnnnnnnnnnnnnnnnnnnnnnnnnnnnnnnnnannnnnnnnnnnnntnnnnnnnnnnnnnncncnnnnnnnnnnnnnnnnnnnnnnntnnnnnnnnnnnnnnnncnnnnnnnnnnnnnnnnnnncnnnncnnnnnnncnnnnnnnnnnnnannnnnnnnnnnnnnnnnnnnnnnnnnnnnannnnnnnnnnnncncncncncnnnnnnngngnnnnnnnnnnnnnnnnnnnnnnnnnnnnnnnnnnnnnnnnnnnnnnnncncncncncnnnnggngngnnnnnnnnnnnnnnnnnnnnnnnnnnnnntnnnnnnnnnnnntnnnnncnncncnccnnnnngggnnnnnnnnnnnnnnnnnnnnnnnnnnnnnnnnnnnnnnnnnnnttcnanncacncacccnnncngggnnngnnnnnnnnnnnnnnnnnnnnnnnnnnnnnnnnnnnnnnntnncannccncncncccncnnggggngnnnnnnnnannnnnnnnnnnnnnnnnnnnnnnannnngtttcaatccacgcacccacacggggtgcgacnnnnnnnnnnnnnnnnnnnnnnnnnnnnnnnnntgntttnaanccnnnnncccnnnnggggnnnnncnnnnnnannnnnnnnnnnnnngnnnnnnnnnnnnngtttcaatccacgcacccacacggggtgcgacagtgtgcaaagttacatattataagtcaataaattagacctattaatatgcgaattctcatttttatttcagcttaatggctgcaatcgccttanagacgggttaatctgctaattattaaggggtgcgaaaatactacttttttcgtaatactccacattcgcataaattatatgataagagcattattaactttgtaagcagtttcaacacctatcacttttacccttttattctcgtttttattgagaatataaaatctaacgctatcaagagacatatcaataatacgcttgattcgttcaatcaagagacaatattgtgcttctgtcacctcacactcaaagacagaattctgtaccctttggccataatctatgcaagccttagccacatgtcgtaggcggcgagctccttctttgctcgtagtatccacatcataagtcacaagaatatgcataatcgtaaatcattttattagaaataccggataattatcaatatcttgcctgatatatcttgccatcaacatggcctgtacataaggcagaagccctatctctattttttcattaagataaggatggattatcacctcccttttccttgcctgccatgcggaaataaatgtctttttccctttatccgtcataacaaccccattatcaccttgaaacaaaaaatccttggatgttatctgtcttttattaatcaacgacaagacaaaacgatcaccaagataggctcgcaattcttccatcatatccaatgctaaggatgtacgtcccggacgaagtgtatggagaaatcctacgtatggatcaaggccaactgtttcgagtgcggcagatgtatcattagcaatcaaagtataagcaaaagacaacatggcattcactgcatctttaggaggacggcgattccggccatgaaacgggaaatcagccttctgattaagtatcaaaacaggcaacacttcaaaataggcatttgaagccatgccttcataccctattagggtcgtcttatcttgggtcgccaaagcttcacgcttggcatgttccaacacttgtaccgcccgattaatgttttcattctctccataatcacgaatatatctctttaatatattacgatagttttgaatcttaccaccaatcatcagtcgtgccacatgtaatgaccaggattcatcatccgacaattgatattgtctcttgcgtaacagtacattccctttcgttgcgctctgtaccctgctgataaatctgccatgaggagataggaatgtaagtgatatgctattgtcactgcacaatttcatcacgcccggacttgcgcccatatatccgaacgtcacaatgccttctatgtttatcgcaggaatacggaacacttcctcttgcttgactgatactacgacattctgcccatccttactcagataggcttcaggtgtcgtcacatacaaagtattcaacaattttctcatgtatataagtgtttattgaggtaagtatctaccgtggtacaattcttggctatcgtcggcatacagatttctttcaatgagcatttgtcgcaatgtcgttcatattttgcttttgggataacagccttactgaatatttcatgcatatccctggcgcattgtctgacgatattgcgcaactcatctgttatagccacctctatccgatgacgaagttctccataaaagaacacaccgtagggtatatggattgcgtacatttcttcaagacacatngtttgtgccgccaactgcacttcatccacttcatcctttttgggtctgccatgcttatactccacagccaccggtcgccaacgtcctggatatttaggatgcaagatcgtatcttccaaagatggagaaggtagcaactctatggcatcggaaatgccatagagccccaactcacgcg

SEQ ID NO: 1527 - DNA, 4000 bp, Escherichia coli
  misc_feature (345)..(345): n is a, c, g, or t
  misc_feature (969)..(969): n is a, c, g, or t
  misc_feature (1992)..(1992): n is a, c, g, or t
  misc_feature (3077)..(3077): n is a, c, g, or t
gtaattcaagtccaacatcggggcatctgtcgtgaacagctttgatacatttacgataatgctctgcacctccatcagctaagtcgtcgcggttaacaacggtaattacggcatggttaacgcccatccgatctacggcttctgcgagttctgcaggctcattaggattcaatggtgcaggggttttctctgtgccgactgcacagaacctgcatccgcgtgtgcatactccccctgcgatcatgaaagttgcagtgcctctgccccagcaatcatggatgtttggacatcttgcttcttcgcagacagtgtgtagcccatgttcatgtacattcgatttggttngattaaatcgactttgagcattccctgttggaagcgttgttttgaaccaaggtgggagtcgcttcctttccgctttccggcgttcttcagcattaactctgagcgcaccgtcacacctttcggtcgacacttcagtgccattagcttggggcagcggtacacccattgaggaagaggagtggacacacagggttaatcattcgccttggacacttagatgagggcattcaaaacgaggagagatatacgagactctcctcccaagtatcgatggctagcagtgcagcactcgtgacggggggcgcaaaaagaattggtgctgcaatttgtcttcacctagcgaaaaaaggctactcagtcgcagttcaccacaattcatcgtctaaagccgccgaggatttagttgaggtgattaaagcactcggagtcaatgcttgcacggttaagggtgatttatcgaatccggaagagtttacccaaattatttccgaagcatcatcacaaattgggcctattctccacctggtcaataatgcatcgaagttcgttcatgatgatttggacaatttcgatgatgaatcctggaacgcgcacatggacattaataccaaagccccattgatnttaactcgggaattgttacaaaatctccctgataatgaagtagggtcagtggtaaatatcttggatcaaaaaatcgcgtctcccaatccagatcatatctcctacacagcgtcgaggtttgctctgctggggattactgaagctttagccagaggcctagctccaaaattacgaattaatgcagtcgcccccgggcatacattggcaagccccgaccaaagcgaggaaggattcaaccaagcccaaagcgagagtcctttgggttatggcccatctccagaagacatcgctcaagcagtgattttcttaatcgaaggtaaatcaatcactggacaagtaattttcgttgacgccggcgaaagattcctctcaagaaaccgagatgttgtgtttgaaactgagggtgttttatgacttcacattccgacgcaataatgcaaatattatctaaaaatcaagccgctactgtactttttttggaaaaggtaattcgggaggttgatataggagtgcacaactacgaaattggctcaccacaacgtctctctttcgacatacacgtcatgctttgtggagatagttcccctcaagaagatgaaatttctcaagttttgaattatgaatacctacttaccactttagacgagaccttgaaattggaacgtgcatcccttttggaaacgttagcaaataggttgttagatagaattctagaacctccttcggtcgagggtgcaaccgttgtaattactaagctagatgtcctggacggggatggtcaactgggctgttcaattactcgaatgaagtaatggtgcagggggtgggatttgaacccacgaagctctatgcaccggagcttaagtccggcccctttgaccactcgggtacccctgcgagccctctgaggacctcattagacttgaaccgagcggatttacgcccccttttgggggcgtgaaaaaagcgatgcaaagagcaatcgaactttacgaacgctttaacactcctccgattacgggnaggtgatgactaggcgcagtgtgccgttccagaatggtcggttcacccaagttgcgatattcctggcaattttgatgataactccccaaatggctacatttttcgctgaaccaacataccttcaggtagactcccgggctgaaaattcagatgaatttgaatcaaaactctacacgctatatttcgcagaagccaatgcgtcctccggaggcgatggccacatttctacaatggtccctgaatctgggggtcaatcaacctctagtgcactagattctacaatagaattcacgactggagaccttctaagttcccttgaaattactggtcgtcccaaacacggttcttccagtggtcaattttacattccagtgcattttttccttcgtgctcaaggacctagcaactctcaggtgacctgggacatcgtgattagtgcaaatggtaatactgttggttcagagtcatgggaggccgatgcatgcaatcccggcataactaattcatgcaacttcgaccacgaattattcgaggttatattgaattcaggtgactcatttaccatacaagatggtaacgaattaacagtggaggtctctgctgaaatgtcaggttgtgaaggttctggtggccccttcggaggtagttgcgaagcagaagttgcttggaacgagatagatggagaaagcaatcggtattcacaaatggaagtagaaaccaacgcgattgcagatagcgaggtcgtcctgcaaagagacggggctgaactcgcagatggtgtagaattggaatggtatccgaacgatgttttgactgatagaacaatgcaattttcctttgatgtgaagagcgccttcggcagagatgatatggattctgtgaagttattgatgcgggatccaaatggaaactaccgtatagatcacgagatttcatccgatgatgatggtattagagacacaagtcaaggaatttttggcacctatacatggacatatccaagcggacttccatccggagaatacaccgtagaattggaaattacggatgttcaaggtaacgccttcctagtcgaacacgaaccngttgaaatgaaacaatggggagttgcgattaaccacagggaagatagaacagtggaatatattgcacctgacgaaacaacaccggtaccacttcagttagtccacagaggtgactctaccaaatcgatgtctgtagaacttgaattactcacaaacttaggtagctcatggcttgtagagttcgactctcctggtggctacactttgaattcaggaggcgatatattgaatccaatacttaccataactgctcctgatgacttgacaggagcacctaacaaaattgagattagagctgttgctgaagccacaatagaaggtgttcaaactgttgtccatcaagatctacttactcttgatttggaaaaattagaagtttaccaacctccagatgtatcgatatggaatgaagttcatgacataccgattgctaactctagccgagtcggtgatatcgatccaacaattcctagatatgtcgaggataaccaattcaataccttcttactagaaattttcaacacaggattcgacacggataatttcagagtggatattcttaagcgctcgaaatcaattatccagatttatgataatgatacgggcgaacgaatcctagaagatgagggggatggaactttccatatacctcccttagagagacattcaactcaggttcttcggttgaatgtaaaaccttccgcagacagagaagattctgatataggaatgatagaggtcgaagtgataagtagtggaaatgcctcacttagaacgacagttgaatttacaattcagaggacatttggaattcgtgcagaagtatcccaagattgcgacggcaccccgctaggtcacatccaagtatctctttgttcaactctaaacgaccctgaagtgaatcttcgcgctcgtataacaaa

SEQ ID NO: 1528 - DNA, 4000 bp, Escherichia coli
  misc_feature (864)..(864): n is a, c, g, or t
  misc_feature (991)..(992): n is a, c, g, or t
  misc_feature (1046)..(1046): n is a, c, g, or t
  misc_feature (1088)..(1088): n is a, c, g, or t
  misc_feature (1090)..(1090): n is a, c, g, or t
cgttcgcgaccggaacgtcttttcctaatttcttcgccagcttttcgaacgcattcttcgtcgaatccgtcgcgcccttgatctttttgccgcgcttaccttgcacggcttcgtcttcttcttcatcatcatcgtcgtcgccgctcgcctccgcctcctgcatcgcgcgcgcggcgtcctcgtcttcatcgtcgtcaaacacgtaatcttgctcctcaaatccatcgtcgtccgggaaatcgacgtcgtcgtctgggaaatcgacgtcgtcggcgaccgtcgccgtcgccggcgcctcgtcgtcgtcgtcgtccgggaaatcgatgtcttcgccgccttcacccgcgttttccccgcgctccatcgcatccacggcctcgccgacaccgccgccgaaatctaattcgttaaactcccgcaccgccatcttcacgctcttgtcgctttgcaacttgtccaccctcgccagcgtctcctccgccggcgcgtacgggtacatcttcaccgcccactccttgtacatcgtcgccaacaaattcatatcgtgttcctcgtgtccctcgcccttcgaccgcgcggcaaacttctccgggaactctctgtacatcgccccgagcccgttcggcccgagcaagtgatcgtgcacgctaaacttcggtcgccgcgtcgtcccggcgctcgacttccgcttctccgcgcgcgcgccgcgatcatcgcccgagccctcgccgcgcgcgccgccctcgacgtcgtccgtcgtcgtcgtcgtcgcgccgtcctcgcgcgttttcagcgcgtcgctcgcctcttttgaaatccatcgctcgcgcggcaccgtgcagtccttcgcccagtgtccgcccngtccgcacttgtagcacggtttatttttgctcgacatcgccgtcgccgtcgccgcgccgcgtcgcgccgtgccgcgccgcgcgccgtcgcgggcgcggcggtttgaaaatttgaaacgccgcgtgtnngtccgtgtgtgattgatgttaccgaccgccgacgacgcctcgacatcgtcgcgngcgacgcgtcgacgcggcggacgcgcgcgcgaggcgacgcgngngcgatgtcggcgaacgcgatggaccacctgctcgtcctgggcgcgctcggcgagatccacgcggcgtcggcgtgggcgaaaacgccgatcgaggagctcgtggaggaaattcaaggcttcgcgggacgcgcgcgcgacgcgagaatggcggcgacgacgccggtgggcgcgttcggagacgcgctgggacggtttggattggtgatgagcgagtgcgtgcgggagacggcgctggagtcggtgatggtggacgacgaggggagcgacgaccagggacgcgcggcgaagacgacgcgattgttgattttgttgggagtgctgtgtaaggggagtttcgagacgaaggtcgagctcgtgtttcgagcgatggacgcgcgaggggtgcgagggatcacgtcggagcaagcgatggaattcgcgggtgattgcgtgagcgtcgtcggcgcgttgctcgaggaacgcggcgaccgcgtggatttaggttgggcttcaaacatgtggacgcggtgcgtcaaagacgcggtcgacgcgtcgaacgcggatgatgatctcggaatgtttacgctggaagaattcaagacgctgatgcggaagatgttcgataagatgacgcgggcgagcctggagagcccggatttggacagacgaaggcgggcgagcgggggcgagacgcaacgtcgacggagcttgggatcggcgagcgagcgacgattgtcgcaaggttcggcacatggctttttagacgcaccgatcgttcaggctggtttggagtacttgacgggcgccagcagcgggggtcagcgagactctcgcggcagcggcggctcgccggcgtccgccgcaattttgtcgaaagttttagaaaccgtggcgagtccgcaacaatcgacgcgtgatgcatcttatcattcgcgcagtcatagtggcgagcacgacgtcaaaacgtcgggcggattacatcgagcgtcagggtcgtcaaactgggcgagcatgattcccgaaggcatcgcgcacgtgctcggagtcggccctcgaggggctacggacactcacgagctaaagcgcgagcccggaatgacggacgaggaatgggaacacgcaaaaattgtatccgaggtcgaggcggcgagacacgagacggatgatgcggagatgggacaggcggtacaggaatcaaactggagcggcatagtcgacttcgtaaaggaactcgtcatacgtattttcctcttcaacaccgtccgtctgcttcttacaattgcgctcctgggcggagatgccgcgttgtgcgtgtacgtcatcggtcacttcggcaccgtcgccggtctaggtttcgttgtcgtcatcaacgtcgtcatcagcgtgattttcatatggttcattgtgagcttcaacaagcgcgaacgcggtaaggacaacatgcaattcggtgcgaacttgatgcagagcatccaagacatcgccaagtccaaggctaccttcgagcagggattaggtgcgtttagaggcgcgaacgagtcggacacagatcacatctcgccgcgttcttggaacatggatggcgagacgacgcctcgcgcgttcgggcaagcgtcgatcacgggcgatcaacgaagatttcggaggaccgtatccggcacggttctcggcgagcgggtgtaggtactaatctagcgaaggtaaatttacaacaagaattacactcagatcgcgcgacgcgccaccgccaactcctcggcgagggcgtccgcgagaaaaggcgtgacgccccacgttgaacacatgtgatcatactcttcccacgccgccttcgacgccgacgcgttcgtgcggatcgctcgaatgagagtatttcgaggcgtgtgctcccctcctacgaattccatgacgtcgacgcgatatcccagcagtcgcaaaatgtgagctctgaatgcgtccgtgagaacgtcaccgagacgttcgctgaggatgccgtgcctcgccatcggcgggaaagcaacatgaggtgcgcttttcaaacgcacttggagatcgtgatgacagcacggcgcgatgagcgccagtggagcgcaccaacgcaccgttcgaacgatggactcatccgtcgccgtgtcgcacgcgtgcaaagcgagcactacgtcggtgaacgcgtcctcctctgaaccgtctacgaaagtcacgtcggcgtcggcgatcgtgccttcaatgaatctcatcgacgcatcccaacctagctctttggccacccgcgagttatgttcgcgcgcttggcgcttcacgtcgacgcccactacgtttgtaggcacgcgtctcttcgagctcaagagcgagtacgccccaaacgtgagatacgcgttcccgcatcctaaatcgcacacacgaagcgggcgagtctcatcgccgcccttcatgtgtcccgccgacgtcgcggtgtcgtaagcaacgttcaaaatcttcagaaactcctccacttgcttgtacttgtcccgcttgctcgccttgatggttccatccttggcgacgacgccgacgtatcgcaaaaacgggtcctcccccgtcagtaacctcgacttctcgcggtcgtgcccttgtgggccgacgacgatcgtctgtgttctcgcattaccgtctatcagcgtccccttactcgcgttgtccctagaaatcgtcgcccgagccttcttcgcgttcgccgtcacgttgtaaccgccgcgcgcgtgttcgacgcgccaatgtttatatcccgccctcagcgcctcctccagcgcctccctcgccccgatcgcgtcctcatccccgctcgcgctcttcgaaacgagccctccttcgccctcgatcgcgtgattactcgtgaacgcctgtcgttcgtcgtaccgcgtccgctgcagcgccgtccgcccccgaatcgtc

SEQ ID NO: 1529 - DNA, 4000 bp, Escherichia coli
  misc_feature (3)..(6): n is a, c, g, or t
  misc_feature (9)..(9): n is a, c, g, or t
  misc_feature (11)..(12): n is a, c, g, or t
  misc_feature (16)..(19): n is a, c, g, or t
  misc_feature (21)..(21): n is a, c, g, or t
  misc_feature (25)..(25): n is a, c, g, or t
  misc_feature (27)..(30): n is a, c, g, or t
  misc_feature (36)..(36): n is a, c, g, or t
  misc_feature (38)..(39): n is a, c, g, or t
  misc_feature (41)..(41): n is a, c, g, or t
  misc_feature (43)..(43): n is a, c, g, or t
  misc_feature (46)..(46): n is a, c, g, or t
  misc_feature (49)..(49): n is a, c, g, or t
  misc_feature (52)..(52): n is a, c, g, or t
  misc_feature (55)..(55): n is a, c, g, or t
  misc_feature (58)..(61): n is a, c, g, or t
  misc_feature (63)..(67): n is a, c, g, or t
  misc_feature (70)..(70): n is a, c, g, or t
  misc_feature (72)..(72): n is a, c, g, or t
  misc_feature (74)..(77): n is a, c, g, or t
  misc_feature (80)..(85): n is a, c, g, or t
  misc_feature (88)..(89): n is a, c, g, or t
  misc_feature (91)..(91): n is a, c, g, or t
  misc_feature (94)..(96): n is a, c, g, or t
  misc_feature (100)..(101): n is a, c, g, or t
  misc_feature (104)..(105): n is a, c, g, or t
  misc_feature (108)..(109): n is a, c, g, or t
  misc_feature (111)..(112): n is a, c, g, or t
  misc_feature (114)..(114): n is a, c, g, or t
  misc_feature (118)..(118): n is a, c, g, or t
  misc_feature (124)..(124): n is a, c, g, or t
  misc_feature (128)..(128): n is a, c, g, or t
  misc_feature (131)..(134): n is a, c, g, or t
  misc_feature (138)..(144): n is a, c, g, or t
  misc_feature (146)..(147): n is a, c, g, or t
  misc_feature (149)..(149): n is a, c, g, or t
  misc_feature (151)..(151): n is a, c, g, or t
  misc_feature (154)..(154): n is a, c, g, or t
  misc_feature (157)..(160): n is a, c, g, or t
  misc_feature (162)..(162): n is a, c, g, or t
  misc_feature (165)..(167): n is a, c, g, or t
  misc_feature (169)..(169): n is a, c, g, or t
  misc_feature (171)..(174): n is a, c, g, or t
  misc_feature (178)..(178): n is a, c, g, or t
  misc_feature (180)..(182): n is a, c, g, or t
  misc_feature (184)..(184): n is a, c, g, or t
  misc_feature (186)..(188): n is a, c, g, or t
  misc_feature (190)..(191): n is a, c, g, or t
  misc_feature (193)..(193): n is a, c, g, or t
  misc_feature (195)..(197): n is a, c, g, or t
  misc_feature (199)..(199): n is a, c, g, or t
  misc_feature (201)..(207): n is a, c, g, or t
  misc_feature (209)..(209): n is a, c, g, or t
  misc_feature (211)..(216): n is a, c, g, or t
  misc_feature (223)..(224): n is a, c, g, or t
  misc_feature (226)..(230): n is a, c, g, or t
  misc_feature (232)..(232): n is a, c, g, or t
  misc_feature (234)..(236): n is a, c, g, or t
  misc_feature (238)..(242): n is a, c, g, or t
  misc_feature (245)..(245): n is a, c, g, or t
  misc_feature (247)..(247): n is a, c, g, or t
  misc_feature (249)..(252): n is a, c, g, or t
  misc_feature (257)..(258): n is a, c, g, or t
  misc_feature (261)..(261): n is a, c, g, or t
  misc_feature (263)..(263): n is a, c, g, or t
  misc_feature (267)..(267): n is a, c, g, or t
  misc_feature (269)..(270): n is a, c, g, or t
  misc_feature (272)..(272): n is a, c, g, or t
  misc_feature (277)..(279): n is a, c, g, or t
  misc_feature (281)..(281): n is a, c, g, or t
  misc_feature (283)..(283): n is a, c, g, or t
  misc_feature (285)..(285): n is a, c, g, or t
  misc_feature (288)..(291): n is a, c, g, or t
  misc_feature (294)..(294): n is a, c, g, or t
  misc_feature (298)..(302): n is a, c, g, or t
  misc_feature (304)..(304): n is a, c, g, or t
  misc_feature (306)..(307): n is a, c, g, or t
  misc_feature (310)..(312): n is a, c, g, or t
  misc_feature (315)..(316): n is a, c, g, or t
  misc_feature (318)..(320): n is a, c, g, or t
  misc_feature (322)..(322): n is a, c, g, or t
  misc_feature (331)..(332): n is a, c, g, or t
  misc_feature (334)..(334): n is a, c, g, or t
  misc_feature (336)..(337): n is a, c, g, or t
  misc_feature (339)..(340): n is a, c, g, or t
  misc_feature (343)..(343): n is a, c, g, or t
  misc_feature (345)..(345): n is a, c, g, or t
  misc_feature (348)..(356): n is a, c, g, or t
  misc_feature (358)..(358): n is a, c, g, or t
  misc_feature (361)..(368): n is a, c, g, or t
  misc_feature (370)..(370): n is a, c, g, or t
  misc_feature (372)..(375): n is a, c, g, or t
  misc_feature (377)..(379): n is a, c, g, or t
  misc_feature (381)..(381): n is a, c, g, or t
  misc_feature (384)..(384): n is a, c, g, or t
  misc_feature (386)..(386): n is a, c, g, or t
  misc_feature (390)..(392): n is a, c, g, or t
  misc_feature (395)..(395): n is a, c, g, or t
  misc_feature (397)..(398): n is a, c, g, or t
  misc_feature (400)..(401): n is a, c, g, or t
  misc_feature (403)..(410): n is a, c, g, or t
  misc_feature (413)..(416): n is a, c, g, or t
  misc_feature (418)..(421): n is a, c, g, or t
  misc_feature (423)..(423): n is a, c, g, or t
  misc_feature (425)..(431): n is a, c, g, or t
  misc_feature (433)..(434): n is a, c, g, or t
  misc_feature (436)..(439): n is a, c, g, or t
  misc_feature (441)..(442): n is a, c, g, or t
  misc_feature (444)..(444): n is a, c, g, or t
  misc_feature (446)..(448): n is a, c, g, or t
  misc_feature (450)..(451): n is a, c, g, or t
  misc_feature (453)..(454): n is a, c, g, or t
  misc_feature (458)..(463): n is a, c, g, or t
  misc_feature (466)..(468): n is a, c, g, or t
  misc_feature (470)..(470): n is a, c, g, or t
  misc_feature (472)..(474): n is a, c, g, or t
  misc_feature (476)..(476): n is a, c, g, or t
  misc_feature (478)..(484): n is a, c, g, or t
  misc_feature (487)..(494): n is a, c, g, or t
  misc_feature (496)..(497): n is a, c, g, or t
  misc_feature (499)..(501): n is a, c, g, or t
  misc_feature (503)..(505): n is a, c, g, or t
  misc_feature (508)..(509): n is a, c, g, or t
  misc_feature (512)..(512): n is a, c, g, or t
  misc_feature (516)..(516): n is a, c, g, or t
  misc_feature (518)..(518): n is a, c, g, or t
  misc_feature (520)..(520): n is a, c, g, or t
  misc_feature (522)..(522): n is a, c, g, or t
  misc_feature (524)..(526): n is a, c, g, or t
  misc_feature (534)..(538): n is a, c, g, or t
  misc_feature (540)..(545): n is a, c, g, or t
  misc_feature (547)..(548): n is a, c, g, or t
  misc_feature (550)..(552): n is a, c, g, or t
  misc_feature (554)..(554): n is a, c, g, or t
  misc_feature (557)..(558): n is a, c, g, or t
  misc_feature (560)..(560): n is a, c, g, or t
  misc_feature (562)..(567): n is a, c, g, or t
  misc_feature (570)..(572): n is a, c, g, or t
  misc_feature (576)..(578): n is a, c, g, or t
  misc_feature (581)..(585): n is a, c, g, or t
  misc_feature (587)..(588): n is a, c, g, or t
  misc_feature (590)..(598): n is a, c, g, or t
  misc_feature (600)..(602): n is a, c, g, or t
  misc_feature (605)..(605): n is a, c, g, or t
  misc_feature (607)..(608): n is a, c, g, or t
  misc_feature (610)..(611): n is a, c, g, or t
  misc_feature (614)..(615): n is a, c, g, or t
  misc_feature (617)..(623): n is a, c, g, or t
  misc_feature (626)..(626): n is a, c, g, or t
  misc_feature (628)..(628): n is a, c, g, or t
  misc_feature (630)..(631): n is a, c, g, or t
  misc_feature (633)..(636): n is a, c, g, or t
  misc_feature (638)..(639): n is a, c, g, or t
  misc_feature (644)..(645): n is a, c, g, or t
  misc_feature (647)..(647): n is a, c, g, or t
  misc_feature (649)..(649): n is a, c, g, or t
  misc_feature (651)..(654): n is a, c, g, or t
  misc_feature (657)..(657): n is a, c, g, or t
  misc_feature (659)..(659): n is a, c, g, or t
  misc_feature (661)..(662): n is a, c, g, or t
  misc_feature (664)..(664): n is a, c, g, or t
  misc_feature (666)..(666): n is a, c, g, or t
  misc_feature (671)..(671): n is a, c, g, or t
  misc_feature (673)..(673): n is a, c, g, or t
  misc_feature (675)..(677): n is a, c, g, or t
  misc_feature (679)..(680): n is a, c, g, or t
  misc_feature (682)..(684): n is a, c, g, or t
  misc_feature (687)..(687): n is a, c, g, or t
  misc_feature (691)..(694): n is a, c, g, or t
  misc_feature (696)..(706): n is a, c, g, or t
  misc_feature (710)..(710): n is a, c, g, or t
  misc_feature (712)..(712): n is a, c, g, or t
  misc_feature (715)..(715): n is a, c, g, or t
  misc_feature (717)..(721): n is a, c, g, or t
  misc_feature (723)..(723): n is a, c, g, or t
  misc_feature (727)..(728): n is a, c, g, or t
  misc_feature (730)..(731): n is a, c, g, or t
  misc_feature (733)..(733): n is a, c, g, or t
  misc_feature (738)..(738): n is a, c, g, or t
  misc_feature (740)..(740): n is a, c, g, or t
  misc_feature (742)..(742): n is a, c, g, or t
  misc_feature (744)..(746): n is a, c, g, or t
  misc_feature (749)..(749): n is a, c, g, or t
  misc_feature (751)..(751): n is a, c, g, or t
  misc_feature (753)..(753): n is a, c, g, or t
  misc_feature (756)..(756): n is a, c, g, or t
  misc_feature (758)..(760): n is a, c, g, or t
  misc_feature (762)..(766): n is a, c, g, or t
  misc_feature (772)..(772): n is a, c, g, or t
  misc_feature (775)..(776): n is a, c, g, or t
  misc_feature (778)..(778): n is a, c, g, or t
  misc_feature (780)..(780): n is a, c, g, or t
  misc_feature (782)..(782): n is a, c, g, or t
  misc_feature (784)..(784): n is a, c, g, or t
  misc_feature (788)..(788): n is a, c, g, or t
  misc_feature (790)..(791): n is a, c, g, or t
  misc_feature (793)..(797): n is a, c, g, or t
  misc_feature (799)..(800): n is a, c, g, or t
  misc_feature (803)..(807): n is a, c, g, or t
  misc_feature (809)..(810): n is a, c, g, or t
  misc_feature (812)..(814): n is a, c, g, or t
  misc_feature (817)..(820): n is a, c, g, or t
  misc_feature (877)..(877): n is a, c, g, or t
  misc_feature (1307)..(1307): n is a, c, g, or t
  misc_feature (1986)..(1986): n is a, c, g, or t
  misc_feature (2158)..(2158): n is a, c, g, or t
  misc_feature (2462)..(2462): n is a, c, g, or t
  misc_feature (2528)..(2528): n is a, c, g, or t
  misc_feature (2780)..(2780): n is a, c, g, or t
  misc_feature (2783)..(2783): n is a, c, g, or t
  misc_feature (3074)..(3074): n is a, c, g, or t
  misc_feature (3218)..(3218): n is a, c, g, or t
  misc_feature (3400)..(3400): n is a, c, g, or t
  misc_feature (3591)..(3591): n is a, c, g, or t
  misc_feature (3615)..(3615): n is a, c, g, or t
  misc_feature (3636)..(3636): n is a, c, g, or t
  misc_feature (3831)..(3831): n is a, c, g, or t
gcnnnnatngnntcgnnnntnaccnannnncggaantnncngnatnccnggnttnacnnnntnnnnntgntnannnngtnnnnnngcnngnggnnnaagnngcnnaanngnntnatcngcatcngctnggnnnnttgnnnnnnngnngnanagncgnnnnanccnnncnannnnctgnannngntnnngnngntnnngngnnnnnnngncnnnnnnattttanngnnnnngngnnncnnnnncgncngnnnngcggnnatncnggtnanncnggtannntngntnaannnnttnaacnnnnngnanntannnacnntnnnancgtcgatgnngncnntnntgncntgnnnnnnnnngngcnnnnnnnngnannnnannncngtnanccgnnnaancnncnnannnnnnnngannnngnnnntngnnnnnnngnngnnnnanncngnnnanncnntgannnnnnagnnnangnnngnannnnnnnaannnnnnnngnngnnnannnggnnatncggncntnangnnnttacggtnnnnncnnnnnntnnannnanacnncnannnnnngcnnngctnnnttnnnnnannannnnnnnnntnnncangnnannagnnannnnnnngcnantnngnnnntnngggcnntngngnnnntgnancnntnantattnancnnntnnannnatngagnnnngnnnnnnnnnnnacgnanatnannnnnanaaanncnnanaacgncnanannntgntnanctnannntnnnnngataantcnnanantntnatananntnnnnntnncannnnnanncnnnttnnnnttttctagcagccgaatagttactaaataattaaactcacttacctagcgtaaacancgactaaatgatcaacttcactaaaatgcacggcctcggtaatgattttgtggtcattgacgccatcaatcagcacatcgacttaacgcccgaacaaatccggctgatgtccgaccggcacttcggcataggcttcgatcagctgttattggtcgaaaaggcggtaaacgccaatgccgacttcaaataccggatctttaacgcagacggcggcgaagtcgcccagtgcggcaatggcgcacgctgctttgcccgctttgttcgcgataaaaagctgtcggacaagaatgaaatctgcgtcgacaccaattcaggtcaattgttactgcgctttgatgccgacaacctgatcaccgtcaatatgggcatcccaaggcacgcacctgctgaaatccctttgctggccgaagaagaatcccgattttatacngtgctggttaacgagactgaaaaagcttttggcgctgtatccatgggcaatccgcacgcggttattcaagtcacggatgttaaaaccgcgccggtggctgaactgggaaaagccctggaaagccatacttttttcccggagcgggttaatgtcggttttatgcaagtcgtagatcgccaacacattaagctgcgcgtgtatgaacgcggcgctgccgaaacactggcttgcggcagcggcgcttgtgccgccgtggtcatcggcattgaacacaatctgctggatcatacggtcagtgttgacctgcccggcggaacgctaagcatcaactggcttggccgtggcgaaccggttttaatgacgggacccgccatttctgtttttgaaggacaaataacgctatgaacgaacacccctcagaactcacttcaacccaggttgaagactacctgcgcaaacatcccgagttcttccatgagcatttgaatttgctggaacacatgagcatcccgcatcctaccggcaatgcggtctccttaatttcaaaacagctggagctgtttagaagtcggcatcatgacatggaaaaccagctcactgcgctgatagaaatagccagggataacgatacctcgctgaaccgtatgcataaactgactctcgcgctgctggatgccanaacgctggaagaagcggttgccaatctggatgtcgtgctgtcggaatattttttgatcgattttgttgcggtgcgcatcatcaaacacaatccggacgccgctattaccaacctgtttattgaaccggacagcaaagacctggaaccgtttgcggttgaactggccggcaancagcccaaatgcggccgcccgactatagctcaggcaagagtattattcggcgagctggcgtttgaagtaaaatcctgcgccattatccccctggcctttaccgaactggaaggcattttagccatcggcagccgggaagaaggccggttccattacagcatgggcaacctgtttttaaatcaaatgagcgaaatcatagcgacccggctgatcaccttgttgcagcagcgttaacaacatggattccgatgccgaactgatgctggctgactttttcaagcagctcactgttgaagttcgcgcntcggaacacaccgtaaaaagttatcagcgggatcttaaacatctatcccgctattgcacagacaancccataacccgctgggccgacctgaagcacaccgatattcgcgcccatatcgccagtcggcatcggaaaggcctaagcagcaaaagtctgcaacgcgagctgtccgctattcgcagtttttataactacctgttaaaaaagggccaggccgacgtaaatcctgcgcagcatattcaagcgcccaaacaagccaggaagctgcctaaaacactggatgtcgatcagttatccggcttgctggaagccggggcnagntcattgcttgaaatacgcgacctggccatgttcgaattattctattcatccggcctgcggttgagcgagctgtcggcgcttgatttaaccgacctggatttgccggacagcaccttgactgtccgcataggcaagggcggtaaatccagagtattaccggtaggcagcaaagccgttacggcgattgaaaactggttacagcagcgagccgtaaaaatccccgctatcgagcccgcgctattcgtttcaacgcggggcacccggctcggtcaacgcaacattgagttaagnctggaacggtggtgcaaagcaaaaggtattgccgaacatatccatccgcacatgctgagacattccttcgccagccatttacttgaatccagccatgacttaagagccgttcaggaactgctcggacacagcaatatcagcacnacccagatatacacccacctggactttcagcatctggctgaaatctatgataaagcgcatccaagagccaaaaaaaaaccgttataacaacttgcgccgtaagcaaatagcaaaaaaacctgctaccatgtagccaatttttcatataaaaaagcagtgggatgaaatgtttttcgatcctncgaaaaaacctctttacgggatttcaaaaatggcggcaaacgatacactgaacgatataaaatctaaagggatactgtggggctttggcgtttttaccctcattgtggtgatcatcctgatcttcctgggcgcttggtggggcagagagccggatcagtttaatgttctggacgaagccgtaaaacgcgcngaagaaacccacgccactgaaagnatgccggtcggctatgtctanaccaacaccctggcccatatcgccgaggttctgttgcataaaagcggcggctatattactaacgacgtcgcgcctcccggcgtattactggacaacatttccaactgggaatacggcgcattagtcatgctgcgcgacgccacatcggcattaagaaaccactttgccagggatcaatcccaatcggccgaagancctgatctggcgattgcagaaccttatttctattacgaaaacgactcatgggccctgccgtcaacggaagccgaatatcaaaaaggcgttgaagcgctgcataaatacatggaacgcctgcaaaaatacggcggccccataaaaaaagctcaattttattcccgtgccg

SEQ ID NO: 1530 - DNA, 4000 bp, Escherichia coli
  misc_feature (411)..(411): n is a, c, g, or t
  misc_feature (3233)..(3233): n is a, c, g, or t
ctggaatccgccttctttaagcctttgcgatatgacctttatcccctcgccgctccatccataacacccgaatgcagctgcttttttattctggaacttcaaacccctcatttcttccaggatggcagctgcagcagaaaggattcccttattcaccgttggggatcctatcaaaactgcctttgatttgaatatttccgtgatcaaatcgcttttgtctgatcgggcgatgttaaacagctttacggtaacctctggatcggccgccgtgattccttccgcgatcgcttcagccatgcgacgcgttccgttccacatggtgtcataggcaatcgtaatctggttttcagaataggcgtgggcccattgaatatattgtttcacaatctgtagtggatcgttccgccatancaccccgtggctcggacagatcatatccactggaatattcaaagctataatctccttaattttcttatcaaccagcttactgaacggggtcaggatgttcgcatagtatttaatggcctcctgaaataactctgcctgatccaccagatcattgtacatcaattctgaggctatgtgttgaccgaacgcatcgttgctgaaaaggacgttatcgcccgtgagataactcatcatgctgtccggccagtggagcatcggggcttcaatgaatgtcagctctttcgatccaatgctgagcgtatcccctgtctttaccacctgaaaattccagtcctcgtgataaagacccgttagcgagtctatcgcgcgggatgtgcagtatatcgggacatcggggatatggcgcatcagttccggcaaggcaccactgtggtcagattctccgtgatttgctataacatagtcaatctcgtcaagtgagatctcttttttaagattctcaacaaattcacccgaaaacggaccccataccgtatcgatcaacgctgttttgttatcccttactaagtaggaattgtaactcgagccgcgatgtgtcgaaagctcctgcccatgaaatgtcctcagttcccagtcaacctttccaatccacgaaatagtctcgttgatcctaaataccatgtccatctcctctttgcgtgttaatcagatcgcgaaacgcataaacgtataacgaccttattattcgctcttgtttataaatatcctgacctcatgatctagtccagttcaacggcgtaagatcagccgatactgcggcgctggaagcccagaaggccgattaccataagaagcactgttactcccatcagcgcaatcaacggcgtcgccgaaaactcgcttacaaggatcttcggcacgtgggtaaacggcgagacgtcttgtatcgactggcctatctgtaggagctcaccgagcaattcgatgacgatgattcctaacaacgcgccccagctcaaaaacgtaagcttaggtatgaggccgtagagcgccatcgcgattccagccatcacaaggattgcaggcagatatgccatcgaggcggcgaacacgcgcggcagctcgtagccgacgtttccgacgctcaaaccgtaggtaagtccagcaggcacgctaaacgccgcaagcacaaccgtggtaccgacgactgtcagtaacaagtaacttcccgcccaacgcagccgaccgactggagtagccagcacgggatcgacgcgcgcctccttttcctcagactgcatttgcagcattgtgacaatggcgtacacggcagctatctcgacaactatcgttagagctaaggtgaaaaaactatcactcactccggagctgcctccaagacgggcaagcagacccacgagctgcggactagttgcaagctggtcagcgccggctttagcgagatcgcctgtgacgacaccaaatacagcgaacccaacggcccatgcgagcagcgagcggcggtttagccgccagacgagcgctgccgggcttcgcagtctcggcgacgccgaggcggggccgggccgcggccgcacaagacctgaaccgacgtcccgctgagaagacagagcaaacgccattgccgttaataacgcgatggcgccgatgaagagtacaaaaacaccccagcgttcgtcagcaaagggtttgatctgttgcatccaaccaagcggcgacagccaagatagtacgctgtgctcgcctatatcgccagcagcccgcagcagatatccaatgccgagaacggcgacggcaatgccttttgcagtgcccgcgcgctcagtgagctgcgcagcgacccccgctaccgcagcaaacgttgctccgacggccgcaactgacaggccgagcgcgacagagccggcgacgggaagtccatatacaattaatccgcccgcaacgagcgcggcgattaccaaatttgcgccgagcgtcacaagcagactcgccgacagcgctgcctgccgacccaccacggtcgcgtctagcagttcaaatcgtccagcctcctcctgcgtacgggtatggcgaacgacaaagagagcactgccgagcccgacaagcactgcgctatagacgctccatctccacgcggtgagcccggcgatggtcggaatgtaaatatgcccgagcagcgctacctctgctgggatgttcgcggtctcggagacgaacgcttcaagcgatgtggctgagggaagaagctgattgaaggtcgccacggtgacaaccgcaaagagggccggcagtatcacacagaccgacaatatgagccaatcccgccgaaggatcagacggagcagtgccctcgtgccggtgtacgcgttcaggttcatctcatgacgccttcctgaagcttataatggcgcaaaaacagatcttcaagcgtaggaggggcgctcgtaagtgcacgcacgtcaaattgggtcaggtaccgcaagacgcgattgaccgcgtcggcatctacgctgaatcgggcgtgggcgccttcgacggtgaggttgtaaacgcctggcagccgggtaagtccagtgatcggtcgccgggtctcgaccgacactgtggtgcgcgtcaggtgacgcagttcggcgagtgacccagtctcaacgattctgccctcattaataatgctaatacggtcacagagcgcttcgacttctgagaggatgtggctcgacagcaacacggtggtgccggcccccttggcctcgacgacgcactctcggaatattgcctccatcaagggatccaagcccaangtaggctcgtcgagaatgagcagttccacgttagagacgagcgccgcgattagggcaaccttctgctggttaccctttgaatacgtgcgacactgccttgtcgggtcgagtttgaagcgtgcgacaagctcatcacgtcgcgattggtcaaagccaccgcgcagcctcgccaagaggtcgattacctcaccaccagagaggtacggccataggttcacatcaccgggcacataagccagtcggcggtggagcgctacgacgtcgcgccagggatcacctccgagcagcgtgaccgttcctgagtccttgcggagcaatccgagcaggatccgcaaagtagtggtctttccggcaccgtttggaccgatgaagccgaacacctcaccgcgctcaacctcgagatcgacgccgtcaagggcaatgtgtttgccgtagcgttttgtcaagctgtgaatttcgattacggacaacctacacacctccgatcgtacgttctgtgcgtttcaggagagtagcgtacgttacgatcttgaagctctttaaccgaatgagatggcgccgtttatgcatagctcttccgattcttgttgcgtcgcccgtcaaaaatttcattttagtcaaaacagaggagcttctcttaaaaagaggagatgctcgtctagctgaagcatagaacccctccctcttccattaattttgagataagaacgacacatatatttagctcagggccttttcgtttgtagctgtgaacaggaccaaagaac

SEQ ID NO: 1531 - DNA, 4000 bp, Escherichia coli
  misc_feature (1)..(1): n is a, c, g, or t
  misc_feature (4)..(5): n is a, c, g, or t
  misc_feature (8)..(8): n is a, c, g, or t
  misc_feature (10)..(11): n is a, c, g, or t
  misc_feature (13)..(17): n is a, c, g, or t
  misc_feature (20)..(21): n is a, c, g, or t
  misc_feature (24)..(24): n is a, c, g, or t
  misc_feature (27)..(27): n is a, c, g, or t
  misc_feature (32)..(32): n is a, c, g, or t
  misc_feature (35)..(36): n is a, c, g, or t
  misc_feature (39)..(39): n is a, c, g, or t
  misc_feature (41)..(42): n is a, c, g, or t
  misc_feature (46)..(47): n is a, c, g, or t
  misc_feature (49)..(49): n is a, c, g, or t
  misc_feature (54)..(54): n is a, c, g, or t
  misc_feature (58)..(59): n is a, c, g, or t
  misc_feature (61)..(61): n is a, c, g, or t
  misc_feature (63)..(63): n is a, c, g, or t
  misc_feature (65)..(65): n is a, c, g, or t
  misc_feature (69)..(69): n is a, c, g, or t
  misc_feature (75)..(75): n is a, c, g, or t
  misc_feature (79)..(79): n is a, c, g, or t
  misc_feature (81)..(87): n is a, c, g, or t
  misc_feature (89)..(89): n is a, c, g, or t
  misc_feature (91)..(91): n is a, c, g, or t
  misc_feature (94)..(94): n is a, c, g, or t
  misc_feature (96)..(96): n is a, c, g, or t
  misc_feature (104)..(104): n is a, c, g, or t
  misc_feature (111)..(111): n is a, c, g, or t
  misc_feature (113)..(113): n is a, c, g, or t
  misc_feature (115)..(115): n is a, c, g, or t
  misc_feature (118)..(118): n is a, c, g, or t
  misc_feature (122)..(122): n is a, c, g, or t
  misc_feature (126)..(126): n is a, c, g, or t
  misc_feature (129)..(129): n is a, c, g, or t
  misc_feature (133)..(133): n is a, c, g, or t
  misc_feature (135)..(136): n is a, c, g, or t
  misc_feature (138)..(138): n is a, c, g, or t
  misc_feature (142)..(142): n is a, c, g, or t
  misc_feature (146)..(146): n is a, c, g, or t
  misc_feature (149)..(149): n is a, c, g, or t
  misc_feature (151)..(153): n is a, c, g, or t
  misc_feature (155)..(155): n is a, c, g, or t
  misc_feature (157)..(160): n is a, c, g, or t
  misc_feature (163)..(164): n is a, c, g, or t
  misc_feature (166)..(167): n is a, c, g, or t
  misc_feature (174)..(174): n is a, c, g, or t
  misc_feature (180)..(180): n is a, c, g, or t
  misc_feature (182)..(183): n is a, c, g, or t
  misc_feature (185)..(185): n is a, c, g, or t
  misc_feature (193)..(196): n is a, c, g, or t
  misc_feature (199)..(199): n is a, c, g, or t
  misc_feature (207)..(208): n is a, c, g, or t
  misc_feature (211)..(212): n is a, c, g, or t
  misc_feature (221)..(224): n is a, c, g, or t
  misc_feature (226)..(226): n is a, c, g, or t
  misc_feature (231)..(231): n is a, c, g, or t
  misc_feature (235)..(235): n is a, c, g, or t
  misc_feature (241)..(242): n is a, c, g, or t
  misc_feature (246)..(246): n is a, c, g, or t
  misc_feature (251)..(251): n is a, c, g, or t
  misc_feature (254)..(255): n is a, c, g, or t
  misc_feature (257)..(258): n is a, c, g, or t
  misc_feature (261)..(262): n is a, c, g, or t
  misc_feature (267)..(267): n is a, c, g, or t
  misc_feature (269)..(271): n is a, c, g, or t
  misc_feature (273)..(275): n is a, c, g, or t
  misc_feature (278)..(278): n is a, c, g, or t
  misc_feature (280)..(281): n is a, c, g, or t
  misc_feature (284)..(286): n is a, c, g, or t
  misc_feature (288)..(288): n is a, c, g, or t
  misc_feature (292)..(294): n is a, c, g, or t
  misc_feature (296)..(297): n is a, c, g, or t
  misc_feature (300)..(301): n is a, c, g, or t
  misc_feature (303)..(307): n is a, c, g, or t
  misc_feature (311)..(312): n is a, c, g, or t
  misc_feature (314)..(314): n is a, c, g, or t
  misc_feature (316)..(317): n is a, c, g, or t
  misc_feature (321)..(321): n is a, c, g, or t
  misc_feature (323)..(323): n is a, c, g, or t
  misc_feature (326)..(326): n is a, c, g, or t
  misc_feature (328)..(330): n is a, c, g, or t
  misc_feature (334)..(334): n is a, c, g, or t
  misc_feature (336)..(336): n is a, c, g, or t
  misc_feature (339)..(342): n is a, c, g, or t
  misc_feature (346)..(347): n is a, c, g, or t
  misc_feature (352)..(352): n is a, c, g, or t
  misc_feature (355)..(355): n is a, c, g, or t
  misc_feature (358)..(358): n is a, c, g, or t
  misc_feature (363)..(369): n is a, c, g, or t
  misc_feature (372)..(372): n is a, c, g, or t
  misc_feature (374)..(375): n is a, c, g, or t
  misc_feature (377)..(379): n is a, c, g, or t
  misc_feature (381)..(381): n is a, c, g, or t
  misc_feature (383)..(385): n is a, c, g, or t
  misc_feature (387)..(400): n is a, c, g, or t
  misc_feature (402)..(407): n is a, c, g, or t
  misc_feature (410)..(412): n is a, c, g, or t
  misc_feature (414)..(421): n is a, c, g, or t
  misc_feature (423)..(428): n is a, c, g, or t
  misc_feature (430)..(431): n is a, c, g, or t
  misc_feature (433)..(436): n is a, c, g, or t
  misc_feature (438)..(438): n is a, c, g, or t
  misc_feature (442)..(447): n is a, c, g, or t
  misc_feature (449)..(455): n is a, c, g, or t
  misc_feature (459)..(459): n is a, c, g, or t
  misc_feature (461)..(468): n is a, c, g, or t
  misc_feature (470)..(471): n is a, c, g, or t
  misc_feature (474)..(476): n is a, c, g, or t
  misc_feature (478)..(489): n is a, c, g, or t
  misc_feature (492)..(495): n is a, c, g, or t
  misc_feature (497)..(497): n is a, c, g, or t
  misc_feature (499)..(500): n is a, c, g, or t
  misc_feature (502)..(503): n is a, c, g, or t
  misc_feature (1535)..(1535): n is a, c, g, or t
  misc_feature (1987)..(1987): n is a, c, g, or t
  misc_feature (1992)..(1992): n is a, c, g, or t
  misc_feature (2260)..(2260): n is a, c, g, or t
  misc_feature (2485)..(2485): n is a, c, g, or t
  misc_feature (2590)..(2590): n is a, c, g, or t
  misc_feature (2786)..(2786): n is a, c, g, or t
  misc_feature (2817)..(2819): n is a, c, g, or t
  misc_feature (2824)..(2824): n is a, c, g, or t
  misc_feature (2826)..(2828): n is a, c, g, or t
  misc_feature (2834)..(2834): n is a, c, g, or t
  misc_feature (2839)..(2839): n is a, c, g, or t
  misc_feature (2845)..(2845): n is a, c, g, or t
  misc_feature (2849)..(2851): n is a, c, g, or t
  misc_feature (2855)..(2856): n is a, c, g, or t
  misc_feature (2861)..(2862): n is a, c, g, or t
  misc_feature (2864)..(2864): n is a, c, g, or t
  misc_feature (2867)..(2867): n is a, c, g, or t
  misc_feature (2872)..(2873): n is a, c, g, or t
  misc_feature (2875)..(2875): n is a, c, g, or t
  misc_feature (2877)..(2880): n is a, c, g, or t
  misc_feature (2882)..(2882): n is a, c, g, or t
  misc_feature (2885)..(2885): n is a, c, g, or t
  misc_feature (2887)..(2897): n is a, c, g, or t
  misc_feature (2900)..(2904): n is a, c, g, or t
  misc_feature (2906)..(2906): n is a, c, g, or t
  misc_feature (2913)..(2917): n is a, c, g, or t
  misc_feature (2919)..(2920): n is a, c, g, or t
  misc_feature (2922)..(2922): n is a, c, g, or t
  misc_feature (2924)..(2932): n is a, c, g, or t
  misc_feature (2935)..(2935): n is a, c, g, or t
  misc_feature (2937)..(2939): n is a, c, g, or t
  misc_feature (2941)..(2941): n is a, c, g, or t
  misc_feature (2944)..(2952): n is a, c, g, or t
  misc_feature (2954)..(2955): n is a, c, g, or t
  misc_feature (2960)..(2962): n is a, c, g, or t
  misc_feature (2967)..(2969): n is a, c, g, or t
  misc_feature (2971)..(2981): n is a, c, g, or t
  misc_feature (2983)..(2986): n is a, c, g, or t
  misc_feature (2988)..(2988): n is a, c, g, or t
  misc_feature (2990)..(2990): n is a, c, g, or t
  misc_feature (2992)..(2992): n is a, c, g, or t
  misc_feature (2994)..(2994): n is a, c, g, or t
  misc_feature (2996)..(2996): n is a, c, g, or t
  misc_feature (2998)..(2998): n is a, c, g, or t
  misc_feature (3000)..(3004): n is a, c, g, or t
  misc_feature (3007)..(3007): n is a, c, g, or t
  misc_feature (3009)..(3012): n is a, c, g, or t
  misc_feature (3016)..(3016): n is a, c, g, or t
  misc_feature (3019)..(3021): n is a, c, g, or t
  misc_feature (3027)..(3029): n is a, c, g, or t
  misc_feature (3037)..(3037): n is a, c, g, or t
  misc_feature (3040)..(3040): n is a, c, g, or t
  misc_feature (3042)..(3045): n is a, c, g, or t
  misc_feature (3049)..(3049): n is a, c, g, or t
  misc_feature (3051)..(3053): n is a, c, g, or t
  misc_feature (3055)..(3058): n is a, c, g, or t
  misc_feature (3060)..(3060): n is a, c, g, or t
  misc_feature (3062)..(3063): n is a, c, g, or t
  misc_feature (3066)..(3068): n is a, c, g, or t
  misc_feature (3070)..(3072): n is a, c, g, or t
  misc_feature (3075)..(3077): n is a, c, g, or t
  misc_feature (3079)..(3079): n is a, c, g, or t
  misc_feature (3083)..(3083): n is a, c, g, or t
  misc_feature (3086)..(3087): n is a, c, g, or t
  misc_feature (3090)..(3090): n is a, c, g, or t
  misc_feature (3093)..(3093): n is a, c, g, or t
  misc_feature (3096)..(3096): n is a, c, g, or t
  misc_feature (3099)..(3101): n is a, c, g, or t
  misc_feature (3104)..(3105): n is a, c, g, or t
  misc_feature (3107)..(3107): n is a, c, g, or t
  misc_feature (3110)..(3110): n is a, c, g, or t
  misc_feature (3116)..(3119): n is a, c, g, or t
  misc_feature (3123)..(3123): n is a, c, g, or t
  misc_feature (3125)..(3125): n is a, c, g, or t
  misc_feature (3127)..(3127): n is a, c, g, or t
  misc_feature (3129)..(3129): n is a, c, g, or t
  misc_feature (3132)..(3134): n is a, c, g, or t
  misc_feature (3138)..(3138): n is a, c, g, or t
  misc_feature (3140)..(3145): n is a, c, g, or t
  misc_feature (3147)..(3147): n is a, c, g, or t
  misc_feature (3152)..(3152): n is a, c, g, or t
  misc_feature (3154)..(3156): n is a, c, g, or t
  misc_feature (3158)..(3158): n is a, c, g, or t
  misc_feature (3160)..(3160): n is a, c, g, or t
  misc_feature (3162)..(3162): n is a, c, g, or t
  misc_feature (3164)..(3166): n is a, c, g, or t
  misc_feature (3168)..(3169): n is a, c, g, or t
  misc_feature (3172)..(3174): n is a, c, g, or t
  misc_feature (3176)..(3176): n is a, c, g, or t
  misc_feature (3179)..(3179): n is a, c, g, or t
  misc_feature (3183)..(3183): n is a, c, g, or t
  misc_feature (3185)..(3185): n is a, c, g, or t
  misc_feature (3188)..(3190): n is a, c, g, or t
  misc_feature (3192)..(3195): n is a, c, g, or t
  misc_feature (3201)..(3201): n is a, c, g, or t
  misc_feature (3203)..(3203): n is a, c, g, or t
  misc_feature (3206)..(3206): n is a, c, g, or t
  misc_feature (3208)..(3209): n is a, c, g, or t
  misc_feature (3211)..(3213): n is a, c, g, or t
  misc_feature (3215)..(3218): n is a, c, g, or t
  misc_feature (3220)..(3221): n is a, c, g, or t
  misc_feature (3226)..(3228): n is a, c, g, or t
  misc_feature (3232)..(3234): n is a, c, g, or t
  misc_feature (3236)..(3239): n is a, c, g, or t
  misc_feature (3241)..(3242): n is a, c, g, or t
  misc_feature (3244)..(3245): n is a, c, g, or t
  misc_feature (3248)..(3248): n is a, c, g, or t
  misc_feature (3251)..(3253): n is a, c, g, or t
  misc_feature (3255)..(3258): n is a, c, g, or t
  misc_feature (3260)..(3261): n is a, c, g, or t
  misc_feature (3264)..(3265): n is a, c, g, or t
  misc_feature (3267)..(3268): n is a, c, g, or t
  misc_feature (3270)..(3270): n is a, c, g, or t
  misc_feature (3272)..(3275): n is a, c, g, or t
  misc_feature (3277)..(3277): n is a, c, g, or t
  misc_feature (3279)..(3279): n is a, c, g, or t
  misc_feature (3281)..(3281): n is a, c, g, or t
  misc_feature (3283)..(3283): n is a, c, g, or t
  misc_feature (3285)..(3285): n is a, c, g, or t
  misc_feature (3287)..(3287): n is a, c, g, or t
  misc_feature (3289)..(3289): n is a, c, g, or t
  misc_feature (3291)..(3291): n is a, c, g, or t
  misc_feature (3293)..(3293): n is a, c, g, or t
  misc_feature (3296)..(3297): n is a, c, g, or t
  misc_feature (3303)..(3323): n is a, c, g, or t
  misc_feature (3325)..(3329): n is a, c, g, or t
  misc_feature (3331)..(3336): n is a, c, g, or t
  misc_feature (3338)..(3340): n is a, c, g, or t
  misc_feature (3343)..(3343): n is a, c, g, or t
  misc_feature (3345)..(3346): n is a, c, g, or t
  misc_feature (3351)..(3353): n is a, c, g, or t
  misc_feature (3355)..(3355): n is a, c, g, or t
  misc_feature (3357)..(3358): n is a, c, g, or t
  misc_feature (3361)..(3361): n is a, c, g, or t
  misc_feature (3365)..(3368): n is a, c, g, or t
  misc_feature (3370)..(3370): n is a, c, g, or t
  misc_feature (3372)..(3381): n is a, c, g, or t
  misc_feature (3384)..(3384): n is a, c, g, or t
  misc_feature (3387)..(3387): n is a, c, g, or t
  misc_feature (3392)..(3396): n is a, c, g, or t
  misc_feature (3398)..(3399): n is a, c, g, or t
  misc_feature (3404)..(3404): n is a, c, g, or t
  misc_feature (3409)..(3410): n is a, c, g, or t
  misc_feature (3416)..(3420): n is a, c, g, or t
  misc_feature (3423)..(3424): n is a, c, g, or t
  misc_feature (3426)..(3428): n is a, c, g, or t
  misc_feature (3430)..(3430): n is a, c, g, or t
  misc_feature (3432)..(3433): n is a, c, g, or t
  misc_feature (3435)..(3435): n is a, c, g, or t
  misc_feature (3437)..(3441): n is a, c, g, or t
  misc_feature (3443)..(3444): n is a, c, g, or t
  misc_feature (3446)..(3447): n is a, c, g, or t
  misc_feature (3449)..(3451): n is a, c, g, or t
  misc_feature (3454)..(3454): n is a, c, g, or t
  misc_feature (3456)..(3457): n is a, c, g, or t
  misc_feature (3460)..(3464): n is a, c, g, or t
  misc_feature (3466)..(3468): n is a, c, g, or t
  misc_feature (3470)..(3476): n is a, c, g, or t
  misc_feature (3480)..(3480): n is a, c, g, or t
  misc_feature (3485)..(3486): n is a, c, g, or t
  misc_feature (3488)..(3488): n is a, c, g, or t
  misc_feature (3490)..(3490): n is a, c, g, or t
  misc_feature (3493)..(3493): n is a, c, g, or t
  misc_feature (3495)..(3500): n is a, c, g, or t
  misc_feature (3502)..(3506): n is a, c, g, or t
  misc_feature (3508)..(3508): n is a, c, g, or t
  misc_feature (3510)..(3513): n is a, c, g, or t
  misc_feature (3515)..(3518): n is a, c, g, or t
  misc_feature (3520)..(3539): n is a, c, g, or t
  misc_feature (3542)..(3546): n is a, c, g, or t
  misc_feature (3549)..(3550): n is a, c, g, or t
  misc_feature (3552)..(3555): n is a, c, g, or t
  misc_feature (3557)..(3563): n is a, c, g, or t
  misc_feature (3566)..(3570): n is a, c, g, or t
  misc_feature (3572)..(3572): n is a, c, g, or t
  misc_feature (3574)..(3575): n is a, c, g, or t
  misc_feature (3578)..(3578): n is a, c, g, or t
  misc_feature (3580)..(3581): n is a, c, g, or t
  misc_feature (3583)..(3584): n is a, c, g, or t
  misc_feature (3589)..(3589): n is a, c, g, or t
  misc_feature (3591)..(3592): n is a, c, g, or t
  misc_feature (3599)..(3600): n is a, c, g, or t
  misc_feature (3604)..(3607): n is a, c, g, or t
  misc_feature (3609)..(3609): n is a, c, g, or t
  misc_feature (3612)..(3613): n is a, c, g, or t
  misc_feature (3615)..(3617): n is a, c, g, or t
  misc_feature (3620)..(3621): n is a, c, g, or t
  misc_feature (3627)..(3632): n is a, c, g, or t
  misc_feature (3634)..(3636): n is a, c, g, or t
  misc_feature (3638)..(3639): n is a, c, g, or t
  misc_feature (3641)..(3643): n is a, c, g, or t
  misc_feature (3645)..(3661): n is a, c, g, or t
  misc_feature (3663)..(3663): n is a, c, g, or t
  misc_feature (3665)..(3678): n is a, c, g, or t
  misc_feature (3680)..(3680): n is a, c, g, or t
  misc_feature (3682)..(3683): n is a, c, g, or t
  misc_feature (3685)..(3698): n is a, c, g, or t
  misc_feature (3700)..(3704): n is a, c, g, or t
  misc_feature (3706)..(3706): n is a, c, g, or t
  misc_feature (3709)..(3711): n is a, c, g, or t
  misc_feature (3713)..(3720): n is a, c, g, or t
  misc_feature (3724)..(3725): n is a, c, g, or t
  misc_feature (3731)..(3734): n is a, c, g, or t
  misc_feature (3737)..(3743): n is a, c, g, or t
  misc_feature (3745)..(3747): n is a, c, g, or t
  misc_feature (3749)..(3750): n is a, c, g, or t
  misc_feature (3752)..(3756): n is a, c, g, or t
  misc_feature (3758)..(3759): n is a, c, g, or t
  misc_feature (3761)..(3772): n is a, c, g, or t
  misc_feature (3775)..(3775): n is a, c, g, or t
  misc_feature (3778)..(3778): n is a, c, g, or t
  misc_feature (3781)..(3781): n is a, c, g, or t
  misc_feature (3783)..(3786): n is a, c, g, or t
  misc_feature (3788)..(3796): n is a, c, g, or t
  misc_feature (3798)..(3801): n is a, c, g, or t
  misc_feature (3804)..(3806): n is a, c, g, or t
  misc_feature (3809)..(3809): n is a, c, g, or t
  misc_feature (3811)..(3811): n is a, c, g, or t
  misc_feature (3813)..(3814): n is a, c, g, or t
  misc_feature (3817)..(3817): n is a, c, g, or t
  misc_feature (3819)..(3823): n is a, c, g, or t
  misc_feature (3827)..(3833): n is a, c, g, or t
  misc_feature (3835)..(3835): n is a, c, g, or t
  misc_feature (3837)..(3841): n is a, c, g, or t
  misc_feature (3843)..(3843): n is a, c, g, or t
  misc_feature (3845)..(3845): n is a, c, g, or t
  misc_feature (3847)..(3847): n is a, c, g, or t
  misc_feature (3852)..(3853): n is a, c, g, or t
  misc_feature (3859)..(3859): n is a, c, g, or t
  misc_feature (3861)..(3864): n is a, c, g, or t
  misc_feature (3868)..(3869): n is a, c, g, or t
  misc_feature (3879)..(3880): n is a, c, g, or t
  misc_feature (3891)..(3891): n is a, c, g, or t
  misc_feature (3928)..(3929): n is a, c, g, or t
  misc_feature (3934)..(3936): n is a, c, g, or t
  misc_feature (3939)..(3941): n is a, c, g, or t
  misc_feature (3950)..(3950): n is a, c, g, or t
  misc_feature (3954)..(3956): n is a, c, g, or t
  misc_feature (3961)..(3961): n is a, c, g, or t
  misc_feature (3963)..(3963): n is a, c, g, or t
  misc_feature (3968)..(3968): n is a, c, g, or t
  misc_feature (3974)..(3975): n is a, c, g, or t
  misc_feature (3978)..(3981): n is a, c, g, or t
  misc_feature (3984)..(3984): n is a, c, g, or t
  misc_feature (3987)..(3987): n is a, c, g, or t
  misc_feature (3993)..(3993): n is a, c, g, or t
  misc_feature (3996)..(3999): n is a, c, g, or t
ntcnncgncnncnnnnnctnnccnccnaactnacnnccntnncccnncnaccancccnncnancnggtnatcttngggncnnnnnnntncnccncncccccgtncctcaantncntcnaaancatnaanaaantnngngggntcanggngnnnangnnnncgnncnnggagatntgggantnngnggaggagnnnnagnacatgaannacnnacacgaccnnnngnacggngacnagaagnncaanaaganaannannaanngccgngnnngnnnggngnnggnnnanggannnannaanngnnnnnacanntngnncatntngancnnntagnantannnntcanntattnagncanatagnnnnnnnaantnngnnncngnnntnnnnnnnnnnnnnncnnnnnncgnnncnnnnnnnngnnnnnnanngnnnntnaagnnnnnntnnnnnnngccncnnnnnnnncnnttnnngnnnnnnnnnnnnggnnnncnanngnngccagaacgcgtgacgcgaggctcgttcccgctcacccgcatctgtacgacttcggagctaccgtcagtcgtatcgcatccgtctcgtcgagcgcagaagcctcgcgagtcagaacgcctcgcggccgttcgccgacgcccatcaagtttccgagtgacgtcgtaggacgcgcgtggaccaaaggagcgaccaccatgtcgagcggccaactcgagacgaagaagtctggtgacttctactggagcaaggatgatgtacgtgccctcatccgtcccgcgttcccactcgcgcacgtccgcgtcgcgtcgtccgcccgaccgcatcgctaccgacggcgcgcgggcggccacgtcgctgtttctgtgtttccacctctccgccatccgaatccgtcgccgcgtggccgtgacgcccgaatcccgtatacgcacgtccgctgacgccgatctctctcccacacctaacccgcgaccccacaggagcctcacgcgaagcgaaggagggagatcctcgagaagtacccgcagatcaaggacctgtatggcccggactggaccacctgcccgcagatcttcgccgtcgtgagcctccagctcgcggtggcctggtggctggggaacaacgcgtcgtggcccgtgctgctgctcaccgcgtatgcctttgggggtttcgtcaccgctaacctgttcctggcgaaccacgagctgagccacaacctcgcgttcaagagcgccggcgcgaaccgcgcgctgggcctcgtggtgaaccttcccatcggcatccccttctccgtggcgttcaagaagtaccacctcgagcaccacatgttccagggccacgacgccatcgacacggatattcccaccgccggcgaggcgaggctcttctctctgggtggatccctgctcaagatcgtgtgggtgattggtcagctcttcttctacgccatcaggccgctctttgtgcgcccgaagccgatgggcaagtgggacgccctcaacctgatcacgcaggcttctttcgacatggcnttcattcatttcgcgggtccccgggccttcgtctacctgctcgcctcggtgttcctcggcggcggtcttcaccccatggccggtcacttcatctccgagcactacgtgttccaccccggacaggagacgtactcgtactacggccccctcaacgtgtttgtgtacaacgtcgggtaccacaacgagcaccacgatttccccaaggtggctgggagcaggctgcccaaggttcgcgagattgcgcctgagtactacaacaacctcaagtaccacacctcctggaccaaggtcattgtcgactacatcgcggacccgaacatggggccctttgcgcgcaccatgaggaagaaggtgagcaagtcggactgagaatggccgatgggactattactcgcgcactctagaagctagtttcgttatattatttggcatgcgttcattatcccgggccnttcangcccttcatagcttggtcgcactgaaaccacatgtgctcgggcgggtcctccgtgccgcccaacccttcacccaccccaccatctgctcgcttcaccttcatcacgaaatccaccgcaaccttggtctgcctgagaagcggtgcgaatcccctcttgggcagaaaaccttcggtctcgccaccaaccgtctccagcgtcggcactttcaccaacaggaacactttcatcggcgtcgccgccggtggacagcccgccacggccggaagncattctctgattacccgtcgcgcggcgttgtccatcgttttttcaatacccgacgtgtgttcgtacgacgcgtaacagctcgacgcgtcgctcagaacgaaggtgtacatctccttgggtctcaacggcgtggacccaaggagaattgccagctccgtggcgcgcgtttcccgcagcatcttcgccgtgactcgggcaagcatggcctcgagttccttgaagagnttcagggatcgcctctcgtcggatgtcgcgcgctttcgcttcgagccgggctggacaccagccgtctgctgcccctccccctcccccaacacttcggcgcccaangactcaaccaacccgcccttcagatcgtcgtaggagcatgggagctgctgcctgacgaagaggaggaacttgatgacctccctgagagtgtgggcgacgagctcggcggtcgcgggtgacggtatcctgacctcatctcgcgttcgttccatcgcccctgaacactgagggacctgtcagaatcgcgttcgaaaanagcaaataaggccaagcccagctccttgaannncaaanannntccccncgcgncacgcntcgnnnaccnnggganncncgngagannanannnnanccnannnnnnnnnnntcnnnnngngtgagannnnntnngngnnnnnnnnncanannntnaannnnnnnnncnnctccnnnacgcnnnannnnnnnnnnncnnnngncncngngngncnnnnncanannnncccncannncccgcnnngcgcgganatntnnnnttanannntnnnnangnncannnannncannnanatcnagnncgntcnagngcnnnccnncnccnccccgnnnntccncntntntannncgangnnnnnncnccgcncnnncncncncnnnanncgnnnanacncgcnancgnnncnnnntctcgngncgngnncnnncnnnntnntcccnnnttcnnngnnnncnngnnccnccnnncnnnncnnccnncnncngnnnncncncncncncncncncnccnncgcccnnnnnnnnnnnnnnnnnnnnncnnnnnannnnnnannnacnannaaacnnnanannggncccnnnngncnnnnnnnnnnggngancgggnnnnngnngcccnccccnncccccnnnnnccnngnnncncnngngnnnnntnntnntnnnaantnnccnnnnncnnncnnnnnnncccnccccnncncnccncnnnnnncnnnnncncnnnncnnnnannnnnnnnnnnnnnnnnnnnccnnnnnccnncnnnncnnnnnnnccnnnnncncnnccncnncnnccgcncnncccgccnncccnnnnanccnngnnnccnncgcccnnnnnncnnncnngnnncnnnnnnnnnnnnnnnnncngnnnnnnnnnnnnnnanannannnnnnnnnnnnnncnnnnncnccnnngnnnnnnnncccnncccccnnnnccnnnnnnncnnncnncnnnnntnncnnnnnnnnnnnnggnggnggngnnnngnnnnnnnnncnnnnggnnnggntngnnggngnnnnnggcnnnnnnngngnnnnncncncnccccnngccccncnnnngggnngggggggggnncggggggcccnggggttccccgccccccgggggggccccgcccccccnnggggnnnggnnnccccccccncgcnnnggccngnccccngggggnnttnnnnttnaanccccgnttnnnna

SEQ ID NO: 1532 - DNA, 4000 bp, Escherichia coli
  misc_feature (1189)..(1189): n is a, c, g, or t
  misc_feature (1198)..(1198): n is a, c, g, or t
  misc_feature (1985)..(1985): n is a, c, g, or t
  misc_feature (2637)..(2637): n is a, c, g, or t
  misc_feature (3128)..(3128): n is a, c, g, or t
  misc_feature (3131)..(3131): n is a, c, g, or t
  misc_feature (3697)..(3697): n is a, c, g, or t
aactacattaaagtatttactggtgatattattattgcacaacgcataatttctgatttaaaaaaagaaaacataattcccgtagtaaaagatcaaaccgattctggacttattcctatttttggctcttccaattcaatacttaaacaagttttcgtccataaagacgaacttgataaggcggttttagcagttgaaaatattacttcagaattacaatcttgattaagtggttactgcgtacattttatcgcgtaattccttaatttttttgtcttgcatatattcatcgaacgtagtgtatcggtctataacaccacatggagttaattctacgactctattcgccacagtctgtgcaaattcatggtcatgtgtagtaaataaaatagtgcctttaaagtttttaagcgaattattaaatgccgtaatactctctaaatctaaatgatttgttggctcatctaattgtaacacatttgccctcatcatcatcattcgagatagcatacacctcactttctctcctcctgataatactgatgattttttaaaagcctcttctccactaaaaatcattttacctaaaaaccctcgaatattaacttcttcacgctcttcctctgtagttgcccattggcgtaaccaatctattaacgttaactcattattaaaaaattcactattgtctagtggtaaataggattgcgttgttgtaacaccccacataaatttaccagaatcagctttttctttattatttaatatttcataaaaggcggtagtagctctagaatctcttgaaaacacaaccactttatcccctttagccaggttcaaatcaatatttttaaataacgtttcaccctcagtagaagctgataatccttcaatatttaaaatttgatctcctgcttctctttcgcgttcaaaaataatagcaggataacgacgactagttcgtctaatatccccaatattcagtttttcaatcattttctttctactggttgcttgtttactttttgcaacgttagcagaaaaacgacgaataaattcttctaattcttttttcttgtcttctgcctttttattttgttgagcatgctgtcttgccgctaattgcgaagactcataccaaaaggtatagttaccagaaaagtgatttattttcccgaagtcaatatcngatatgtgngtacaaactgcgtctaaaaagtgtctatcgtgagacacaacaataacacaattatcatagtttgctaagaagttttccaaccacgagatagtttcataatctaaatcgttggtaggctcatccataattaacacatcgggatttccaaataatgcctgtgccaatagcacacgtactttttgtttaccatccaaatcggccatcaaagtataatgaaactcttccttaatacccaaattagataacattgaagctgcattactatctgcattccatccatccatttcttcaaacttaacttgaagttctcctattttttcagcattctcatctgtataatcagcataaagcgcatcaatttcagtttttatcttatgtaatggtttgtttcccattaaaatcgtttctaaaaccgtatgggcatcatataaattatgattttgttctaaaacagacatacgcttcccagactctaaagacacatggcctgaagttggatcttgttttccagaaataatttttaaaaatgtagattttccagacccatttgctccaataataccataacaattaccattattaaaagaggtattaacttcatcgaaaagaacacgtttaccgaactgaacagaaagatttgatactgataacatagagaatatttaatttttgcaaaagtaaaaaaaatccattggttatacgaaacatctataactaataatttacttattagcagaagtaatgatatggatgctacatgtgacaaataaaaataataagtttttgnacatgacatataatgagtctatttttaagtatttaaagctgttatgggtgtatttgtttagtaaatatttaacaacgcattaacatgactttataaatacaagctatatttttgtaggtataaatgactcggaaaggatttatgaagttatactttactttgatatgtattcttttaacaatcatcggttgtaaaaaagatagtaacgaggttaccattgattatgcttacctcggtggtgagataattaacccgaataccaattacattgttttgtctaaaaacgaagtaattcttgatacggttaagttagatggtagaaacagatttctatacaaaattgatgagttaaatgaaggtttgtacacgtttagacacggtggtgaatttcaacttatattattagaacctaaggatagcttattatttagattaaacactttagattttgatgaatcactagtttatagtggaaacggagataaaaaaaataattattttatcaatgagtatttacaaagcgagcaggaagaaaaatatattgttgaactttgtcagcttgacggtattacatttcaaaaacgtgtagattctttaaatgcttcaaaagtgacagcattagaaaattttagtaataaatatgatccgtccnctttattcttaaaaatagcaaaagcaaatattgattattcctttttttctagtaaagaagtttatccatttgtgcattacggaaaaaataaagctgctattttaaaatcattacctgaagatttttacaattacagaaaagctattgattataatgatggttttttaagtaatcaccataattataataagttcttaaggtataatttgagtaacttaacgcttaaaactcatgataaacacgacaataatgcttgttttgatagaaattcattgtgttataatttagatagactaaagcttattgatagtttaattaccaacccaaaggttaaagatgatttattatatcatttcgccatgggttatctatcaaaaaataaaaatgaggaaagcaacaatgcactcttgaagtcttttttaggcaaaagtgaaagtgaaaaaggtaaagagttgatggtacgttatacaaattcagttaacagcttgaanganggcgtaaaactgccacaaattaatgtagtaagttataatgaagatgtgcttaaaattagtgctcttatagattcgccaacggttttaagtttctggtctcatacttattataaacattttaaggaaagtcattataaactaaaagaactaaaagcaaaatacccagaagtaaagtttattgttattaatatagataattatggtttagagaaatctaaaagactattggaaggccatgggttcaataaaacgaatgaatttaagtttaaaaacccggaagaggctttagatatctttgctgtttatcctatgacaaaaaccgtacttgttgataagaataaaaaaataacaaacagtaacaccaatattttttcaactcatttcgaagagcaacttcttggtttaataaataagtaaattacaacttgtaatgcttcatcaaaagtttttcataaaccttatctggaagaattcgctttaaaacaatagagaatttctgcataaactcccctactttataatgcccttttggatttggagtgtttataattctgtaaaccgatttngccatcatatcaggatcactgccattatcaacgtgagtattcattaaatctaaagtatctccatatggctttttatatggtgaatcgtcaagtagcggcgcatgatatctcccagcagcaatattggttgcaaaatctccaggggcaatgttagtcatttttatgttgaagtcttttatttccattctaaaagcttctgttaaaagctctaaagcacctttgctagcactataaacacctctgtatggtaatcccatataaccagcaatagatgtaatgtttattattaagccagagtgttgt

SEQ ID NO: 1533 - DNA, 4000 bp, Escherichia coli
  misc_feature (903)..(903): n is a, c, g, or t
  misc_feature (2492)..(2492): n is a, c, g, or t
  misc_feature (3412)..(3412): n is a, c, g, or t
  misc_feature (3457)..(3457): n is a, c, g, or t
  misc_feature (3465)..(3465): n is a, c, g, or t
ctgtattattctggtcaagcacttctccaattccaatagcactctctttcttaaatggtcgaatacagagctgtttattaaaaatcaagcctggttttttatataatttatagagcgcttcttttgcagtccaaatatgagtaagataaatgacctcactcatgttcttagggatttgaaattctgaagtatgcaaaaaccttggagcaattcgcttaattttctcttgataatgttctaaatcaatcccaaccaaatttgaagaaatcacgactgctgcaacatcttttgtatggctaattgaaatatatcgcccatcggtaagataaggcgctccaattttgtcatactgatgcgtctttggcaaaactcccaaagacttaagcagctgcctaattgctaaatagcccttacggtgaacgatgcttttacgatttgaaagtcgttctatcgcttccggagaaagcgataatccatgttgtaattcagactccgtttctgtaatctcccaaacagccatttcagtatcctcagctataatttcacggtgacattctggcatttgttattgtatagaaaggttgtacttttgctcctcaaaacaaaggtacaactatggattctaataaaacaaagtacatcccctataaagtaaaagacatatctcaagcttcttggggaagaaaagaaatcaccttggctgaaaaagaaatgccgggtttaatggccttaagagaagagtatggtccttcacaacctttaaaaggcgcacgtatcgctgggtgtcttcacatgactatccaaacagcagtattgatagaaactttagttgcactaggcgctgatgttacttggagttcttgtaatattttttctactcaagatcatgcagcagcagccatngctgaagctggaattcctgtttatgcatggaagggaatgaacgaagaagaatttgactggtgtatcgagcaaacacttcttttcggagaagatcgtcaaccgctaaacatgattttagatgatggtggtgatttaaccaatatggttttggatcgttttccagaattaatcgaagaaattcgtggtctttctgaagaaactactactggagttcaccgtttatacgaacgtatgaaaaacgggacactccccatgcctgcaattaatgtaaacgactctgtaactaaatctaaatttgacaacaaatacggctgtagagaaagtgctgttgatgctatccgaagggctacagatgtaatgttggctgggaaacgagttgttgtttgtggttacggtgatgttggaaaagggactgctgcttcttttagtggcgctggagctattgttactgttacagaaatagaccctatatgtgctcttcaggctgctatggacggttacgaagtaaaaaaactttcaacggtaattggtaatgcagatattgtctgtactgctactggaaacaaagacattcttaaaaaagagtatttccttaatatgaaggacaaagccatcgtttgtaacatcggtcattttgataatgaaatagatatggcatggttaaacgaaaattatggtcacaccaaatcagaaatcaagcctcaggtagatctctatacccttgaagaaggaaagcaaatcattgtacttgctgaaggtcgtttggttaatttaggctgcgctacagggcatcctagttttgtgatgagtaattcctttacaaatcaaaccttagcgcaaattgaattatggttacacaccgatcaatatgaaaataaagtttacatgcttccaaagcatcttgatgaaaaagttgctgctttgcacctagatcatcttagtgtagagctagaaacgctttcagaagaacaagcagattatattggcgttacagttaaaggtccttataaacccgattattaccgctactaagaaaataatagtagtcataaaaaaaccccgcaaaagcggggttttttatttgtacaggtattcgattatgcttcaaagggtactatagaaacgaaagatttgttatcttttttctttgtaaactttacaacaccatctactctagcgtgaagcgtatgatctttccctaggtaaacattttcaccagggtagtgagctgttccacgttgacggatgatgatgttccctgcacgtgcagcttgaccaccaaagatctttacgcctaagcgtttcgattctgattctctaccgtttttcgaactacctactccttttttgtgtgccatgatcgtatggttttaagtgtttattttgaaagggcagcaatcaaatctgcttttttcattgaagaaattccttcaatacctttctttttagctgcttcttttaattctgctacggttagtttgctgtaatctaccgcctcaactttttttgctgctggctttttagctgcaggttttgctgttgctttcttggctacaggttttttctccgctttggaaggtgctgctacngcttttgcaggagctgcttttggctttgcaccactagcctgaatactttcaataactagttctgtcaaagcttgacggtgtccgtttttaacacggtacccttttcttctctttttcttaaatacgatgactttgtcacctttgaggtgacttaccacttttgcttctacagaagctccagcgatagccggggcgccaagggtcactttctttccatcgtctagcaagtatactttgtcaaaagaaactttcgctccttctttgtctgccaaacggtgtacaaaaagcttttggtcttgcacaactttaaattgctgccctgctatttctactattgcgtacattttcgtttgtttttatggacggcaaatatagcgatttttaaaacaaaacaaacatttttcttttattccttgcctattgcatactttcctgaaccagtaaaaaaaagcgttaaaaatgcaaagaaatagacaaaggctttttctttattggaaaaaggatctccatcatgggcaatcacaaaggcaaccaacatagtgagcgttgggaaaagggtcacaagacgagtcttccatcctaaaataatcaaaataggagcaacaaattcgccaatcgtagcaaggattagagaaaaggtagggccaatcccaatagggtcaccaaactcaaaatttccttgaataacttttaagaattttccataaccgtgagttagcatcccgacggaaaatccaacacgcataataaataaaccgaggtcaattgaagtttttttcatgataggggtttttataatttaatcctaaggtactcaattttaaagataaaatttaatcgtattatttattcctacttcaaaagtagttgatgctttccagcctaattctttttcaattttggatgcatctattgcatancgatagtcatgccccaaacgatccgtaacaaattcaatgagtttnagagaggntccttcaggacggcttaactttttatcaacctgctgaattaaatgatgtactaaatctaaatttttctgttcattatttccccctagggcataagtttcaccaggtttgcctttatgtaaaatcagatctattgcttcagcgtgatcctctacgaatagccaatcgcgaatgttgtctcctttaccatataccggtaggggtttttcagcaactatatttttgatcattaaaggaataagcttttctgaatgttgccctgggccgtaattattggaacaattagacagtactacaggcaatccataggtgtgaaaatacgcccgtaccaaatgatcagaagaagcctttgaagccgaatagggagaacgagggtcataagaagtcttttcagtgaaatatccttcagtacccaaactaccgaaaacctcatcggtagaaatatggtaaaaacgttggttctgggcattgttgccccaatgctgtcgtgccgcttccaaaagattcaacgttccttgaatattggtctgagcaaaa

SEQ ID NO: 1534 - DNA, 4000 bp, Escherichia coli
  misc_feature (2)..(17): n is a, c, g, or t
  misc_feature (19)..(21): n is a, c, g, or t
  misc_feature (23)..(42): n is a, c, g, or t
  misc_feature (44)..(49): n is a, c, g, or t
  misc_feature (51)..(52): n is a, c, g, or t
  misc_feature (58)..(65): n is a, c, g, or t
  misc_feature (67)..(71): n is a, c, g, or t
  misc_feature (75)..(79): n is a, c, g, or t
  misc_feature (81)..(91): n is a, c, g, or t
  misc_feature (93)..(95): n is a, c, g, or t
  misc_feature (100)..(104): n is a, c, g, or t
  misc_feature (106)..(108): n is a, c, g, or t
  misc_feature (113)..(117): n is a, c, g, or t
  misc_feature (121)..(131): n is a, c, g, or t
  misc_feature (133)..(134): n is a, c, g, or t
  misc_feature (136)..(136): n is a, c, g, or t
  misc_feature (143)..(146): n is a, c, g, or t
  misc_feature (148)..(148): n is a, c, g, or t
  misc_feature (152)..(153): n is a, c, g, or t
  misc_feature (161)..(161): n is a, c, g, or t
  misc_feature (163)..(163): n is a, c, g, or t
  misc_feature (186)..(186): n is a, c, g, or t
  misc_feature (190)..(190): n is a, c, g, or t
  misc_feature (196)..(196): n is a, c, g, or t
  misc_feature (224)..(224): n is a, c, g, or t
  misc_feature (229)..(229): n is a, c, g, or t
  misc_feature (263)..(263): n is a, c, g, or t
  misc_feature (329)..(329): n is a, c, g, or t
  misc_feature (334)..(335): n is a, c, g, or t
  misc_feature (341)..(341): n is a, c, g, or t
  misc_feature (344)..(344): n is a, c, g, or t
  misc_feature (352)..(352): n is a, c, g, or t
  misc_feature (500)..(500): n is a, c, g, or t
  misc_feature (542)..(542): n is a, c, g, or t
  misc_feature (763)..(763): n is a, c, g, or t
  misc_feature (879)..(879): n is a, c, g, or t
  misc_feature (882)..(882): n is a, c, g, or t
  misc_feature (918)..(918): n is a, c, g, or t
  misc_feature (1008)..(1008): n is a, c, g, or t
  misc_feature (1473)..(1473): n is a, c, g, or t
  misc_feature (1677)..(1677): n is a, c, g, or t
  misc_feature (2223)..(2223): n is a, c, g, or t
  misc_feature (2734)..(2734): n is a, c, g, or t
  misc_feature (2759)..(2759): n is a, c, g, or t
  misc_feature (3176)..(3176): n is a, c, g, or t
  misc_feature (3341)..(3341): n is a, c, g, or t
  misc_feature (3347)..(3347): n is a, c, g, or t
  misc_feature (3381)..(3381): n is a, c, g, or t
  misc_feature (3801)..(3801): n is a, c, g, or t
  misc_feature (3840)..(3840): n is a, c, g, or t
  misc_feature (3876)..(3876): n is a, c, g, or t
annnnnnnnnnnnnnnncnnnannnnnnnnnnnnnnnnnnnntnnnnnngnntttttnnnnnnnntnnnnntttnnnnntnnnnnnnnnnnannnttttnnnnntnnnaaaannnnnaaannnnnnnnnnntnntnttttttnnnncngcannttttttcncngaatgctgtcggatgcctctctncaantgtccncacgatttaaaacttttccataattttntccgnccattccggaggatattcagcattacgggcctcntccagaacagtatcactgagagtattatttccaagcggatgcaggatgtgcgctccatgggctaancctanntcctgnganacttccancgcacggttggtcatactgaatttgacccatttgcctgcaaaccattcaagtactatttctccaaaaatcaactgaatctgctgaatattatctccatcatcaatccagaaaaaaccgtgagcatccgctctattttcacaacataangtgtgcttttttagaccattcaccacttcctctgactttttngaaatgatgagataaaattgacaatgtctcataaatcagtgctctgtgtcttgtcttttcctgctgtttcgctgattatattgattgaactttaagcgttttataaaaacagcagagagtctgttttgaatgaaggtgaaccataaaatcgattttaacagccatgagtctcatacgagtattaatcaacggatccaaaggtcggatgggtcaggaatccntcaaggcggtcagcgcggatgcagaattggatttagtcgcacaaactgatttgagtgataatctagctcaaatcattgaacaatccaaggcccaagttgtgctggacttcacaacngcngcggttgccatggaagtttcagcgagtatcattcantcaggcgcacgtcccgtaatcggtaccagcggcttacttccagaacaagttgctgaacttaaaaaactttgtaaagaacaaaacatcggnggtgttattgcgccgaattttgcgattggcgcagtgctgatgatgaaatattctcaggatgcagcccggtatttcccgcaggcagaagttattgaactgcatcataacggtaaactggatgcgccttcaggaaccgcaatcaagaccgcaaatttaattgctgaagcacgtgactcagttccgcaaaaaattgcagaaaaagaaattcttcccggagcacgcggagccaatgcagaagaaatccgcatccactctatacgtcttcccgggctggttgcacatcaggaagtgcttttcggcggacaaagccagacattgaccatccggcacgattcaacacaccgtgactctttcatgcctggtgtttgccttgcctgtaaaaaagtcatggatttgaacgaactagtttacggactggagcatctcctttaaaagaaaaacctgtctaaaattcattcacctgcngtgtttttctgaccacgtggatgaagttcatggtagaccttgaaaaaatcaggacggtttacatgtgcatactgcagagttgcgtccagactgacataaccgaataattgcttaatatccgacaagtcaatcccgttctgcagtaggtgtaccgcaaatgagtgacgtaatattctcggattaatacgactggtgatgcctgcncggagagcatgttttttgatcatagaccaaaatcctaccctgctcattcttgtaccgttacgtccgggaaacaaacacgaatcttccggatgtagtaaacgtccggctcttgcctgctcaagataaggccgcagtacctcaaccgcggttgaagtcattggtaccatgcgttcacgtttggaacgtactttcaaaaattctaaatccagaaacaaatcctctacatccagtccgagcagttcgttgactttaagtccgcttgaataaagcagttccagcattgctctgtcacgcaagcccagataatgagcgagcgaaggtgcttcaagcagggctacaacctcttctgttgacaaaatttctggtgcgtcaggaatgatttccggaaaacggagatgatgtgccggactggttttgatcaaaccgcttaattcaaggtgatcgaggaatagacgcagtgaggaaatgtgtctcgctaaagttcttggtttgtaggattcccgcaggaaggcaaggtaattttcaatgtcatcagagctaagtttncgaatctggaccagcagcttttgactgtccgaatcctcctcatcaagctcgagccactttaagaatttacgcagatcaagacggtgactctggatactgtttgtagaatatttttttgtgtgaagcgagtctaaaaactctaaaaccagcggttgcatgagattcaactggtcaagggggaagattaaaatttgttttgaagaatatgtctgctgtcgaaaagcagaaaacccgcgatgccgtgtgtgaaagataagcttttgtttccttggccacgcaaggtggagtaatgtggtagaaggtttaggcgtcctgctcatcggcaggctggctcaccccctccagggacgaactcctttctgaaaaaatcaggaagcaaaagtttcacatcacgtacatcgcagactctaatgctctgtattaacaataaccagctctgtgagaacaatcaaggatgatgcaagaaaaaagcaaattatctttaaatcagcagatattttagctcttcagnaaaaaaacctgaagtgcttgaaatnttgcgagctgtgttttcctgtcttgtttgcagaaaattttcgatttatttttctgttaaaacctcatccagtttgtagcataaattatccagatcttcttcaataccttcgaactttgagactctttttttcaagctcagcagtttatctgctaaatttaaggcaaccagtaaagcaacgtttgttggaccaaatgcgtcagtgtgttctgtgacttccgcgatctgctggtccagaaatttttccacttcacggacgtgttcttctccataaggactagaaattgagaaacggttaccgctgatatttatctggtattgcctactgtcgttatcctccacaataaccccttttctgcaaacgatgtttttgtaatccgcagcataacggatcacggaatttattttttaatgagcnacatccagagaagctgatgcgaaatactacaggatgtgataaagtaaaccttgcgctaacttataggataatgctttcgtaaaaacccctgaactaatgatctgtcatctcgaacgaagagagagatcttaaaagtgtcagtacttaacataaaacagctttctngctttntaagcaagctcacgtttttatgactttttactgnttcagtataggataattttctaacagtttttagctgagaaagcaatccgattttggtttgagtaatgaaagtaacacatttcgtttagaaagttaatcatgaaatctccccatttaagcaaattaaatactgaatcacgtcaggaatatggggcattgctgttgttggatcaacttatgcgttatgaactgcccaggcaggaaaaagataatttgcaggaaacagtcgctcaactggaagaagaagtagcagaacttaaaaaaggtttttttcattcagatgaacaggatcaggaactgaattttgaaaaagatgaactgagtgaagcacgggaggcactctcagaggttgaaaaagaaatggaggaaaacgaacattgccgactcaatctcgcgctgatagaaacggatgatgaaggcntggaaccgctgctgaagtttatggaggaaggtggaacantgactgtgagtgaagaaaatttttatctgccgaccncaaaaggagaagaggtttatcaacatttagtggaacagctcgaagcgtatgttgtgcattttgacgtctttgcttatgttgatctggaagaaggcgcattcggtgatccgaaaacggatttgct

SEQ ID NO: 1535 - DNA, 4000 bp, Escherichia coli
  misc_feature (2685)..(2685): n is a, c, g, or t
gggcctttgcccgcgccgcggattgttcgagttctgcggcgatgtcctcgtcgggcccgctggccgattgggcgcgatgccacgcgcggcgatcagggtctcgcgcagcatcggtcgcgccggccagggcgcggtgaacgttctggcgatcagccaccggtgctgtccggtagatcgcggagcggaccagcggatgccggaaggcgacacgagcgccgatcgacaccagcccctcccgttcggctggggcggcagcgtcgaaaccgatgcccagatcactggccgcccgccacagcagcgcgggatcgccctgcgggtcggcggcagccaccaacagcagcatccgcgtcggtgccggcagagtcgcgatgcggcggcggaagctggcctcgacccgatcccgcaccggcacgctctgaggtaaaccgaagccgccggccagcccctctgccgaccagccgtgtggcaactccagcagggcgagcgggttgcccgcagattcggcgacgatgcgctcgctcacctgcccgtcgagcttgccgggaattgccgacatcagcagtgtgcgagcgtccacatcggccagcccggtcaggttcacttccggcagcccggcgaagggatcggtctcgtccccgtcgcggatcccgacgaggaatgcgaccgactcgccgtaaagacggcgggccacgaatgccagcgtttgagccgaagcctggtcgagccactgcgcgtcatcaatcaggcagagaagcggctggctctcggcctgaccggacagcagactcaacacggcaaggctgaccaggaaccggtccggcggtggtccggcgcgcagaccgaaggcgatgcgcagcgcggccgcctggggctctggaaggcggtcgaggtgatcgagcatcggtctgcacagttgatggaccgcggcgtagggcagttccatttccgactcgaccccgtcggcgcgggccacgtgaaagtccgggcctgtttcggcggcgtactgcatgagggctgatttaccgatcccgggttcaccgcgcagcaccatcacccggctgcggccagaccgggcctcggcgatcagggcgtcgatcagccggcactgctcgttacgaccgcgcagcatcatggcaggcctccttctaagccctcagccgcccattgtccgcgcctacggtccgccacgcgtcggcacggatgaacgggcgcatctgcactgggcacttactggggtcacaccgatgcgaccaggccccgtctggccggacgctgttcgcagaggcatcggcctcaccaccgcgtcacaccgctgactagttctggaggaacagcacatgccgttcgtcaacgtcaaactcgttgaaggcgtctttaccgaaaagcagaagcacgacatggccgcgagactcaccgacgtcatggtcgagttcgaaggatctgaggcgttccgcgaggtcgtctgggtcctgatcgaggagctgcaccccgacggctggcacatcggcggcgagcccttcttcggccccgccacgctgatgagtgtgctgggacgttccaaagccgcctacgacgctatcgacggcacccccaccacccacgacgaattcgtcgccgagtcaccggtcatcccccgctagccccgccctcccaacagccacccgcatcgcggcgaactcaaggaaaacacccatgtcctacatcggtaaggaaaacaccaccgacaccgtcgagggcggcgaccatctgctgctgttcggactgttcaccaagctcagcaaggccgcaagggttcatccgcggccgggcgtagcggccgtgacgacgtcggtaggtatgagcgcgcgccaggtggccagcatgcgagacgctgagaacctggccagcgcctggaatgcggccctgcacgtcgcggtggacggccgcccgtacctcgagctcgagacagcccagggcccggagcgcgtcgacctggtactcgcgggtaggttctagtgtcctcaagcatcacgcagccgtcggttggctgcaaatcgtcagaaaaaagtggccatggatgacagcaatgttgctatccgactgaaagggcaacccccgatgaagctgggttaccactcgatcacatggggccagggcgtcgtcggtgacccctcaggggtcacctcgatcaaggacctctactaccgctcccccggctcgatggaacaggccatcaccgacatcgccgccgccggctacgccgggaccgaaatgtttgacggcaatcttgccgacttcgctgccacaccagaggttctcaccgagtcgctgtacaacagcggccttgaactgatcagcgtgtacaccggggcgaattttatctactcggatgtgttgcccgacgagttgtaccggatcaaccgggccgcggaactagccgtgatgttcggggcccgacgcctagtggtcggcggcggggcacgacgcgcggccggcaccaccaacgaggactacacgctccttggtgcaggacttgaccgcgtggtggacattgccgagcagcatggactcgcggccagctatcacccgcaccttggcacgatcgccgagagcccggatgagatcgagcgggtcttcaccagtagtcgcatcgccttctgccccgacaccgcccacctggcagccggcggcggtgacccagcggcnttgatcagggcacattcggatcgcatcgcacacgtccatctcaaagatctcaccacggcaccattcgcgttccaaccgctcggccagggtgacctcgactttgacgaaatcctgtccgctgtccgtgaagtcgggtatgacgattggctggtggtcgagctggacacctatgacggcgatccgaagaccgccgccgagatcagcaagaaattcctggagacccggctcggctgaaaagccgggcgtgcagctaccgctgaggaccatctggtcggttggtgggcgctcctcgcatcgaagtcctgtcacgccccacttggaggcatcatgaaacgctctatccgatccatcgcggtcaccaccgcactcgcagcagtgctcaccaccgtattattgaccggctgcgcctttcccggcggcagtcagactctggcgaagccgacctccaccgtggccgatcaggccctcgaggagatcgccgggcaggttttcagcaagggtcccaacggtgaaaccgcctcaccaccaagcagtgccgacctcaccgacgaggaggtagcgcaaatcaagtcgttgggactcaaagccgccatcgtcatgcacacgggcggcgacgactggtcgcaggcccagatcaatggcctcaattccgagttcgaacgtttgggcatcgaggtcgtcgccaccaccgacgccaagttcgacccgaaaacccaggtcgccaacctgcagacggtgatggccaagaagccggacatcatcgtgtcgctgcccaccgacccggtcgccaccgccgcggcctaccgcgaagcggccgcagggggcgccaagctggtcttcatggacaatatcccggacggtttcgaagccggaaaggattacgtctcagcggtttccgcggacaattacggcaacggtgtcatatccgcgcacctcatggccagagcgctcggtggccagggaaagatcggcgttgtctaccacgatgccgacttcttcgtcaccaagcagcgctacgacggcttccgcaccaccatggagcaggactatccaggcatcgagatcatagagagtaagggcgtcggcggcccggacttcgccacccaggcacagaacgccgccgccgcgatgttgagcaaacactccgagctggacgggatctgggcggtgtgggacgtgccggcagagggtgtgctggccgccgcccgcgccgccgggcgcctgaacctcatgatcgcaaccgaggacctcggcaagatcgtcgcgatcaatatggccaggaacaccatggtcgttggcctgggcgcccaggtcc

SEQ ID NO: 1536 - DNA, 4000 bp, Escherichia coli
  misc_feature (43)..(43): n is a, c, g, or t
  misc_feature (72)..(72): n is a, c, g, or t
  misc_feature (853)..(853): n is a, c, g, or t
  misc_feature (1035)..(1035): n is a, c, g, or t
  misc_feature (1132)..(1132): n is a, c, g, or t
  misc_feature (1177)..(1177): n is a, c, g, or t
  misc_feature (1231)..(1231): n is a, c, g, or t
  misc_feature (1246)..(1246): n is a, c, g, or t
  misc_feature (1249)..(1249): n is a, c, g, or t
  misc_feature (1255)..(1255): n is a, c, g, or t
  misc_feature (1351)..(1351): n is a, c, g, or t
  misc_feature (1479)..(1479): n is a, c, g, or t
  misc_feature (1515)..(1515): n is a, c, g, or t
  misc_feature (1635)..(1635): n is a, c, g, or t
  misc_feature (1647)..(1647): n is a, c, g, or t
  misc_feature (2526)..(2526): n is a, c, g, or t
  misc_feature (2538)..(2538): n is a, c, g, or t
  misc_feature (2676)..(2676): n is a, c, g, or t
  misc_feature (2720)..(2720): n is a, c, g, or t
  misc_feature (2730)..(2730): n is a, c, g, or t
  misc_feature (2739)..(2739): n is a, c, g, or t
  misc_feature (2748)..(2748): n is a, c, g, or t
  misc_feature (2914)..(2914): n is a, c, g, or t
  misc_feature (2989)..(2989): n is a, c, g, or t
  misc_feature (3001)..(3001): n is a, c, g, or t
  misc_feature (3163)..(3163): n is a, c, g, or t
  misc_feature (3166)..(3166): n is a, c, g, or t
  misc_feature (3202)..(3202): n is a, c, g, or t
  misc_feature (3239)..(3239): n is a, c, g, or t
  misc_feature (3271)..(3271): n is a, c, g, or t
  misc_feature (3289)..(3289): n is a, c, g, or t
  misc_feature (3681)..(3681): n is a, c, g, or t
  misc_feature (3693)..(3693): n is a, c, g, or t
  misc_feature (3807)..(3807): n is a, c, g, or t
  misc_feature (3810)..(3810): n is a, c, g, or t
  misc_feature (3867)..(3867): n is a, c, g, or t
  misc_feature (3885)..(3885): n is a, c, g, or t
  misc_feature (3933)..(3933): n is a, c, g, or t
  misc_feature (3963)..(3963): n is a, c, g, or t
  misc_feature (3987)..(3987): n is a, c, g, or t
  misc_feature (3999)..(3999): n is a, c, g, or t
atagtccgctgtaatggtggatgtcgcattggctgcgtcagcngctttggtttcagggcttacaggggttanccatgtgccttggcaatacgcggagcttaagtaacgaccttggcgctgttgagcttcaggagatgacttatcgacatagtattgttcgaaaaacttttgcccaggatagctttcttgtagtgcttgttttagcgattgttgttcgtctgaaatagacgtggttggtgttgcagcatagcttgtgattgagctaccacaaagaagggtaaatatcgcagtcgctaaaggattaaatttaaactgatgcttcatgtgtctcatttaccaagtatgcttaaaacgcaattaattattgtcgcatcatagagaaaaagttgataagtggctacacttagcactttaaaaactcagcctgtattagaatttatcgcaaatgaatacacaacgtgaacaattgatacaaacatggatttcatctgtacttggttcagatcaatttgaaattaactttttagcaggcgatgcaagtttccgtcgttatgcacgaatcaagttgaataataaaacatttatgctgatggatgcaccaccagaaaaagaagattgtgtgccttttgtgacgattgatgaattttttgatacgaacggtgttcgtgtaccacatattgtggcgaaagatttggagcaaggcttcttattgcttgaagattttggtgatgtgctactgtctacacagctcgatgacaagactgtcgatgcacattatgagcaaagttttaagcagttgattcaattgcaatctattgatggtgaaggtcatttcccagcttattcttatganaagttaatgaccgaaatgtcgctattgacagattggttattgccaagtttacagattcaaccttctgatgatgagtctgcgctgattaaacgtacatttgcaattttagccaatgctgctttggctcagcctcaagtgattgtacatcgtgatttccatagtcgtaatctcatgcttttggnagatgagcaagagcaaggcgtaattgactttcaggatgctgtgattggtgcagatacttatgatctgatctcaattacacgtgatgcgtatgtacantggaatcctgagcgcgtttatcattggtttaaagtgttttatganctattgccagcttctgccaaagaagggcgtgactttgaacagtttaagcaagangctgacctgatggcnatncaacgncatattaaaattttaggtatttttgtgcgtttatttgaacgtgacggaaaatcaggttatctgaaagatttaccacgtgtgatgtggtatttactngaagaaagcaaaccttatgcagaactacaacctttcatgcaatttatttgcgataaagtgatgccgaaatttgaagcaaaatatggcaaatatgaggttgttgcagcatgaaagcaatgattttggcngcggggcttggaaaccgtatgcgtcctttaacattntataaaccgaaacctctgcttgaagttggtggcaaaccactgatcgtttggcatattgaaaaactcaagcaaattggggtcacagaaattgtgatcaattctgcatggttggccgatgtnttgattggtgcncttggcgatggttcgcagtttggagtgactattcgttggacgcgtgaagaagaggggcttgaaacagcgggtggtattatcaatgctctaccactgttggggacagaaccgtttattttagtgaatggcgatgtttggaccacttttgattttgcatctttacttgatgtgcaattggacgccgattttgcgcatctcgtatttgtacccaacccgacacaacatcccaaaggcgactttatcttaaatcaagggcgtgcttatacctttgaacaagagcagtcaggcgaagcactgacttatagtggtgttgcagttatacatccacagatgtttaagggattggaagcaggtaagcgtccgttggctccattgctaaaagaagcgatgtctgctggaaaaatttctgccgagaaaatgcaagccgcatgggtggatgttggcacacctgagcgattaagtgatctagatctacagattcgtcaaggtatgtacgtttaagtgcataatcactaagcgttagctactgttccacggctgagaaatcggtatacttcagtttaattttattgagatgtcttctttatgcatccattttttcaagacttaaagcaaggtagtcaaaagcttggcttagatttgagtgaagaagcattaaatttattgctgaagtatcaagacgcacttgtgctgtggaacaaagcttacaatttaacagcgattcgcgatcctaaagaaatgctggtgaagcatttattagatagtttaagtattttaaaagatttgccgaaaggtcgtttgctggatattggtacaggcggtggtatgccgggcatgattattgctctatgccaacctgagcgccaatgtgttttgctngattccaatggnaaaaaaattcgttttttaaagcagtttattgcagacttaaaattaaccaatgtaattgcagttcaaacgcgtgttgaaaatgaagatagcatccatgatttgggtcagtttgatgtgattaccagtcgtgcatttgcntctttaaccgattttatcaatgcatcgaagccttatatgcaccnagacagcatnattgcgtcnatgaaaggnttggttccgcatgacgaagttgaagcgttcaaaaacgaatttagttgtgacattattgcgttaaaagttccacgtttggacgaacaacgacacttacttttattaaaacgtatctaaaaaaattcaaaggattgggcgggtcatggcacaaattattgcgattgcnaaccaaaaaggtggtgtaggtaaaaccacaaccgcagtaaatttggctgcatctttagcagtacttaaaaagcgngttttattggtngatatggactcgcaaggcaatgcgaccatgggttcaggcattcaaaaaaatgacctactgtattcagtgaccgatgttttactgggtgaagtgcctatagagactgcgattaccaaggcggaagtgggttataaggtcttgggtgcaaaccgtgatttggcnggngttgaacttgcgattgctgagcaagaagggcgtgantttattctgcgtgatgcgttgcaagaaattgaacaancatatgactacatcattgtggactgtgcgccnagcttaagcttgatcacngttaatgcactggcagcggtggatggtgtgatgattccaatgcagtgtgaatactatgctttggaaggcttggcagatttaacacagaccattgatcgcattcaacaagcattgaatcctgagttaaaaattattggtgttctacgcaccatgtatgatgcacgtaatgcactgacacgtgatgtgtctgaagaattagaacaatactttggcaaaaaactctatgacacggtcattccacgtaatgtgcgtctagctgaagcacctgcgcatggtttgcctgtgatttattttgaaaaaagctcgaagggcgcagttgcttatttacatttagcagctgaaatgattaagaaaagcaaagtgaaaaaaggaagtaacgcatgaccgttaanaaacgtggactngcaaaaggtcgtggtttagatgccttactcggttccattcaaaaagagaaattacaacttgaagcacaagctcttgatcacggtcagctaaaacaaattgatgtgcatttattncancgtggtgaatatcagccacgtcgttttattaatgagcaagacttacaagagttagcngcatcgattgaaaaacanggtgtgatgcagccgattgtgattcgtccaattgataatgaaaagcanccctatgaaattattgcgggtgagcgtcgntggcgtgcggctcaacttgctggnttaacgcaagtnc

SEQ ID NO: 1537 - DNA, 4000 bp, Escherichia coli
  misc_feature (1215)..(1215): n is a, c, g, or t
  misc_feature (1496)..(1496): n is a, c, g, or t
  misc_feature (1990)..(1990): n is a, c, g, or t
  misc_feature (2960)..(2960): n is a, c, g, or t
  misc_feature (3061)..(3061): n is a, c, g, or t
  misc_feature (3092)..(3092): n is a, c, g, or t
  misc_feature (3175)..(3175): n is a, c, g, or t
  misc_feature (3556)..(3556): n is a, c, g, or t
aatgctaaaactatagatatgataaccaacaccgtagcctttgttctgttggaagtggaaacacctccgtctaggattccagcacccaagaatattaacccgaagaaaaataacagacctgtaagtgcatgcagtccatcaacgaatgtatgggctattcctgcataggatagaactataccagtcaatccaattgcagttagtccgccaccaggcatgattagttcccaattactcatctaagcttgttgaaaaatattatatattaatcgttttgcaatccaggaatagattcgaagaaattaaatcttatgttattccgctgacaataattgggattaaaagaaatatttgaggtttcaaaaccacgaatcataattttacttgttataacggctgtaacatccatgtatgctggaagtaaatttgtaggtcctgagctaagcgaattgggaatattgcatattataattgcaggatctcttgcttcggctggatctagtgcactcaaccatttttacgatagagatattgatctaaaaatgaagcgaacaagcaaaagaccaatcccatcaggtagaattaagcccattacggtttttgtgtatggtctaggtgtaagcataacttctgtggtttatgcagcattgactttgaattatttgtgtacgttctttattgctttgggcatatttttttatgttgtaatttatacagtgtggctgaaacgccttaactcctccaatattgtgataggtggatttgcaggtagtgctgcgtctatggctggttggtctgcagctacaggttctattgatattctaggatttttgataggctttttgatttttgtgtggaccccatctcatttttggtgtctagccatgaagattcgtgatgagtatgcggaagtaaaaattccaatgttacctgttttgattggcatggaaagaacgtcgaagtatatacttgccaatactatcattttgttaccatattcgttaatgttgtatgcatttggtatgggagtaatctatactgtatttgctgctgttgcaggtggactcatgctgttatatcattacaagctaacaaagacacctacatcagattttgcgtggaaggcatacaaggtgactgcaccatatctaacgataatctttataggaattgctttggatgcagctttccactttaggtttagttaaatattgntttttgtagcaggaaaacttgattcataatcattttctaatgattttttattttccaactcaacatcgtcctcttcatttttgttagaaacaatctctattctacgcgtatttttattcagccaagtgacattgattaatcccataatttccagatcaagcaatgttttgttaattacatcttcgtgtaaaagatagccatcttttgtaagacttttagttagggatgtgtcagtgatagagcctgattcttttaccttttcaaatactaaatttttgtantgcattattcatcatctataaaaagtctcatccgtagacttgggaattatgtttgatacctcatcttttatcgatgtataccattggtctatttgcttagtgatagatggtttaaccttctttagtgctaatgcaaagtcattgctgttaatttttttagaattattctgcattgcatttacaactgcctctctgcatagagatgccaggtcagcaccagtatagttttgcgtagaaacagcaatctcatccagatcaacatcactagtaagcggcatcttttcagttaatatttttattatctccaatctacctttctcgtccggtggttgaataaataaaacaatatcaagcctgccagtacgaagcatagaattatcaatcagatctggtctatttgtaattccaacaattatgatcctagatgtaccaccttcttccatctcagttaacatttgactaagtattgtttccccacggtttccttcttctgntgttcttgattttgccagagaatctaattcatcaaaaatgattacacatggtgcagatgtctttgctttcctgaaaatttctctaattgctttttcggattcaccaacccactttgataatatttccggacccctgaccaaaatcatgtttgcaccacattcagctgctagtgctctagcaagaatggtctttccacatccaggcggtccgtaaagcaacacacccttaggtggttttattcccatcttagtaaatttgctagggtcattgacagatgtgatcatgttgtcctctaacgttttttttgcatagtctaaaccacccacatctttccaccaaacttttgctcgttcaacataaaactcacgcatagctgttggtacaacatcatgcattgcatcgtaaaagtcacgtgattttatttccatcgattgtaacatcttagacggtatacgctcattttcaagatcaatttcgggcagataacgtcgtattgcttttatggcgctctccctacacagagatttaatatctgcaccagtatacccatgaagctcggatgcaagatttttcaaatctatatcatccgaaagtggcattccacgtgtatgtatatgtaaaatctccaatctaccatctgagttaggaactgaaatttccatttctctgtcaaacctacccggtcttcttaacgcaggatctatactgtcaggacgattagacgctccaagtacgataacatttcctctttcagtcaatccatccattagtgctaaaagctgggctactactcgtttttcaacatcgccataagcttcttctctctttggagcaattgcatcaatttcatcaatgaagattatactgggtgagttgtcttttgcttccttgaaaatctctcgaagtctagcttcagtttccccataatacttgttcatgatttcaggaccgttaattaaatacatgttngcatctgattcacttgcaataaccttagcaaggagtgtctttccacatccaggcggtccgtagagcaaaactccgctatgtggttctactccaagcctggnaaaaagttctggatgcctcagcggtagttcnacaatttcacgcattgcggttatctcaactcccagcccaccaatttcttcatatgtgattctattttttttgtcagttgccgnctcagaaagtatttttagattggagagacgatcaattttaacaactcgttttggtgagatcttactgatcttaaaatccatcgagtttcccaaaatcattactgaaatctcatcaccactagttaatggtagacccttcaatctattttttacaaaatcagtgaactccttatcaatagtcacaacgtcatttattggcataagtacgacagttttggcggtttttacttcaactttttgaacttcaactatgtcatcaagtgtcagcccaacgttctttctagtttgaccatcgatattgacgcaatcagggtttttttcatcttcattagctggccaaacaacagcactgctcgttctttttccttttatctcaataanatcaccaggtgcaacatgtagatagtccattgcttcaggaccaattctagctcttttcttaccaacatctctttgttttgattctcctattcgcatttgcagtggctgtgtatctttttgtggcaacaaatcacctatttcatgtcaactgacattctactcatatttagtacttcaaactgacttactccatctacttttcgtactgcattttctaatgaatccatctgacctgctttatcatctaaaataaattcagcattgaggtaatacagaccaaaagcaagtggaagtttttggaattttttaagctgaatattatcttttagtgtgttttttattgattctgccaaattgtccaaatcaatttctgtcccagtaggaagaatttttgtaatcagaagtaattgtgccatttttaaggcccctgaaaattacatgatg

SEQ ID NO: 1538 - DNA, 4000 bp, Escherichia coli
  misc_feature (1)..(1): n is a, c, g, or t
  misc_feature (4)..(7): n is a, c, g, or t
  misc_feature (9)..(11): n is a, c, g, or t
  misc_feature (13)..(19): n is a, c, g, or t
  misc_feature (22)..(24): n is a, c, g, or t
  misc_feature (26)..(26): n is a, c, g, or t
  misc_feature (28)..(30): n is a, c, g, or t
  misc_feature (32)..(36): n is a, c, g, or t
  misc_feature (40)..(40): n is a, c, g, or t
  misc_feature (42)..(42): n is a, c, g, or t
  misc_feature (45)..(47): n is a, c, g, or t
  misc_feature (49)..(53): n is a, c, g, or t
  misc_feature (55)..(57): n is a, c, g, or t
  misc_feature (59)..(61): n is a, c, g, or t
  misc_feature (64)..(69): n is a, c, g, or t
  misc_feature (71)..(71): n is a, c, g, or t
  misc_feature (74)..(76): n is a, c, g, or t
  misc_feature (79)..(81): n is a, c, g, or t
  misc_feature (85)..(86): n is a, c, g, or t
  misc_feature (88)..(88): n is a, c, g, or t
  misc_feature (91)..(92): n is a, c, g, or t
  misc_feature (94)..(96): n is a, c, g, or t
  misc_feature (99)..(100): n is a, c, g, or t
  misc_feature (102)..(106): n is a, c, g, or t
  misc_feature (110)..(114): n is a, c, g, or t
  misc_feature (116)..(122): n is a, c, g, or t
  misc_feature (124)..(125): n is a, c, g, or t
  misc_feature (128)..(130): n is a, c, g, or t
  misc_feature (132)..(137): n is a, c, g, or t
  misc_feature (139)..(149): n is a, c, g, or t
  misc_feature (152)..(152): n is a, c, g, or t
  misc_feature (154)..(158): n is a, c, g, or t
  misc_feature (162)..(166): n is a, c, g, or t
  misc_feature (168)..(172): n is a, c, g, or t
  misc_feature (174)..(180): n is a, c, g, or t
  misc_feature (186)..(190): n is a, c, g, or t
  misc_feature (193)..(197): n is a, c, g, or t
  misc_feature (199)..(203): n is a, c, g, or t
  misc_feature (205)..(206): n is a, c, g, or t
  misc_feature (208)..(210): n is a, c, g, or t
  misc_feature (213)..(213): n is a, c, g, or t
  misc_feature (215)..(217): n is a, c, g, or t
  misc_feature (219)..(225): n is a, c, g, or t
  misc_feature (227)..(231): n is a, c, g, or t
  misc_feature (234)..(236): n is a, c, g, or t
  misc_feature (238)..(239): n is a, c, g, or t
  misc_feature (241)..(245): n is a, c, g, or t
  misc_feature (247)..(247): n is a, c, g, or t
  misc_feature (249)..(251): n is a, c, g, or t
  misc_feature (254)..(259): n is a, c, g, or t
  misc_feature (261)..(261): n is a, c, g, or t
  misc_feature (265)..(269): n is a, c, g, or t
  misc_feature (271)..(271): n is a, c, g, or t
  misc_feature (273)..(273): n is a, c, g, or t
  misc_feature (275)..(276): n is a, c, g, or t
  misc_feature (280)..(280): n is a, c, g, or t
  misc_feature (282)..(283): n is a, c, g, or t
  misc_feature (285)..(285): n is a, c, g, or t
  misc_feature (289)..(296): n is a, c, g, or t
  misc_feature (298)..(298): n is a, c, g, or t
  misc_feature (301)..(305): n is a, c, g, or t
  misc_feature (307)..(311): n is a, c, g, or t
  misc_feature (314)..(317): n is a, c, g, or t
  misc_feature (319)..(323): n is a, c, g, or t
  misc_feature (325)..(325): n is a, c, g, or t
  misc_feature (327)..(328): n is a, c, g, or t
  misc_feature (331)..(331): n is a, c, g, or t
  misc_feature (333)..(334): n is a, c, g, or t
  misc_feature (337)..(337): n is a, c, g, or t
  misc_feature (339)..(339): n is a, c, g, or t
  misc_feature (344)..(344): n is a, c, g, or t
  misc_feature (346)..(346): n is a, c, g, or t
  misc_feature (351)..(352): n is a, c, g, or t
  misc_feature (355)..(355): n is a, c, g, or t
  misc_feature (357)..(357): n is a, c, g, or t
  misc_feature (359)..(360): n is a, c, g, or t
  misc_feature (362)..(363): n is a, c, g, or t
  misc_feature (366)..(366): n is a, c, g, or t
  misc_feature (372)..(372): n is a, c, g, or t
  misc_feature (374)..(376): n is a, c, g, or t
  misc_feature (378)..(378): n is a, c, g, or t
  misc_feature (380)..(380): n is a, c, g, or t
  misc_feature (382)..(382): n is a, c, g, or t
  misc_feature (385)..(388): n is a, c, g, or t
  misc_feature (390)..(395): n is a, c, g, or t
  misc_feature (397)..(398): n is a, c, g, or t
  misc_feature (401)..(401): n is a, c, g, or t
  misc_feature (403)..(404): n is a, c, g, or t
  misc_feature (407)..(407): n is a, c, g, or t
  misc_feature (409)..(410): n is a, c, g, or t
  misc_feature (415)..(417): n is a, c, g, or t
  misc_feature (421)..(421): n is a, c, g, or t
  misc_feature (423)..(426): n is a, c, g, or t
  misc_feature (428)..(428): n is a, c, g, or t
  misc_feature (430)..(430): n is a, c, g, or t
  misc_feature (432)..(433): n is a, c, g, or t
  misc_feature (437)..(438): n is a, c, g, or t
  misc_feature (440)..(445): n is a, c, g, or t
  misc_feature (448)..(454): n is a, c, g, or t
  misc_feature (457)..(459): n is a, c, g, or t
  misc_feature (462)..(466): n is a, c, g, or t
  misc_feature (468)..(468): n is a, c, g, or t
  misc_feature (473)..(474): n is a, c, g, or t
  misc_feature (476)..(476): n is a, c, g, or t
  misc_feature (478)..(478): n is a, c, g, or t
  misc_feature (481)..(482): n is a, c, g, or t
  misc_feature (484)..(484): n is a, c, g, or t
  misc_feature (487)..(489): n is a, c, g, or t
  misc_feature (491)..(491): n is a, c, g, or t
  misc_feature (495)..(499): n is a, c, g, or t
  misc_feature (502)..(503): n is a, c, g, or t
  misc_feature (506)..(506): n is a, c, g, or t
  misc_feature (510)..(514): n is a, c, g, or t
  misc_feature (516)..(517): n is a, c, g, or t
  misc_feature (519)..(520): n is a, c, g, or t
  misc_feature (522)..(523): n is a, c, g, or t
  misc_feature (525)..(531): n is a, c, g, or t
  misc_feature (536)..(537): n is a, c, g, or t
  misc_feature (539)..(540): n is a, c, g, or t
  misc_feature (544)..(547): n is a, c, g, or t
  misc_feature (549)..(553): n is a, c, g, or t
  misc_feature (555)..(560): n is a, c, g, or t
  misc_feature (562)..(562): n is a, c, g, or t
  misc_feature (567)..(568): n is a, c, g, or t
  misc_feature (571)..(572): n is a, c, g, or t
  misc_feature (574)..(574): n is a, c, g, or t
  misc_feature (576)..(577): n is a, c, g, or t
  misc_feature (579)..(582): n is a, c, g, or t
  misc_feature (584)..(586): n is a, c, g, or t
  misc_feature (588)..(588): n is a, c, g, or t
  misc_feature (591)..(595): n is a, c, g, or t
  misc_feature (598)..(598): n is a, c, g, or t
  misc_feature (601)..(601): n is a, c, g, or t
  misc_feature (603)..(605): n is a, c, g, or t
  misc_feature (608)..(608): n is a, c, g, or t
  misc_feature (612)..(613): n is a, c, g, or t
  misc_feature (615)..(615): n is a, c, g, or t
  misc_feature (622)..(623): n is a, c, g, or t
  misc_feature (625)..(625): n is a, c, g, or t
  misc_feature (628)..(628): n is a, c, g, or t
  misc_feature (630)..(631): n is a, c, g, or t
  misc_feature (634)..(634): n is a, c, g, or t
  misc_feature (637)..(641): n is a, c, g, or t
  misc_feature (644)..(644): n is a, c, g, or t
  misc_feature (647)..(653): n is a, c, g, or t
  misc_feature (657)..(657): n is a, c, g, or t
  misc_feature (659)..(664): n is a, c, g, or t
  misc_feature (666)..(666): n is a, c, g, or t
  misc_feature (668)..(668): n is a, c, g, or t
  misc_feature (671)..(671): n is a, c, g, or t
  misc_feature (673)..(673): n is a, c, g, or t
  misc_feature (675)..(675): n is a, c, g, or t
  misc_feature (678)..(679): n is a, c, g, or t
  misc_feature (681)..(687): n is a, c, g, or t
  misc_feature (690)..(691): n is a, c, g, or t
  misc_feature (694)..(696): n is a, c, g, or t
  misc_feature (698)..(699): n is a, c, g, or t
  misc_feature (701)..(703): n is a, c, g, or t
  misc_feature (705)..(705): n is a, c, g, or t
  misc_feature (707)..(707): n is a, c, g, or t
  misc_feature (709)..(710): n is a, c, g, or t
  misc_feature (712)..(713): n is a, c, g, or t
  misc_feature (715)..(722): n is a, c, g, or t
  misc_feature (725)..(731): n is a, c, g, or t
  misc_feature (733)..(738): n is a, c, g, or t
  misc_feature (740)..(747): n is a, c, g, or t
  misc_feature (749)..(751): n is a, c, g, or t
  misc_feature (753)..(758): n is a, c, g, or t
  misc_feature (760)..(765): n is a, c, g, or t
  misc_feature (767)..(768): n is a, c, g, or t
  misc_feature (771)..(772): n is a, c, g, or t
  misc_feature (776)..(776): n is a, c, g, or t
  misc_feature (779)..(780): n is a, c, g, or t
  misc_feature (782)..(783): n is a, c, g, or t
  misc_feature (785)..(786): n is a, c, g, or t
  misc_feature (788)..(788): n is a, c, g, or t
  misc_feature (790)..(791): n is a, c, g, or t
  misc_feature (793)..(793): n is a, c, g, or t
  misc_feature (795)..(795): n is a, c, g, or t
  misc_feature (798)..(801): n is a, c, g, or t
  misc_feature (803)..(803): n is a, c, g, or t
  misc_feature (805)..(805): n is a, c, g, or t
  misc_feature (808)..(809): n is a, c, g, or t
  misc_feature (811)..(815): n is a, c, g, or t
  misc_feature (817)..(825): n is a, c, g, or t
  misc_feature (827)..(827): n is a, c, g, or t
  misc_feature (833)..(836): n is a, c, g, or t
  misc_feature (844)..(847): n is a, c, g, or t
  misc_feature (850)..(855): n is a, c, g, or t
  misc_feature (857)..(862): n is a, c, g, or t
  misc_feature (864)..(871): n is a, c, g, or t
  misc_feature (873)..(878): n is a, c, g, or t
  misc_feature (880)..(882): n is a, c, g, or t
  misc_feature (884)..(888): n is a, c, g, or t
  misc_feature (890)..(892): n is a, c, g, or t
  misc_feature (894)..(895): n is a, c, g, or t
  misc_feature (902)..(902): n is a, c, g, or t
  misc_feature (905)..(907): n is a, c, g, or t
  misc_feature (911)..(917): n is a, c, g, or t
  misc_feature (922)..(923): n is a, c, g, or t
  misc_feature (925)..(926): n is a, c, g, or t
  misc_feature (929)..(931): n is a, c, g, or t
  misc_feature (938)..(945): n is a, c, g, or t
  misc_feature (947)..(948): n is a, c, g, or t
  misc_feature (950)..(950): n is a, c, g, or t
  misc_feature (952)..(952): n is a, c, g, or t
  misc_feature (954)..(956): n is a, c, g, or t
  misc_feature (958)..(958): n is a, c, g, or t
  misc_feature (960)..(960): n is a, c, g, or t
  misc_feature (966)..(973): n is a, c, g, or t
  misc_feature (975)..(975): n is a, c, g, or t
  misc_feature (977)..(977): n is a, c, g, or t
  misc_feature (979)..(981): n is a, c, g, or t
  misc_feature (983)..(983): n is a, c, g, or t
  misc_feature (986)..(990): n is a, c, g, or t
  misc_feature (992)..(992): n is a, c, g, or t
  misc_feature (1000)..(1001): n is a, c, g, or t
  misc_feature (1005)..(1005): n is a, c, g, or t
  misc_feature (1007)..(1007): n is a, c, g, or t
  misc_feature (1011)..(1012): n is a, c, g, or t
  misc_feature (1016)..(1019): n is a, c, g, or t
  misc_feature (1021)..(1021): n is a, c, g, or t
  misc_feature (1023)..(1027): n is a, c, g, or t
  misc_feature (1029)..(1029): n is a, c, g, or t
  misc_feature (1031)..(1035): n is a, c, g, or t
  misc_feature (1037)..(1042): n is a, c, g, or t
  misc_feature (1044)..(1045): n is a, c, g, or t
  misc_feature (1048)..(1051): n is a, c, g, or t
  misc_feature (1053)..(1054): n is a, c, g, or t
  misc_feature (1056)..(1056): n is a, c, g, or t
  misc_feature (1061)..(1062): n is a, c, g, or t
  misc_feature (1065)..(1065): n is a, c, g, or t
  misc_feature (1068)..(1068): n is a, c, g, or t
  misc_feature (1070)..(1072): n is a, c, g, or t
  misc_feature (1075)..(1075): n is a, c, g, or t
  misc_feature (1077)..(1079): n is a, c, g, or t
  misc_feature (1082)..(1083): n is a, c, g, or t
  misc_feature (1085)..(1085): n is a, c, g, or t
  misc_feature (1087)..(1087): n is a, c, g, or t
  misc_feature (1089)..(1089): n is a, c, g, or t
  misc_feature (1091)..(1091): n is a, c, g, or t
  misc_feature (1095)..(1095): n is a, c, g, or t
  misc_feature (1097)..(1100): n is a, c, g, or t
  misc_feature (1102)..(1105): n is a, c, g, or t
  misc_feature (1107)..(1107): n is a, c, g, or t
  misc_feature (1109)..(1116): n is a, c, g, or t
  misc_feature (1118)..(1119): n is a, c, g, or t
  misc_feature (1121)..(1121): n is a, c, g, or t
  misc_feature (1123)..(1123): n is a, c, g, or t
  misc_feature (1125)..(1131): n is a, c, g, or t
  misc_feature (1133)..(1133): n is a, c, g, or t
  misc_feature (1135)..(1137): n is a, c, g, or t
  misc_feature (1139)..(1141): n is a, c, g, or t
  misc_feature (1143)..(1148): n is a, c, g, or t
  misc_feature (1152)..(1152): n is a, c, g, or t
  misc_feature (1154)..(1155): n is a, c, g, or t
  misc_feature (1160)..(1161): n is a, c, g, or t
  misc_feature (1163)..(1165): n is a, c, g, or t
  misc_feature (1168)..(1169): n is a, c, g, or t
  misc_feature (1172)..(1177): n is a, c, g, or t
  misc_feature (1181)..(1184): n is a, c, g, or t
  misc_feature (1187)..(1187): n is a, c, g, or t
  misc_feature (1189)..(1198): n is a, c, g, or t
  misc_feature (1200)..(1200): n is a, c, g, or t
  misc_feature (1204)..(1205): n is a, c, g, or t
  misc_feature (1207)..(1208): n is a, c, g, or t
  misc_feature (1212)..(1213): n is a, c, g, or t
  misc_feature (1217)..(1217): n is a, c, g, or t
  misc_feature (1220)..(1225): n is a, c, g, or t
  misc_feature (1228)..(1232): n is a, c, g, or t
  misc_feature (1235)..(1236): n is a, c, g, or t
  misc_feature (1238)..(1239): n is a, c, g, or t
  misc_feature (1242)..(1248): n is a, c, g, or t
  misc_feature (1250)..(1255): n is a, c, g, or t
  misc_feature (1257)..(1260): n is a, c, g, or t
  misc_feature (1262)..(1263): n is a, c, g, or t
  misc_feature (1265)..(1265): n is a, c, g, or t
  misc_feature (1267)..(1268): n is a, c, g, or t
  misc_feature (1270)..(1272): n is a, c, g, or t
  misc_feature (1274)..(1274): n is a, c, g, or t
  misc_feature (1278)..(1279): n is a, c, g, or t
  misc_feature (1281)..(1282): n is a, c, g, or t
  misc_feature (1284)..(1286): n is a, c, g, or t
  misc_feature (1288)..(1298): n is a, c, g, or t
  misc_feature (1300)..(1305): n is a, c, g, or t
  misc_feature (1307)..(1312): n is a, c, g, or t
  misc_feature (1314)..(1314): n is a, c, g, or t
  misc_feature (1316)..(1317): n is a, c, g, or t
  misc_feature (1319)..(1323): n is a, c, g, or t
  misc_feature (1325)..(1325): n is a, c, g, or t
  misc_feature (1327)..(1327): n is a, c, g, or t
  misc_feature (1331)..(1336): n is a, c, g, or t
  misc_feature (1338)..(1340): n is a, c, g, or t
  misc_feature (1344)..(1344): n is a, c, g, or t
  misc_feature (1349)..(1353): n is a, c, g, or t
  misc_feature (1355)..(1359): n is a, c, g, or t
  misc_feature (1361)..(1361): n is a, c, g, or t
  misc_feature (1364)..(1368): n is a, c, g, or t
  misc_feature (1370)..(1383): n is a, c, g, or t
  misc_feature (1389)..(1389): n is a, c, g, or t
  misc_feature (1391)..(1398): n is a, c, g, or t
  misc_feature (1400)..(1402): n is a, c, g, or t
  misc_feature (1404)..(1407): n is a, c, g, or t
  misc_feature (1409)..(1410): n is a, c, g, or t
  misc_feature (1412)..(1412): n is a, c, g, or t
  misc_feature (1415)..(1417): n is a, c, g, or t
  misc_feature (1420)..(1425): n is a, c, g, or t
  misc_feature (1428)..(1429): n is a, c, g, or t
  misc_feature (1432)..(1434): n is a, c, g, or t
  misc_feature (1436)..(1436): n is a, c, g, or t
  misc_feature (1438)..(1443): n is a, c, g, or t
  misc_feature (1445)..(1446): n is a, c, g, or t
  misc_feature (1448)..(1452): n is a, c, g, or t
  misc_feature (1454)..(1459): n is a, c, g, or t
  misc_feature (1465)..(1469): n is a, c, g, or t
  misc_feature (1472)..(1475): n is a, c, g, or t
  misc_feature (1477)..(1477): n is a, c, g, or t
  misc_feature (1480)..(1481): n is a, c, g, or t
  misc_feature (1483)..(1485): n is a, c, g, or t
  misc_feature (1487)..(1494): n is a, c, g, or t
  misc_feature (1578)..(1578): n is a, c, g, or t
  misc_feature (1590)..(1590): n is a, c, g, or t
nttnnnnannnannnnnnnaannntnannnannnnngggntnttnnngnnnnnannnannnttnnnnnncnaannnaannnaaanntnggnngnnnttnnannnnnaaannnnngnnnnnnntnnaannncnnnnnntnnnnnnnnnnnttnannnnnaaannnnnannnnncnnnnnnnaaattnnnnnaannnnngnnnnngnnannnaangnnntnnnnnnngnnnnnggnnnannannnnngnannnttnnnnnnangttnnnnncnantnncttnannanaaannnnnnnnanaannnnntnnnnnttnnnntnnnnngncnnaanannatntnatttnanttttnnttnangnngnnaangggttngnnntnancnaannnnannnnnntnnttnannttntnnaaatnnntttnannnntnangnnaaanncnnnnnntgnnnnnnnaannnttnnnnntnaaccnncntntannanttnnncntttnnnnnccnnttnaatnnnnntnntnntnnannnnnnnaaaannannttannnntnnnnntnnnnnntnaaaannaanntngnntnnnngnnnanttnnnnnttnaantnnnaantttnncnaaaaaannanccnannaanttnnnnnaanttnnnnnnntttncnnnnnnantnaantnanttnnannnnnnnttnnaannntnncnnnantnanngnncnnnnnnnnttnnnnnnncnnnnnnannnnnnnntnnnannnnnnannnnnngnnaannaaantanntnntnngntnntngnaannnnananttnnannnnngnnnnnnnnngnaaaaannnnaaaaattnnnnggnnnnnncnnnnnnannnnnnnnannnnnntnnntnnnnntnnnanntaaaaanttnnnaaannnnnnngttgnngnnggnnnaaccaannnnnnnntnntngngnnnantnaagggnnnnnnnntnantnnnanttnnnnntnaaaatttnnaaangntttnntttnnnntntnnnnnancnnnnnannnnnncnngannnnanncnaaaannatnaantnnnaangnnnaanngncntnantttngnnnntnnnngntnnnnnnnnanngntncnnnnnnngntnnntnnnannnnnntttncnnaaaannannnttnnggnnnnnnaaannnnaangnnnnnnnnnngnaaannannaaannaaanttnnnnnnttnnnnnaannannagnnnnnnntnnnnnngnnnntnntngnngnnnantttnntnngnnngnnnnnnnnnnnannnnnntnnnnnntngnnannnnncntnaaannnnnnannnaaangaaannnnntnnnnntnaannnnnannnnnnnnnnnnnnaaaaantnnnnnnnntnnntnnnnannanggnnnccnnnnnnaannttnnntngnnnnnntnntnnnnnannnnnnaaaaannnnnaannnntnaannannnannnnnnnncccttaattaaattaaaataattaattagcgcataaaagtgtaaatactatctttattaagcgcataaaagtgttatgatatcngtgttaattacntaaacagacttccagatgaagcgaatattattaaataaattactagattggaaaaatcaagccagtagaaagcctctattaattgacggcgctagacaaacaggaaaaacctttcttttacaaactttatttgctgacgagtttcccagcgtcttatatatagactttctgaaaacgccacagatggcggacgccttctcaggggagctatcccctgatgttattatttctaatatagagttattgacaggtcaagtttttaatccagaatcagacctgttgattttagatgaaattggcgaatgtcaaaaagctgtaaccgctttgaaatacttcgcccaagaggcgccaacctattatgttgcggcaagcggttcaaatattggtttattagctagtttcccagtaggaaaagttgagcactgttatctaaatccttttacatttaaggaatttttgtgggctgcaaacgaacctttgttgcttaaggtttatgagcaacaagccaactctaaagctgtccatacaaaactatttgataagttgacagattattactttacaggtggtatgcccgaggctgttgccgcttggttcgaatattcagaaacaagcatacttaagcgtatcaaccaagttgaacaaattcatgctgatttactggagggttataagcgcgattttggcaaatatgctaacaaggtagatgcccagttaattgagtcggtttttagcagcattccttcgcaactctcctctgtgtttgacggctctgttaatcgctttaagtttaaaggagtttttgcaaaaaaatcacgttatgctgaatttgaaagtgcaattaactggctgcatcgatgtcgactggttttgaaaaaccatcctattgagggtttgccaaaatcaccactggcggcctatcaaaaaaacaataaagtaaagttatttttctttgatgttggcttattaaatcacagtttgagcactacctacaaagagataaagcagcaagcttatgaatacaagggttacattgcagagaatttcgtacagcaagagctggcagcgctaggatttgaaccaagtttttcatggaatgatgctcgggcagagattgagttcatcgtcagtaataaacaaggcgaaattattccaattgaagttaagagtggagggcgcacgcgcgcaaaatcattaaaatcttatatagttaagtgcgcgcctagcaaaaccattaaattaacgggcacacaaggttcgaacaacctagaaaagattaatattgtaatgccattgtattacgcagaatttataatagacaagattaataattagtgatgtgtttgcgaactgtacgtttaaaaccagtgattaaaaaaaggtgtgaacttaatttattaattctgttgaattcgacagaattaggataaaaaagtgagccggatattactcaatggattgtctggtttttagagtaagttaaacctcacacacaaagtagtgtgtataagttcaacattgcattttgctaattgggtttaaagtaacaaccctttctaagtgttctggtgataaatgagcatagcgcattgtcatttttaaatcactgtgtcccagtgttttttgtagggtgagaatatcaccaccattcatcataaagtgactggcaaacgagtgtcttagaatatgggttaactggccttttggcatgtctatttccaggcttctaatgacacggacaaaggttgagtagccatctttaaaaggtgcattttctctaacctcatcagccaactctttggtgagtggcaattgcctaatttttccatttttagtgtcagttaagctgattcgattgttagcgatatttctggccttaatgccggtagcctcactccatcttgtgccaacacttaagcagatcttagtggtaatgtaggtgtcaatacttattcgtttgagcgtttcaaggagtagtttaatttgttctttggttaggtaggtaagttctgtttcattaaatcttagctttctaattcctatcattgggtttgcttcaagtaagtccaatctaacgagctcaccaaatacagcagctaaatatgcatggtgatggttaatggtattcgctgttatgtcagtacgtttattgcgatactttaaaaaatcatgttttgtaaagttgcatatttttgggtcttttaaatactcaacaagtactattagtgctcttaaccggccgcccaggtcatggcaaaaacatctatgctttaaccttcttagagcagcaagagtttatcaattacgataaagaaaccaaaacctttagttctaccattgatagacctttgttctttattgcctttgacggtattaatattgttgatagtactacggctaaatatgaaga

SEQ ID NO: 1539 - DNA, 4000 bp, Escherichia coli
  misc_feature (258)..(258): n is a, c, g, or t
  misc_feature (260)..(260): n is a, c, g, or t
  misc_feature (536)..(536): n is a, c, g, or t
  misc_feature (614)..(614): n is a, c, g, or t
  misc_feature (650)..(650): n is a, c, g, or t
  misc_feature (653)..(653): n is a, c, g, or t
  misc_feature (2028)..(2028): n is a, c, g, or t
  misc_feature (3366)..(3366): n is a, c, g, or t
  misc_feature (3374)..(3374): n is a, c, g, or t
  misc_feature (3380)..(3381): n is a, c, g, or t
  misc_feature (3393)..(3393): n is a, c, g, or t
  misc_feature (3834)..(3834): n is a, c, g, or t
ttatggattcaattaaaaaaagcggaggatttgatataacctctctgggagaggaaaagtaaagcaccttagttccatacaattttggagtatgtatggattttttaacattagattctaatcttaccggtcttaccgaaggttatgcctcttcaactggttcaagtcttgatactggcgatttaaggcgaacttttggttttttaccaataccggaagcaacgcaagtggggccggcgaacactccactactggcgntnatgagtaaatatcgcaagagacctacggatgatcctcagcctaaaacgctggagagacgcagttctattcatcgtcgttatgcttatgttgttgctcacggaacgagtattgctggatattctacaactgatgctactgttacttataccaatgtaaatgctggtgatacttattatgttcgtatggctactgactataagtcggctggcaatattggtattgtctataatgcagagggaacagctagaaatgcatttgaggttggggcttcaggnactcgacctgaatttttcttagttggacaattagtaaagattccgtgtattgcgtcgggggcgggtgcaactcatacngatgcggcttcttttaatactattgatcattttacnggncgtattgagcaagttattctcaatactaatactgttgacttgaaacttacgattgttgatggactttctgaaaatcgtgatcttgctggttggggtagtgctgataatactgctgattatccaatttcaagtttatcggcagctaatttggttaagttacgagtttttgatcagttagaaagagctcgttcgtatgttgttatgactggatttgctcgtggtactggttacccgaatagctggagtgataatccgttctctactggttatactaatacgcagattttcaaaacaacgctggcaatggatgaaactactcgtgctactgttttgaaaattgaaccaaatgagtttgctcgtttgtggcgtgataaagttattgagcataatgtcgatgtcgaaggtggtatgttatggtcaactcttggaactggcactgatagttcaggcaagtcaatttattatactcaaggtatagctgattatgccttgaattatagcccgattttccaattggcttcaactacaaatgctgataattttctggataatatggcgacatttatggatggtcgtatgaaagctgaaaatgaaaaggctacaatgtggttagttgataagtggacgcttaattggctaatgaaaatttctggttatgctttgcaaaatcttaaagcagctacatcatcgacttatgcttcaatgagtatggattataaaggatggcgagacattaaacttggcgatggttctgttaccagtcacgaaatctggactccttatgggaatatgaatttggtttatatgccacaatttgacggaactggcatttcaattctggctgttaatatgaatgatgtcgaatatcgtccattagttggaaatgggattaatcgagatactcgtgttattcctggtgtgcaaacactggaaaactctggtattgatggtcgtgtcgatttaatccaaactgaggcggctttagcttgtaaagcccctgaacatcacgccgtttggaaacgggcttaaggagttattatgggtaaagaacctttaattgggtctattgatcatataaacgaagttagcaagatgatcggtggcgtcgaaactatcactgctgctaagactcttacaatcgctgatagtggcaagacatttatttttgatgttgcttctggtgcaactgtgacactgccaactgcttatgatggttgtagatttaaatttctatttaaaactgcggtaaccagtaataactatggcattgacacggcagctgcaacgtctttattttatggcagaattgtcattcacgataaggatgttagcacttatgattccacattagcgcattttgctgctgatcaatctnatgacgattcaattgatatgaatggtagcactactggcgggcttgctggcggctatatcgaccttgtggcttatggcggtcattggttcgtagatggcgagatttacggtgatggtaatcttgtcactccatttagttgatatgagtgagttatttgtttagacatcgggaaatgggtggtcgtgagaccaccctatacccttttctaaatggtgattgatggcaaaagaactattgacggcaataagagcaattactggctcggtagtgagtggcacacctgctactactgatgaccaattaattatattcttaaataacgcctctaatttcgttattaataatctaccaatagaatatgccatcccattttggaaagatagttcagcaattacgtcaaatgctggttttactgttatttcagaccgaattgttcaagtaaggcgtaatggcagagcttgtaagcaaattggattgggacttgcttatgctcaagatttaacgcctacttttacaataactgttagtgattatgctaatatagcagttggtaaagcaataactatagatggtattaaactttattgtcaagaatcagctactactgagaaaagtgatttcattaaggaaacatcaaatcagattactgctcaaaatattgtagatgcaataactaatactttttctgctccgatagtggcaagtttaaatgatgcaactatatcaataacaggtgctaatagtgttacaagtgaagatgcaataagattaattgtaacgcaatctgcaacatctacaagtctatataaggcaactgaattgtttcctgcttattatgttatggcaaataaagtctatatcaagcccgacccgacagcaagtgcagttggttatgtaacttatgtttcaccattgacttttactaatggtgatagttctgagatgacggtaagtggggtaaagacaattattttagattatgctattcatcaggattatgcccatttggctggtgtatggcgggatttggcgcaaacagaattggctaaagttacaacggctacaactggttatttggcattattcaatgcagcacttcctacttggtcagatgttacagctccgacaatgcctaccttgacaattgagccaatgacaaccttgccaactcttaccctttccaatgcaagtgattcctggcctacttttagtgaaacaattactctgccagaattggtattaccagttatgacagctttaccagttctgcaacgaacaattgcttcaaatgtatttgtaactggtgaggctaatacgtctgatgcaactgctgagacnattcttanagttgnnatggaagatganacaactttacaaatgcaattatggattactggtattacggatgatggtgcaaatagtggtagttatgcgttatttatcgcttataaaaaagatggcactaacgatccagtccaaattggtgattatgaaacgggagcgcatattgaagttactgatgaagaatggaatggggtaacatttgaagtatcgtcttctaatatattggtaaaagtttctggtaaggcagatacaaatataagttggaatgctttggcattaaaaactacaggtggaagttctattgcacttgaggatgtaaaaattaccaatcctggtacgctttcaatgcctatagcgccatctttaccagtgttagcattaagtacaatggatactttgccaacggcattaattgaagctgatatggatttcagtgggctaacagagccttcctatacagcncctacagcacccgatagtataaccttgccaacattgacagtcccagcacttgatactttgccagatgcacttgaatatagtaatattgatttatctggtataaaagttccagtttatactcaaccagatgcacctgctccaatagaattacctaccttagttgtgc

SEQ ID NO: 1540 - DNA, 4000 bp, Escherichia coli
  misc_feature (1985)..(1985): n is a, c, g, or t
  misc_feature (3198)..(3198): n is a, c, g, or t
  misc_feature (3347)..(3347): n is a, c, g, or t
  misc_feature (3594)..(3594): n is a, c, g, or t
  misc_feature (3597)..(3597): n is a, c, g, or t
  misc_feature (3600)..(3600): n is a, c, g, or t
  misc_feature (3604)..(3606): n is a, c, g, or t
  misc_feature (3609)..(3609): n is a, c, g, or t
  misc_feature (3612)..(3612): n is a, c, g, or t
  misc_feature (3615)..(3615): n is a, c, g, or t
  misc_feature (3620)..(3621): n is a, c, g, or t
  misc_feature (3624)..(3624): n is a, c, g, or t
  misc_feature (3626)..(3627): n is a, c, g, or t
  misc_feature (3632)..(3633): n is a, c, g, or t
  misc_feature (3636)..(3637): n is a, c, g, or t
  misc_feature (3639)..(3639): n is a, c, g, or t
  misc_feature (3643)..(3644): n is a, c, g, or t
  misc_feature (3647)..(3647): n is a, c, g, or t
  misc_feature (3666)..(3667): n is a, c, g, or t
  misc_feature (3673)..(3673): n is a, c, g, or t
  misc_feature (3675)..(3678): n is a, c, g, or t
  misc_feature (3685)..(3685): n is a, c, g, or t
  misc_feature (3687)..(3688): n is a, c, g, or t
  misc_feature (3693)..(3694): n is a, c, g, or t
  misc_feature (3696)..(3698): n is a, c, g, or t
  misc_feature (3707)..(3707): n is a, c, g, or t
  misc_feature (3715)..(3716): n is a, c, g, or t
  misc_feature (3721)..(3722): n is a, c, g, or t
  misc_feature (3732)..(3732): n is a, c, g, or t
  misc_feature (3737)..(3738): n is a, c, g, or t
  misc_feature (3740)..(3742): n is a, c, g, or t
  misc_feature (3746)..(3746): n is a, c, g, or t
  misc_feature (3750)..(3750): n is a, c, g, or t
  misc_feature (3753)..(3758): n is a, c, g, or t
  misc_feature (3760)..(3762): n is a, c, g, or t
  misc_feature (3764)..(3765): n is a, c, g, or t
  misc_feature (3769)..(3770): n is a, c, g, or t
  misc_feature (3774)..(3774): n is a, c, g, or t
  misc_feature (3777)..(3777): n is a, c, g, or t
  misc_feature (3779)..(3779): n is a, c, g, or t
  misc_feature (3783)..(3792): n is a, c, g, or t
  misc_feature (3796)..(3797): n is a, c, g, or t
  misc_feature (3802)..(3802): n is a, c, g, or t
  misc_feature (3807)..(3808): n is a, c, g, or t
  misc_feature (3811)..(3811): n is a, c, g, or t
  misc_feature (3814)..(3815): n is a, c, g, or t
  misc_feature (3819)..(3819): n is a, c, g, or t
  misc_feature (3822)..(3823): n is a, c, g, or t
  misc_feature (3826)..(3827): n is a, c, g, or t
  misc_feature (3832)..(3833): n is a, c, g, or t
  misc_feature (3837)..(3837): n is a, c, g, or t
  misc_feature (3841)..(3841): n is a, c, g, or t
  misc_feature (3846)..(3846): n is a, c, g, or t
  misc_feature (3851)..(3853): n is a, c, g, or t
  misc_feature (3868)..(3869): n is a, c, g, or t
  misc_feature (3872)..(3873): n is a, c, g, or t
  misc_feature (3875)..(3875): n is a, c, g, or t
  misc_feature (3879)..(3880): n is a, c, g, or t
  misc_feature (3887)..(3887): n is a, c, g, or t
  misc_feature (3890)..(3892): n is a, c, g, or t
  misc_feature (3894)..(3899): n is a, c, g, or t
  misc_feature (3903)..(3904): n is a, c, g, or t
  misc_feature (3922)..(3922): n is a, c, g, or t
  misc_feature (3927)..(3927): n is a, c, g, or t
  misc_feature (3932)..(3932): n is a, c, g, or t
  misc_feature (3941)..(3941): n is a, c, g, or t
  misc_feature (3947)..(3947): n is a, c, g, or t
  misc_feature (3950)..(3950): n is a, c, g, or t
  misc_feature (3961)..(3961): n is a, c, g, or t
  misc_feature (3966)..(3966): n is a, c, g, or t
  misc_feature (3974)..(3974): n is a, c, g, or t
  misc_feature (3980)..(3982): n is a, c, g, or t
  misc_feature (3989)..(3989): n is a, c, g, or t
  misc_feature (3992)..(3993): n is a, c, g, or t
  misc_feature (3995)..(3996): n is a, c, g, or t
tctttgttaattatattcaagagcatcgagcatataatttaaatcaaaaattaaaagtattagttactgataacttttttgttctaaatcaaaaaattgacaatattaatacttttaattttaatgaaacaaacaaaaatttaattcaaattaatcaaaatgatttagtaattggtgatgttattgttttaaaacaaggtgatttaattcctgctgatgctagaattatttgagaagataatttatcagttgatcaatcaacattaactggcgaaaataatccaattaaaaaaagtattactaataaaagtaaaaaaattgttgaatataacaatattctatttgcgcaaacaattattacttcaggtaaatgttatgcggtaattattaacattggtgatagtaattactcacaatcaattttaactatggccgaacaaattgcaactaaatctgatttcagtaaaggaataagtaaactaacaataatgctagttattgcaattttagcagtaattccgtttatttttattgctaatggtttacgaacttcacaatgaattgcagctttagtattcactttatcaattgttgtttctttaacacccgaggcattaccagccgttattgctactaacttaaaaattggtagtaaaaaacttgttaaagaaaatgttgttgttaaaaataatgaagtaattcaaaatatggggagtgttaatatcttaacaactgataaaacaggaactttaacagttgatgaaattgaagttgcagatatcattgatattaatggtaacagttctgaatgtattgcaaaatgtgcttatattaatgctttttttgaaagaaatttaattaataaaattgatgaagcaatttatcataaacttaataaaaaatttaatactaacaaaatccaattaattgctgatatccaatttgatcatgaaacgaaaattagtacagttttaattaaagaagataataaaacaaaacaaattactaaaggttcttttactgaaatgatgaatatcattaccaaagttaaaattgataacaaaattgttactttaaatgatcaacataaaaataaaattaatcaattagttaataatttagctcaaaaaggttttcgagtaattcttgttgcttcaaaaaaaacaagtaaaattacaactaacaatttagtttttgaaggaattatttcgtttgaagataaattaaaagatgatatcaaaaaagtcattaaaaccatttatgagtcaggaattgatttaaaaattttaacaggagatgccttagaagtttcacaaactattgctaataaattagcaatgaaaaaagaaaatgctgtacttggtcaagatttagcaattagtaataatgaaaaactatatcaacaacttataacagcaaatatttttgctaaattatcaccctttgaaaaagcaaaaattgttgaaactttaaaatcaaataatgttgttgcttttttgggtgatggtgttaacgatgccggtgctttaaaattagcagatgttggaatttcagttaataatggtacgccaattgccaaatatgcttctgatgttatcttattaaaaaaagatttagatgtgttagaaaaatcatttattaaaggaagagaaattttttataatgctcttaagtatattaaattaactgttgcttcaaactttggtttaatgttaactttattaattggatcaatttgatttgactttgctactatgtcaccaattcagttattaatgcaaaacttaacttttgatttagctaatttattgtttgttattgataaagttgataaccaagcaattaaaaaaccattaaaatgaaatattaaaacaatatttcctttcgtgcttattaatagtattttaatgtcaattattagtattactaatttcttaattgttggttatggttttaatttttttgaacatattaatcataatganctatcaagagccttatatattaaacaatttcaaacaatgttctttattgaatcaatggtcagtcatattttctttattttctttgctcgaacagcaaaaatatcatttattcaatcatgaccggcaattactttcttatttagtatgctaagttttttaataatccctttcttatttacctttgttaatccgattgcaaatgtctttcaattatcaaaaccaccattattatgactaccagtattaccaggattaataattgttaattgaattttagttgaatcaacaaaagcagtaatgacaaaaaaatttaaaatttgaatttaataagtaattaaaaattgttaatttaacggcagtgaattttaaatattcactgtttttttatcattattttcaaaaatattgctccccctcctcctgagagtgatataattttaaaaaaataaaggagataacctaaaatggcacaagatttaacaaaagaaattcttccaattgaagaacaaaaacaaacaaagaaaatattatataagaattgaaaattttatgctacagcattaggaatcataacggttggtttagctgtcggtttaggaataggattaggtgttgaaaatagttctcataatactattactccagcacaaaaaattgttaatgaaattaacaagatcacaaatcttgaagtaatagcaaatactactgatagcacagtaacatctattaataatctaattactagtgattttattagtgcaaaattaacaggtgacaataaaactacatttgaagctaataaaaataaatttgcacttgtaaaaattactgttggtaaaaacaatttagtagataataatctaaaaacaattggaacaattaatgctaaacttatttataattatgactcaattaaaaatcaaacaaccaatctaataattacagtttcagataaaaatactactgatatagttaatcaaattaatattactacttatgaaacaaatgttgaaattaatagcacaattgatgatttaatatttatgcctttattcattcaatcaaaattaacattccaaaataaaacaggatttaatgctaatttgtttacttttaataaaattactgttaatggtaatgatttacaaaatagtgatttaacaacagaacaaacaattaatgctaagattaattacaattatgataatattgnaaaccaaacaacaaacttaacaatgacagtcggtactaatgtttgatctgaagatgtaataactaagcaattaaatacattaacaggttttacagttaattatgatcaaacaacagcaacaattacaacagttacagaccaattaaaanctatgtatgttgatacttttacgagcattaagattcaaaatgaaattaaagaaaatttaataatttctaatttaaatcgtagtataagtggtactcatactccatgaacagatgatgacttaagaaatggagcaactagtggtacaacttgattcaatcttacttttaaaaatatattattaagtagcactaaaattgtccatcttaatcctgttattattgatgcaactttacttaattatttaantancanaaannnttnaanaanaattnnttntnntaaannaanngnaaannttnattcaattaaaaaccaaannttaaanannnnaattaanannattannannnaaaaaattnaaaattannttaannaaaatttaanaattnntnnnttanatanatnnnnnngnnnanntggnnaaanaananaaannnnnnnnnnaaannaaagnttaannaanggnnaaanaannggnnattannaatntttnttaanaaaannnattcttggaattaannaannanaaannaaagttnttnnncnnnnnntttnnccaaattaaataattaanaaaanatttnttcaaaatnaaaaanttnagtttataaantgaantttttttntttttnnnaattaanaannannactg

SEQ ID NO: 1541 - DNA, 4000 bp, Escherichia coli
  misc_feature (1)..(1099): n is a, c, g, or t
  misc_feature (1621)..(1621): n is a, c, g, or t
  misc_feature (1658)..(1661): n is a, c, g, or t
  misc_feature (1665)..(1669): n is a, c, g, or t
  misc_feature (1671)..(1674): n is a, c, g, or t
  misc_feature (1676)..(1677): n is a, c, g, or t
  misc_feature (1680)..(1680): n is a, c, g, or t
  misc_feature (1683)..(1687): n is a, c, g, or t
  misc_feature (1725)..(1731): n is a, c, g, or t
  misc_feature (1733)..(1734): n is a, c, g, or t
  misc_feature (1737)..(1746): n is a, c, g, or t
  misc_feature (1749)..(1749): n is a, c, g, or t
  misc_feature (1751)..(1753): n is a, c, g, or t
  misc_feature (1791)..(1791): n is a, c, g, or t
  misc_feature (1793)..(1796): n is a, c, g, or t
  misc_feature (1798)..(1801): n is a, c, g, or t
  misc_feature (1804)..(1804): n is a, c, g, or t
  misc_feature (1807)..(1809): n is a, c, g, or t
  misc_feature (1811)..(1814): n is a, c, g, or t
  misc_feature (1816)..(1819): n is a, c, g, or t
  misc_feature (1856)..(1859): n is a, c, g, or t
  misc_feature (1861)..(1867): n is a, c, g, or t
  misc_feature (1869)..(1869): n is a, c, g, or t
  misc_feature (1871)..(1874): n is a, c, g, or t
  misc_feature (1876)..(1878): n is a, c, g, or t
  misc_feature (1880)..(1883): n is a, c, g, or t
  misc_feature (1885)..(1885): n is a, c, g, or t
  misc_feature (1922)..(1937): n is a, c, g, or t
  misc_feature (1939)..(1942): n is a, c, g, or t
  misc_feature (1945)..(1951): n is a, c, g, or t
  misc_feature (1988)..(2002): n is a, c, g, or t
  misc_feature (2004)..(2010): n is a, c, g, or t
  misc_feature (2012)..(2014): n is a, c, g, or t
  misc_feature (2016)..(2016): n is a, c, g, or t
  misc_feature (2573)..(2573): n is a, c, g, or t
  misc_feature (2803)..(2803): n is a, c, g, or t
  misc_feature (3584)..(3584): n is a, c, g, or t
nnnnnnnnnnnnnnnnnnnnnnnnnnnnnnnnnnnnnnnnnnnnnnnnnnnnnnnnnnnnnnnnnnnnnnnnnnnnnnnnnnnnnnnnnnnnnnnnnnnnnnnnnnnnnnnnnnnnnnnnnnnnnnnnnnnnnnnnnnnnnnnnnnnnnnnnnnnnnnnnnnnnnnnnnnnnnnnnnnnnnnnnnnnnnnnnnnnnnnnnnnnnnnnnnnnnnnnnnnnnnnnnnnnnnnnnnnnnnnnnnnnnnnnnnnnnnnnnnnnnnnnnnnnnnnnnnnnnnnnnnnnnnnnnnnnnnnnnnnnnnnnnnnnnnnnnnnnnnnnnnnnnnnnnnnnnnnnnnnnnnnnnnnnnnnnnnnnnnnnnnnnnnnnnnnnnnnnnnnnnnnnnnnnnnnnnnnnnnnnnnnnnnnnnnnnnnnnnnnnnnnnnnnnnnnnnnnnnnnnnnnnnnnnnnnnnnnnnnnnnnnnnnnnnnnnnnnnnnnnnnnnnnnnnnnnnnnnnnnnnnnnnnnnnnnnnnnnnnnnnnnnnnnnnnnnnnnnnnnnnnnnnnnnnnnnnnnnnnnnnnnnnnnnnnnnnnnnnnnnnnnnnnnnnnnnnnnnnnnnnnnnnnnnnnnnnnnnnnnnnnnnnnnnnnnnnnnnnnnnnnnnnnnnnnnnnnnnnnnnnnnnnnnnnnnnnnnnnnnnnnnnnnnnnnnnnnnnnnnnnnnnnnnnnnnnnnnnnnnnnnnnnnnnnnnnnnnnnnnnnnnnnnnnnnnnnnnnnnnnnnnnnnnnnnnnnnnnnnnnnnnnnnnnnnnnnnnnnnnnnnnnnnnnnnnnnnnnnnnnnnnnnnnnnnnnnnnnnnnnnnnnnnnnnnnnnnnnnnnnnnnnnnnnnnnnnnnnnnnnnnnnnnnnnnnnnnnnnnnnnnnnnnnnnnnnnnnnnnnnnnnnnnnnnnnnnnnnnnnnnnnnnnnnnnnnnnnnnnnnnnnnnnnnnnnnnnnnnnnnnnnnnnnnnnnnnnnnnnnnnnnnnnnnnnnnnnnnnnnnnnnnnnnnnnnnnnnnnnnnnnnnnnnnnnnnnnnnnnnnnnnnnnnnnnnnnnnnnnnnnnnnnnnnnnnnnnnnnnnnagaatatatacaaaagacaacccatagatacgattacgctagttttctgtgaaaactagcgattttcaaactcccctacagatcaggtaatggtataattattttcccacctctccctagcagtggcaagttatagctcccctacagatcaggtaatggtataatctttgtgtatctatatagtgtactatactgttatagctcccctacagatcaggtaatggtataattcttttttaataacaaaatgtccgaaatacgttatagctcccctacagatcaggtaatggtataattcagtaactcatactaaaggaggcgcacggttatagctcccctacagatcaggtaatggtataatatttcataatagccaaccaggtgcgagtgcgttatagctcccctacagatcaggtaatggtataatagtttttcttccttcctgccagtctttcagttatagctcccctacagatcaggtaatggtataatgaagtcctgatgataaagacgatgcgtaangttatagctcccctacagatcaggtaatggtataatnnnngaannnnnannnncnnggnacnnnnngttatagctcccctacagatcaggtaatggtataattnnnnnnnannagnnnnnnnnnnatncnnngttatagctcccctacagatcaggtaatggtataattngnnnntnnnnatnccnnnannnncnnnngttatagctcccctacagatcaggtaatggtataatnnnntnnnnnnnanannnncnnngnnnnangttatagctcccctacagatcaggtaatggtataatnnnnnnnnnnnnnnnncnnnnatnnnnnnngttatagctcccctacagatcaggtaatggtataatnnnnnnnnnnnnnnntnnnnnnnannntnggttatagctcccctacagatcaggtaatggtataatagattgagaaaatacccatactacataatatagtatgggtatttctcttgcaaaaactgagattaaaataggagtaattgtgattcattaattcttttttcttgtacttttttatcacctgttactattaccgcttctgaaaactgcttatttgtgatcaaaataaccctaactgcaccttttggaggagcccacaatttcatccttttaatatgaatgcgagcatcatcaccatcgcggcaaattcttgaatagactgagaattgtatcatatcatatccgtcacgaagtaaaaagttgcgaaattgtccgtaattttttttgctctcttttgtctctgttgggagatcaaacataactacaatacgcataaatctattttccatatttaagtattggtaatagtaggcgtgaagggtctttttcagtagttaccgttactaaactttgagctgtaatttccattgctcttagaatcgtttgttttgattcgttaattattacacgatgagttaagatncctactaattcatttcgcatttctttatttaataattcggcatttacagaaatttttgtaaaaactaaataatcaacataaggtctatacacttccatcaaatcgtctgccaaagaataattgtttaactcatttttatgttgaataccgatacttgataaaaatccgtaagttacaattgaacgagccatagctccgcgtaaaatagcataaccataatttaaagacgngtttattacatgatcactattacgcacacatccttttggtaaaagctcaccaaaatataatctcgctgctgaagcttcacgatttagggtgtcaccagaattaactgatgcagtataatttataaaattaggaaattctcttttagaaatttcagttagtaccgcgtactgattttccagtttttgtttaattatactttgccagactcttttctttaatggttctgtccataacaattgttcttttataactttactttgtcgggagtgttgctggtatccaagaagagttccgctaggggtgtgtttttcatcacatattaaaaccgcaattttatgttgaatacaagcatcaagtaacgcgaccgaagtagtgatagttctattttcaagcacaataacgctaatatcctctaacgggactttgaattcgcctgaatcttgttttatcaccaaattttctagattaagcgataaatatgatttttcagcaatgctgactattcgccatgacatattttacaagcacaaaaaagtcctgtgaataaggactcttttgtcaaagttacttactgcaatttagttaaacttaagtcgtttttcccccttaaccaaactgtagttacctaatacatctaccacatacttatcgaacttgtcaagtgttttgattcctatgttggattccgaacttttatcatgagtagcgactacaagagacgccactgagattccggccttaatgtagtaccctaacgaattctcattctttttagtaatntgtaccaaatcaccaggatataagctgaacttaaaattaaatgttttatctagttttgtccaatcgctttcatgtttcccaggagaacatactctgtcaggaagttctttagcaacaacatgatgagcgtagattggtacaaaataaaattcatcttttaaattcttgttaggtttggagaaaatgtcaatccggaccattgatgcacggtccaccagagcattcccgtcattaattaaaataccagatttctgtgtattattttgcaactttacactacgaacgacaggacctctggtgccatctttttgtattttataaaatggttcagcaaaggcttttttaccatcgccactatattcatctaattttaatttaagtgctgtatataattttggatctaaataacgaccttc

SEQ ID NO: 1542 - DNA, 4000 bp, Escherichia coli
  misc_feature (172)..(172): n is a, c, g, or t
  misc_feature (592)..(592): n is a, c, g, or t
  misc_feature (733)..(733): n is a, c, g, or t
  misc_feature (974)..(974): n is a, c, g, or t
  misc_feature (986)..(986): n is a, c, g, or t
  misc_feature (1274)..(1274): n is a, c, g, or t
  misc_feature (1355)..(1355): n is a, c, g, or t
  misc_feature (1415)..(1415): n is a, c, g, or t
  misc_feature (1550)..(1550): n is a, c, g, or t
  misc_feature (1553)..(1554): n is a, c, g, or t
  misc_feature (1847)..(1847): n is a, c, g, or t
  misc_feature (1952)..(1952): n is a, c, g, or t
  misc_feature (1973)..(1973): n is a, c, g, or t
  misc_feature (2055)..(2055): n is a, c, g, or t
  misc_feature (2142)..(2142): n is a, c, g, or t
  misc_feature (2178)..(2178): n is a, c, g, or t
  misc_feature (2300)..(2300): n is a, c, g, or t
  misc_feature (2355)..(2355): n is a, c, g, or t
  misc_feature (2400)..(2400): n is a, c, g, or t
  misc_feature (2433)..(2433): n is a, c, g, or t
  misc_feature (2483)..(2483): n is a, c, g, or t
  misc_feature (2541)..(2541): n is a, c, g, or t
  misc_feature (2576)..(2576): n is a, c, g, or t
  misc_feature (2589)..(2589): n is a, c, g, or t
  misc_feature (2604)..(2604): n is a, c, g, or t
  misc_feature (2670)..(2670): n is a, c, g, or t
  misc_feature (2787)..(2787): n is a, c, g, or t
  misc_feature (3727)..(3729): n is a, c, g, or t
  misc_feature (3788)..(3788): n is a, c, g, or t
  misc_feature (3894)..(3894): n is a, c, g, or t
  misc_feature (3902)..(3902): n is a, c, g, or t
  misc_feature (3908)..(3908): n is a, c, g, or t
  misc_feature (3949)..(3949): n is a, c, g, or t
  misc_feature (3972)..(3972): n is a, c, g, or t
  misc_feature (3998)..(3998): n is a, c, g, or t
cgacgccggggtcgaatgggacgacctggtggagtgggccgtacagcgcggattgtgggggctcgaaaacctctcgctgatcccgggcaaggccggggcggcgcccgttcagaacatcggcgcctacggctgcgaggcgaaggacgcgatcgagcgggtacacatgttctgngtggaaaactgcaaatgcatgacgctcgacgccgcgcactgctgtttcggttaccgcgaaagcatcttcaagcacgacctgcggggacgtgtcgtcatcacggcggtcgacatccgcctttcgcgcacgccgcaaccccggctggggtacggcgacgtggagcgcgaggtcgaggcccgcggcggcacgacgctgcgcaacatccgcgaggcaatctgcgccatccgccgcgccaaactacccgacccgaaggtgacgggcaatgcggggagcttcttcaaaaacccggtcgtcgatgaatccgtggcgcaacaattgcgggccagctggcccgacatgccgctctaccccgccgccctttcgggcaaggccaaactcgccgccgggtggctcatcgacaaggcggggctgaaaggctgncgaagcggacgggtcggcatccatgaacggcaggcactggtattggtgaacctgggaggcgccacgggcggcgagatactcgatttcgcccgtatggtacaggcccgcgtacacgaaaagttcggcatagagatagacacngaagtcaacatattgtaatatggcacttttagaggctttccagaggtatgtcgccgagaatgacctggcgacgcacgacgaccgcatcctgctgaccgtttcggggggcgtggattcgatggtcatgctgtcgcttttcacccgcagcggctattcggtgggcgtggcgcactgcaatttccagctgcggggcgccgagagcgacgaggacgaagtgctggtggaagaagaggcgaagaantacggcgtgganttctacaacaagcggttcgaaaccacggccgaaatggaacgcacgggcgagtcgatggaaatggcggcacggcgcctgcgctatgcgtggttcgacaccctgagccgcggtcagggctacacggccgtggcgatcgcccaccatgccgacgactcgatcgagacgttcttcatcaacctgctgcgcggcacggggctgcgcgggctgacgggcatctcgacgcaggtgggcaggatcatccgtccgctgatgttcgcctcgcgcaaggagatcctcgaatatgccgtngccaaccgcatcccgttccgcgaggattcgtcgaaccgctcgaccaaatacctgcgcaacaagatccggctcggactgatnccccgcatccgggagatcaaccccaagttcacgagcctcatgagccgcaacctggcacgnctgaccgatgcccagctgttcatcaaccacggcatcgaacgtatccgcggcgaggcggtgacttcggcggacgggttcgacacgatccacctcgaccgcatcgacccggcattcccgcaggagttcgtgatttanganntgctgagttcggcctacgggttcaagggtgacgtcgtcgactcgctctgccattcgctccggcacgatatgacggggcgacgcttctactcgcgcgaacgggtggcctacgtcgaccgcggcaagatcgtcgtggcgccgatcacccccgacgacgcctgcatgacgcaggtggaaaggggcgcacagcggagctactgcggcaattcggtgctctacttcgaatatacggacatcgacacgatcaagaatttcggcgtgccggagcatatcgcccaggtcgacgccgaccgnttgcaattcccgctcacgctgcgccgctggcgcgaaggcgactccttcgtgccgttcggcatgacggggcgcaagaaagtgagcgattttttgatcgacgccaangtctcgatggccgaaaaacancggcagttcgtactgctgtcgggcggcgagatcgtatggctcgtcggccgccgcatcgacgaccgctaccgcctgacgcccnacacggagaacgtgctgcgtatcaccaaagaaatcgtctgacatggctaaaagcgcactgaaattcaaggattccgtcgccgcatangaacaactcgccggccagatcgccgcacggcggttngtccccatctacctgctcatgggcgaagagagctacttcatcgacgccatcgccgagcagatagccacgaccgtgctgggcgaagccgaacgggctttcaaccagctcaccgtctacggcanggactccgaggcggggcaggtcatcaacctctgccgccagatgccgatgatgggntcctaccaggtcgtcatcctcaaggaggcgcagcagctgcgcggnctggacaagctctcgctctacacccagaagccntcgccgacgacgatcctcgtaatctgccacaaggagaaaaacgccgacangcgttcggccttctacaagggttgcgccgccaacggcgcggtgctcgagtcggtgcgnccgcgcgactacgagatcgcctcgtggctccagcnattcatcgccggnaaagggttggccatngacacgaaggcgctgtcgatgctgaccgaccacctgggcaccgacatttcgaaaatctcgaacganctgggcaaactggtcgtctcgctgcccgaaggcacgaagcgcatcaccgacgccgacatcgaggccaacatcggcatctcgaaggactacaacaacttcgagctgtgcaaggccgtngcgacccgggacatggcgcgggcgctgatgatcgccgagcatttcgcccgcaaccccaaggacaacccgctgctggtcaccgtactggcgcttttcgggcagttcaaggagctcttcgtcgtgaactacctccgctggctctcgcggcacaagggaaccgcattcccgcccgacacggagctgatgcgcatcctcaagaagagcaacgtctatgtcatcggcgagatcaagcagaacgccgccaactgggacaaccgcaaggtattcaacatcctcggcctgctgcgcgaatacgacgccaagagcaagggcatgaacgccggaggtgcatcggacggcgaactgctgcgcgaactgctgctcaaaatcttcatgctctgatgcgggaagtctacctataccagaccgtacatgtcctcgacggagagtgcctctgcctgcgggaacacctggccgtactcgaccgctggtcgcgcacgctcttcgggtgcccggggccacaggacgcccgggaggtcgggacggccgtcgcggcggtggtcggacgggaagcccccggcagcgaccgttcgaaattcgtgcggctcgtcctgccggcatcgggctccctgcggctggaattcgaaggcgtttcgctctaccgcggctacgacctgcgcagcctgatgcccgaagccgtgacgctgcaatacgaaccgccgctgttcgacgcccccacctcggcacgcgaggctgccgtagagctggcacggcaatatgccgggttgcagggtgcgagcgtcgccgtacgctgcgaccgcaacgggactctcatggcggccgacgaagcggcgctgttcgccatccggggcaggcgggtctacgccccgccgggcgaagcgagcatcgggcgcagccttgcagtcaggagcatccgcgccgccgggctggaactggccgnnncgcccgtcgggcgcgacgacctgccgcgcatggacgaacttttcttcatcgaccaccgnggcgtcaccgccctttcccgctgcgacgggcagccctacatggccatcttcgccgaacgcatcgccggggcgctccgcgggctgtttccgaatatgtagaaacccncccggganggcacncgctatcttcgccgcaaaacccggaaaccatgaaaaaatancttttcctttacgccgtcctcanaacggcgctgctggcatacggctatncc

SEQ ID NO: 1543 - DNA, 4000 bp, Escherichia coli
  misc_feature (807)..(807): n is a, c, g, or t
gaagggatgttcaaacaactggggatttataccaccgaaggtcagaaatacattccacacgatgtcgaccaggtgttgtcttaccatgaagataaagccggccagattctcgaagaagggatcaacgaatcgggtgcgttttcagcttggatggcttgtgctacctcctatgctaaccataaccaaccattaatcccgttctatatttattactcgatgtttggtcatcagcgagtgggtgacctcacctgggctgcgggtgatatccaggcgaaaggcttcttactgggcgcaacttcaggccggaccactttaaatggggaagggttgcagcaccaagacggacatagtcatattctggcgggcactgtcccgaatcagcgttcttatgatccaacctatagttacgaagttgcggtcatcgttcagcacggtctaaagcagatgtatgacgaaaatcagagtgtgttttattacatcaccctgatgaatgaaaactacaaccatccggatatgcccgaaggtgttgaatcagacatcatcaaggggatgtatctgctgaagcctgctgcgcctaagatgaagcacagtgttcgtctgctgggctcaggaacgattctgagagaggttgaggcggcagctgaaatgctagtcgattttggcgtcggtgctgaagtgtatagcgcgaccagctttaatgagttgcgtcgtgatggccagtcggcagcacgttataacttattgcatccagaagagaaaacggctcggatcagtcacgttgaaaccatgttgggtggatctgatgcnccagtggtggcggcgactgatcatatccagctttactccgagcagattcggccattccttggaaaacggacctacattacgcttgggactgatggatttggtcgttcggattcacgtaagaaattgcgtgagcactttgaagtggatcgtcgattcgtcacgattgcggcgctcagagcgctgtcaatggacggaaagattgatcctaaagtcgtgactcaagccatcaaagatttcgacatcgatcccgatcgtcttgatccggtgacattgtaaggaggtatgacatgacaacgattcgtgtaccagatattggtgatgcctcgaacgtcacagtcattgaagtggctgttgctcaaggcgatacagtcgccgaaggggataccttaattgttttagagtctgataaggcctcaatggaaattccagccgacgcatccggtgttgtgggtgcgatccatgtgtctgagggttctgaggtcaatgaaggtgatgcaatttgtgaattggacagtgcggatgctgttggctcggcgcctattgagccgcctcctgccgaggctctgactgctgcgccagtcgcagctgctccagtatcccaagaagccacggtgagtgagcaggtggttgtgcctgacactgggagtgctgacggcgtgactgtgattgaggtcgcggtttcagtgggtgataccgttgccgagggcgatacgctgatcgtcctagagtcagataaagcgtccatggaaattcctgcgcctagggctggagtgatcagtgcactgatcgtgaccgaaggccagcaagtggtgcagggtgatccaatttgcgagatgtcagtgaccgatggcagtccggctgtggctccctcgcaagctccggtagccgacactccatcgacacctgtgtctgctgcagcctcaaatcgtgcaggcggtctggaaaaagtggtcgttcctgacaccggaaatgccgatggtgtgactgtgatcgaggtcagtgttgcgattggtgataccgttgccgaaggcgatacattaattgttctcgaatcggataaagcctcgatggaaataccgtcgccggtgagtggaaaaatcgtcgcacttgctgtgaaagagggcgattccgtggctcaaggtgatccgattgctgatgtggaatccaccagcggttctgcgacccttgcaagcccagtagcacaaccgagtgaacctgtggctccagtcgctccagcggccgctcaaagcaagaagatagaacctcctgcagctgagatttcagggtcactagtgcatgcaggtccagcggtgcgtgcgttagcgcgtgagcttggtgtcgatttgaccaaagtgccgtcatctggcccacgaggccggatcaccaaagatgacttgcataattttgtgaaggcgaaattgagccaaaaagaagcgggtccagcggtcacgggtggaacaggaattccagcaattccaccggttgattttgctgcctttggtcctgtggaacgaattccaatgaccaaaattcacaaactcacagcggataacatgactcgctgttggctcaatgttccagccgtgacacagtttgatgaagccgacatcacggatctggaagccttccggaaatccatgaaagctgaggctgagaagaagggtgtgaagctcaccccgcttccatttttgattaaggcctctgcctacgccttggctgaactaccacaagtcaatgcctcgatcgatcctgcaactgacgaaatcgtcagaaaagggtatatccatatcggtattgccgtggatacacctgatggattgatggttccggtgattcgtgatgcggatcaaaaagggatttgggagattgccgctgaagcatctgagttggccgataaagcgaagaataagaagttaaaacccgcagaaatgcagggtgcgaccttcacgatttcatcgcttggatccattggtggtacagcctttactccaatcgttccttcaccacaggcggcgatcctcggaatatccaaggcatcgattcagccggtttgggatggtgctgcattccaaccgcggttgatgctaccgttgtgtttgtcctacgaccaccgtgtgattaacggtggagatggtgctcggtttaccactgtcttaagcaaggtgctcgctgatatcagacacttggtcttttgactgaaagcccggttcgccgggctttttttattgagtgcgtgctgacttccaaaacacctcatggccaccatcgcgtcgagccaagtgccgagccatcacgaacagaacgtctgagagccggttaatgtagtgttttaagtcgtcgccaaccgcctcttgtttggctaaagcgacaatgatgcgttcggctcgtctcgccacagcgcgagccatgtgacacaaacctgctgatttggatccaccaggaagaataaactctttcagcgccggcagttcgtcattgagttgatcacacaaggtctcaagatctgaaaccatctctgggtgaatcagttggaatccaggaactgcaagttcaccgccgaggtcaaacaagcgatgctggatgtctgtgagtggtgcggtcaggggctcgttgtcagagaactccgcgatgagtaatcccatccaggaattgagttcatcaatcgtgccgactgcttcgattcggagactatcttttgacgtccgtgatccatcacccagtccggtcgtgccatcatcgcctgttttggtatagagctttgttaatcggttacccattggaatccttgtgatgtgttgaaatttgctcgagtggtttgcgaatgagtaccagaagcaatagccctggaatgaccattactgcagttaacacgaaaaatagaggccaattgccacccgtccaatcgacaaaccatcctccgcttgatgccagcacggttcgacccgcattgccaatggatgccagtaaggcatattgagtggccgagaatgcttttccagtcagcgccgttaagaaactcacgaaagcgacggtcgagaacgccgtggtgaaattatcggtcaagatcgcaaacagcagaatggatttatcaggaccagccattgcaagccaggcaaacagtaaattactgccggccatcgcaacgccaccgataaacaaaccgcgtgtgactcctagccgaacgttgatgatg

SEQ ID NO: 1544 - DNA, 4000 bp, Escherichia coli
  misc_feature (199)..(199): n is a, c, g, or t
  misc_feature (201)..(201): n is a, c, g, or t
  misc_feature (203)..(204): n is a, c, g, or t
  misc_feature (207)..(210): n is a, c, g, or t
  misc_feature (212)..(223): n is a, c, g, or t
  misc_feature (227)..(228): n is a, c, g, or t
  misc_feature (230)..(230): n is a, c, g, or t
  misc_feature (232)..(233): n is a, c, g, or t
  misc_feature (238)..(238): n is a, c, g, or t
  misc_feature (240)..(243): n is a, c, g, or t
  misc_feature (245)..(245): n is a, c, g, or t
  misc_feature (357)..(357): n is a, c, g, or t
  misc_feature (394)..(394): n is a, c, g, or t
  misc_feature (397)..(397): n is a, c, g, or t
  misc_feature (415)..(415): n is a, c, g, or t
  misc_feature (485)..(485): n is a, c, g, or t
  misc_feature (497)..(497): n is a, c, g, or t
  misc_feature (503)..(503): n is a, c, g, or t
  misc_feature (723)..(723): n is a, c, g, or t
  misc_feature (736)..(736): n is a, c, g, or t
  misc_feature (761)..(761): n is a, c, g, or t
  misc_feature (1010)..(1010): n is a, c, g, or t
  misc_feature (1021)..(1021): n is a, c, g, or t
  misc_feature (1038)..(1038): n is a, c, g, or t
  misc_feature (1082)..(1082): n is a, c, g, or t
  misc_feature (1130)..(1130): n is a, c, g, or t
  misc_feature (1163)..(1163): n is a, c, g, or t
  misc_feature (1687)..(1687): n is a, c, g, or t
  misc_feature (1712)..(1712): n is a, c, g, or t
  misc_feature (2699)..(2699): n is a, c, g, or t
  misc_feature (2708)..(2708): n is a, c, g, or t
  misc_feature (2792)..(2792): n is a, c, g, or t
  misc_feature (2798)..(2798): n is a, c, g, or t
  misc_feature (3317)..(3317): n is a, c, g, or t
  misc_feature (3323)..(3323): n is a, c, g, or t
  misc_feature (3341)..(3341): n is a, c, g, or t
  misc_feature (3344)..(3346): n is a, c, g, or t
  misc_feature (3351)..(3353): n is a, c, g, or t
  misc_feature (3359)..(3359): n is a, c, g, or t
  misc_feature (3361)..(3361): n is a, c, g, or t
  misc_feature (3365)..(3365): n is a, c, g, or t
  misc_feature (3377)..(3377): n is a, c, g, or t
  misc_feature (3380)..(3380): n is a, c, g, or t
  misc_feature (3383)..(3383): n is a, c, g, or t
  misc_feature (3386)..(3386): n is a, c, g, or t
  misc_feature (3394)..(3395): n is a, c, g, or t
  misc_feature (3400)..(3400): n is a, c, g, or t
  misc_feature (3402)..(3402): n is a, c, g, or t
  misc_feature (3413)..(3415): n is a, c, g, or t
  misc_feature (3418)..(3420): n is a, c, g, or t
  misc_feature (3422)..(3422): n is a, c, g, or t
  misc_feature (3427)..(3430): n is a, c, g, or t
  misc_feature (3432)..(3432): n is a, c, g, or t
  misc_feature (3437)..(3437): n is a, c, g, or t
  misc_feature (3440)..(3440): n is a, c, g, or t
  misc_feature (3444)..(3444): n is a, c, g, or t
  misc_feature (3447)..(3451): n is a, c, g, or t
  misc_feature (3455)..(3455): n is a, c, g, or t
  misc_feature (3458)..(3458): n is a, c, g, or t
  misc_feature (3464)..(3464): n is a, c, g, or t
  misc_feature (3467)..(3467): n is a, c, g, or t
  misc_feature (3472)..(3473): n is a, c, g, or t
  misc_feature (3476)..(3476): n is a, c, g, or t
  misc_feature (3482)..(3482): n is a, c, g, or t
  misc_feature (3485)..(3485): n is a, c, g, or t
  misc_feature (3488)..(3488): n is a, c, g, or t
  misc_feature (3497)..(3497): n is a, c, g, or t
  misc_feature (3503)..(3503): n is a, c, g, or t
  misc_feature (3506)..(3507): n is a, c, g, or t
  misc_feature (3510)..(3510): n is a, c, g, or t
  misc_feature (3517)..(3517): n is a, c, g, or t
  misc_feature (3519)..(3519): n is a, c, g, or t
  misc_feature (3521)..(3522): n is a, c, g, or t
  misc_feature (3524)..(3524): n is a, c, g, or t
  misc_feature (3536)..(3537): n is a, c, g, or t
  misc_feature (3539)..(3539): n is a, c, g, or t
  misc_feature (3545)..(3545): n is a, c, g, or t
  misc_feature (3548)..(3550): n is a, c, g, or t
  misc_feature (3552)..(3553): n is a, c, g, or t
  misc_feature (3555)..(3555): n is a, c, g, or t
  misc_feature (3557)..(3557): n is a, c, g, or t
  misc_feature (3566)..(3566): n is a, c, g, or t
  misc_feature (3569)..(3569): n is a, c, g, or t
  misc_feature (3581)..(3583): n is a, c, g, or t
  misc_feature (3590)..(3590): n is a, c, g, or t
  misc_feature (3593)..(3593): n is a, c, g, or t
  misc_feature (3595)..(3595): n is a, c, g, or t
  misc_feature (3600)..(3600): n is a, c, g, or t
  misc_feature (3602)..(3602): n is a, c, g, or t
  misc_feature (3604)..(3605): n is a, c, g, or t
  misc_feature (3611)..(3611): n is a, c, g, or t
  misc_feature (3613)..(3613): n is a, c, g, or t
  misc_feature (3615)..(3615): n is a, c, g, or t
  misc_feature (3617)..(3617): n is a, c, g, or t
  misc_feature (3619)..(3619): n is a, c, g, or t
  misc_feature (3629)..(3629): n is a, c, g, or t
  misc_feature (3632)..(3632): n is a, c, g, or t
  misc_feature (3635)..(3635): n is a, c, g, or t
  misc_feature (3640)..(3640): n is a, c, g, or t
  misc_feature (3645)..(3645): n is a, c, g, or t
  misc_feature (3652)..(3653): n is a, c, g, or t
  misc_feature (3656)..(3656): n is a, c, g, or t
  misc_feature (3662)..(3662): n is a, c, g, or t
  misc_feature (3666)..(3667): n is a, c, g, or t
  misc_feature (3686)..(3686): n is a, c, g, or t
  misc_feature (3692)..(3695): n is a, c, g, or t
  misc_feature (3702)..(3702): n is a, c, g, or t
  misc_feature (3707)..(3707): n is a, c, g, or t
  misc_feature (3710)..(3710): n is a, c, g, or t
  misc_feature (3713)..(3713): n is a, c, g, or t
  misc_feature (3716)..(3716): n is a, c, g, or t
  misc_feature (3719)..(3719): n is a, c, g, or t
  misc_feature (3723)..(3723): n is a, c, g, or t
  misc_feature (3725)..(3725): n is a, c, g, or t
  misc_feature (3728)..(3728): n is a, c, g, or t
  misc_feature (3731)..(3731): n is a, c, g, or t
  misc_feature (3734)..(3734): n is a, c, g, or t
  misc_feature (3742)..(3742): n is a, c, g, or t
  misc_feature (3744)..(3746): n is a, c, g, or t
  misc_feature (3749)..(3749): n is a, c, g, or t
  misc_feature (3754)..(3754): n is a, c, g, or t
  misc_feature (3756)..(3756): n is a, c, g, or t
  misc_feature (3758)..(3758): n is a, c, g, or t
  misc_feature (3770)..(3770): n is a, c, g, or t
  misc_feature (3785)..(3785): n is a, c, g, or t
  misc_feature (3794)..(3794): n is a, c, g, or t
  misc_feature (3800)..(3800): n is a, c, g, or t
  misc_feature (3803)..(3803): n is a, c, g, or t
  misc_feature (3807)..(3807): n is a, c, g, or t
  misc_feature (3809)..(3810): n is a, c, g, or t
  misc_feature (3812)..(3812): n is a, c, g, or t
  misc_feature (3831)..(3831): n is a, c, g, or t
tcgaaattttatgtgtgtttgttgatggatatcacctgagatgtgaaggttttcataacgtgagagccagtcctcacggatagaatattttgattctaccttgtttggactttgatcttccaacggtgtcatcaaaatagtaagtcgccacgcgtagagtaactagcagcactttaagttgcgatcattgtacccaaantnannttnnnngnnnnnnnnnnnnaaannantnnaaaantnnnnantttttttcgagtgagaccgatctgcccacataaatagatgggtggtcgaaaaagcaacgccgcggtgatgcttctaaccatctaaatcattgacgatccaaaggcgcgtacntcgacgtcaatggatttctattgccgaaaggaatttncantatgagattaaacaaaanccaacaagaaacactcatgtatcaatctagactgttatttaagcatgataatgttgaatcagcattaganagatcattagcnattacnatatatacaaatgaagtatttgatacagaacactttaagagagcagtcttccagaagatacatcgagcaatttatggagctatatcagcaccagataactttacctattctatgatgattgcaggtgatgttgaaagctcaaggtctgggacagttgggttggaaaccttaaaggcagcttatgaacctcatttccatggtttactggtcttttctaaancagattggtgtcncattgaggcagacctacccaaatanatatatctaatacaatcagcaatttcagacatacgggaagtgaaaaaacctcttatcgatgatgatggtgtgtgcagttggaatacgatttgggtcaggaagtttgaggaaagtactaagccaaagcataagttctcctcgtcgttttcgaactacatcaattacatattcaagtctgacaaccatgcgcagaagcacggtatcgacacttatgtacctagtgtttttcctcatgatctttacccaccnaagactaaatnttcgtcaacagaggctntgttcaagcaattatgtttgattgaagaggagtttcagcagaancgggaaaaataccttaattgaggatattaagtgattttctagttcggntagtagtgaaatatgtaactaaattgcgctgtngtgattgatgtgtttgttttagatcgtagcgagcgatttgagatattcagcgacaaattatggttatctttattagttgccaaagttatgctgaacgctggatcgctgccctttgcatcaatggatttcttcgctgtggctgacaaaccattggatgagtaaaaggctttggcatcagacttgatatgccaattactaatgcctgctgatagttccattttgaggcttttggtggggctgaaccttacaccaactgaaaagtcatttgcattgatacttgtgtctgatgagcccgttaaatctaagttgtttcgctttccaatcagattagaggctttgagctttcttcgcgttatctccgctgtagtgaagaggttgaagtgtttttgttgaaaaaattggtatcgaccgtttaaacttaaataggtacctgtaacctttccattaaaattagcgcccgcaaaagatgtcttttgattgttgttttgcccatagcctaggtggctggagatggtaaaatttgnattgaaagttttgtgcacttggatnccggcgacacccaaagcgtattttgtggatacgccatcgatgaggatattacgatcagcttgttcaaaaagtgcgaaaggttcaattttataactgtcggcaatgcctgtagtggcaaataaaattaatgctaatgaacggattaggattataattttatattttgtcaattaatttggtccatttgcgttgttcctatctaaacttcatttaagcatattaaatctcattgcgatatcaaatcattcgtcctaacgttgttgcctaaatgaatggttggaaatagtcatgaaacatttgtcatccgctgcgtttagtaaacgaaattttgcttttgggatgtcgcccctcgcgcttctcacgctgactgcttgtggcggtggtggcggtggcggcagtacatcaagtggtgcgacgccttctgtttctgttgggggtagtgttgttaaggggccgttgagcaacgcacttgtaggcttggattatgacggtgatggcgttgtggacagtgcaacagtgcgcactgatgccaacggtggatattcgatttcaacaagcaacgcgacctataccgttatagctgttgcagatgatagcactgttgatacttcatctggtacagtattttcaggcgtgactttgaaagccccgaaaggggcaacagtggtaactcccacaaccacattaatggaagaaggtaacctaactgctacacaagttgcgagtgttttaggacttccagacggtgttgatccgctgacattcaatccctttgccgctggagtgagtgcaagtgatgcactggctgtggagaaagcaagtcagcaggtcatgagcgttgtaaatgcttttgcgtctgcggcagaaggtgctggtgctaccgaggctgcagcttacaccgccgcccttaattcaattgttgaagttgtgaagacaaaagcagctactagcggctcgcttgatctgaccaatacagctgatttggcnctcattaanacgcaggccaaaacagagatggcttccacctctggagtgaacacaacggcttttgatgccttggctgatgacacagcaacagcnattaanaatgtgaacgacaagattgcgacagtgtccgatctgacctcagatgcatcaaagaatattttctctacaactcaagttctggcagatcaggtcaagactgcggctgcggctgaggccagcagtgcgggatcgggcagcagcagtatcactttcacagatagtagtgtggtgaatacagcagcgagtaacaaagctccaacaaacatcgcgctgagttcaagcgccataagtgaagctgcaagctctctggtgataggcacactgaccaccactgatagtgaccaaacggctggggttaaaccgatatatgcacttgctgaagtagcaggttcggatcacgcagcgttcagcatcaatcaagcaacgggcgagttgtccctgaaagcgcagcccgattttgagaccaaatcctcatacagcgtcactatcttatctactgatgagggtgggaaaacattctcaaagacttttagtattagcattggtgatgccaatgatgcaccgactttgacggttccnacgggnggttccgtaactgaggangcnnncacgnnnacgatnangggnagtcttaccagntcnganccngagaatgnnacacngncttacattttnnntgnnncnacttnnnntnatggnagntatnccnnnnntggnacntatggnacnttggnnctnaacgcntcnacnggtgcttanacttanacnntgnataatantncnncngctgttaatgcnntngatgcnagnnntnntnanactgagacnttntctgttaaagtnnntgatggnacnancacancngnngcccanancntnancttcacgatnaanggngcggnagatnagcctgnnatnactgtntctnntcttacatccattgctganaactcnnnnaatgctnttgcngcnacngtnagngctncngangcngangatggtantnnnacngttgngntnagtggcagtggncgtgacgatgcaaantttgaaatngtcganggnaaantnngnatcaaaacatctgctgatnatgaagcgcaaggcacgtatcaagtgcagctaaaagtcactgatagtgctaataacacagtattaaaaaatatcgaatttggtgtcactgatgttgctgaagccattagcggttctatcgttgacggttatgtcgctggcgcgactatcttccaagatttggataacga

SEQ ID NO: 1545 - DNA, 4000 bp, Escherichia coli
  misc_feature (1428)..(1428): n is a, c, g, or t
  misc_feature (1978)..(1978): n is a, c, g, or t
  misc_feature (1992)..(1992): n is a, c, g, or t
  misc_feature (1996)..(1996): n is a, c, g, or t
  misc_feature (2198)..(2198): n is a, c, g, or t
  misc_feature (2506)..(2506): n is a, c, g, or t
  misc_feature (2530)..(2530): n is a, c, g, or t
  misc_feature (2629)..(2629): n is a, c, g, or t
  misc_feature (2791)..(2791): n is a, c, g, or t
  misc_feature (2905)..(2905): n is a, c, g, or t
  misc_feature (3064)..(3064): n is a, c, g, or t
  misc_feature (3076)..(3076): n is a, c, g, or t
  misc_feature (3080)..(3080): n is a, c, g, or t
  misc_feature (3380)..(3380): n is a, c, g, or t
  misc_feature (3404)..(3404): n is a, c, g, or t
  misc_feature (3467)..(3467): n is a, c, g, or t
  misc_feature (3556)..(3556): n is a, c, g, or t
  misc_feature (3662)..(3662): n is a, c, g, or t
  misc_feature (3707)..(3707): n is a, c, g, or t
  misc_feature (3764)..(3764): n is a, c, g, or t
atgttttttactccaggatgatctctcttaagaaagaaacaggaaaaactttttacaaatacggctgaaacaaaaggtgttgaaaactgttaataaaattgttgaaaatgtttgtgatagtgacatataatctagccgatagcgacatgcagatactatcaggcttcggaaaggaggtatgaatgtttaagcgaagcggtgtctggtggacgtgtataaggcataatggtagaaagattcaaaaaagccttgagacctcagatcgaaaactggcaaaagcaatcgaagcaaagattcgaacagagattattgaaggaaagtattatgaaaaacctatctataatgaacgaactttcttgccgttgattgctaaattcatgaaggagtatgcaccaaagaagtccgttagtatgcagagaagctatactgcatcttcaaaacatcttattcctttttttggtaacataaacttgttgttaataacagccaaaaagatatcaaagtataaggtgttaagatatgaagagggtgtaagtcctgcaactattaatcgtgagacggcaatgttatccaggatgttcactatagcagttgaggagtgggagtggttagatcataagcctttcttgaggataaaaaaagagaaagaaaacaatgttcaggaaaaatacctgacatcggacgaagaaaagaggcttattgagaactgccctgaatggttaaaaggtttagtagttttttcgctaaacactggactgaggcagaatgaacagctttcattgacttgggagagagtgtctttgcaacgaagagacattcttattctggaaacaaaatctggcaggcctagaagtattccattgaacaaaactgctataggagtacttgaaagaaatgcaaagactcgaagcatcaaaaatgatctagtatttttcagcaattgtgggacaaagcttaacaactgtaatcttataagggcttttaaaagagcggtaaagaggacaggaatcagtgactttacatggcacggactgagaagaacatttgcgactcgtctggctcatagaggcttagatatctataaaatttcaagattgctcggtcatgaagatgttcagacaactcaaaggagatatgcccatcattgtactgaaagtctgagaattggagttgatattttagattctgactacaatttgactacaatcggtgaaaaagagggttttttgagtgcttctaggttgtcgtaagtctttgggggagaataaattggggtaccaggattcgaacccggacaaattgaaccagaatcaattgtgctaccattacacaataccccaatgaattactcattttatttcatatctctttaatatcaataaaaaaatttgtactcttgttaatttattgagaacttgcaggtttttnccctatatggactgtaactatacccagtgttctggtaaaaaatcttacatctttcaggccgcattgctccatctttttcttcaggcttaatctatccgggaaggccaatactgattgtggcagatatgaatatgcatcaaccttgcttttggctatcaaccgtcctatcattggtagtattctggtaaagtaaaaaaagtatatttttttaaaaagaaagtttgtcggttgcgaaaattccaatatgacaactttgccattcggcccgaccactcttctcatctcttttattccctcttccagattcgagacgtttcttataccaaaagcaacagtagaaacatcgaatgcgttgtcacgaaagggaagttgtagtgtatctgcttctacaagtttgatcttgctttccagatgcctcttcctgattttaggtaatccgtatttcagcatgccgtggcaatagtcacttccgaccacaagcccatttccatttaataatttagaatgagatatggcaagatctccggtgccggtacaaacatccagcacntttgtgtgtggctntatntcacttacttttacggcaaattttcgccatgacttatcgaagttaagactcaaaatcgcattcaggagatcatatactcctactatagagccaaacatgctctttatgctttctgctttcttttttaagagttcctcttgttgtatttcactatcagtattcattaacaatttggcaggtgcagggaaggtaacacttgccnacccttttgcactactttagtttattttttgctctatctcagaaagtatctcattcatgcttccgctacggtaaccttcaagatccagtgtaacataagtaaaaccgatatttttaaacttagctgataattcttctctgacaggtgaattagtaaggatgtgtatatcctccggcaaaacctcaatcctggcaatagtttcatggtgcctcactctaaactgtatcaggcctagagccctcaggtatttttctgcttctgaaaccatactgagcttctcttccgtgatagactgtccgtatggaaanctggaagacaaacaggcatacgcnggtttatcccagttaggcagatttaagaatttagagacttcacgtatgtctttctttgtcaaacctgtttcctttaaaggactcctgacattcagctcnctggatgcctgcaatccgggacggaattcctgtgtgtcgtctagattcgcaccgtcagcaacgttcagaaaaccctgttctcctgctatctctttcaactttccaaatagttcagttttgcaaaaatagcacctttcaggagggttatttgcaaatccttcnatagccagttcgctggtgtctattacaaggtgtttaatacctatctcatcggccaacttttgcgactccttaaactcaaaatcaggataggtttccgaccttgccgtaaccgcnatagatttgtcttttagggtgtcgtaacatacttttgcaacaagcgtactgtccacaccaccggaaaatgcaaccacaacactctcaagtttactgacaaccgcttttaatttagatagtttttcttctacttccaaagctacatcctcgtttaaattngttgtttgttcnttanatgtatgccctatgaggtgtccaaagcaacgagctggtaataaattttcaatttacgatgttaacacacacacatgatgaatgcaaatatcgatttagggcttttggtagggagtatagtggaaatatttctcatcaggtccaaacatttttttgagaaataatgctcaggcaggcatctacaacattgggatcgtatagtatatttctgttgttagatatttcctcttgcgctttttcaatgcctagcgccggtctataaggtctatgtggcactatagcatccacaacatcggctacnctcaggattctggcttcgatgagnatcttttcaccttgtagacctgacggatatccggaaccatccattctttcgtgatgttgaagnacgtattctgcaataggccattgaaattcaattgtctttaatatgtcataaccggcttgtgaatgtgtctttatcaggtcgaattccanttttgttaattttccgcatttactgagtatttcagtaggaacctgcatctttcctatatcatggatagcccctgccagatgaatactatcaatacgttctctgggnaaacccattttttcagctatggagcttgcaagactggcaacctgnctctggtgaccggcagtgtaggggtctctcatttctactgtcattgccatggcacgnatggttccttcaatatttgtctttattttgtctgtactttttttaagttcttcatagagggactcactgagtttaacgtttctaaggataattccataagattcgacagcactgactactgtatccatgagctgttcgggatctcctttttgtacataagcgtgtggcctaaattgtctccttatgtctcttctctcttccagcatgacagtagtacctgtgtggaaaatgatagg

SEQ ID NO: 1546 - DNA, 4000 bp, Escherichia coli
  misc_feature (1)..(1): n is a, c, g, or t
  misc_feature (3)..(3): n is a, c, g, or t
  misc_feature (5)..(6): n is a, c, g, or t
  misc_feature (8)..(9): n is a, c, g, or t
  misc_feature (11)..(11): n is a, c, g, or t
  misc_feature (13)..(14): n is a, c, g, or t
  misc_feature (16)..(17): n is a, c, g, or t
  misc_feature (20)..(21): n is a, c, g, or t
  misc_feature (24)..(24): n is a, c, g, or t
  misc_feature (26)..(28): n is a, c, g, or t
  misc_feature (31)..(31): n is a, c, g, or t
  misc_feature (33)..(45): n is a, c, g, or t
  misc_feature (48)..(49): n is a, c, g, or t
  misc_feature (51)..(51): n is a, c, g, or t
  misc_feature (53)..(63): n is a, c, g, or t
  misc_feature (65)..(66): n is a, c, g, or t
  misc_feature (68)..(68): n is a, c, g, or t
  misc_feature (70)..(71): n is a, c, g, or t
  misc_feature (73)..(73): n is a, c, g, or t
  misc_feature (76)..(77): n is a, c, g, or t
  misc_feature (79)..(80): n is a, c, g, or t
  misc_feature (83)..(87): n is a, c, g, or t
  misc_feature (90)..(90): n is a, c, g, or t
  misc_feature (92)..(92): n is a, c, g, or t
  misc_feature (95)..(96): n is a, c, g, or t
  misc_feature (99)..(105): n is a, c, g, or t
  misc_feature (107)..(107): n is a, c, g, or t
  misc_feature (110)..(110): n is a, c, g, or t
  misc_feature (113)..(114): n is a, c, g, or t
  misc_feature (117)..(117): n is a, c, g, or t
  misc_feature (119)..(122): n is a, c, g, or t
  misc_feature (124)..(126): n is a, c, g, or t
  misc_feature (128)..(132): n is a, c, g, or t
  misc_feature (134)..(135): n is a, c, g, or t
  misc_feature (137)..(137): n is a, c, g, or t
  misc_feature (140)..(140): n is a, c, g, or t
  misc_feature (143)..(144): n is a, c, g, or t
  misc_feature (146)..(147): n is a, c, g, or t
  misc_feature (149)..(150): n is a, c, g, or t
  misc_feature (152)..(153): n is a, c, g, or t
  misc_feature (155)..(156): n is a, c, g, or t
  misc_feature (158)..(158): n is a, c, g, or t
  misc_feature (160)..(161): n is a, c, g, or t
  misc_feature (164)..(164): n is a, c, g, or t
  misc_feature (166)..(166): n is a, c, g, or t
  misc_feature (169)..(169): n is a, c, g, or t
  misc_feature (174)..(174): n is a, c, g, or t
  misc_feature (176)..(180): n is a, c, g, or t
  misc_feature (182)..(183): n is a, c, g, or t
  misc_feature (185)..(188): n is a, c, g, or t
  misc_feature (191)..(193): n is a, c, g, or t
  misc_feature (196)..(196): n is a, c, g, or t
  misc_feature (199)..(199): n is a, c, g, or t
  misc_feature (201)..(201): n is a, c, g, or t
  misc_feature (203)..(213): n is a, c, g, or t
  misc_feature (216)..(216): n is a, c, g, or t
  misc_feature (219)..(227): n is a, c, g, or t
  misc_feature (230)..(230): n is a, c, g, or t
  misc_feature (233)..(233): n is a, c, g, or t
  misc_feature (235)..(239): n is a, c, g, or t
  misc_feature (241)..(245): n is a, c, g, or t
  misc_feature (248)..(256): n is a, c, g, or t
  misc_feature (258)..(264): n is a, c, g, or t
  misc_feature (267)..(267): n is a, c, g, or t
  misc_feature (270)..(270): n is a, c, g, or t
  misc_feature (272)..(276): n is a, c, g, or t
  misc_feature (278)..(280): n is a, c, g, or t
  misc_feature (282)..(282): n is a, c, g, or t
  misc_feature (284)..(284): n is a, c, g, or t
  misc_feature (287)..(288): n is a, c, g, or t
  misc_feature (290)..(290): n is a, c, g, or t
  misc_feature (292)..(292): n is a, c, g, or t
  misc_feature (294)..(295): n is a, c, g, or t
  misc_feature (297)..(312): n is a, c, g, or t
  misc_feature (314)..(315): n is a, c, g, or t
  misc_feature (318)..(327): n is a, c, g, or t
  misc_feature (329)..(333): n is a, c, g, or t
  misc_feature (335)..(339): n is a, c, g, or t
  misc_feature (341)..(342): n is a, c, g, or t
  misc_feature (344)..(348): n is a, c, g, or t
  misc_feature (353)..(353): n is a, c, g, or t
  misc_feature (356)..(363): n is a, c, g, or t
  misc_feature (365)..(369): n is a, c, g, or t
  misc_feature (371)..(371): n is a, c, g, or t
  misc_feature (373)..(374): n is a, c, g, or t
  misc_feature (376)..(381): n is a, c, g, or t
  misc_feature (386)..(386): n is a, c, g, or t
  misc_feature (390)..(391): n is a, c, g, or t
  misc_feature (393)..(395): n is a, c, g, or t
  misc_feature (397)..(398): n is a, c, g, or t
  misc_feature (400)..(400): n is a, c, g, or t
  misc_feature (404)..(409): n is a, c, g, or t
  misc_feature (411)..(411): n is a, c, g, or t
  misc_feature (414)..(414): n is a, c, g, or t
  misc_feature (416)..(416): n is a, c, g, or t
  misc_feature (420)..(420): n is a, c, g, or t
  misc_feature (423)..(423): n is a, c, g, or t
  misc_feature (426)..(426): n is a, c, g, or t
  misc_feature (429)..(429): n is a, c, g, or t
  misc_feature (432)..(432): n is a, c, g, or t
  misc_feature (435)..(435): n is a, c, g, or t
  misc_feature (438)..(438): n is a, c, g, or t
  misc_feature (440)..(440): n is a, c, g, or t
  misc_feature (442)..(443): n is a, c, g, or t
  misc_feature (446)..(450): n is a, c, g, or t
  misc_feature (453)..(453): n is a, c, g, or t
  misc_feature (455)..(456): n is a, c, g, or t
  misc_feature (458)..(459): n is a, c, g, or t
  misc_feature (461)..(462): n is a, c, g, or t
  misc_feature (464)..(465): n is a, c, g, or t
  misc_feature (468)..(468): n is a, c, g, or t
  misc_feature (471)..(472): n is a, c, g, or t
  misc_feature (474)..(474): n is a, c, g, or t
  misc_feature (478)..(479): n is a, c, g, or t
  misc_feature (482)..(483): n is a, c, g, or t
  misc_feature (485)..(485): n is a, c, g, or t
  misc_feature (490)..(490): n is a, c, g, or t
  misc_feature (493)..(497): n is a, c, g, or t
  misc_feature (499)..(499): n is a, c, g, or t
  misc_feature (501)..(502): n is a, c, g, or t
  misc_feature (505)..(507): n is a, c, g, or t
  misc_feature (509)..(512): n is a, c, g, or t
  misc_feature (514)..(514): n is a, c, g, or t
  misc_feature (516)..(516): n is a, c, g, or t
  misc_feature (518)..(520): n is a, c, g, or t
  misc_feature (522)..(522): n is a, c, g, or t
  misc_feature (524)..(525): n is a, c, g, or t
  misc_feature (527)..(528): n is a, c, g, or t
  misc_feature (530)..(531): n is a, c, g, or t
  misc_feature (533)..(534): n is a, c, g, or t
  misc_feature (536)..(536): n is a, c, g, or t
  misc_feature (538)..(538): n is a, c, g, or t
  misc_feature (540)..(540): n is a, c, g, or t
  misc_feature (542)..(547): n is a, c, g, or t
  misc_feature (549)..(549): n is a, c, g, or t
  misc_feature (551)..(555): n is a, c, g, or t
  misc_feature (557)..(563): n is a, c, g, or t
  misc_feature (566)..(566): n is a, c, g, or t
  misc_feature (569)..(570): n is a, c, g, or t
  misc_feature (572)..(572): n is a, c, g, or t
  misc_feature (574)..(575): n is a, c, g, or t
  misc_feature (577)..(577): n is a, c, g, or t
  misc_feature (579)..(581): n is a, c, g, or t
  misc_feature (584)..(585): n is a, c, g, or t
  misc_feature (587)..(593): n is a, c, g, or t
  misc_feature (595)..(608): n is a, c, g, or t
  misc_feature (611)..(611): n is a, c, g, or t
  misc_feature (614)..(615): n is a, c, g, or t
  misc_feature (617)..(621): n is a, c, g, or t
  misc_feature (623)..(623): n is a, c, g, or t
  misc_feature (626)..(626): n is a, c, g, or t
  misc_feature (629)..(633): n is a, c, g, or t
  misc_feature (635)..(636): n is a, c, g, or t
  misc_feature (638)..(644): n is a, c, g, or t
  misc_feature (646)..(646): n is a, c, g, or t
  misc_feature (649)..(649): n is a, c, g, or t
  misc_feature (656)..(657): n is a, c, g, or t
  misc_feature (659)..(663): n is a, c, g, or t
  misc_feature (665)..(671): n is a, c, g, or t
  misc_feature (673)..(674): n is a, c, g, or t
  misc_feature (676)..(678): n is a, c, g, or t
  misc_feature (680)..(680): n is a, c, g, or t
  misc_feature (682)..(683): n is a, c, g, or t
  misc_feature (686)..(688): n is a, c, g, or t
  misc_feature (690)..(690): n is a, c, g, or t
  misc_feature (693)..(693): n is a, c, g, or t
  misc_feature (696)..(696): n is a, c, g, or t
  misc_feature (698)..(699): n is a, c, g, or t
  misc_feature (701)..(701): n is a, c, g, or t
  misc_feature (703)..(704): n is a, c, g, or t
  misc_feature (706)..(708): n is a, c, g, or t
  misc_feature (710)..(711): n is a, c, g, or t
  misc_feature (715)..(721): n is a, c, g, or t
  misc_feature (723)..(725): n is a, c, g, or t
  misc_feature (727)..(730): n is a, c, g, or t
  misc_feature (732)..(732): n is a, c, g, or t
  misc_feature (735)..(736): n is a, c, g, or t
  misc_feature (738)..(740): n is a, c, g, or t
  misc_feature (743)..(743): n is a, c, g, or t
  misc_feature (745)..(745): n is a, c, g, or t
  misc_feature (748)..(751): n is a, c, g, or t
  misc_feature (753)..(753): n is a, c, g, or t
  misc_feature (755)..(755): n is a, c, g, or t
  misc_feature (757)..(757): n is a, c, g, or t
  misc_feature (760)..(760): n is a, c, g, or t
  misc_feature (763)..(765): n is a, c, g, or t
  misc_feature (768)..(769): n is a, c, g, or t
  misc_feature (771)..(772): n is a, c, g, or t
  misc_feature (774)..(777): n is a, c, g, or t
  misc_feature (779)..(783): n is a, c, g, or t
  misc_feature (786)..(787): n is a, c, g, or t
  misc_feature (789)..(790): n is a, c, g, or t
  misc_feature (792)..(792): n is a, c, g, or t
  misc_feature (795)..(805): n is a, c, g, or t
  misc_feature (807)..(807): n is a, c, g, or t
  misc_feature (810)..(810): n is a, c, g, or t
  misc_feature (812)..(812): n is a, c, g, or t
  misc_feature (818)..(818): n is a, c, g, or t
  misc_feature (826)..(826): n is a, c, g, or t
  misc_feature (1987)..(1987): n is a, c, g, or t
  misc_feature (1990)..(1990): n is a, c, g, or t
  misc_feature (1999)..(1999): n is a, c, g, or t
  misc_feature (2439)..(2439): n is a, c, g, or t
  misc_feature (3359)..(3359): n is a, c, g, or t
  misc_feature (3922)..(3922): n is a, c, g, or t
  misc_feature (3971)..(3971): n is a, c, g, or t
  misc_feature (3996)..(3997): n is a, c, g, or t
ngngnngnngncnncnnccnnctncnnntcntnnnnnnnnnnnnnctnnangnnnnnnnnnnngnngntnntnttnntnncgnnnnngcncnccnnccnnnnnnngnacnacnnggngnnnncnnncnnnnncnncngcnggnngnngnngnngnngncnnccncnagnagggngnnnnngnngnnnngcnnnccnccncncnnnnnnnnnnnctncannnnnnnnnccnccncnnnnncnnnnngcnnnnnnnnnannnnnnngtngtncnnnnngnnntncnccnncntntnntnnnnnnnnnnnnnnnncnncannnnnnnnnncnnnnncnnnnngnngnnnnncgcgncgnnnnnnnngnnnnncngnncnnnnnnctccnccgnngnnncnncnaccnnnnnngncgncngctnctnctncgncgncancancncnncgnnnnnggngnngnngnngnncgncgnngngccnnccnncnccgcngcnnnnncntnnttnnncnnnncnancnnncngnngnngnngnngntngncnnnnnntngnnnnngnnnnnnnccnccnncntnncncnnncgnncnnnnnnnannnnnnnnnnnnnncgncgnncnnnnncngangannnnncnncnnnnnnncnccnccgcggnngnnnnncnnnnnnncnncnnngncnnccnnngnggnggngnngngnncnnngnngggnnnnnnncnnncnnnngncgnngnnnggngncgnnnncngngnggncgnnnganngnngnnnngnnnnncgnngnncnccnnnnnnnnnnnanacncnccgccngatgacanactatggtttcccagactagatgctcatacgagcgggtcctccattttcgccgcgcgcgagaggcgtcacacggccccggaaacttttttttggaaactttttacacccaacacgacacgtagttcataccagactactacctttgtatttaccgcgccgcgcgcgtaaagcgtatctatatgtacataaagttagtgatgtcatcacgcgatccccgcgacggcgccggcggcgaaggcggcgccatacgctccgacggttttcgccatcttcgcgcgcgcgcggcgccttcgccgccgctcgatcagcgccacctcgtcgggcacgccgtcgccgtcctcgtccctccccaccttcagcttcccgaacaccttggcccgcatggcctccatctgcgccttgggcaggttcttcatccgcgccttgacgaagcccaggacgatgggcacgcacgctccggcgacggcgcccaggatgggcgccaccaccgtctggttcacgacgaacacgccgacgcccttcgccgcgccgcgcgcggcggtcttccagatgggccactccatgcgggagaagtacgtgcgcgcgaacccctcccactcgcgcgcgtcgagcttgccgtcgttgttgtcgtcgtacttgctcaagatggtctccgccttctccttgacgcgcgggagctttccgacgccgcccaacatcgcctccaaccgtcggtacagcgcgtcgatggcgagcgtgagctcggcgacatcgaggctgggctcggagtcgtcgccctcgcggtggttgatgcccgcgcacttctcgaacacgtccttcagaaccgcgtcgaactccttggacaagatcagatccatccactgctgcttctgcgcccgcgcgttgccggcgttctcggcggctctcttgagtttctcctccgtggacgccatcgcgtcgtcgtccgaccggtccaacttacgcgtcagcttgcgcaccaggaactgggtcttccgcgacgtgctgtctagcaggtgtttcgccttcttcaggaccatcgcgggagggcggtccgccggcccggtgagtgggggcgcggagcgaggcgatcggagccgatacaaaagtaacaatcatcatctggccagctcgttcactggaaaatcttcgggcccgcaacnctnagtgcgcantgcccagtcagcacactgcatcgcagctctcattggtttatctgcgtgtgaaaaacctctcggcgtggcggtgtttggcgcgtcccactcgggacgaccgcgcgaccgccgaacgcacaccggcgcgttcgacagggcatcagtcgccttcgcgcgtatcgcacgcgcgcggctcgaggcctcgaacctccgcgtctgcccgtcccaggaacgcgttcgctcgcgtcccggatagacacctcagcagcgactggctctgcatcgacgacgggcgcgatgaccgcggcgtgcgcctccggcgtcggctcgggaatcgcaggcgcgacgaggacgggcgtttccgcgtcgtttcgcgatgccgcgcgtcgcggcggcggcgtgtcccgtctgagacgcgggcgacgcgttcccgtcgccccgcgcgcgggcctcgccgactntggcgtgggggatctcggcctcgggacgtcggagaccgccgcggcggcggcggcccagaccgccgcggcggcggcgccgagcgcggcgaatcggtacgccgagctgttccccgacctgcccgccttcgtgttcggcgtgagcgtgcccgactccgcgcgcgcgctcgccgacgccgcctcgcccgtcacgggcgcggcgctggaggcgctgccggacgacgcgcgcgcgggcgtgctcggcttctggtcggacgaggcggcgagcggcttcacgctgctcaccggcaacgccgagtacgagctcgcgctcgccgtgcttttatttttgtgggccaccgggcgccccggcgtgttcgcgggtgcgttcgacgcgtacgtcgccgcgcctctggacaaggttctgagcgaccgcgcgttcgaccccgcgtcggtgcgcctgggcgggcggctgggcgacggctccttcgggcaggtgtttgcggcgacggcgctcgcgacggacgcggacgtggtggtcaagcaggccaagtccgtgcagggtgcggcgcagctgcagtgcgcggaggagtacatgaaccggcgcgtgcgccgcgcgccgctcgcggccatcgggtgcgcgaagtacctgggcagctacgacgtcgtcgagggcgcggcgtcgccgacgctcgtctgggcgcgcgagggggacgcgacgctggaggacctgatcaacgcgcgggactaccccggctgcctggaggaggcgctgtacggcgcggtctccgactcggacgacttcgcgcggcgcacgagccgagccgcgaagtgcgtgctccggcgattgctgttcacgctctcgcagctgcacgacatcggcgtcgtgcaccgggacgtgaagcccgccaacctggtgctggcggaggacgaagccgcgttcntgctggtggacttcggcgccgccgcggatctccgcacgggatataactacgagccggagcagggtttgctggaccccttctactccccccccgaaaacttcatcatgcccgagagaatacccgcgccgccgccgctgcggcccatcgccgcgtccttctcgccgctcatctgggcggcgttcttgcccgacctgttcgactcgttcagcgcggggctggtgttcctgcagatgtgcgtcccgcagctgcgcggccggaaggtgatggacccgaacggcgcgttccgccggaacctggaaaacgccaactacgacctgcgaaagtggcgccgcgtcgtcgagccgcagggctgggacttcgccgcgctggacgtcggcggcggcctcgggtgggacctggcgtgccgcctggtgtgcaagcggaactttttgcagaggggcaggctcgggtgcaacaccgcgctgttgcacccgttcttctggacgccatgagcgaacgcgctctttcggtggggtctctcggcacgagcgcgacggggttctcgcgaccacggtagggacatngtgagtacgcgcgcgcgtcgtcgacgcggcgggcgcggagatgacttgngtacaagttgtacttccggacggcnncgt

SEQ ID NO: 1547 - DNA, 4000 bp, Escherichia coli
  misc_feature (110)..(110): n is a, c, g, or t
  misc_feature (207)..(207): n is a, c, g, or t
  misc_feature (284)..(284): n is a, c, g, or t
  misc_feature (356)..(356): n is a, c, g, or t
  misc_feature (1720)..(1720): n is a, c, g, or t
  misc_feature (1942)..(1942): n is a, c, g, or t
gtggagagtccgatctgctacaaaagcatcggttcccgttgcgtgcctgtcttgaggaagccggcgaattggtgcgcatgtcgcatcgcggcaaagatattgatctcgcnatcgaatgcgcgaccggcgttgacatacagggtgatcgccagcgcatatcacaggtttttgtaaatattctgagcaacgcttatgacgccagcgacncgggggatctgataagaatcatcgcctcagcagcagctgatcacacagagattacggtccgcgattttggtcacggnatgagcgaagaaatcagcgagcgaatttttgaaccgttcatgaccacaaagcagccaggtgaaggcacaggnctgggtatggcattaacgtacgggatcattcgtgaccacggtggatcgatagaagttgagagcgctccaggtgccggcacggaagtacggatcacgtttccggtgtcggacaaataaattatggaacacatcttaatcatcgaggacgaagcggtcatccgcaaagccctcgcgaagttgctcaaacgatcgggttactcggtttcggaggcaggctcggtcctcgaaagcgagcaacagttcagtctggactcctttgatctgatcattgctgatcttcggttgcccggcggactcgggaccgaagtcatcgagaagtgtgcgggcacgcctgttttgatcatgacgagttacgcaagcatcagttcggcggttgatgccatgaaagcgggcgctgccgactacatctcaaaaccttttaaccacgatgagattctggtcgtgattgaccgactcatccgccaaaacctgctctttcgtcagaaccaggcgttgcgacgtgatattcaacgcgagtatccggccagcggtatggtgggctcctcacaggcaatgcagcaggtgctctcgattatccaaaaagtggctaaaacccggtccacggtgttgatctgtggcgaatccggaaccggcaaagaacttgttgcgagagccatacatgatcagggcgagcgcaagaatgcgccactcgtgattatgaactgcgccgcaatccccgatagcctcatcgaatcggagctgttcggcttcgagaaaggggcattcaccggggccgacaaatcaaccccgggcctcattgagagcgccgatggaggcaccctctttctggatgaggttgccgagctgtctccacccgcccaggcgggactgcttcgcgtcattcaagagggggaatcacgaaggctgggctcgagtcacacaaaaacagtcgacgtgcgcgtgctcgcagccacacatcgaaaccttgacgagcgtgtgcgcaaaggattattccgcgaagaccttatgtatcgcctaaaagtggttgaaatcgaccttccccccttacgggatcgtcaagaagatctacctgcacttgcggaccacctactggatcgaatcagcgccaaactcaatcgacggtctctggcgttctccgcggaggcgttgcagaagatcctaaaacatgactggcccggcaacgtacgggaactggaaaacgcgattgaacgagcggtaattctttctgatggtgataccttgtcagcggatcaactcacgctttcctccatgaaaaccacatcgcaagaggctgacgcgcccttgactccaaaaggatctctcgacgattactttgtggagtttgtcgtcaagaacgaatcaantctcaatgagaccgaactggctaagagtcttggcatcagccgcaagaccctttgggagcgaagacaaaaattcggcattccacggaacatttcctcttcgcaagccaagaaataagcgcttctcatcggcgttaccccacactagagtgttaccttacgtaacactcttttcgaatctgagaagaactagatctcagaatgtaaataaataatgctgttttnaagcgattttcaatcttcggataactggcacgtatcttgcttaaagagtagcaacgcgccaaaggatgggcgcggaggcttaaccaaaactgcagttggaggctaaaaatggatcaatcaacacgtgaatcccattgggccaagacaaaggggttgatgattacgaccctgattatctggttcatattttcgtaccttgttcactggtttgctgacagcctgaacaacgtgacgttcatcggattccccctcgggtattacatggcggcacagggttccctcatcgtttttgtggtgctgattttctggttcgccagacgacaacattcgatcgatgtggagcatggcgtggcagaagacgaatagccagcaaccatcagaactaaggagaaacttacatgtctgtaattaaaggtgactttatagacaacctacccaaagtctacgggctttatacgggcgggtttgttgtcttcatcctgctgatggcgattcttgagcaggctggagtcagcgccgatacgatcggcatcttgttcgtagcattcaccgttctcatttatgcgggtattggttggttatcccgtacgatgcaggtcgatgcgtattacgttgcaggacgtcaggtaccggccttatttaacggaatggcgacagcagccgactggatgtccggtgcgtcgttcgtggcgatggccggtggcatctactttggcggccacggttacgtggcgttcgtcgtcggttggaccggcggttatgtgctggtggcctcgctgatggcgccgtatctgcgcaagtttggctgttacaccgtgccggactttatcggtacacgttacggcggcaaccttgcacgctttctggccgttctggttctggtcatcgcatcgtttacgtatgtgacggcacagatcaatgcgacaggaacgatcgcttcgcgggcgcttcaaatcccgtttgaagtcggagtgtggttcggcctgctcggcattctgctttgctccatgcttggtggtatgcgcgcggtaacctggacccaggtggcccagtacatcgtgctcatcattgcctatgtggtcccggtaatctggatgtccaacaagcaaggcttcggtctgatcccgcagtttgtctacggtgatgccatcatgcgaattacggaactcgaaacccttcacggggtcggaaccgctcccgctgagaagatcgctgggctggccgtgctgacgaaggctcattcggtggcgggctcgacgtttgcagccaaatggcagttcgctaccctggtgctttgcatgatggccggtacggcttcactgccccacattctgatgcgctacttcactacgcctagcgtaaaagcggctcgtcagtcggtagcatggtctctgctcttcatcttcctcctgtacttcaccgccccggcgctggcgacatttaccaaactgcagctgcttgatcctaatcttgcaaccagcatcattggtaaatcgatcgctgaagtgaacgcgatggagtggatacagaaatggagcgcggtcaagttcctggccatttcggacgcaaacggcgatggtatcctgcaaatcaatgagttcttcatgcgtggcgacatcgtcgtgctggcgactccagaaattgcggggctgccctacgtcatctccggccttgtagccgcaggtggtatggcggctgccatgtcgaccgccgacggactgctgttggcgatcgccaatgcgctgtcgcatgatctgtactacaagatcatcgatccgaaagccgacaccaagcatcgcctgatcgtcgctcgagtgctgctcatcttcatcggtgccgcaggtgcctttgtggcaagcttgaagcttacgagcattctcggtgcagtggcgtgggcctttgactttgccatgtcaggcttgttcttcccgctggtgctcggcatctggtggaagcgagccaaccgagccggcgcgattgcaggtatgttcttcggcctattggctggaacgctatacctctacgcggtgcgctggggtggcatggagccatggctct

SEQ ID NO: 1548 - DNA, 4000 bp, Escherichia coli
tgacaaccgatgtcgggattgaaaccaccaacggattgccaagttgtttgacgtaaaattcagcgtcaccgtttgcaaaacagttcacaactttgccgtcctcatagacgattagaattttcgcgggcataaaaaagccgcacgtccagtcgtgccgagtgatgcagttacgccgtgaggcgcgaaagcgtcggacacttccaaacgtgcggacggggtttgttggttcttcggtttctgcatcacggctctactttagcagagaccgtgccaagtgtcaagcggtcacattccggcggttttccgccggtgattgtgcgagcgcgtcactatttgaggcacagaggccggtttttggacagacaaggggcttgccgtggccgctgcggggcgtttgactggtgccgcaacggttttagccggaagcaccggcggcacggcggcggggcttttaaccgctgccacgttgacgggcgaaaagacgtgtttgatcccggccacgatcttgcttgcgggcgcgggcggcgccgcgattgcggcttccgctttgcgggcttcggtgacttcgagcatggcgtcgtcgagccggtcgagtgccatttccaaacgtgaggctgtcatagattttttacgattgtgctgccctgtttctccaaaaacgccacgacttttttttcgaccgccgcgttttggatgatgtaagtgatcgccagcacgacaaggattgcggagatcacgattgcgaagtgcgcggaaaaccatactgcgaaaatcggcaggatgataccggcggcacacactttgacaccggccacgatctgcccgaaataaaacaatgcgccggacgcgagcaagcagagaatcccggcggcgatgaaaagtttttcctcaaatgaaaccatttgccggacgggtgacaacgcgggcgcgggcgcgggcgtgacggcgggctggactgtggcgtgcgggatcggcgggacttccgccgtggaaattttgaacagggagcaaccggacaggaacgcgacggccagaatcatgcacaaaattgacaaggatttttttttcataggcaatcgtcgtccagttttaattttcccattttcgggcagatttgcaccaaaattttcagcaaggtttcctgcttcgtcattcgatgctcgaatcgcaaccaaaacagtgtaagcccactaagtagtgtaagcaacattaaaatttcggtgatgctcatgggttgagtaaaggccgcgtccaaatgttttgccacacagtttgcagcacaaaggccccgattggcaaagtggcaggaacaccgcctgaccaattcggcaccatgtcataaacgacttgctgcccgccaaaggattgcttggtaacgccgacgccgtaaagagtttccccggcggtgttgaaagaataattgtgcgtgcatcggctgactccgacgacgccggtgcccgacccggcaacttgcgcccaagacaactgcgcggtgttgtcaacgtagctcgttgccgggacaacgcccgtcgcgccgacgtgcgcgttttgcgtgaaagcggcgtccgtgatcacacgcaagtaacccggattgaccccgtccaaaactgcattggtgctatcggatgcgccagttgaaaggactgtttgtgttgcccatttttcaagcgcgaaagacccggtgaaagtgccggtgcctttgtattggttccaaacttggtcgcccgccgcgctcaaaaccgggatcggcggcgcgagcgtgaaaatcagttgcaaggtgatcacgacataatctgaaacaccgatcacttccggcgcgcccaaaactacgcggcctttgatgttgggatttgccccgccggtgctgccccaaccgagttcgttgatcgtataggatgtaactttcgtattgatgatgaaagtgcgttgatgcgtgactgtggcaacgccgcccgcataaaccggcgtggtgctgcacgcgcccggcgaggtcacataggcatcgtaattgtaagagaacgcaaccagtttcgtttgctgcgtcaaccagacagttccggcgtcgccgacgggcacggcacgcgaaacgtccacaacggcggttgtgccgccgccgccgatgctttggatatacgcttcaagtccgccggtcccgtggccgaatttgaaaatcccgccgaccattgcgccggtgaaaaatggagcggacgcggtgatcgtggtgagggcttgcgtgaaagtgatcacgccgccggtgatataattggccgttgcatccgatccgacacaaaggtttgtaaaaatgtcagcggtgccggtcatgttcgccaacgcagtcagtccagcgtcaaggacgacattgtggccacgaatttcgcgcttcacccttcgcgtcacggcatcatgcacgcggagccggtaattgacttgaagttttgttttcatttaattagtcgaaactccccacccttttccttgtaacgaagccttgcttagtagcccggcagcagatggagcagaattcaaaccgccggaagcaatgaaattcccatcaagcatcccgttggcgtcacatgcagccagagccgcatcaactgctgcttgtgtcagcgcgcatgagttacaatcgaatatcactaactgtggacaatttgaaatagtcgccgaaacttgcgagttgtttcccgaacaatatagcaccgttaattgggtcaagccggtcaaatccaaatcaacgagtgccccgttatcttgggcggaaagaatctgtaattttacgcatgaactcacgtccaacgcggttaaattcaggtctccaatgtctccggacgaaacgtccaaatatgttaaatcgccgctgaaattagaatccacggcactaatacaaggccatactttgcaaaatgcatttgaaccagccacaaacgcgttgctgtcgttggcgtaaatgacaatcgttccgctggcgtcttgcacggcgaaatatccagtgcttgtttcggcggtgaaattgtaatccgtcgaaccgtcacctgttaaaatggctgtttgatctttcatgcgaaacagggagacgcacgaaatggcgtctccgacctcctctccggttgtgattggcacggcaatcgggtgaaccagcgtaacgcatgaaatgagcgtgtcgggagcgtcggaaatagcaatgtcaatttccggcgagtgataaagtgaaacgcatgaaatgagtgtgtcgggattttcgctgccggtgatcgggattgcgccgggcgtgtgcatatagaagcacgacaaatcgctgcccggattttcaccggcgacaagcgtttcttcaatcggagcaatgagcaaaaagcacgacaaatcgctgccgggattttcctgcatgagcagatcaaacgtgtcaggccgtttgatggtgagcaacggcgtcggagtggcattgatttgctgatatggatcgtatggcttgaacacattttatcaggccgggatcgcggcgtaaatttcggaaataattgcgttgatcgcggcggcttggatgattgagtaatcgccggacacgtcgaaacgaacgggcgtgagcggttgcaccgcgccgatacttccatcggcaaggccggtcgcgttctttttttgcaggaaatacttgtcagcgttcgagcagttgaaaacttcgattgcgatccggtagagcggcaaccattttttgccgttgatgtccaaaaacgacgatccggtgagatcgggaatttgaattgagacggcggcgtttgcgacgggataaaccgggttcgccacgttttgaatataagcgttggaaagaatgagttggttgttaacgaagtcggaaaaacccgtccagatcgaaaccacgaccggaacggtattcggattttgaatgtccactacgtcgaacgccacggtgttctcgccgggctgctgtcgtgtcccctgcccttgttgataaagtgaataagagtcggtgccgtagcgatgtccg

SEQ ID NO: 1549 - DNA, 4000 bp, Escherichia coli
  misc_feature (1676)..(1676): n is a, c, g, or t
  misc_feature (1718)..(1718): n is a, c, g, or t
  misc_feature (1844)..(1844): n is a, c, g, or t
  misc_feature (1985)..(1985): n is a, c, g, or t
  misc_feature (1992)..(1992): n is a, c, g, or t
  misc_feature (2006)..(2006): n is a, c, g, or t
  misc_feature (2063)..(2063): n is a, c, g, or t
ttgatgaaataagtaaaatagtagatcgtaagcaggtaatgcctttggttttagggatgttggatatgaaagttgctatgattcatcagcacttggaggagaagtataagcccaaaagggttcgttacgtttcattagccaaacactatcactcagaagaaagtttaaaagcactttttgatagcttgcaaaaagcaccaaaacaacttgctgtacttatggcaattttcactgattcaactggacacaaagagcttaaaaaagtgtcaattttgaagtctaaatcaggatcaggtagtagccaaataaaaacactaattgacaaaggggttttagaagagcaatatcaagatgagcaccgtttgttaattaaacaacaacaagatgttttaggaaataaaacactctctgatgctcagcaattgtctttagatgaaatcaaaaaacagtttgataataaaaaggttgttttatttgagggtgttacctcctcaggaaaaacggaggtatatatcaagttgattgaagagcaactagcccatggaaatcaagttctgtatttattgccagagatttctttgacctcacaaattgtaaatcgattggcagcaagatttggagaccaagtaacggtatatcattcaaaattttctattcacgaacgagccgaggtgtggcaaaaagtattaactgcctctccagaagcaagagtaatagtaggtgcacgctctgctgttctcttgccgtttgaaaatctaggattagttttgatcgatgaggaacatgaaaattcctacaaacaatttgatccagctccacgttatcaagcacgagacagcgctatatatttagcaaatctaatgcaatcaagagtattattaggttctgctacaccctctttggaatctgcagagaatgttcgaactggaaaatatggatgggttcgattaacagaacgctatggtggtgtttctttgccaaagattgaactcatagatttgaaagaagctaaccgaaagaaaatgatgaaagggatgttttcgtctcaattaattgatgcaattcaacatactttatctcaaggcaagcaagtgattttattccaaaaccgaagaggttatgctccaatatctgaatgtacaagttgcggccattcgcctcaatgtactcagtgtgacgtttcattaacctatcatcaaacacaacaacaattacgttgccattattgtggctataatattcctatgccaaatcaatgtcacgcttgtggaatgccaactctcacgactaaaggcgcaggaacgcaacaaatagaagaacagattaaagctttttttccagaagtagccgtaggtcgaatggactgggacagtacgcgaggcaaatggagttttgatgcaattattgagtcttttgttcaagaaagaattcaaatcttagttgggacacagatggttgttaaggggctggattttaaaaacgttttattggttggtgttatcaatgcagatcatgtattgaacttcccagattttagagctcatgagcggagttatcagatgttatgtcaagttgcaggtagggcagggcgctcggataggaagggtaatgtattgattcaaacttatcaaccagaacatccaatattaagacaggttttagatcatgattatganggtctctaccaaactcaaaaaaaggaacgccatgaatacaantaccctccttattacaggatgatccgtattaccttcaaaagtaggcagtatgacactgttaacttagcttctgaatggtttactaatgtgctcaggcaatcttatgaaggaacagtattgggtccngtatttccatctgttgctcgaataagaaatcagtatcacaaacaactagtcgttaaaattgatcataattttaccccccaagtgataaaaaaaaccttagaaagaactctacaaagttttcaggctattgccgcttttagnagtactngagtaaattttgangtagacccttattgaaatctgctcaataaaagacgaaattgttttttctgtgttcgncttaaagggaagtctttattttcaatatttacggaggatgaagaataattaataacctttttaaggttaatgatgtaggatttgtggattcgtgaaaactgttcttgtggtaagcgggttaaaaaatccttcattgttgagagtaccaagaatttttttttgtgagttataatttttatataatctcctacagcttcaatccattggatttgatcaatggctattttttcagtcttaaggttgtgtttgatttcaataaaatcatttgttttttttgtgatactaagacttagtttgattctttgttcaatacgagcaatagattgttcaatacgctccaatgaaaaaggaggtgagatacagtcggctagatttaaatcaaaagcacgaagagcatcctctgcctgttcggtcataagaatgatttctgtagggtcttttaacctttcaataaaatcaaacccattataaacagggagttttgcagagagaaatataagatctacagaggagtaatttagaaaattttgagcttcaacagcgttagaaaattcagcaataaagtttagtgttttaacttttttgaggatttgcgataggtaaaggcgcctaattggattaggatcaaccaaaatatagttaaggagcattgtttaaataatatagtgctacaaatataattaaaaaaactttattttaaagtgatctttatttggtatactgtatagtttaagttatttttgccaaccaaaataaagattatgaatcaatacgaaactgttttcattttaaatcccgttctctctgaaactcagattgaggaagcagttcaaaagtttgtagaatttattaagaccaaccaaggttcaatgacgagtcaggaaaattggggtcttaagaaacttgcttatcctatcgagaataagaaaagtggcttctatcatctttttgaatatgcagcaccaagcgaagccgtagcggctttagaggtagaatttcgccgtgacgagcgtatcatgcgttacttaacggttaaactcgacaagcattcactagcgtgggcagaaaaaagaagaaaaaagaacaaagcaaaagcataagcaatgtctaaaatagaagaacaaaattcaggaaaaaaagaaggtgaaattcgctatttaactccgttaaatatcgatacatctactcaaaaaaaatactgtcgttttaaaagaactggtatcaagtatgtggattataaagatccagactttttaatcaagtttgtaaacgagcaaggcaaaattttaccacgaaggttaacaggaacttcattgaagtaccaacgtaaagtttcagtggctgtaaaaagagcgcgtcatttggcattaatgccttatgttgccgatatgttaaaataataatcactcatcatggaattaatattaaaagaagacgttcaaaatcttggatttaaagatgaaatcgtgagtgttaaaaatggttacggtagaaattttttaatcccaacgggggttgctgttatggctactgtgtcagctcgaaaagtattagctgaaaatctaaaacaacgtgcattcaaagaaaaagcagttgttgatgaagcaaaagctagagctgagaaaatccaagcacttgaaattaaaatcgcttccaaagtaggaagtggagacaaactttttggatcaatttctaatgcagatcttgcgtctgcaataagctctaatggcgatgatcttgacaagaagtttattacactacctgggaaaacaatcaaacgtttaggtaaatacgaggcaactattcggttacatcgagaagtaagttttgaatttccgtttgagattgtgcctgaaacgaaagcttagtaaaatttaaacccgctttatgtgggttttttttattctaaaaagtaagaatgaaatatcacaggctca

SEQ ID NO: 1550 - DNA, 4000 bp, Escherichia coli
  misc_feature (1)..(5): n is a, c, g, or t
  misc_feature (7)..(8): n is a, c, g, or t
  misc_feature (10)..(12): n is a, c, g, or t
  misc_feature (14)..(18): n is a, c, g, or t
  misc_feature (20)..(20): n is a, c, g, or t
  misc_feature (23)..(31): n is a, c, g, or t
  misc_feature (33)..(34): n is a, c, g, or t
  misc_feature (36)..(37): n is a, c, g, or t
  misc_feature (39)..(40): n is a, c, g, or t
  misc_feature (44)..(45): n is a, c, g, or t
  misc_feature (47)..(47): n is a, c, g, or t
  misc_feature (49)..(49): n is a, c, g, or t
  misc_feature (51)..(52): n is a, c, g, or t
  misc_feature (55)..(63): n is a, c, g, or t
  misc_feature (65)..(67): n is a, c, g, or t
  misc_feature (69)..(70): n is a, c, g, or t
  misc_feature (72)..(73): n is a, c, g, or t
  misc_feature (77)..(78): n is a, c, g, or t
  misc_feature (80)..(80): n is a, c, g, or t
  misc_feature (82)..(85): n is a, c, g, or t
  misc_feature (87)..(90): n is a, c, g, or t
  misc_feature (94)..(96): n is a, c, g, or t
  misc_feature (99)..(105): n is a, c, g, or t
  misc_feature (107)..(108): n is a, c, g, or t
  misc_feature (110)..(115): n is a, c, g, or t
  misc_feature (122)..(125): n is a, c, g, or t
  misc_feature (128)..(128): n is a, c, g, or t
  misc_feature (130)..(130): n is a, c, g, or t
  misc_feature (133)..(135): n is a, c, g, or t
  misc_feature (137)..(138): n is a, c, g, or t
  misc_feature (140)..(141): n is a, c, g, or t
  misc_feature (143)..(145): n is a, c, g, or t
  misc_feature (147)..(148): n is a, c, g, or t
  misc_feature (151)..(151): n is a, c, g, or t
  misc_feature (154)..(163): n is a, c, g, or t
  misc_feature (165)..(168): n is a, c, g, or t
  misc_feature (170)..(170): n is a, c, g, or t
  misc_feature (172)..(175): n is a, c, g, or t
  misc_feature (177)..(179): n is a, c, g, or t
  misc_feature (181)..(182): n is a, c, g, or t
  misc_feature (184)..(188): n is a, c, g, or t
  misc_feature (191)..(192): n is a, c, g, or t
  misc_feature (194)..(200): n is a, c, g, or t
  misc_feature (202)..(202): n is a, c, g, or t
  misc_feature (204)..(204): n is a, c, g, or t
  misc_feature (206)..(206): n is a, c, g, or t
  misc_feature (208)..(217): n is a, c, g, or t
  misc_feature (220)..(226): n is a, c, g, or t
  misc_feature (229)..(230): n is a, c, g, or t
  misc_feature (232)..(232): n is a, c, g, or t
  misc_feature (234)..(234): n is a, c, g, or t
  misc_feature (236)..(236): n is a, c, g, or t
  misc_feature (240)..(240): n is a, c, g, or t
  misc_feature (243)..(243): n is a, c, g, or t
  misc_feature (245)..(255): n is a, c, g, or t
  misc_feature (257)..(258): n is a, c, g, or t
  misc_feature (260)..(263): n is a, c, g, or t
  misc_feature (267)..(267): n is a, c, g, or t
  misc_feature (269)..(278): n is a, c, g, or t
  misc_feature (281)..(284): n is a, c, g, or t
  misc_feature (286)..(287): n is a, c, g, or t
  misc_feature (289)..(292): n is a, c, g, or t
  misc_feature (296)..(298): n is a, c, g, or t
  misc_feature (300)..(300): n is a, c, g, or t
  misc_feature (305)..(306): n is a, c, g, or t
  misc_feature (308)..(311): n is a, c, g, or t
  misc_feature (313)..(313): n is a, c, g, or t
  misc_feature (315)..(315): n is a, c, g, or t
  misc_feature (317)..(318): n is a, c, g, or t
  misc_feature (320)..(322): n is a, c, g, or t
  misc_feature (325)..(325): n is a, c, g, or t
  misc_feature (327)..(329): n is a, c, g, or t
  misc_feature (331)..(339): n is a, c, g, or t
  misc_feature (343)..(350): n is a, c, g, or t
  misc_feature (352)..(354): n is a, c, g, or t
  misc_feature (356)..(367): n is a, c, g, or t
  misc_feature (369)..(376): n is a, c, g, or t
  misc_feature (379)..(380): n is a, c, g, or t
  misc_feature (382)..(386): n is a, c, g, or t
  misc_feature (389)..(390): n is a, c, g, or t
  misc_feature (394)..(395): n is a, c, g, or t
  misc_feature (398)..(400): n is a, c, g, or t
  misc_feature (402)..(403): n is a, c, g, or t
  misc_feature (407)..(408): n is a, c, g, or t
  misc_feature (411)..(414): n is a, c, g, or t
  misc_feature (416)..(416): n is a, c, g, or t
  misc_feature (418)..(422): n is a, c, g, or t
  misc_feature (424)..(427): n is a, c, g, or t
  misc_feature (429)..(433): n is a, c, g, or t
  misc_feature (436)..(436): n is a, c, g, or t
  misc_feature (438)..(442): n is a, c, g, or t
  misc_feature (444)..(444): n is a, c, g, or t
  misc_feature (447)..(449): n is a, c, g, or t
  misc_feature (452)..(453): n is a, c, g, or t
  misc_feature (455)..(456): n is a, c, g, or t
  misc_feature (458)..(467): n is a, c, g, or t
  misc_feature (469)..(472): n is a, c, g, or t
  misc_feature (475)..(478): n is a, c, g, or t
  misc_feature (480)..(481): n is a, c, g, or t
  misc_feature (483)..(483): n is a, c, g, or t
  misc_feature (488)..(491): n is a, c, g, or t
  misc_feature (494)..(495): n is a, c, g, or t
  misc_feature (497)..(497): n is a, c, g, or t
  misc_feature (499)..(499): n is a, c, g, or t
  misc_feature (501)..(503): n is a, c, g, or t
  misc_feature (505)..(507): n is a, c, g, or t
  misc_feature (509)..(510): n is a, c, g, or t
  misc_feature (512)..(512): n is a, c, g, or t
  misc_feature (516)..(521): n is a, c, g, or t
  misc_feature (523)..(523): n is a, c, g, or t
  misc_feature (525)..(529): n is a, c, g, or t
  misc_feature (531)..(532): n is a, c, g, or t
  misc_feature (534)..(535): n is a, c, g, or t
  misc_feature (538)..(550): n is a, c, g, or t
  misc_feature (554)..(554): n is a, c, g, or t
  misc_feature (556)..(558): n is a, c, g, or t
  misc_feature (560)..(566): n is a, c, g, or t
  misc_feature (568)..(571): n is a, c, g, or t
  misc_feature (575)..(576): n is a, c, g, or t
  misc_feature (578)..(578): n is a, c, g, or t
  misc_feature (580)..(583): n is a, c, g, or t
  misc_feature (585)..(587): n is a, c, g, or t
  misc_feature (589)..(591): n is a, c, g, or t
  misc_feature (593)..(600): n is a, c, g, or t
  misc_feature (602)..(602): n is a, c, g, or t
  misc_feature (604)..(605): n is a, c, g, or t
  misc_feature (607)..(609): n is a, c, g, or t
  misc_feature (611)..(611): n is a, c, g, or t
  misc_feature (614)..(617): n is a, c, g, or t
  misc_feature (619)..(619): n is a, c, g, or t
  misc_feature (621)..(629): n is a, c, g, or t
  misc_feature (631)..(631): n is a, c, g, or t
  misc_feature (633)..(640): n is a, c, g, or t
  misc_feature (642)..(645): n is a, c, g, or t
  misc_feature (648)..(650): n is a, c, g, or t
  misc_feature (652)..(654): n is a, c, g, or t
  misc_feature (661)..(662): n is a, c, g, or t
  misc_feature (664)..(666): n is a, c, g, or t
  misc_feature (668)..(676): n is a, c, g, or t
  misc_feature (678)..(678): n is a, c, g, or t
  misc_feature (681)..(682): n is a, c, g, or t
  misc_feature (684)..(685): n is a, c, g, or t
  misc_feature (687)..(697): n is a, c, g, or t
  misc_feature (699)..(702): n is a, c, g, or t
  misc_feature (705)..(705): n is a, c, g, or t
  misc_feature (707)..(707): n is a, c, g, or t
  misc_feature (709)..(710): n is a, c, g, or t
  misc_feature (713)..(713): n is a, c, g, or t
  misc_feature (717)..(722): n is a, c, g, or t
  misc_feature (725)..(728): n is a, c, g, or t
  misc_feature (730)..(739): n is a, c, g, or t
  misc_feature (741)..(742): n is a, c, g, or t
  misc_feature (744)..(748): n is a, c, g, or t
  misc_feature (750)..(751): n is a, c, g, or t
  misc_feature (753)..(764): n is a, c, g, or t
  misc_feature (766)..(771): n is a, c, g, or t
  misc_feature (773)..(774): n is a, c, g, or t
  misc_feature (776)..(781): n is a, c, g, or t
  misc_feature (783)..(783): n is a, c, g, or t
  misc_feature (785)..(786): n is a, c, g, or t
  misc_feature (793)..(793): n is a, c, g, or t
  misc_feature (795)..(800): n is a, c, g, or t
  misc_feature (802)..(806): n is a, c, g, or t
  misc_feature (808)..(808): n is a, c, g, or t
  misc_feature (810)..(810): n is a, c, g, or t
  misc_feature (812)..(817): n is a, c, g, or t
  misc_feature (821)..(821): n is a, c, g, or t
  misc_feature (823)..(837): n is a, c, g, or t
  misc_feature (839)..(842): n is a, c, g, or t
  misc_feature (844)..(847): n is a, c, g, or t
  misc_feature (850)..(851): n is a, c, g, or t
  misc_feature (853)..(857): n is a, c, g, or t
  misc_feature (859)..(861): n is a, c, g, or t
  misc_feature (863)..(874): n is a, c, g, or t
  misc_feature (876)..(881): n is a, c, g, or t
  misc_feature (883)..(883): n is a, c, g, or t
  misc_feature (885)..(886): n is a, c, g, or t
  misc_feature (888)..(902): n is a, c, g, or t
  misc_feature (904)..(907): n is a, c, g, or t
  misc_feature (909)..(909): n is a, c, g, or t
  misc_feature (911)..(914): n is a, c, g, or t
  misc_feature (916)..(922): n is a, c, g, or t
  misc_feature (924)..(928): n is a, c, g, or t
  misc_feature (930)..(937): n is a, c, g, or t
  misc_feature (939)..(946): n is a, c, g, or t
  misc_feature (948)..(948): n is a, c, g, or t
  misc_feature (950)..(950): n is a, c, g, or t
  misc_feature (954)..(955): n is a, c, g, or t
  misc_feature (957)..(957): n is a, c, g, or t
  misc_feature (959)..(963): n is a, c, g, or t
  misc_feature (965)..(969): n is a, c, g, or t
  misc_feature (971)..(971): n is a, c, g, or t
  misc_feature (973)..(973): n is a, c, g, or t
  misc_feature (976)..(976): n is a, c, g, or t
  misc_feature (978)..(993): n is a, c, g, or t
  misc_feature (996)..(1012): n is a, c, g, or t
  misc_feature (1016)..(1016): n is a, c, g, or t
  misc_feature (1018)..(1020): n is a, c, g, or t
  misc_feature (1023)..(1028): n is a, c, g, or t
  misc_feature (1030)..(1032): n is a, c, g, or t
  misc_feature (1034)..(1036): n is a, c, g, or t
  misc_feature (1038)..(1043): n is a, c, g, or t
  misc_feature (1045)..(1050): n is a, c, g, or t
  misc_feature (1052)..(1054): n is a, c, g, or t
  misc_feature (1058)..(1062): n is a, c, g, or t
  misc_feature (1065)..(1065): n is a, c, g, or t
  misc_feature (1067)..(1069): n is a, c, g, or t
  misc_feature (1071)..(1073): n is a, c, g, or t
  misc_feature (1075)..(1077): n is a, c, g, or t
  misc_feature (1079)..(1080): n is a, c, g, or t
  misc_feature (1084)..(1085): n is a, c, g, or t
  misc_feature (1090)..(1090): n is a, c, g, or t
  misc_feature (1094)..(1098): n is a, c, g, or t
  misc_feature (1100)..(1105): n is a, c, g, or t
  misc_feature (1107)..(1107): n is a, c, g, or t
  misc_feature (1109)..(1110): n is a, c, g, or t
  misc_feature (1112)..(1112): n is a, c, g, or t
  misc_feature (1114)..(1116): n is a, c, g, or t
  misc_feature (1119)..(1124): n is a, c, g, or t
  misc_feature (1126)..(1127): n is a, c, g, or t
  misc_feature (1129)..(1136): n is a, c, g, or t
  misc_feature (1138)..(1140): n is a, c, g, or t
  misc_feature (1142)..(1143): n is a, c, g, or t
  misc_feature (1145)..(1145): n is a, c, g, or t
  misc_feature (1147)..(1148): n is a, c, g, or t
  misc_feature (1150)..(1153): n is a, c, g, or t
  misc_feature (1155)..(1161): n is a, c, g, or t
  misc_feature (1163)..(1164): n is a, c, g, or t
  misc_feature (1167)..(1167): n is a, c, g, or t
  misc_feature (1170)..(1170): n is a, c, g, or t
  misc_feature (1172)..(1173): n is a, c, g, or t
  misc_feature (1176)..(1176): n is a, c, g, or t
  misc_feature (1179)..(1180): n is a, c, g, or t
  misc_feature (1183)..(1183): n is a, c, g, or t
  misc_feature (1185)..(1185): n is a, c, g, or t
  misc_feature (1187)..(1194): n is a, c, g, or t
  misc_feature (1198)..(1200): n is a, c, g, or t
  misc_feature (1202)..(1205): n is a, c, g, or t
  misc_feature (1207)..(1207): n is a, c, g, or t
  misc_feature (1209)..(1209): n is a, c, g, or t
  misc_feature (1211)..(1215): n is a, c, g, or t
  misc_feature (1218)..(1219): n is a, c, g, or t
  misc_feature (1221)..(1221): n is a, c, g, or t
  misc_feature (1224)..(1224): n is a, c, g, or t
  misc_feature (1226)..(1226): n is a, c, g, or t
  misc_feature (1228)..(1228): n is a, c, g, or t
  misc_feature (1230)..(1230): n is a, c, g, or t
  misc_feature (1232)..(1232): n is a, c, g, or t
  misc_feature (1235)..(1235): n is a, c, g, or t
  misc_feature (1237)..(1239): n is a, c, g, or t
  misc_feature (1242)..(1245): n is a, c, g, or t
  misc_feature (1248)..(1253): n is a, c, g, or t
  misc_feature (1255)..(1257): n is a, c, g, or t
  misc_feature (1260)..(1260): n is a, c, g, or t
  misc_feature (1262)..(1263): n is a, c, g, or t
  misc_feature (1265)..(1265): n is a, c, g, or t
  misc_feature (1267)..(1267): n is a, c, g, or t
  misc_feature (1271)..(1271): n is a, c, g, or t
  misc_feature (1273)..(1273): n is a, c, g, or t
  misc_feature (1275)..(1286): n is a, c, g, or t
  misc_feature (1289)..(1289): n is a, c, g, or t
  misc_feature (1292)..(1294): n is a, c, g, or t
  misc_feature (1296)..(1298): n is a, c, g, or t
  misc_feature (1304)..(1304): n is a, c, g, or t
  misc_feature (1306)..(1306): n is a, c, g, or t
  misc_feature (1308)..(1310): n is a, c, g, or t
  misc_feature (1312)..(1313): n is a, c, g, or t
  misc_feature (1316)..(1320): n is a, c, g, or t
  misc_feature (1322)..(1322): n is a, c, g, or t
  misc_feature (1324)..(1326): n is a, c, g, or t
  misc_feature (1333)..(1333): n is a, c, g, or t
  misc_feature (1335)..(1335): n is a, c, g, or t
  misc_feature (1337)..(1338): n is a, c, g, or t
  misc_feature (1340)..(1342): n is a, c, g, or t
  misc_feature (1347)..(1347): n is a, c, g, or t
  misc_feature (1350)..(1350): n is a, c, g, or t
  misc_feature (1354)..(1354): n is a, c, g, or t
  misc_feature (1356)..(1356): n is a, c, g, or t
  misc_feature (1361)..(1361): n is a, c, g, or t
  misc_feature (1364)..(1366): n is a, c, g, or t
  misc_feature (1368)..(1368): n is a, c, g, or t
  misc_feature (1371)..(1371): n is a, c, g, or t
  misc_feature (1373)..(1375): n is a, c, g, or t
  misc_feature (1378)..(1379): n is a, c, g, or t
  misc_feature (1381)..(1382): n is a, c, g, or t
  misc_feature (1385)..(1386): n is a, c, g, or t
  misc_feature (1388)..(1392): n is a, c, g, or t
  misc_feature (1394)..(1394): n is a, c, g, or t
  misc_feature (1396)..(1396): n is a, c, g, or t
  misc_feature (1399)..(1401): n is a, c, g, or t
  misc_feature (1474)..(1475): n is a, c, g, or t
nnnnngnngnnngnnnnngnaannnnnnnnncnncnngnngcgnngngngnnggnnnnnnnnntnnngnngnngggnngncnnnncnnnncaannnaannnnnnnanncnnnnnncacaccnnnnctntnctnnncnngnnannngnnagngcnnnnnnnnnnannnnanannnnannncnntnnnnnctnngnnnnnnngngntntnnnnnnnnnnccnnnnnnnganngnananaagnaangnnnnnnnnnnntnngnnnngttngnnnnnnnnnngtnnnntnnannnnatgnnntnatctnntnnnntntngnntnnnttncnnngnnnnnnnnnatgnnnnnnnncnnncnnnnnnnnnnnncnnnnnnnnttnntnnnnnccnncccnncannncnncccnnctnnnntncnnnnngnnnngnnnnntgntnnnnncnccnnnccnncnntnnnnnnnnnntnnnntcnnnntnncntcccnnnnctnncntncnnncnnncnncnctgnnnnnnancnnnnnanncnnccnnnnnnnnnnnnncatngnnntnnnnnnncnnnncctnncntnnnntnnngnnntnnnnnnnnanannannncngtnnnntngnnnnnnnnngncnnnnnnnngnnnnggnnngnnnagcgaanngnnngnnnnnnnnncntgnntnntnnnnnnnnnnncnnnnccngngnngtntagnnnnnnccnnnncnnnnnnnnnncnngnnnnncnngnnnnnnnnnnnngnnnnnncnngnnnnnntntnnttttttntnnnnnngnnnnncncncnnnnnncgtncnnnnnnnnnnnnnnncnnnncnnnnccnncnnnnnannntnnnnnnnnnnnnannnnnncncnncnnnnnnnnnnnnnnnannnnantnnnntnnnnnnncnnnnngnnnnnnnncnnnnnnnntntnctcnncncnnnnntnnnnntncnctncnnnnnnnnnnnnnnnntcnnnnnnnnnnnnnnnnncggntnnnttnnnnnngnnntnnngnnnnnncnnnnnntnnntttnnnnnagnannngnnngnnngnngggnnggggngggnnnnntnnnnnngngnngngnnncgnnnnnngnncnnnnnnnntnnntnncntnncnnnncnnnnnnntnnggntgngnngcntcnnttntntnnnnnnnntggnnngnnnncntnannnnnccnncnccncncncnangcnannntannnnggnnnnnngnnnagncnngngnggcncncnnnnnnnnnnnnaanaannnannntttttnantnnngnnttnnnnngnannngcaaacngncnngnnngaaanaangaananataantannngnagntnnncgnntnnaannannnnngncnggnnnggtccaaacgacagaaagagtccatgcatggctcccctcgcgcttgcggcaccgtggagggtatgggtgcganntacgtcgcacgcatccgaaaacagacgaagagttcgcgtcagggcgctcgagaacgtcgaggacgatgacgtcttatggttgacctcagggacagagcagttgcctcctctcgttgaagcaacgatgcgattgcagagtgaggcatcgatgcgtgtcgtcaagcctcccggtgttgacgagctttgggactggtacgaacaggtggggtctgacgacgcggacccatcttgggggcgggtgtggaagaccgcatccgatctatcgaacttagtgcaagcagatgcacttccttctttcagtctgagaggaggaaagaactcgaaggtagtcgtcgaggtggggtgcggactcggttacgttgggctttgtgcagccgtgacacaaggtgctcgggtgattttctgcgacagggaacctctggcgatacactgtgcgttatcttcagcccaactcaatggactggaggtgcacagcgtcaatgacatctcaatatcaagtcaaggtgtcgcaggatcggttctcgactgggcagctcctcttggtgctttggcgcagtcggcggatgtggtactgggggctgattgtttgtatgatccaacgactgctgcgatgcttgcgaaaacatgcaaacatttgttggatgaagacggggtggttgtgatttgtgaaccggagaaggagcgagctctggggacttactcaaagttcattgaatgcgcgcaatctttgggggcgacttcagcagaaatattgccgtaccctgacctggattcggacgaaccatctgttttacttcgcgtgtcgtggaaacgtctctgactttcaagccgatgcgcaattctagttgtgatgtcgactaccaaagtagactttctaaagctattcaatctgctctactggtttttcaaccctgctgtgtttcattggggacttccccttcatattccaaccttgtatcccatcgccattgggtcggacacaaaacattccgtcgtcgtcgccgtcatcatcgtcgccttctcccgccccgtcatccgatgagggctcctcagctgcgaaatcgacccagtgggctttgcggaattttcgacgagcacctcggtgcttgttagcgatcagcgcacttcctgcatcatcctctgctgaacgttcgtacaggcgggcaccaccgcgaagtgacgcagccgcacggagtgagacacgattcgacctaagatgctcagtttcgcgctccacggttttcgaatagccatcgcctgcagaaatttcaagagtcgcgccaagcttgccgctgctgcgatatactgcttgaagtgcgtcgtcaaatttgccacgcttcgaagcgtttggtttcactcccaaaggcatccacatgctggttgaagtaagggatgttagcgagatattgacggcacagatcatatctgtgacctccgcagccgagagatacgttagcctgagtgagcgcatcgcgtcagcctttcggcacatcctctttatcagcaacaaagcagcatccatcgcgtgtaccatcaactggcccgcacgcgataatctattgttcaccccagtgtcaattgtgccgacatcacgaaagttgatggtatcttcacgagattcacaaactgcatgacgcacgtgagctgaaagaagacacagagtcacagaaagagcagtggctgaagccgacgccggaaggctatcttttgtggatgagaccacatggatgacgtcagctatcaccgatatggcagcatcaggcccattgtgcgcaaatgcaagatgatgtgccacttggaggagttcagtgcgttgtgaccgttcaaaaggataagtttgtgttgccgccatagtgagcttgctttcacgttgaagcagatgcacgaaagcgctgaattgagtgccggtcttcatgccctttgagatttcttgagcaaacatcagtgcatctcccgaggaataatccgatgtacctttaagagattgcatgtcatcggcgtttgcgtcaacctgaccccacagagcaactgatgcatgcgcggtcacgatcatcggcgtgaacgcggatgcagattcaggcgacagtcccaagattaatgtggctcctaatcgtaatgctgccgcagcaggatgaagggcggtgcactcgttggctcgtgcgattacccattggagtatacttagacgtctgctctcgacgatgtcagcatcgtgaccaccaacaacaccgatggttccattttctgcgctccacgaatctaaatgaaacgcgggggcagccaacgagcacagcactgatgactcgagcgcaggagaggcagggacattggcggcaatcgtgcacaattgaaagcatgcagtcacaatagtcgcacgcactgcggaagaggtttctgcccattgaccatatctcttacctgcggagtagctcactgccccactgtttgcaaccagctccttttcaactcgtggtgcagacagacgttccgccagcatctgatagcgattcgtcaaatccccccct

SEQ ID NO: 1551 - DNA, 4000 bp, Escherichia coli
  misc_feature (1986)..(1986): n is a, c, g, or t
  misc_feature (1992)..(1992): n is a, c, g, or t
taagaaaattgatatagacaaatataagaagtgattatttacaatccaatcaaagtatgatataataatattatgtttaaaatatttaagaagaaaaaagaagaatttgaagaacttgactgggataaagtaacaaccctagaggatgtcagattattggtaaagctcacctttccggttattaaagtgagtaaaagcagaattgaaaaagtaagacatttattaaaggagaagtagtaatgagtttagatagaacgggtaatgggtacttagtagacccaacaacatggtcactagatgtgatgtatgagatggcaaaggaagatgatgttgcattgagtgagtcacaggtaatgcagattgaaaaggcgcgtgaatactttgatgagaattcaagtgttccaccgattagaacatttgctaagtatgtaggaattgataaaggtaaactattcaaagaatggttgaccggccctctcaagcctattactaagtatggtggtcttcctcaaccgacggggtgtgtctaatgattaaaagaatgataccactcggcgacagtattttagtattgcccgatgcagcggaaacggtgactgaatctggttttatcttaaccaacgctgaaatgactactactggtactgtacaggcgactggtcccggtaaattggtggatggagagatggtgcaaccacaactaaagccaggtgataaaattatgttcgccggcattaatgtaaatgaaagcttaagattagtaacactcaatgacgttcgatatctactaatgcttgagtctcaaatttttgggattatcgaagaagattaagtctggttcgactttcagggagtgggcagcatgtataaataatagatatatacctatataaggaatgtttatgtcttgtcactctaagtggtgtacttggataacggcagtatcgcaactagcgatagctacagttattgtatatgcaggattggttgttggctcccacatggaatcatggactaaatcgtttaaacaaggttctaatgatctacattctattagagagaatatgaatagtatgacttattctatggagtccatcaatagagacatggatataatgaataataatataatgattattaataagcagatgagttatatgaatggttcggtaagtaatatgtcgaataagtttagcccgcagggaatggcgagaagcttcatgcctttttaatataaataaattataatatagtaatacaatgaatgttgtgtagcaattccattaggagaaatatatggaattgaatagtttaggctatgcactaaatacattgtactttcttgtctccgcagtcttagtgatgtggatggcggcaggatttacaatgttagaagctggatcggttcgttcaaagaacgtaacagagatccttttaaaaaatgttgcactgtatagtgtagcatcactaaccttcttgtttgtgggttatgaattaatgtacggtggatggaacgctccagaagaccacgcattaatgagtgactttttctttcaagtagtgtttgttgcaacagcgatgtcagtagtttcgggcgcagttgcagaacgtaagaaactatggtcatttttaatctttgctggtatttttacagcagtgatttatccaatccaaggctcttggtcttggggtggaggatggttatctgaggcagggttctttgactttgcaggatcgggtatcgttcatatggcgggtgcagcggcggcattagcggctgtgctattaatcggcgctcgtaagggtaagtatgataagaatggtaacccagttgctattcacggttcaagttcaactcaggttgctcttggaacacttattctttggatgggctggtttggttttaatggtggttcgcagttaagtattttaggaattgacaacgctaacgcagttgctcaaattttcgtaaatacaaacactgcngccgcngcaggattattgagtgcaatgttgctctcaaagatttggttaaagaagaccgttttaaatgtaacactgaatggtgccttggctggactagtggtaattaccgctgatccattcacaccttcaccagagattgcagccttgtatggtgcaatcggtggattaattgtccctatctcaatggcgctgctagagaaatggggtatcgatgatccagttggtgcgatcagtgtacacggtgttgcgggtattgtgggactaatgttggttccgattttaaatactgatgcaacactgtatggccaagcgctaggtactactgcaatcttcggatttgtatttggtacaagcctagtagtttggtatatactcaaaaagaccgttggtctgagagtaggtgaagaggaagaacttgctggttctgatatgtgggaaacagggcaatccgcctacccagagttcatgaacagcaagaaataactttaactgaattgttatacaacatactaaccctcttaactgagggttttttaataaaagtatattaatatatcataatactgtttacaatcagagccttttatgttataatataactatatatgaaataatttgtatatacaacaaaaattaggagaaataaatgaaaaatttattcgcagcattaacagtgcttttaacagtaacatcggcaaatgctttctttaacggaaacaattcttggaacagtaaccactcaaatggttaccaagaagataatggtatctttgcatataacagttatgatttctgggatccacgttggtactctcaagagtttactaactttgtgactgaaatggatgatgagtttagtaatgatgactattcaaagcgttcatactacacggtacgtaataacaacttcccagcagtagatactactaaataaggatataataataatatcttaatttgaggagtccttcgggactcctttttcgcacaaggagaaagttatggcagatactacattagacgcaagtggattaaattgtccactaccaatattaaagactaagaaggcactaaacaaaatggagtctggacaaattttagaagttatctctacagatgcaggttcgattaaagacctcgaagcattttgtaatcaaactggtaataggttgatgaagacaattgaagttgcaggtaagtacacattcacaatcgagaaagtataatgaaagaactatataacaagtggaaaatgaattgtccaacaccaagagcatatagatgggttgcgactcattttaaaaatttagacacaaaataggagtaaagttatgtttgagtcattcttaatgggggcgatattattctttgccttctatataacacaggaagacagaaactttttctgtcgtaaattatggagtaaattgtggacacgaaaataggaaaattagtaggtgctggtatagcgattgtattatggatagggttattattactatctaactctgctaaggcagattatattacaatggacgtagattcatctgtgcgcagtggcacggttttgtgtgacagtgttcagagttgttatattaagacgttacaaatggagcaacgtggttctgctcaatactgtaactcagtaacaattaaaagagatggtagagtagtttggtttaagaattactttcgttaattatttggtcggccgaatatatagaagcttattcttaacttcgttcaacatatctttttgattatctagattgacttggatttctttgatgcccaccaagagctcttggtggtagaccggccaagctgatctaaattcagaattatcagcaacttcagatttaaggttattcatgttggtggtgatcttagatgcccaccaaacagaagtcataatttgagtgaacatagcacctaagactattacagccgattttttcaaccacttaggtagttgtggttctctatgttgtatcgcattaatatccgaacgcat

SEQ ID NO: 1552 - DNA, 4000 bp, Escherichia coli
  misc_feature (2)..(9): n is a, c, g, or t
  misc_feature (12)..(13): n is a, c, g, or t
  misc_feature (15)..(18): n is a, c, g, or t
  misc_feature (20)..(39): n is a, c, g, or t
  misc_feature (41)..(41): n is a, c, g, or t
  misc_feature (43)..(51): n is a, c, g, or t
  misc_feature (53)..(55): n is a, c, g, or t
  misc_feature (57)..(57): n is a, c, g, or t
  misc_feature (60)..(60): n is a, c, g, or t
  misc_feature (62)..(67): n is a, c, g, or t
  misc_feature (69)..(70): n is a, c, g, or t
  misc_feature (72)..(77): n is a, c, g, or t
  misc_feature (79)..(81): n is a, c, g, or t
  misc_feature (83)..(83): n is a, c, g, or t
  misc_feature (85)..(90): n is a, c, g, or t
  misc_feature (92)..(92): n is a, c, g, or t
  misc_feature (96)..(97): n is a, c, g, or t
  misc_feature (99)..(99): n is a, c, g, or t
  misc_feature (101)..(113): n is a, c, g, or t
  misc_feature (115)..(115): n is a, c, g, or t
  misc_feature (117)..(117): n is a, c, g, or t
  misc_feature (119)..(119): n is a, c, g, or t
  misc_feature (121)..(121): n is a, c, g, or t
  misc_feature (123)..(123): n is a, c, g, or t
  misc_feature (125)..(125): n is a, c, g, or t
  misc_feature (129)..(131): n is a, c, g, or t
  misc_feature (133)..(134): n is a, c, g, or t
  misc_feature (136)..(143): n is a, c, g, or t
  misc_feature (145)..(145): n is a, c, g, or t
  misc_feature (147)..(147): n is a, c, g, or t
  misc_feature (149)..(163): n is a, c, g, or t
  misc_feature (165)..(173): n is a, c, g, or t
  misc_feature (175)..(175): n is a, c, g, or t
  misc_feature (177)..(184): n is a, c, g, or t
  misc_feature (186)..(190): n is a, c, g, or t
  misc_feature (192)..(192): n is a, c, g, or t
  misc_feature (194)..(195): n is a, c, g, or t
  misc_feature (197)..(271): n is a, c, g, or t
  misc_feature (273)..(280): n is a, c, g, or t
  misc_feature (283)..(283): n is a, c, g, or t
  misc_feature (285)..(285): n is a, c, g, or t
  misc_feature (287)..(287): n is a, c, g, or t
  misc_feature (289)..(290): n is a, c, g, or t
  misc_feature (294)..(294): n is a, c, g, or t
  misc_feature (296)..(301): n is a, c, g, or t
  misc_feature (303)..(303): n is a, c, g, or t
  misc_feature (305)..(313): n is a, c, g, or t
  misc_feature (317)..(323): n is a, c, g, or t
  misc_feature (325)..(330): n is a, c, g, or t
  misc_feature (332)..(335): n is a, c, g, or t
  misc_feature (337)..(361): n is a, c, g, or t
  misc_feature (363)..(363): n is a, c, g, or t
  misc_feature (365)..(382): n is a, c, g, or t
  misc_feature (384)..(388): n is a, c, g, or t
  misc_feature (391)..(391): n is a, c, g, or t
  misc_feature (393)..(398): n is a, c, g, or t
  misc_feature (400)..(400): n is a, c, g, or t
  misc_feature (402)..(407): n is a, c, g, or t
  misc_feature (409)..(416): n is a, c, g, or t
  misc_feature (418)..(430): n is a, c, g, or t
  misc_feature (432)..(437): n is a, c, g, or t
  misc_feature (439)..(443): n is a, c, g, or t
  misc_feature (445)..(445): n is a, c, g, or t
  misc_feature (447)..(465): n is a, c, g, or t
  misc_feature (467)..(472): n is a, c, g, or t
  misc_feature (474)..(487): n is a, c, g, or t
  misc_feature (489)..(495): n is a, c, g, or t
  misc_feature (497)..(504): n is a, c, g, or t
  misc_feature (506)..(509): n is a, c, g, or t
  misc_feature (511)..(526): n is a, c, g, or t
  misc_feature (528)..(587): n is a, c, g, or t
  misc_feature (589)..(591): n is a, c, g, or t
  misc_feature (593)..(593): n is a, c, g, or t
  misc_feature (595)..(595): n is a, c, g, or t
  misc_feature (597)..(597): n is a, c, g, or t
  misc_feature (599)..(599): n is a, c, g, or t
  misc_feature (601)..(650): n is a, c, g, or t
  misc_feature (652)..(681): n is a, c, g, or t
  misc_feature (686)..(689): n is a, c, g, or t
  misc_feature (691)..(692): n is a, c, g, or t
  misc_feature (694)..(699): n is a, c, g, or t
  misc_feature (701)..(701): n is a, c, g, or t
  misc_feature (703)..(703): n is a, c, g, or t
  misc_feature (705)..(705): n is a, c, g, or t
  misc_feature (707)..(716): n is a, c, g, or t
  misc_feature (718)..(720): n is a, c, g, or t
  misc_feature (722)..(722): n is a, c, g, or t
  misc_feature (724)..(724): n is a, c, g, or t
  misc_feature (726)..(766): n is a, c, g, or t
  misc_feature (768)..(770): n is a, c, g, or t
  misc_feature (775)..(779): n is a, c, g, or t
  misc_feature (781)..(783): n is a, c, g, or t
  misc_feature (787)..(787): n is a, c, g, or t
  misc_feature (789)..(791): n is a, c, g, or t
  misc_feature (793)..(794): n is a, c, g, or t
  misc_feature (797)..(797): n is a, c, g, or t
  misc_feature (799)..(799): n is a, c, g, or t
  misc_feature (801)..(803): n is a, c, g, or t
  misc_feature (807)..(811): n is a, c, g, or t
  misc_feature (814)..(826): n is a, c, g, or t
  misc_feature (828)..(831): n is a, c, g, or t
  misc_feature (833)..(833): n is a, c, g, or t
  misc_feature (835)..(841): n is a, c, g, or t
  misc_feature (843)..(843): n is a, c, g, or t
  misc_feature (845)..(845): n is a, c, g, or t
  misc_feature (847)..(847): n is a, c, g, or t
  misc_feature (849)..(851): n is a, c, g, or t
  misc_feature (853)..(854): n is a, c, g, or t
  misc_feature (856)..(856): n is a, c, g, or t
  misc_feature (858)..(858): n is a, c, g, or t
  misc_feature (860)..(860): n is a, c, g, or t
  misc_feature (862)..(862): n is a, c, g, or t
  misc_feature (864)..(870): n is a, c, g, or t
  misc_feature (872)..(881): n is a, c, g, or t
  misc_feature (883)..(887): n is a, c, g, or t
  misc_feature (889)..(890): n is a, c, g, or t
  misc_feature (892)..(902): n is a, c, g, or t
  misc_feature (904)..(917): n is a, c, g, or t
  misc_feature (919)..(927): n is a, c, g, or t
  misc_feature (929)..(929): n is a, c, g, or t
  misc_feature (931)..(933): n is a, c, g, or t
  misc_feature (935)..(939): n is a, c, g, or t
  misc_feature (941)..(941): n is a, c, g, or t
  misc_feature (943)..(943): n is a, c, g, or t
  misc_feature (945)..(945): n is a, c, g, or t
  misc_feature (947)..(947): n is a, c, g, or t
  misc_feature (949)..(949): n is a, c, g, or t
  misc_feature (951)..(951): n is a, c, g, or t
  misc_feature (953)..(953): n is a, c, g, or t
  misc_feature (955)..(960): n is a, c, g, or t
  misc_feature (964)..(964): n is a, c, g, or t
  misc_feature (966)..(966): n is a, c, g, or t
  misc_feature (968)..(971): n is a, c, g, or t
  misc_feature (973)..(973): n is a, c, g, or t
  misc_feature (975)..(977): n is a, c, g, or t
  misc_feature (979)..(988): n is a, c, g, or t
  misc_feature (991)..(1000): n is a, c, g, or t
  misc_feature (1002)..(1002): n is a, c, g, or t
  misc_feature (1004)..(1004): n is a, c, g, or t
  misc_feature (1006)..(1006): n is a, c, g, or t
  misc_feature (1008)..(1028): n is a, c, g, or t
  misc_feature (1030)..(1035): n is a, c, g, or t
  misc_feature (1037)..(1037): n is a, c, g, or t
  misc_feature (1039)..(1040): n is a, c, g, or t
  misc_feature (1042)..(1043): n is a, c, g, or t
  misc_feature (1045)..(1050): n is a, c, g, or t
  misc_feature (1052)..(1052): n is a, c, g, or t
  misc_feature (1055)..(1061): n is a, c, g, or t
  misc_feature (1063)..(1063): n is a, c, g, or t
  misc_feature (1065)..(1065): n is a, c, g, or t
  misc_feature (1067)..(1087): n is a, c, g, or t
  misc_feature (1089)..(1093): n is a, c, g, or t
  misc_feature (1095)..(1103): n is a, c, g, or t
  misc_feature (1108)..(1108): n is a, c, g, or t
  misc_feature (1111)..(1113): n is a, c, g, or t
  misc_feature (1115)..(1115): n is a, c, g, or t
  misc_feature (1117)..(1117): n is a, c, g, or t
  misc_feature (1119)..(1123): n is a, c, g, or t
  misc_feature (1127)..(1131): n is a, c, g, or t
  misc_feature (1133)..(1136): n is a, c, g, or t
  misc_feature (1138)..(1138): n is a, c, g, or t
  misc_feature (1141)..(1150): n is a, c, g, or t
  misc_feature (1152)..(1152): n is a, c, g, or t
  misc_feature (1158)..(1158): n is a, c, g, or t
  misc_feature (1160)..(1173): n is a, c, g, or t
  misc_feature (1175)..(1175): n is a, c, g, or t
  misc_feature (1179)..(1179): n is a, c, g, or t
  misc_feature (1181)..(1183): n is a, c, g, or t
  misc_feature (1189)..(1196): n is a, c, g, or t
  misc_feature (1198)..(1198): n is a, c, g, or t
  misc_feature (1200)..(1208): n is a, c, g, or t
  misc_feature (1211)..(1211): n is a, c, g, or t
  misc_feature (1213)..(1213): n is a, c, g, or t
  misc_feature (1215)..(1217): n is a, c, g, or t
  misc_feature (1219)..(1219): n is a, c, g, or t
  misc_feature (1221)..(1222): n is a, c, g, or t
  misc_feature (1224)..(1228): n is a, c, g, or t
  misc_feature (1230)..(1230): n is a, c, g, or t
  misc_feature (1232)..(1232): n is a, c, g, or t
  misc_feature (1234)..(1237): n is a, c, g, or t
  misc_feature (1239)..(1239): n is a, c, g, or t
  misc_feature (1241)..(1241): n is a, c, g, or t
  misc_feature (1243)..(1249): n is a, c, g, or t
  misc_feature (1251)..(1254): n is a, c, g, or t
  misc_feature (1257)..(1261): n is a, c, g, or t
  misc_feature (1263)..(1263): n is a, c, g, or t
  misc_feature (1265)..(1274): n is a, c, g, or t
  misc_feature (1277)..(1280): n is a, c, g, or t
  misc_feature (1282)..(1289): n is a, c, g, or t
  misc_feature (1291)..(1297): n is a, c, g, or t
  misc_feature (1299)..(1323): n is a, c, g, or t
  misc_feature (1325)..(1325): n is a, c, g, or t
  misc_feature (1327)..(1327): n is a, c, g, or t
  misc_feature (1329)..(1339): n is a, c, g, or t
  misc_feature (1341)..(1341): n is a, c, g, or t
  misc_feature (1343)..(1344): n is a, c, g, or t
  misc_feature (1346)..(1362): n is a, c, g, or t
  misc_feature (1364)..(1370): n is a, c, g, or t
  misc_feature (1372)..(1379): n is a, c, g, or t
  misc_feature (1381)..(1392): n is a, c, g, or t
  misc_feature (1394)..(1397): n is a, c, g, or t
  misc_feature (1399)..(1401): n is a, c, g, or t
  misc_feature (1403)..(1403): n is a, c, g, or t
  misc_feature (1405)..(1405): n is a, c, g, or t
  misc_feature (1408)..(1408): n is a, c, g, or t
  misc_feature (1410)..(1412): n is a, c, g, or t
  misc_feature (1414)..(1414): n is a, c, g, or t
  misc_feature (1416)..(1418): n is a, c, g, or t
  misc_feature (1420)..(1430): n is a, c, g, or t
  misc_feature (1432)..(1452): n is a, c, g, or t
  misc_feature (1454)..(1466): n is a, c, g, or t
  misc_feature (1468)..(1468): n is a, c, g, or t
  misc_feature (1471)..(1481): n is a, c, g, or t
  misc_feature (1483)..(1490): n is a, c, g, or t
  misc_feature (1492)..(1508): n is a, c, g, or t
  misc_feature (1510)..(1515): n is a, c, g, or t
  misc_feature (1517)..(1524): n is a, c, g, or t
  misc_feature (1526)..(1531): n is a, c, g, or t
  misc_feature (1533)..(1534): n is a, c, g, or t
  misc_feature (1536)..(1536): n is a, c, g, or t
  misc_feature (1538)..(1544): n is a, c, g, or t
  misc_feature (1546)..(1554): n is a, c, g, or t
  misc_feature (1556)..(1556): n is a, c, g, or t
  misc_feature (1558)..(1564): n is a, c, g, or t
  misc_feature (1568)..(1570): n is a, c, g, or t
  misc_feature (1575)..(1575): n is a, c, g, or t
  misc_feature (1578)..(1578): n is a, c, g, or t
  misc_feature (1581)..(1581): n is a, c, g, or t
  misc_feature (1584)..(1584): n is a, c, g, or t
  misc_feature (1587)..(1589): n is a, c, g, or t
  misc_feature (1591)..(1591): n is a, c, g, or t
  misc_feature (1597)..(1598): n is a, c, g, or t
  misc_feature (1600)..(1617): n is a, c, g, or t
  misc_feature (1619)..(1623): n is a, c, g, or t
  misc_feature (1625)..(1631): n is a, c, g, or t
  misc_feature (1633)..(1633): n is a, c, g, or t
  misc_feature (1635)..(1643): n is a, c, g, or t
  misc_feature (1650)..(1658): n is a, c, g, or t
  misc_feature (1660)..(1660): n is a, c, g, or t
  misc_feature (1664)..(1665): n is a, c, g, or t
  misc_feature (1668)..(1668): n is a, c, g, or t
  misc_feature (1670)..(1670): n is a, c, g, or t
  misc_feature (1672)..(1676): n is a, c, g, or t
  misc_feature (1678)..(1678): n is a, c, g, or t
  misc_feature (1680)..(1680): n is a, c, g, or t
  misc_feature (1682)..(1684): n is a, c, g, or t
  misc_feature (1686)..(1686): n is a, c, g, or t
  misc_feature (1689)..(1689): n is a, c, g, or t
  misc_feature (1695)..(1695): n is a, c, g, or t
  misc_feature (1698)..(1698): n is a, c, g, or t
  misc_feature (1700)..(1700): n is a, c, g, or t
  misc_feature (1702)..(1703): n is a, c, g, or t
  misc_feature (1707)..(1707): n is a, c, g, or t
  misc_feature (1709)..(1712): n is a, c, g, or t
  misc_feature (1714)..(1714): n is a, c, g, or t
  misc_feature (1716)..(1716): n is a, c, g, or t
  misc_feature (1718)..(1718): n is a, c, g, or t
  misc_feature (1720)..(1721): n is a, c, g, or t
  misc_feature (1723)..(1723): n is a, c, g, or t
  misc_feature (1725)..(1725): n is a, c, g, or t
  misc_feature (1727)..(1727): n is a, c, g, or t
  misc_feature (1729)..(1729): n is a, c, g, or t
  misc_feature (1731)..(1732): n is a, c, g, or t
  misc_feature (1734)..(1737): n is a, c, g, or t
  misc_feature (1739)..(1741): n is a, c, g, or t
  misc_feature (1743)..(1743): n is a, c, g, or t
  misc_feature (1746)..(1748): n is a, c, g, or t
  misc_feature (1750)..(1750): n is a, c, g, or t
  misc_feature (1752)..(1753): n is a, c, g, or t
  misc_feature (1878)..(1878): n is a, c, g, or t
  misc_feature (1985)..(1985): n is a, c, g, or t
  misc_feature (1987)..(1987): n is a, c, g, or t
  misc_feature (1992)..(1992): n is a, c, g, or t
  misc_feature (2008)..(2008): n is a, c, g, or t
  misc_feature (2861)..(2861): n is a, c, g, or t
  misc_feature (2982)..(2982): n is a, c, g, or t
  misc_feature (3980)..(3980): n is a, c, g, or t
annnnnnnnaanngnnnnannnnnnnnnnnnnnnnnnnnanannnnnnnnnannnanaanannnnnnannannnnnnannnanannnnnnanagcnnanannnnnnnnnnnnnananananananaaannnannannnnnnnnananannnnnnnnnnnnnnnannnnnnnnnanannnnnnnnannnnncncnnannnnnnnnnnnnnnnnnnnnnnnnnnnnnnnnnnnnnnnnnnnnnnnnnnnnnnnnnnnnnnnnnnnnnnnnnnnannnnnnnnaanananannaaanannnnnnanannnnnnnnnaaannnnnnnannnnnntnnnnannnnnnnnnnnnnnnnnnnnnnnnnanannnnnnnnnnnnnnnnnnannnnnaanannnnnntntnnnnnnannnnnnnnannnnnnnnnnnnnannnnnnannnnngngnnnnnnnnnnnnnnnnnnngnnnnnngnnnnnnnnnnnnnnannnnnnngnnnnnnnngnnnnannnnnnnnnnnnnnnngnnnnnnnnnnnnnnnnnnnnnnnnnnnnnnnnnnnnnnnnnnnnnnnnnnnnnnnnnnnntnnnananananannnnnnnnnnnnnnnnnnnnnnnnnnnnnnnnnnnnnnnnnnnnnnnnnntnnnnnnnnnnnnnnnnnnnnnnnnnnnnnnaaaannnntnntnnnnnncncncncnnnnnnnnnnannnananannnnnnnnnnnnnnnnnnnnnnnnnnnnnnnnnnnnnnnnncnnnccccnnnnntnnntctntnnncnnttncncnnncgcnnnnnccnnnnnnnnnnnnncnnnntntnnnnnnnanancncnnncnncncncncncnnnnnnncnnnnnnnnnntnnnnnanncnnnnnnnnnnnannnnnnnnnnnnnntnnnnnnnnnanannntnnnnntntntntncncncncnnnnnnctcncntnnnncncnnncnnnnnnnnnntgnnnnnnnnnnanananannnnnnnnnnnnnnnnnnnnncnnnnnnananncnntnnnnnnanaannnnnnngngngnnnnnnnnnnnnnnnnnnnnncnnnnngnnnnnnnnnacacncannnananannnnncccnnnnngnnnnanatnnnnnnnnnnanatatanannnnnnnnnnnnnncncccncnnnctctcnnnnnnnncncnnnnnnnnnaananannngngnngnnnnnanancnnnntntntnnnnnnnannnnaannnnncncnnnnnnnnnnccnnnncnnnnnnnncnnnnnnnannnnnnnnnnnnnnnnnnnnnnnnnananannnnnnnnnnnanannannnnnnnnnnnnnnnnnannnnnnncnnnnnnnncnnnnnnnnnnnngnnnntnnntntntcncnnncncnnncnnnnnnnnnnnannnnnnnnnnnnnnnnnnnnnannnnnnnnnnnnntntgnnnnnnnnnnncnnnnnnnngnnnnnnnnnnnnnnnnncnnnnnngnnnnnnnncnnnnnngnncngnnnnnnncnnnnnnnnngngnnnnnnntttnnnttttnttnttnttnttnnntntttttnntnnnnnnnnnnnnnnnnnntnnnnncnnnnnnnanannnnnnnnnctctctnnnnnnnnntntttnnttntntnnnnnanantnnnanaanaaaaanaanananngaanannnnanancncnnantntntntnntnnnnannntnttnnnanannacacacacacacacacacacacacacacacacacacacacgtgataataataataataatactgatgatgacgagagtactaatgacgccgacaaggacgaggtttttggcgcttaaaacacatnatcatccttggataatgttgttctcattgttggtgttccaaaattgttctcttttttcttttccaataacatcagtcaatgcgttgggttgcgagtgcacgggagangngtttntcgtctcgggcgtttncttgggcagccgatgcgccgagtggggggataaaaacgcaatctgcgcggatcaaacgacggtcacggacgagtgctgcaaaccgtggtgttgggtgtcacaaacagattgtccttctgcgaggtataacaaacaggcggataaatatttttcgtacgacgcgtgcggggcgacgtgcgcgaacgaccattgcggagaggagaagacgtatgtagataccagaggagcaatcgtgtgcgaatcggaatatcaaaacacgtgggttcgatatcgaatgtcgtcgtggatattcattattcccttgttttgtttgttttcttcgttacggtaccagcaatcacggaggcggatgttgctttgtcaaaaccagttacaaggcggcggttcgccatatggtcaagcgtcagcgggggtgtggagaggacagaattttggtctgcagaataactttacgacgccgcaagggcaggcggtatacatcgtcggcgcgaacgggcgattaacgccgctacagaattcgaacgcggctaatcaaccgcaattttatcaagggggaaacccagcgcaagaggtgaggagacaacagaatcagccgagaagcggcggcatgttagacgcgttgtttggtagagccaacagaggtggtggtggtggtggcgtgcaatcgcaacaacaaccacgcgcggcggcggcaacatctgttgttccggaaatgtcgcccgtgagtagagaaccggcgtacgcacctccgtcgaattattacggcaacgaaaaccaagcgagacgaaatcaagcggtgaccgataattctccgcaacaagcgtatccgactgtttaaaagtaaatatcaatnaccatgatgcttgaagtaggaagaaacttgattaacgatgatgtttttatatgtaataagatttgtatatgagatatttaaagtacgcgtacaacggcagcagtatctagatgaaatttanaatcgctcttttcttttccttccggtatatttagaatcgtttgccacctggacgcctcgattcctcatctgttttttcttcttcatcacccacgctttccctttcccttccgggtgtgattttgagcccacatatatcgttctcgcgtgcttatctcctttcctcttcttcttcacacctaatccgaattcgctattattgttattgttatgtttgaacttgttcttcccgcctcctctcccgacgacgtcttgtttcgcgttggcgtagtcattcgcctcgtccgtctttgccgtcggcatcgagtccggcggtccagccgccaagaccaaaaaatatttcttcgctctcgtcgagtttggataatctacgactaaaccaccgctaaaaccaactctcaacgcactactcgcaatcatctccgcctgcctcgcgttctccggataaaactgaaacgcgcacttcgcgcctcgtttcaagcacctatacgtttgcgaaaagaacgctttcaatcgtttcctcgggtcgtgttcgctcttatccgcgttgcacaaccactgaatcgcggatatagagacgcacccgtcgaacactcccggacgaaacggtaccccgtggccgatatctgactcgaaaacgtctccttccacttctcgctccaccgcgtgattcaacatccctctggagatgtctaccccgacccaatgatgcccgagctcggttaaccgatccccggataagccggacccgcacccgacgtctaacaaaaatctcggcacatcgtccctcgggaagtttaataactccaacgctctctccgtcaatctttcttggatttcaatcaccctcgacgaggcggtgtacttctttgcctcggcggcgtcgtagaaatactccgccggggcggtcagttctggtcgagacattactaatttgcgtttgttgaacaaagagtgaacaaagacaaatgatgatgatgatgcgggtacaaatagtanagaagtatatatatacgcga

SEQ ID NO: 1553 - DNA, 4000 bp, Escherichia coli
  misc_feature (214)..(214): n is a, c, g, or t
  misc_feature (396)..(396): n is a, c, g, or t
  misc_feature (439)..(439): n is a, c, g, or t
  misc_feature (459)..(459): n is a, c, g, or t
  misc_feature (483)..(483): n is a, c, g, or t
  misc_feature (501)..(502): n is a, c, g, or t
  misc_feature (1331)..(1331): n is a, c, g, or t
  misc_feature (1412)..(1412): n is a, c, g, or t
  misc_feature (1438)..(1438): n is a, c, g, or t
  misc_feature (2028)..(2028): n is a, c, g, or t
  misc_feature (2890)..(2890): n is a, c, g, or t
  misc_feature (3054)..(3054): n is a, c, g, or t
  misc_feature (3240)..(3240): n is a, c, g, or t
tcctgcatcaacgacttctcccacaaaaatggaatggtctccttcctccacagttgttacaagtctgcattcaacgaaagcaggtgtgttctccaaaactggtgctccggtacttcctgcatgaaatggctcgccgcttattttttgtccgtctctttcagccggtttgaaaaacgcataggccgcaccctgttgtcccttgcccaaaacattnagtgcaaaatttccggctgttttaataatgtcatgtatctgggaatcagctttaacaccgacagcaaccaggggcggtttgaacgaagcctgtgtgacccagttcacagtagcagccgaaattcgaccatctttgtcttcggctgtcataacgtaaagtccataaggaatcatccgcaatgnggtttttttagcattctcatccataaagcctccttttgagaanaatagaaaaaagttgaaacngcagtgtttcagaaatgagttagntttgtcaagttaagttgnngagacacttggattttgcacatattcacttcggcagtttagcaggaaatattccgcagcgaacaatactttttgatcggtgtcaatcagcaggcttaagtaaaatttttccaatgtgggcactgctttccatcaggcgatgtgcttctgacgcttgtttgagcggaaatgtttgatggatgatcggtcggatagctccggattccagcaatggccaaacgtttttttgcagggcctgagcgattttagttttttcttcaacgctgcggggacgcaaggtggagccggtcaaggttacacgtttgagcagtaaggagcgaaaatcaacttctgctttgctgccctgcatcagagcgatttgcactaaccgaccttcgtcggccagcaaccggatgttttttggaaagtatgggccgccaaccatgtcaaggatcacatttacgccttttccttcagtcaagcgtttgatttcttcggagaaatcctgttctctgtaattgatggcagcatcggcaccaagattattacaaaactcacatttatccgaagttcctgcagtggtgtaaacagttgccccaaaggcttttccgagttgaatggcagttgttcctattccactgctaccgccgtgtaccaacagactttctccggctttgagttgtccgcgtttaaagacatttgtccagacggtgaaaaaggtttccggaattcccgcggcatttactagcgaaattttttccggaaccggcaagcaaatcgaggctgccgccagacaatattccgcataaccgccgcaggtcacgagggcacaaacttcagaattgatgggnggctcgctgacgttttgacccacactcactacagttccggaaacctccagtccgggaacatcggttgcgccgggaggcggnggataaagccctttgcgctgcatcangtccggacggttgactcccgccgccgcgaccttaatcagtacttcaccggggcctggttccggaaccggcatcgaatgcagttttaatacttcaggatccccatgtttttcgatctgaatgtagttcattgattgtggtatgttgttcatgaaaactccgaaaataaagtaaacttagtcaactgtatcaatatgaccttatttctttttaaaattatttagtgccagattgagttgtgatttgctccaactttaacaatcgttttttaatcggcagtccgccggcatatccgacaagctctccattacttccaattatacgatgacagggaattatgattgccatcgagtttgcgccattagcagcggcaactgctctgaccgctttttcattctttatatttttggccaactgcaaataagttgacgtagttccaaaaggaactctcagtaaagcttcccagacacttttttgaaaatccgttcctaccatttgtagagggacatcaaactcttttctgttgccatgaaaatattcatcaagctctgcccgggttttttctataatttccgtgttattttctacaaanttggcatttagtccttttttaattctttcatcaacggattttctcatttttctgtatctaaaatcaagcagacaaagtttgccttcgaaggagcctaaaatcagttcaccaatttttgttttacaatattgtatgttgataaatttcatagtttcagaagagtccaaacgtttgagagttttcagtcaatcctatgtatattcaccggaatgactattcgaaatgataaaaaccaataacagcagtgccagtgtactcaacaaataaagtggtattacttcaagtccaaagattcttgccagcacacctgcaattgaaggaaccacagccacccccaaacctgctgcggcaatctgcattccaattgtattggcctgatgccggaaccctacacgacttgttgtgctggaaaccagtccgggaaatattggtgcgatcgcaaaaccggctaaagtgactccaagaattgttattataagactggaatctgccagcagcagagctactccgaaaagtgccagtgagatactcaagtaaattagtttgcgaatgtctatcattttagcgtaccatcccgcaaaaatacggccgacagtaaacattgcccagtaacctccggttacaattccagcaacttccggagcaactccacgggattctgtcaaaagtgagtaaatccaaagccctaaacccaattctacacctgtataaagaaaaaacaatgccacacttaagagtacctgaattgattttatagtttcactgagggaagcattattctcatcgtgatcttcttctctactactggctgaaataccttcccacatgtctttagtaaaaagaaaaattacggaaagaattnccattgccactgaaacaacaaaatatccgctttgccaatgggatgttgcgtttattcccattgtcattatgaatggaccggaggtaattcccacgccaaaacttgcgtgtaaccactgcatcattctggtactgtggtatttggcgatataggtatttattccngcatcaattgcaccggcaccaagtcctccaactgcagaaaaaataacgaaaacccaccagagaggagtaactgcataaactagtaatgtaccagccatggcagcacaactcagactcagcagcccaccgattcctaaatgtcgaatcagtagtccactcaaaaagcttgaaagcatgtatcctgcngttccgcagacaagaataattcctaaagcatcaactggcagttggaattggtgacgaatcccaggccatgccacgcccatgagtccgtctggtaagcccagggaaacaaaggcaaaaaaagagataataattaatcccatagattttagtgagagtttgactgtggttgaagcgagttttgtagctaattaaaaggataataaccgttaagatacttttgtatctattatattgtcattctgggcgaagtgccttccggtaactgaatcagacttgaaaagcgtgacgcctccggaagataaagcacacccttggcttgatagtcagctgggccgattgtgcgccgaccgctgccggctccctcgagttccttggctgccgccaggaacttgtggtcggcatagcgcaaaaataccaaacccaataccgggacagagtattcattggatgttaactcagaatttgcgcgcagttcatcggctgcttcccaaagtcgtgattcgatgttatttccgttttggttcatctgttctactaagtggttctacttattttaaaattcctccgtttcagtcactccgggaaaaaacttattatccggtaaatcagaaatatttgtctgcaatacaagatatcaagtcaacttgatctgacgggtttgaattgaatgtacggaattatggcgaaattagaccaatcttattgtagtgaaatctaatacatttcagcgggaatttcaatctaaaaggctagtgaagat

SEQ ID NO: 1554 - DNA, 4000 bp, Escherichia coli
  misc_feature (1976)..(1976): n is a, c, g, or t
  misc_feature (1988)..(1988): n is a, c, g, or t
tccaataaattttcaattgttggataaatatgataagtacaattattcataatttcaatatagcaattgcaaatttcttcaacaatgttttcatcattttgacagagatctaaaattctcactaatatagagtggtaattattatataattctattattggatgattttcactaatatcaatttcttcatttaattttatagtaaaaaagagagaaatatatgatataatatctatatatttttaaatattaatgtttatataataaaaatcaaataaattaataaatatatatatatatataataaataaatataaagaattatttatgaattattgataatttaccttgaatatcataagcaatattattaatattattatttggattattaatatattcatcactagttaacaattgtaatttttcaattaatggtaaatttaatttattaagatagtaatatagatcattttttgaaacatagattaaaatattacaaattgatttcaataaatcataaatatcctgatagttataaacattgattactttaatatagaaattgcaaaattcatcaagtaaatttgttaaatactttaatattaattataataataataaataaataaataaaataattaatatatatatatttcattaatttagttttaattttatttctaaataatataactattgtttaaatttttaccattccacaatatttagtaaattctaacaatgacgcaaatccttgatatctattactttcattttcaagaaatgatattaaataatttaattgttcattgatttcaatattattattaaatgaatattctgataaatcaccaattattctaataataacattatttattttttcattatttggaaagtagggtatcatttttacaatttctcttataatgttttgatggtcattgtttatattaaatataattgagtatagataaaataaatgaacttctatattgtttgaagtatcctcactgatttcattttgattagttttattgcaaagttcattttttaatgattcataaagggaatttaatatatcatattcatttagcattaaaaagcaattctgaaacataacttcaaaaacttctaatgaaatttcatcatcattattcattgatgtcaatttatataaatttaatgttttttcttgaaggacgctgtatgcctctacaaattgtggtttataattctgatatcctatgttatttaattgttcttgtaatatagtaaaaaatctatatgatatttcaatactatttggataaattgaatataattctattaatgaagctataataaatttaaaatcgttataatttttgattatggtataaatattatattcagcatatgtttcaaacattaaattatatattaataaaacttctttagatgatatatatttaatatgatttgataattcaaatattgtaggtgttatatagttcaataattctttattagtttctgatgaagtagatgaagaaattattaattcatttataatacttccaatgacttcatcaatttcatcattaattgcttcttttattatataattcattaatggagattttattatttttaatggttttatagccttatatcttatccaattgtatatacaattatttatatttgatttaagcctagagttattatctatatttattttatagaagttatgttaaaatttaaaaaacttattactttttactaatcatttaaatttcttttatttcttttttcaatttatatataaaaattcatacttgcttccattgaataataagataatatttcaacaatgttatttacgatattacttattaagacttcttcctttatttttgcttttctttcctatgtaatataataatagtaatataatattaatattaataataataataaaaaaaaaaaanaaaaaaaaaaangaagaaaaattaaaattttcaaacaaaataataaatatttaataaaaatattacaatatttacacttaattttaattgtttattatttagttcttcaggaatatatgctaaaaattgaaataatatacttgtcatttctgtatttttttcaaataattcacaaatttcttcaattggattattccaatcatcacataatattgccaaatcagataacgccaaacataattgcgttaaaattggatttgacttatctttattaatatataaaagataagtaattgaattcttcaattcgattgcatcttgttttaaatattgtaactcataaattatctagcattatttattattaattaatttatttatttacttatatatatattaaattttaaatttttaaattatttattatataataaaataatcattcaaataaaccttttgtcttaaagtttgagaagaaaatagttttaaatctagattttcctcattactttttaatatctcaagagacataaaccaagcattatcctttttaaaataattataaattaaattaatttataaatttattaattagtttttaaaattaatttaatttaagattaataaaaaatattattattattattattattattattattattattattattattattattattattattattattattattattattattattattattattattattattattattattattacgataatcttccagccattttaaatttgtttggtaagtatcataattatttgaattattcaaagaattaaaaataaaaagtagatgattataattttcatccatatccattattccagtagtcatagcgataaattgtacaaatatcaatgcttataaatatataatattaattattaaataaagaactgcaaatttatgtataaattctaaagaaaaaaacaatacttattaaatataactataaaaatgaattaatatcattgtttattattactttatttatattaaatctaaaataaaaatttaaataatatttattttcaaatttatattcttcatttattaatattattacataagttataataacattgttaatatgattgaaatattcatttaataaataaaatagaaaaactttttttctgaaaaatgttattactttatgtcctatcctatactaataataaataaatataaaataaaaataaaaatatttatacatattttttttattgataaggttcataaatatacggatcatttaatagatcattttaaaaataaattaattaatatatatatattatatattagaatataataaaatatattataaaatattattaattttagtataaatatttaatatctttagcaattatttaaaagaggagagcaatccaccataaaaaataaggtttttaataattactaataatttaataatttttttataaaaaaaattatatatatttaactgattttatactattaataattttctttaaatacaacaatattttaaattagtcaaaaagtaaagttggatcaaatagtaataaaaatggatgaagaatatgcccttgatgacatgggggataaagaagttttaattccaagaaaaaaaaaaggagaaaaagaaataaaagaattgcaacccaatttaaagaaagtaagagtacaatatatatatataaatatttatttttcatttgtttattattattttttttatcaaaggaatataaaaaattattttattttgtcttattttatattattaattttttttaatttattttgttttatttttattttgctttattttattttattttattttattcactatgtacttaaatttatatttttaatatttattttctttcattatattatattctctattatattatatattttattttattttattttattttattttattttattttattttattttattttattttattttattttattt

SEQ ID NO: 1555 - DNA, 4000 bp, Escherichia coli
  misc_feature (983)..(983): n is a, c, g, or t
  misc_feature (1008)..(1008): n is a, c, g, or t
  misc_feature (1154)..(1154): n is a, c, g, or t
  misc_feature (1181)..(1181): n is a, c, g, or t
  misc_feature (1185)..(1186): n is a, c, g, or t
  misc_feature (1190)..(1190): n is a, c, g, or t
  misc_feature (3834)..(3834): n is a, c, g, or t
  misc_feature (3891)..(3891): n is a, c, g, or t
  misc_feature (3942)..(3942): n is a, c, g, or t
  misc_feature (3960)..(3960): n is a, c, g, or t
aaggcataaaagggaaaaacccggttcgtgttattcttgattccagagcaacgatccgtgcaagctccaaaatcttaagaacatgttcaaaaattccaacaattatcgcagtgtcaaaaatggcaaagaaaaaaaacttagaaaaactaaaaaaatttccagtggtggtaaaagtttgtggaaataataaaataaacataaaaaaattacttaaatttctcaaagaaaaaaagataaaaaatcttttagttgagggaggcggaattacaaattggacatttgtaaaagaaaacctagttgacgaggcaataatcacaataactccttacattataggaggaaattcatctacaacattagtggatggtaacggtttttctattattgcaaaatcatcaagattgaggctaaaaaacgttacaagaatgaaaaacgaggttgtattacactatgagaattaagatggcatatctttttttatttcatcaattttcttcgcaaatgccttttttgccttctcatttttcttgtgatccaagatcttaccacatgaaggacatttgaaagactcttcaagtgcattttcaaatgtcagtctttcgcagtcttcatttccacaatgataaaactgcgatgaattttcataatctaatctttgctgaagtctctcagcaatcttctttttctgattctcaataaaattttcaacctcatctcttctagagcgccagcggtagacaaaccaaccttttctctcatcttttaccctaactcctgtaattagtgccttaccaaaaagatcatagagtacttttctaaccatgtttattcttaaaccagtatagcttgcaatttcctcatcagttgcatcttgtgcttttatcagtgatctagcaactttaagatattcatcaccaccaatcatttgtgagatttttacaaatggatcctcgtatttatcaatcaacgacgtccacactcanattctattattaatagttgttttantcatcctgacattttttccctgttcctgagggattatcactctttctgaattttcaaacttggattcaaactgatttccacactgaattcgatctaacaatactccgagagcgcttatttccgaatgtggttgattgcctattgcnacattataatctgccatctcaaaaatntccnntggnaccttctcagccccaactattattaagattttatcttcatttcgtaatttattttcaacgtcgttaatgcttagaccatacattgtaagatgaacaatttttacagactcctttttctttttcctgattatttttttccattccgtaatattttcaattgcaaaatttccaccccaggttttattaatcttggaaatcgtgtcattaatttcaggatttatttcattcatgtaaattcgtttagcaccaaatgatcttgcaaccagggcaacatgtgttgtaactctatcatctcttacaattcgttggccgattcttagcacctcaatttccatacgtttttacaccaacactcttattattttgcaatttattattttggaaaattttcccaattatttttttaagttcatccatgtttttacctgtaagagcagaaatggctatccattttttattttcttttagcattagataatctaccctatctaaaacctcatcatcagtcagtaattctgatttgtttaaaacgtaaatcatcttctccggctctacaccaatttcaattaaagttctataacaacttttgaattttttttgtaactcgtacaaaccgtcactcgcatcaattataactagtataatgtctgcatacaacagctcttctaatgtcgaattaaatgcctcaatcatatatgcggggatcttagtgataaatccaacagtgtctgaaatcagtgcaacttcgtgatttaccttaactcttctaacagtagttgaaagtgtagtaaaaagttcatcactttcttctttttgctctcctgttagaagattaaataatgttgtcttacctgctgaggtatatcctgctagtgatattattttaaaaccaagacgctttctgccttctctgtgcagtttacgttgtttgcctacctttactaattttgattttatatttatcatcctttttttaatttcgttatagtatacatcaacctcaaacgttcctagacccataaatccaggttgttcaccaccttttgataacttgactttttcttttgctcttgacatttcatatcgaagctgtgctaattctacctgaaactttgattctgcgttggcagctctactctcaaatatttttaaaatcaaagcctctctgtcaagtatttcaattttgagctctgaagctaggttataattctgtcttggttttaacatctcatcaaagattatgacatctggttttgcagcagcagtaatgtccttaagctcttgaatttttccagtgcttacaccaaattttggtttctgtaaaaaatcctgttttataatgtgctcaactttgtaacctgccgagtcacagagagctagcgcctcttttattacatcatcttggtcatatgttattaaaactgctgaattcatcgcaaaattttatgccttttgttttttgataatcttctctatattcatgtttaagacaatctcgccaacgtcacttgcatattcagcaattctttttacgttttcagaaattcttctaatcctaaaaacttcttcttcgttcttgtttattctaagaccctcaattatctttttttcatatttttctatatcgtttgcccttttaattgcattttcagcttcttcatagtcttttttgaataaggctaagcacgcatcatccattacagatatagcaaaatcactcatttctcgtatcatatcaaataacttgcctgtgataggttttttataatccaaaacatcttttgatattctgactgcatgatctgctagtctttcaatgttttttgtaataaccctatagccaaggcaatcgcgggcattttgaaatcccatttcctttaacatatggtcattttcaattgcaatcacaagctgtctagtaatataaaatgcaaatctgtctacatcatcatcactgttgataacctcttttgcaagttctacatttccttcttttattgcaatgagggcatcatcttgcattgatttagctagtagcatcatccttttgaaagcaccatcaactgagagctctaccaaatttattagaacttgaatggttatgccatctgaagaatcagcagtaatttcagaacccattaaaattttctttacagcatctctaattccaactctttgtgatggtgtgattcttcctatctttggtttaatattgattatcttaaaacgaaaaaagtatagtgacacaagctttcttacgacagaagacttatcctcctccggctcaatttctattgtagcaacttcagattcttctttttttctcgtacgatgcggcattatttgcaaacttgtagttccacttcgttcaactgatacctgatcaccctgttttagacccagttcattaacccattgttttggaagagaaataatgtaagtagatttgcccgtaaactggattttccgagtttcctcactatttgccataactatattcatcttatctgtctatatagattatttgatttctatacaaaatttaaactaatatttagatatcaggtatctgtttttgatggatcctattgtaaagcttaggcttagtattgatgcattatttgggcagggagtttcaaaacanctcccaaagaatattgagattttcttttcaaagagaactggacgaattcgtcaagtntaccataaacagaaacttctttgtacattgaaaattgacggtggactggcnatttcaccatattttgcncaaattcttatgaaaagtaaaaaattcagagaaaactgtg

SEQ ID NO: 1556 - DNA, 4000 bp, Escherichia coli
  misc_feature (418)..(418): n is a, c, g, or t
  misc_feature (420)..(444): n is a, c, g, or t
  misc_feature (447)..(447): n is a, c, g, or t
  misc_feature (450)..(451): n is a, c, g, or t
  misc_feature (454)..(454): n is a, c, g, or t
  misc_feature (456)..(458): n is a, c, g, or t
  misc_feature (460)..(462): n is a, c, g, or t
  misc_feature (465)..(468): n is a, c, g, or t
  misc_feature (470)..(487): n is a, c, g, or t
  misc_feature (490)..(490): n is a, c, g, or t
  misc_feature (492)..(494): n is a, c, g, or t
  misc_feature (496)..(496): n is a, c, g, or t
  misc_feature (499)..(499): n is a, c, g, or t
  misc_feature (501)..(502): n is a, c, g, or t
  misc_feature (504)..(511): n is a, c, g, or t
  misc_feature (513)..(514): n is a, c, g, or t
  misc_feature (516)..(517): n is a, c, g, or t
  misc_feature (519)..(523): n is a, c, g, or t
  misc_feature (525)..(530): n is a, c, g, or t
  misc_feature (532)..(535): n is a, c, g, or t
  misc_feature (537)..(537): n is a, c, g, or t
  misc_feature (539)..(544): n is a, c, g, or t
  misc_feature (546)..(547): n is a, c, g, or t
  misc_feature (549)..(554): n is a, c, g, or t
  misc_feature (556)..(558): n is a, c, g, or t
  misc_feature (560)..(560): n is a, c, g, or t
  misc_feature (562)..(563): n is a, c, g, or t
  misc_feature (565)..(567): n is a, c, g, or t
  misc_feature (569)..(570): n is a, c, g, or t
  misc_feature (572)..(576): n is a, c, g, or t
  misc_feature (578)..(580): n is a, c, g, or t
  misc_feature (582)..(586): n is a, c, g, or t
  misc_feature (588)..(589): n is a, c, g, or t
  misc_feature (592)..(593): n is a, c, g, or t
  misc_feature (595)..(595): n is a, c, g, or t
  misc_feature (600)..(608): n is a, c, g, or t
  misc_feature (610)..(611): n is a, c, g, or t
  misc_feature (614)..(619): n is a, c, g, or t
  misc_feature (621)..(629): n is a, c, g, or t
  misc_feature (631)..(631): n is a, c, g, or t
  misc_feature (637)..(639): n is a, c, g, or t
  misc_feature (642)..(645): n is a, c, g, or t
  misc_feature (647)..(650): n is a, c, g, or t
  misc_feature (652)..(653): n is a, c, g, or t
  misc_feature (656)..(656): n is a, c, g, or t
  misc_feature (659)..(659): n is a, c, g, or t
  misc_feature (661)..(663): n is a, c, g, or t
  misc_feature (665)..(671): n is a, c, g, or t
  misc_feature (674)..(675): n is a, c, g, or t
  misc_feature (678)..(678): n is a, c, g, or t
  misc_feature (682)..(682): n is a, c, g, or t
  misc_feature (684)..(684): n is a, c, g, or t
  misc_feature (686)..(686): n is a, c, g, or t
  misc_feature (688)..(706): n is a, c, g, or t
  misc_feature (708)..(711): n is a, c, g, or t
  misc_feature (714)..(715): n is a, c, g, or t
  misc_feature (721)..(727): n is a, c, g, or t
  misc_feature (733)..(733): n is a, c, g, or t
  misc_feature (735)..(736): n is a, c, g, or t
  misc_feature (739)..(741): n is a, c, g, or t
  misc_feature (743)..(745): n is a, c, g, or t
  misc_feature (747)..(747): n is a, c, g, or t
  misc_feature (749)..(749): n is a, c, g, or t
  misc_feature (754)..(758): n is a, c, g, or t
  misc_feature (760)..(760): n is a, c, g, or t
  misc_feature (762)..(762): n is a, c, g, or t
  misc_feature (765)..(765): n is a, c, g, or t
  misc_feature (770)..(770): n is a, c, g, or t
  misc_feature (773)..(773): n is a, c, g, or t
  misc_feature (775)..(775): n is a, c, g, or t
  misc_feature (777)..(777): n is a, c, g, or t
  misc_feature (779)..(779): n is a, c, g, or t
  misc_feature (781)..(782): n is a, c, g, or t
  misc_feature (785)..(786): n is a, c, g, or t
  misc_feature (790)..(791): n is a, c, g, or t
  misc_feature (796)..(800): n is a, c, g, or t
  misc_feature (802)..(802): n is a, c, g, or t
  misc_feature (805)..(805): n is a, c, g, or t
  misc_feature (807)..(808): n is a, c, g, or t
  misc_feature (812)..(812): n is a, c, g, or t
  misc_feature (816)..(816): n is a, c, g, or t
  misc_feature (818)..(818): n is a, c, g, or t
  misc_feature (822)..(822): n is a, c, g, or t
  misc_feature (824)..(825): n is a, c, g, or t
  misc_feature (828)..(828): n is a, c, g, or t
  misc_feature (832)..(832): n is a, c, g, or t
  misc_feature (835)..(835): n is a, c, g, or t
  misc_feature (837)..(838): n is a, c, g, or t
  misc_feature (840)..(843): n is a, c, g, or t
  misc_feature (845)..(850): n is a, c, g, or t
  misc_feature (853)..(861): n is a, c, g, or t
  misc_feature (863)..(863): n is a, c, g, or t
  misc_feature (865)..(892): n is a, c, g, or t
  misc_feature (894)..(894): n is a, c, g, or t
  misc_feature (896)..(897): n is a, c, g, or t
  misc_feature (901)..(906): n is a, c, g, or t
  misc_feature (908)..(910): n is a, c, g, or t
  misc_feature (912)..(915): n is a, c, g, or t
  misc_feature (917)..(919): n is a, c, g, or t
  misc_feature (922)..(931): n is a, c, g, or t
  misc_feature (933)..(939): n is a, c, g, or t
  misc_feature (941)..(948): n is a, c, g, or t
  misc_feature (950)..(951): n is a, c, g, or t
  misc_feature (953)..(953): n is a, c, g, or t
  misc_feature (957)..(960): n is a, c, g, or t
  misc_feature (962)..(962): n is a, c, g, or t
  misc_feature (964)..(976): n is a, c, g, or t
  misc_feature (978)..(984): n is a, c, g, or t
  misc_feature (986)..(988): n is a, c, g, or t
  misc_feature (990)..(993): n is a, c, g, or t
  misc_feature (995)..(1003): n is a, c, g, or t
  misc_feature (1005)..(1010): n is a, c, g, or t
  misc_feature (1012)..(1013): n is a, c, g, or t
  misc_feature (1015)..(1018): n is a, c, g, or t
  misc_feature (1020)..(1029): n is a, c, g, or t
  misc_feature (1032)..(1033): n is a, c, g, or t
  misc_feature (1035)..(1037): n is a, c, g, or t
  misc_feature (1039)..(1046): n is a, c, g, or t
  misc_feature (1049)..(1049): n is a, c, g, or t
  misc_feature (1052)..(1053): n is a, c, g, or t
  misc_feature (1055)..(1055): n is a, c, g, or t
  misc_feature (1057)..(1060): n is a, c, g, or t
  misc_feature (1062)..(1067): n is a, c, g, or t
  misc_feature (1069)..(1075): n is a, c, g, or t
  misc_feature (1077)..(1077): n is a, c, g, or t
  misc_feature (1079)..(1102): n is a, c, g, or t
  misc_feature (1104)..(1107): n is a, c, g, or t
  misc_feature (1109)..(1116): n is a, c, g, or t
  misc_feature (1118)..(1119): n is a, c, g, or t
  misc_feature (1121)..(1123): n is a, c, g, or t
  misc_feature (1125)..(1125): n is a, c, g, or t
  misc_feature (1127)..(1127): n is a, c, g, or t
  misc_feature (1129)..(1129): n is a, c, g, or t
  misc_feature (1131)..(1131): n is a, c, g, or t
  misc_feature (1133)..(1133): n is a, c, g, or t
  misc_feature (1135)..(1135): n is a, c, g, or t
  misc_feature (1137)..(1140): n is a, c, g, or t
  misc_feature (1142)..(1149): n is a, c, g, or t
  misc_feature (1151)..(1157): n is a, c, g, or t
  misc_feature (1159)..(1163): n is a, c, g, or t
  misc_feature (1165)..(1167): n is a, c, g, or t
  misc_feature (1169)..(1178): n is a, c, g, or t
  misc_feature (1180)..(1180): n is a, c, g, or t
  misc_feature (1182)..(1183): n is a, c, g, or t
  misc_feature (1185)..(1186): n is a, c, g, or t
  misc_feature (1188)..(1188): n is a, c, g, or t
  misc_feature (1190)..(1210): n is a, c, g, or t
  misc_feature (1213)..(1213): n is a, c, g, or t
  misc_feature (1216)..(1219): n is a, c, g, or t
  misc_feature (1221)..(1224): n is a, c, g, or t
  misc_feature (1227)..(1234): n is a, c, g, or t
  misc_feature (1238)..(1239): n is a, c, g, or t
  misc_feature (1241)..(1249): n is a, c, g, or t
  misc_feature (1251)..(1252): n is a, c, g, or t
  misc_feature (1255)..(1255): n is a, c, g, or t
  misc_feature (1257)..(1257): n is a, c, g, or t
  misc_feature (1259)..(1259): n is a, c, g, or t
  misc_feature (1261)..(1261): n is a, c, g, or t
  misc_feature (1263)..(1265): n is a, c, g, or t
  misc_feature (1269)..(1271): n is a, c, g, or t
  misc_feature (1273)..(1274): n is a, c, g, or t
  misc_feature (1276)..(1277): n is a, c, g, or t
  misc_feature (1279)..(1279): n is a, c, g, or t
  misc_feature (1281)..(1282): n is a, c, g, or t
  misc_feature (1284)..(1284): n is a, c, g, or t
  misc_feature (1286)..(1286): n is a, c, g, or t
  misc_feature (1288)..(1289): n is a, c, g, or t
  misc_feature (1291)..(1297): n is a, c, g, or t
  misc_feature (1299)..(1301): n is a, c, g, or t
  misc_feature (1303)..(1304): n is a, c, g, or t
  misc_feature (1306)..(1308): n is a, c, g, or t
  misc_feature (1310)..(1318): n is a, c, g, or t
  misc_feature (1320)..(1321): n is a, c, g, or t
  misc_feature (1324)..(1329): n is a, c, g, or t
  misc_feature (1331)..(1333): n is a, c, g, or t
  misc_feature (1335)..(1335): n is a, c, g, or t
  misc_feature (1337)..(1338): n is a, c, g, or t
  misc_feature (1341)..(1350): n is a, c, g, or t
  misc_feature (1352)..(1357): n is a, c, g, or t
  misc_feature (1359)..(1359): n is a, c, g, or t
  misc_feature (1361)..(1364): n is a, c, g, or t
  misc_feature (1366)..(1373): n is a, c, g, or t
  misc_feature (1376)..(1376): n is a, c, g, or t
  misc_feature (1378)..(1381): n is a, c, g, or t
  misc_feature (1383)..(1388): n is a, c, g, or t
  misc_feature (1390)..(1392): n is a, c, g, or t
  misc_feature (1394)..(1396): n is a, c, g, or t
  misc_feature (1398)..(1403): n is a, c, g, or t
  misc_feature (1405)..(1409): n is a, c, g, or t
  misc_feature (1411)..(1412): n is a, c, g, or t
  misc_feature (1414)..(1436): n is a, c, g, or t
  misc_feature (1438)..(1505): n is a, c, g, or t
  misc_feature (1507)..(1522): n is a, c, g, or t
  misc_feature (1524)..(1524): n is a, c, g, or t
  misc_feature (1526)..(1537): n is a, c, g, or t
  misc_feature (1539)..(1543): n is a, c, g, or t
  misc_feature (1545)..(1545): n is a, c, g, or t
  misc_feature (1548)..(1548): n is a, c, g, or t
  misc_feature (1550)..(1562): n is a, c, g, or t
  misc_feature (1567)..(1568): n is a, c, g, or t
  misc_feature (1571)..(1571): n is a, c, g, or t
  misc_feature (1573)..(1575): n is a, c, g, or t
  misc_feature (1577)..(1579): n is a, c, g, or t
  misc_feature (1582)..(1583): n is a, c, g, or t
  misc_feature (1586)..(1586): n is a, c, g, or t
  misc_feature (1588)..(1588): n is a, c, g, or t
  misc_feature (1591)..(1593): n is a, c, g, or t
  misc_feature (1597)..(1599): n is a, c, g, or t
  misc_feature (1601)..(1604): n is a, c, g, or t
  misc_feature (1606)..(1607): n is a, c, g, or t
  misc_feature (1609)..(1611): n is a, c, g, or t
  misc_feature (1613)..(1613): n is a, c, g, or t
  misc_feature (1616)..(1616): n is a, c, g, or t
  misc_feature (1618)..(1618): n is a, c, g, or t
  misc_feature (1621)..(1623): n is a, c, g, or t
  misc_feature (1626)..(1626): n is a, c, g, or t
  misc_feature (1628)..(1629): n is a, c, g, or t
  misc_feature (1631)..(1632): n is a, c, g, or t
  misc_feature (1637)..(1638): n is a, c, g, or t
  misc_feature (1640)..(1640): n is a, c, g, or t
  misc_feature (1642)..(1642): n is a, c, g, or t
  misc_feature (1644)..(1646): n is a, c, g, or t
  misc_feature (1648)..(1648): n is a, c, g, or t
  misc_feature (1650)..(1651): n is a, c, g, or t
  misc_feature (1654)..(1654): n is a, c, g, or t
  misc_feature (1657)..(1657): n is a, c, g, or t
  misc_feature (1660)..(1661): n is a, c, g, or t
  misc_feature (1663)..(1664): n is a, c, g, or t
  misc_feature (1666)..(1666): n is a, c, g, or t
  misc_feature (1668)..(1669): n is a, c, g, or t
  misc_feature (1671)..(1671): n is a, c, g, or t
  misc_feature (1676)..(1682): n is a, c, g, or t
  misc_feature (1684)..(1684): n is a, c, g, or t
  misc_feature (1687)..(1688): n is a, c, g, or t
  misc_feature (1691)..(1693): n is a, c, g, or t
  misc_feature (1695)..(1700): n is a, c, g, or t
  misc_feature (1702)..(1705): n is a, c, g, or t
  misc_feature (1708)..(1708): n is a, c, g, or t
  misc_feature (1712)..(1712): n is a, c, g, or t
  misc_feature (1714)..(1714): n is a, c, g, or t
  misc_feature (1716)..(1717): n is a, c, g, or t
  misc_feature (1719)..(1719): n is a, c, g, or t
  misc_feature (1721)..(1728): n is a, c, g, or t
  misc_feature (1730)..(1730): n is a, c, g, or t
  misc_feature (1732)..(1734): n is a, c, g, or t
  misc_feature (1736)..(1737): n is a, c, g, or t
  misc_feature (1739)..(1750): n is a, c, g, or t
  misc_feature (1752)..(1754): n is a, c, g, or t
  misc_feature (1756)..(1758): n is a, c, g, or t
  misc_feature (1795)..(1795): n is a, c, g, or t
  misc_feature (1860)..(1860): n is a, c, g, or t
  misc_feature (1863)..(1863): n is a, c, g, or t
  misc_feature (1979)..(1979): n is a, c, g, or t
  misc_feature (1988)..(1988): n is a, c, g, or t
  misc_feature (3024)..(3024): n is a, c, g, or t
  misc_feature (3129)..(3129): n is a, c, g, or t
  misc_feature (3135)..(3135): n is a, c, g, or t
  misc_feature (3138)..(3138): n is a, c, g, or t
  misc_feature (3141)..(3141): n is a, c, g, or t
  misc_feature (3195)..(3196): n is a, c, g, or t
  misc_feature (3219)..(3219): n is a, c, g, or t
  misc_feature (3222)..(3222): n is a, c, g, or t
  misc_feature (3306)..(3306): n is a, c, g, or t
  misc_feature (3816)..(3816): n is a, c, g, or t
  misc_feature (3957)..(3957): n is a, c, g, or t
ccaaatcagagcgcaaccctcggggcggttccgcgagataaactgggagccgcttcaggcatgtcagtgacgaccggccgaattggggtatcctgcggcgtggcgctttccacagcagtctttacttatgcgctgactcttacgggtctaacccgcagccagattgaatttcccgaggactggggtttgtttcccgatgaatttatgcgcgcgttcaaccatacagtccatgtcattaattctttcacgctgctctcgattgttttctccgcgtcgcgagggggccgcaaggattgacgtctattaaaacgctgatgccggatgataacgaacgatttcctcacttctccacggccgagtttgccttctcgaatttttcgacaaatgaattgtcgaaaaattcctttggattggtgcntnnnnnnnnnnnnnnnnnnnnnnnnntgngannctncnnntnnnccnnnntnnnnnnnnnnnnnnnnnncanannngnctngnnannnnnnnngnngnngnnnnncnnnnnntnnnntntnnnnnnannannnnnntnnntntnntnnncnntnnnnntnnngnnnnncnngcnntnttttnnnnnnnnngnnacnnnnnngnnnnnnnnntngctaannncgnnnntnnnntnnggnttntnnntnnnnnnnttnnccntcgntncntnnnnnnnnnnnnnnnnnnngnnnntcnnctttgnnnnnnncatgcntnnagnnngnnngnantcgannnnntncnggntgaanggngncntntnngtnnagcnngaagnnnnncntgnanngatngatnanagantnnctngacntcngnnannnnannnnnnccnnnnnnnnngngnnnnnnnnnnnnnnnnnnnnnnnnnnnncncnnccgnnnnnntnnngnnnncnnnttnnnnnnnnnntnnnnnnncnnnnnnnncnntntttnnnncnannnnnnnnnnnnncnnnnnnncnnntnnnngnnnnnnnnntnnnnnngnncnnnngnnnnnnnnnntgnnannngnnnnnnnncgnctnncngnnnntnnnnnncnnnnnnnanannnnnnnnnnnnnnnnnnnnnnnncnnnngnnnnnnnncnntnnntntngncntnantnnnnannnnnnnncnnnnnnntnnnnngnnnannnnnnnnnngngnngnncncnnnnnnnnnnnnnnnnnnnnnggnagnnnncnnnnagnnnnnnnnaggnncnnnnnnnnngnnttncnangngnnntctnnngnntnngnannangncnngnnnnnnntnnnannannnannnnnnnnngnnggnnnnnngnnngntnnaannnnnnnnnntnnnnnnantnnnnannnnnnnncancnnnntnnnnnngnnntnnngnnnnnnannnnngnncnnnnnnnnnnnnnnnnnnnnnnntnnnnnnnnnnnnnnnnnnnnnnnnnnnnnnnnnnnnnnnnnnnnnnnnnnnnnnnnnnnnnnnnnnnngnnnnnnnnnnnnnnnnanannnnnnnnnnnnannnnntnttngnnnnnnnnnnnnngaacnnagncnnncnnnaannaancncgnnnccannngnnnntnngnnncnagngngcnnnctngnnanngcganncngncnnncnanngcngtnttnngnngncnntntccgnnnnnnngntcnnatnnnannnnnngnnnngantttnananngncnnnnnnnncnannncnntnnnnnnnnnnnnannncnnntgatagagaatcgggctcccatcctcagtccgatctntgctcgggcagatcctttagcccatcaacgggcaacttccatattcccttctgccctacctatcnaantcatatagacgagggagagtcttaaaaattcggcaggcgatccagtggccgtaaacttgacgcatccaatgccgaaagctattgtcgatttgatgaaaaaaacgatcaacgtgacnattaacggncgcctgtacgaagaagacgtcgagccgcgtctgctgctttctcattttctccgcgagaatatcggcctcacgggaacgcatgtcggttgtgtcgtcggcgaatgcggtgcctgcacgattcttttggatggcaaactcgttaaatcatgccttcatttcgcggtccaggcggacggacgggaagtcacgaccgttgaaggattggctaaagatggcgagttgagcgtcgttcaagaagccttcgtcaagcactacgcgtttcaatgcggttactgcacccccggaatgatcatggcgagttacgcgctcttgcgcgatcatccgaatcccagcgagggagaaattcgcaaagcgctctccggcaatctttgcatgtgcacaggctacgtgcagatcgtcgaagccgtcaaagatgcagcacaaggactgaagaatggctaaattcgtaggcagccgcagtcgcagcaaggaaggtccccggcacgtcaccggtcgaggtctttatacggatgacttcatgctgccgggcatgcttcaggcgatgattttgcggagcccccacgctcacgcgaaaattgtttccatcgatccttcagaggcgctgaaaaatcccaacgtcatcacggtaatcactccggacgacgtcaagcaaagcacacgaccgttcaggcccggccggtatgccgctggactgaagcggcccatcgatgaatacgcgggcgccgtcgataaagtgcgctatgttggcgagcctgtaggggcggttgcggctcgagatcgcgggacggcggaagatgcgttggaattgatttcggttgagtacgagcctctccgttccgtggtggacgtgcgcgaagctattaagccttcctccgctgtcctgttcgatgaattgggcaccaacctggcatggcacggcgctttgaagtatggcgagatcgacggcgcattcaaatccgcggatcgaatcgtcaaggagaatttgaagattcaccgctacagctcgactcctctggagcctttcgccgtcatcgcntcctacgatgcagcgagcaaaagattgacggtttgggtcacggctcaggttcctgaggttatttacgatggactgcgcgaggcgctcggattgcaagacgttcgngtcatnatnccngacgtcggcggcgggtttggccaaaaaattcatttgattcgtaaatacgtcgtnntgatctctcttcttgcgatgaanagnggccggccggtcaaatggatcgaagaccgcagcgagcacatgatggccggcggccacgcctgcgctcaggaatttgaggccgangccgccgtgaaaaatgatggcacggttttgggtcttcgcttcaaggaatacgatgacgtgggcggctccatcagcaccctcacgatccacttcaccaacaaactgaacaacctttctaacacctaccgcacgccgaatatttcaatggaaggtttcgccgtcgtgacgaacaaatgcccggttattcccaatcgtggcatcggcaaaccgggcatgtgctttgtttgggaacgaatgatggatcgtgttgctcaggagctgaatctaagtcccatcgaagtacgccggaaaaacctgattcagcccaacgagatgccctacagcactgtgagcggcaacgtctatgatagcggcgactatccggggctgctgcaaggtctcttggaaaaaatagattacgataaactcagagaggaacaaaagcgtgaacgggaaaaagggcgtctcatcggcatcggcgtggttatcggcgtcgaacctggcggccgaaacgccgcccgtgacatggcnatctttcccgagatgaaggagccaccgggctccggcggcatcaatggcgcaaccatcaagcttgagaaaaacggcaccctcgcgcttcacctcggctcgcccaactgcggtcaggcccacgaaaccaccaccgcgcaagtngcggcggaagttctcgggacgactcccgaccgcatcagtacca

SEQ ID NO: 1557 - DNA, 4000 bp, Escherichia coli
  misc_feature (2)..(4): n is a, c, g, or t
  misc_feature (6)..(6): n is a, c, g, or t
  misc_feature (8)..(11): n is a, c, g, or t
  misc_feature (14)..(16): n is a, c, g, or t
  misc_feature (22)..(24): n is a, c, g, or t
  misc_feature (26)..(27): n is a, c, g, or t
  misc_feature (29)..(35): n is a, c, g, or t
  misc_feature (38)..(38): n is a, c, g, or t
  misc_feature (43)..(49): n is a, c, g, or t
  misc_feature (53)..(54): n is a, c, g, or t
  misc_feature (56)..(61): n is a, c, g, or t
  misc_feature (64)..(66): n is a, c, g, or t
  misc_feature (70)..(70): n is a, c, g, or t
  misc_feature (74)..(75): n is a, c, g, or t
  misc_feature (77)..(77): n is a, c, g, or t
  misc_feature (79)..(80): n is a, c, g, or t
  misc_feature (82)..(86): n is a, c, g, or t
  misc_feature (88)..(90): n is a, c, g, or t
  misc_feature (92)..(92): n is a, c, g, or t
  misc_feature (96)..(98): n is a, c, g, or t
  misc_feature (100)..(106): n is a, c, g, or t
  misc_feature (109)..(109): n is a, c, g, or t
  misc_feature (111)..(114): n is a, c, g, or t
  misc_feature (116)..(117): n is a, c, g, or t
  misc_feature (119)..(127): n is a, c, g, or t
  misc_feature (129)..(131): n is a, c, g, or t
  misc_feature (133)..(146): n is a, c, g, or t
  misc_feature (148)..(149): n is a, c, g, or t
  misc_feature (152)..(153): n is a, c, g, or t
  misc_feature (155)..(155): n is a, c, g, or t
  misc_feature (157)..(157): n is a, c, g, or t
  misc_feature (159)..(159): n is a, c, g, or t
  misc_feature (161)..(167): n is a, c, g, or t
  misc_feature (169)..(170): n is a, c, g, or t
  misc_feature (173)..(173): n is a, c, g, or t
  misc_feature (176)..(177): n is a, c, g, or t
  misc_feature (180)..(182): n is a, c, g, or t
  misc_feature (184)..(185): n is a, c, g, or t
  misc_feature (187)..(191): n is a, c, g, or t
  misc_feature (196)..(202): n is a, c, g, or t
  misc_feature (204)..(206): n is a, c, g, or t
  misc_feature (208)..(216): n is a, c, g, or t
  misc_feature (218)..(221): n is a, c, g, or t
  misc_feature (223)..(225): n is a, c, g, or t
  misc_feature (228)..(229): n is a, c, g, or t
  misc_feature (232)..(233): n is a, c, g, or t
  misc_feature (235)..(235): n is a, c, g, or t
  misc_feature (237)..(240): n is a, c, g, or t
  misc_feature (282)..(282): n is a, c, g, or t
  misc_feature (969)..(969): n is a, c, g, or t
  misc_feature (1014)..(1014): n is a, c, g, or t
  misc_feature (1209)..(1209): n is a, c, g, or t
  misc_feature (1230)..(1230): n is a, c, g, or t
  misc_feature (1976)..(1976): n is a, c, g, or t
  misc_feature (1983)..(1983): n is a, c, g, or t
  misc_feature (1991)..(1991): n is a, c, g, or t
  misc_feature (1997)..(1997): n is a, c, g, or t
  misc_feature (2408)..(2409): n is a, c, g, or t
  misc_feature (2411)..(2413): n is a, c, g, or t
  misc_feature (2415)..(2416): n is a, c, g, or t
  misc_feature (2418)..(2419): n is a, c, g, or t
  misc_feature (2424)..(2425): n is a, c, g, or t
  misc_feature (2427)..(2429): n is a, c, g, or t
  misc_feature (2432)..(2432): n is a, c, g, or t
  misc_feature (2437)..(2437): n is a, c, g, or t
  misc_feature (2439)..(2439): n is a, c, g, or t
  misc_feature (2443)..(2445): n is a, c, g, or t
  misc_feature (2447)..(2449): n is a, c, g, or t
  misc_feature (2451)..(2452): n is a, c, g, or t
  misc_feature (2454)..(2457): n is a, c, g, or t
  misc_feature (2459)..(2461): n is a, c, g, or t
  misc_feature (2463)..(2466): n is a, c, g, or t
  misc_feature (2468)..(2470): n is a, c, g, or t
  misc_feature (2473)..(2473): n is a, c, g, or t
  misc_feature (2475)..(2478): n is a, c, g, or t
  misc_feature (2480)..(2481): n is a, c, g, or t
  misc_feature (2484)..(2484): n is a, c, g, or t
  misc_feature (2487)..(2492): n is a, c, g, or t
  misc_feature (2494)..(2494): n is a, c, g, or t
  misc_feature (2496)..(2496): n is a, c, g, or t
  misc_feature (2498)..(2500): n is a, c, g, or t
  misc_feature (2505)..(2506): n is a, c, g, or t
  misc_feature (2509)..(2511): n is a, c, g, or t
  misc_feature (2513)..(2515): n is a, c, g, or t
  misc_feature (2518)..(2522): n is a, c, g, or t
  misc_feature (2524)..(2524): n is a, c, g, or t
  misc_feature (2526)..(2528): n is a, c, g, or t
  misc_feature (2530)..(2531): n is a, c, g, or t
  misc_feature (2536)..(2536): n is a, c, g, or t
  misc_feature (2538)..(2538): n is a, c, g, or t
  misc_feature (2540)..(2544): n is a, c, g, or t
  misc_feature (2546)..(2564): n is a, c, g, or t
  misc_feature (2566)..(2567): n is a, c, g, or t
  misc_feature (2570)..(2582): n is a, c, g, or t
  misc_feature (2584)..(2596): n is a, c, g, or t
  misc_feature (2598)..(2601): n is a, c, g, or t
  misc_feature (2603)..(2603): n is a, c, g, or t
  misc_feature (2605)..(2606): n is a, c, g, or t
  misc_feature (2609)..(2609): n is a, c, g, or t
  misc_feature (2612)..(2612): n is a, c, g, or t
  misc_feature (2616)..(2616): n is a, c, g, or t
  misc_feature (2618)..(2619): n is a, c, g, or t
  misc_feature (2621)..(2625): n is a, c, g, or t
  misc_feature (2628)..(2630): n is a, c, g, or t
  misc_feature (2632)..(2634): n is a, c, g, or t
  misc_feature (2637)..(2637): n is a, c, g, or t
  misc_feature (2639)..(2643): n is a, c, g, or t
  misc_feature (2645)..(2647): n is a, c, g, or t
  misc_feature (2649)..(2650): n is a, c, g, or t
  misc_feature (2655)..(2657): n is a, c, g, or t
  misc_feature (2659)..(2659): n is a, c, g, or t
  misc_feature (2661)..(2662): n is a, c, g, or t
  misc_feature (2665)..(2665): n is a, c, g, or t
  misc_feature (2667)..(2670): n is a, c, g, or t
  misc_feature (2672)..(2673): n is a, c, g, or t
  misc_feature (2675)..(2676): n is a, c, g, or t
  misc_feature (2678)..(2680): n is a, c, g, or t
  misc_feature (2682)..(2682): n is a, c, g, or t
  misc_feature (2685)..(2685): n is a, c, g, or t
  misc_feature (2687)..(2691): n is a, c, g, or t
  misc_feature (2693)..(2693): n is a, c, g, or t
  misc_feature (2695)..(2695): n is a, c, g, or t
  misc_feature (2698)..(2702): n is a, c, g, or t
  misc_feature (2706)..(2708): n is a, c, g, or t
  misc_feature (2710)..(2711): n is a, c, g, or t
  misc_feature (2715)..(2721): n is a, c, g, or t
  misc_feature (2723)..(2723): n is a, c, g, or t
  misc_feature (2725)..(2725): n is a, c, g, or t
  misc_feature (2728)..(2731): n is a, c, g, or t
  misc_feature (2735)..(2737): n is a, c, g, or t
  misc_feature (2740)..(2741): n is a, c, g, or t
  misc_feature (2743)..(2746): n is a, c, g, or t
  misc_feature (2750)..(2755): n is a, c, g, or t
  misc_feature (2759)..(2759): n is a, c, g, or t
  misc_feature (2761)..(2772): n is a, c, g, or t
  misc_feature (2774)..(2782): n is a, c, g, or t
  misc_feature (2784)..(2785): n is a, c, g, or t
  misc_feature (2787)..(2787): n is a, c, g, or t
  misc_feature (2789)..(2790): n is a, c, g, or t
  misc_feature (2792)..(2793): n is a, c, g, or t
  misc_feature (2796)..(2796): n is a, c, g, or t
  misc_feature (2798)..(2802): n is a, c, g, or t
  misc_feature (2804)..(2813): n is a, c, g, or t
  misc_feature (2815)..(2815): n is a, c, g, or t
  misc_feature (2817)..(2830): n is a, c, g, or t
  misc_feature (2832)..(2832): n is a, c, g, or t
  misc_feature (2834)..(2836): n is a, c, g, or t
  misc_feature (2839)..(2839): n is a, c, g, or t
  misc_feature (2842)..(2842): n is a, c, g, or t
  misc_feature (2844)..(2844): n is a, c, g, or t
  misc_feature (2846)..(2847): n is a, c, g, or t
  misc_feature (2849)..(2849): n is a, c, g, or t
  misc_feature (2852)..(2855): n is a, c, g, or t
  misc_feature (2857)..(2859): n is a, c, g, or t
  misc_feature (2861)..(2861): n is a, c, g, or t
  misc_feature (2865)..(2870): n is a, c, g, or t
  misc_feature (2872)..(2873): n is a, c, g, or t
  misc_feature (2875)..(2875): n is a, c, g, or t
  misc_feature (2877)..(2880): n is a, c, g, or t
  misc_feature (2882)..(2884): n is a, c, g, or t
  misc_feature (2886)..(2887): n is a, c, g, or t
  misc_feature (2889)..(2890): n is a, c, g, or t
  misc_feature (2892)..(2895): n is a, c, g, or t
  misc_feature (2900)..(2902): n is a, c, g, or t
  misc_feature (2904)..(2904): n is a, c, g, or t
  misc_feature (2906)..(2906): n is a, c, g, or t
  misc_feature (2908)..(2910): n is a, c, g, or t
  misc_feature (2912)..(2912): n is a, c, g, or t
  misc_feature (2915)..(2915): n is a, c, g, or t
  misc_feature (2917)..(2918): n is a, c, g, or t
  misc_feature (2920)..(2923): n is a, c, g, or t
  misc_feature (2925)..(2927): n is a, c, g, or t
  misc_feature (2931)..(2936): n is a, c, g, or t
  misc_feature (2938)..(2939): n is a, c, g, or t
  misc_feature (2941)..(2942): n is a, c, g, or t
  misc_feature (2944)..(2948): n is a, c, g, or t
  misc_feature (2951)..(2956): n is a, c, g, or t
  misc_feature (2959)..(2960): n is a, c, g, or t
  misc_feature (2962)..(2962): n is a, c, g, or t
  misc_feature (2964)..(2966): n is a, c, g, or t
  misc_feature (2969)..(2969): n is a, c, g, or t
  misc_feature (2971)..(2976): n is a, c, g, or t
  misc_feature (2978)..(2978): n is a, c, g, or t
  misc_feature (2980)..(2985): n is a, c, g, or t
  misc_feature (2987)..(2988): n is a, c, g, or t
  misc_feature (2990)..(2992): n is a, c, g, or t
  misc_feature (2994)..(2996): n is a, c, g, or t
  misc_feature (2998)..(3001): n is a, c, g, or t
  misc_feature (3005)..(3007): n is a, c, g, or t
  misc_feature (3009)..(3009): n is a, c, g, or t
  misc_feature (3011)..(3012): n is a, c, g, or t
  misc_feature (3014)..(3015): n is a, c, g, or t
  misc_feature (3018)..(3018): n is a, c, g, or t
  misc_feature (3020)..(3020): n is a, c, g, or t
  misc_feature (3022)..(3031): n is a, c, g, or t
  misc_feature (3034)..(3034): n is a, c, g, or t
  misc_feature (3036)..(3039): n is a, c, g, or t
  misc_feature (3041)..(3046): n is a, c, g, or t
  misc_feature (3048)..(3048): n is a, c, g, or t
  misc_feature (3050)..(3052): n is a, c, g, or t
  misc_feature (3055)..(3057): n is a, c, g, or t
  misc_feature (3060)..(3060): n is a, c, g, or t
  misc_feature (3062)..(3064): n is a, c, g, or t
  misc_feature (3066)..(3066): n is a, c, g, or t
  misc_feature (3068)..(3068): n is a, c, g, or t
  misc_feature (3070)..(3077): n is a, c, g, or t
  misc_feature (3079)..(3080): n is a, c, g, or t
  misc_feature (3084)..(3090): n is a, c, g, or t
  misc_feature (3092)..(3093): n is a, c, g, or t
  misc_feature (3095)..(3097): n is a, c, g, or t
  misc_feature (3100)..(3100): n is a, c, g, or t
  misc_feature (3102)..(3107): n is a, c, g, or t
  misc_feature (3110)..(3110): n is a, c, g, or t
  misc_feature (3112)..(3113): n is a, c, g, or t
  misc_feature (3115)..(3122): n is a, c, g, or t
  misc_feature (3124)..(3124): n is a, c, g, or t
  misc_feature (3126)..(3131): n is a, c, g, or t
  misc_feature (3133)..(3133): n is a, c, g, or t
  misc_feature (3135)..(3135): n is a, c, g, or t
  misc_feature (3139)..(3139): n is a, c, g, or t
  misc_feature (3141)..(3143): n is a, c, g, or t
  misc_feature (3145)..(3145): n is a, c, g, or t
  misc_feature (3147)..(3153): n is a, c, g, or t
  misc_feature (3155)..(3156): n is a, c, g, or t
  misc_feature (3158)..(3159): n is a, c, g, or t
  misc_feature (3161)..(3161): n is a, c, g, or t
  misc_feature (3163)..(3164): n is a, c, g, or t
  misc_feature (3167)..(3167): n is a, c, g, or t
  misc_feature (3169)..(3169): n is a, c, g, or t
  misc_feature (3172)..(3173): n is a, c, g, or t
  misc_feature (3177)..(3181): n is a, c, g, or t
  misc_feature (3183)..(3185): n is a, c, g, or t
  misc_feature (3187)..(3192): n is a, c, g, or t
  misc_feature (3194)..(3194): n is a, c, g, or t
  misc_feature (3197)..(3206): n is a, c, g, or t
  misc_feature (3208)..(3213): n is a, c, g, or t
  misc_feature (3215)..(3215): n is a, c, g, or t
  misc_feature (3217)..(3217): n is a, c, g, or t
  misc_feature (3219)..(3222): n is a, c, g, or t
  misc_feature (3224)..(3228): n is a, c, g, or t
  misc_feature (3230)..(3236): n is a, c, g, or t
  misc_feature (3238)..(3241): n is a, c, g, or t
  misc_feature (3243)..(3243): n is a, c, g, or t
  misc_feature (3245)..(3245): n is a, c, g, or t
  misc_feature (3248)..(3250): n is a, c, g, or t
  misc_feature (3252)..(3266): n is a, c, g, or t
  misc_feature (3268)..(3278): n is a, c, g, or t
  misc_feature (3280)..(3281): n is a, c, g, or t
  misc_feature (3283)..(3285): n is a, c, g, or t
  misc_feature (3287)..(3288): n is a, c, g, or t
  misc_feature (3290)..(3292): n is a, c, g, or t
  misc_feature (3295)..(3297): n is a, c, g, or t
  misc_feature (3300)..(3302): n is a, c, g, or t
  misc_feature (3304)..(3307): n is a, c, g, or t
  misc_feature (3311)..(3313): n is a, c, g, or t
  misc_feature (3315)..(3316): n is a, c, g, or t
  misc_feature (3318)..(3325): n is a, c, g, or t
  misc_feature (3327)..(3327): n is a, c, g, or t
  misc_feature (3329)..(3331): n is a, c, g, or t
  misc_feature (3333)..(3333): n is a, c, g, or t
  misc_feature (3336)..(3341): n is a, c, g, or t
  misc_feature (3343)..(3344): n is a, c, g, or t
  misc_feature (3346)..(3347): n is a, c, g, or t
  misc_feature (3349)..(3349): n is a, c, g, or t
  misc_feature (3351)..(3351): n is a, c, g, or t
  misc_feature (3353)..(3357): n is a, c, g, or t
  misc_feature (3359)..(3366): n is a, c, g, or t
  misc_feature (3368)..(3368): n is a, c, g, or t
  misc_feature (3370)..(3371): n is a, c, g, or t
  misc_feature (3374)..(3379): n is a, c, g, or t
  misc_feature (3381)..(3384): n is a, c, g, or t
  misc_feature (3386)..(3387): n is a, c, g, or t
  misc_feature (3390)..(3391): n is a, c, g, or t
  misc_feature (3393)..(3393): n is a, c, g, or t
  misc_feature (3395)..(3396): n is a, c, g, or t
  misc_feature (3398)..(3399): n is a, c, g, or t
  misc_feature (3401)..(3402): n is a, c, g, or t
  misc_feature (3407)..(3412): n is a, c, g, or t
  misc_feature (3414)..(3414): n is a, c, g, or t
  misc_feature (3416)..(3420): n is a, c, g, or t
  misc_feature (3425)..(3425): n is a, c, g, or t
  misc_feature (3427)..(3433): n is a, c, g, or t
  misc_feature (3436)..(3436): n is a, c, g, or t
  misc_feature (3438)..(3438): n is a, c, g, or t
  misc_feature (3441)..(3443): n is a, c, g, or t
  misc_feature (3445)..(3446): n is a, c, g, or t
  misc_feature (3448)..(3455): n is a, c, g, or t
  misc_feature (3458)..(3471): n is a, c, g, or t
  misc_feature (3473)..(3473): n is a, c, g, or t
  misc_feature (3475)..(3475): n is a, c, g, or t
  misc_feature (3478)..(3480): n is a, c, g, or t
  misc_feature (3482)..(3484): n is a, c, g, or t
  misc_feature (3486)..(3488): n is a, c, g, or t
  misc_feature (3492)..(3497): n is a, c, g, or t
  misc_feature (3500)..(3504): n is a, c, g, or t
  misc_feature (3506)..(3508): n is a, c, g, or t
  misc_feature (3510)..(3511): n is a, c, g, or t
  misc_feature (3513)..(3514): n is a, c, g, or t
  misc_feature (3516)..(3519): n is a, c, g, or t
  misc_feature (3521)..(3526): n is a, c, g, or t
  misc_feature (3528)..(3529): n is a, c, g, or t
  misc_feature (3531)..(3534): n is a, c, g, or t
  misc_feature (3536)..(3536): n is a, c, g, or t
  misc_feature (3538)..(3538): n is a, c, g, or t
  misc_feature (3541)..(3543): n is a, c, g, or t
  misc_feature (3545)..(3546): n is a, c, g, or t
  misc_feature (3548)..(3549): n is a, c, g, or t
  misc_feature (3551)..(3551): n is a, c, g, or t
  misc_feature (3553)..(3553): n is a, c, g, or t
  misc_feature (3555)..(3555): n is a, c, g, or t
  misc_feature (3557)..(3559): n is a, c, g, or t
  misc_feature (3561)..(3563): n is a, c, g, or t
  misc_feature (3565)..(3565): n is a, c, g, or t
  misc_feature (3568)..(3570): n is a, c, g, or t
  misc_feature (3575)..(3576): n is a, c, g, or t
  misc_feature (3578)..(3579): n is a, c, g, or t
  misc_feature (3581)..(3581): n is a, c, g, or t
  misc_feature (3583)..(3584): n is a, c, g, or t
  misc_feature (3586)..(3588): n is a, c, g, or t
  misc_feature (3591)..(3591): n is a, c, g, or t
  misc_feature (3593)..(3595): n is a, c, g, or t
  misc_feature (3597)..(3600): n is a, c, g, or t
  misc_feature (3602)..(3604): n is a, c, g, or t
  misc_feature (3607)..(3608): n is a, c, g, or t
  misc_feature (3610)..(3610): n is a, c, g, or t
  misc_feature (3613)..(3615): n is a, c, g, or t
  misc_feature (3617)..(3619): n is a, c, g, or t
  misc_feature (3621)..(3622): n is a, c, g, or t
  misc_feature (3625)..(3627): n is a, c, g, or t
  misc_feature (3630)..(3634): n is a, c, g, or t
  misc_feature (3637)..(3639): n is a, c, g, or t
  misc_feature (3641)..(3643): n is a, c, g, or t
  misc_feature (3645)..(3647): n is a, c, g, or t
  misc_feature (3649)..(3650): n is a, c, g, or t
  misc_feature (3652)..(3655): n is a, c, g, or t
  misc_feature (3658)..(3658): n is a, c, g, or t
  misc_feature (3660)..(3663): n is a, c, g, or t
  misc_feature (3665)..(3665): n is a, c, g, or t
  misc_feature (3667)..(3669): n is a, c, g, or t
  misc_feature (3671)..(3687): n is a, c, g, or t
  misc_feature (3689)..(3689): n is a, c, g, or t
  misc_feature (3691)..(3697): n is a, c, g, or t
  misc_feature (3699)..(3699): n is a, c, g, or t
  misc_feature (3701)..(3704): n is a, c, g, or t
  misc_feature (3706)..(3710): n is a, c, g, or t
  misc_feature (3714)..(3718): n is a, c, g, or t
  misc_feature (3721)..(3722): n is a, c, g, or t
  misc_feature (3724)..(3734): n is a, c, g, or t
  misc_feature (3737)..(3744): n is a, c, g, or t
  misc_feature (3746)..(3746): n is a, c, g, or t
  misc_feature (3748)..(3748): n is a, c, g, or t
  misc_feature (3751)..(3752): n is a, c, g, or t
  misc_feature (3754)..(3754): n is a, c, g, or t
  misc_feature (3757)..(3758): n is a, c, g, or t
  misc_feature (3760)..(3760): n is a, c, g, or t
  misc_feature (3762)..(3772): n is a, c, g, or t
  misc_feature (3774)..(3785): n is a, c, g, or t
  misc_feature (3787)..(3787): n is a, c, g, or t
  misc_feature (3789)..(3790): n is a, c, g, or t
  misc_feature (3793)..(3795): n is a, c, g, or t
  misc_feature (3798)..(3804): n is a, c, g, or t
  misc_feature (3806)..(3806): n is a, c, g, or t
  misc_feature (3808)..(3810): n is a, c, g, or t
  misc_feature (3812)..(3812): n is a, c, g, or t
  misc_feature (3814)..(3819): n is a, c, g, or t
  misc_feature (3821)..(3833): n is a, c, g, or t
  misc_feature (3837)..(3838): n is a, c, g, or t
  misc_feature (3840)..(3841): n is a, c, g, or t
  misc_feature (3843)..(3844): n is a, c, g, or t
  misc_feature (3846)..(3848): n is a, c, g, or t
  misc_feature (3850)..(3850): n is a, c, g, or t
  misc_feature (3854)..(3860): n is a, c, g, or t
  misc_feature (3862)..(3864): n is a, c, g, or t
  misc_feature (3866)..(3867): n is a, c, g, or t
  misc_feature (3869)..(3870): n is a, c, g, or t
  misc_feature (3872)..(3876): n is a, c, g, or t
  misc_feature (3878)..(3878): n is a, c, g, or t
  misc_feature (3880)..(3881): n is a, c, g, or t
  misc_feature (3883)..(3884): n is a, c, g, or t
  misc_feature (3886)..(3889): n is a, c, g, or t
  misc_feature (3891)..(3893): n is a, c, g, or t
  misc_feature (3895)..(3895): n is a, c, g, or t
  misc_feature (3897)..(3898): n is a, c, g, or t
  misc_feature (3900)..(3904): n is a, c, g, or t
  misc_feature (3907)..(3915): n is a, c, g, or t
  misc_feature (3917)..(3920): n is a, c, g, or t
  misc_feature (3922)..(3922): n is a, c, g, or t
  misc_feature (3925)..(3925): n is a, c, g, or t
  misc_feature (3927)..(3935): n is a, c, g, or t
  misc_feature (3937)..(3943): n is a, c, g, or t
  misc_feature (3946)..(3946): n is a, c, g, or t
  misc_feature (3948)..(3952): n is a, c, g, or t
  misc_feature (3954)..(3956): n is a, c, g, or t
  misc_feature (3958)..(3962): n is a, c, g, or t
  misc_feature (3964)..(3968): n is a, c, g, or t
  misc_feature (3970)..(3970): n is a, c, g, or t
  misc_feature (3972)..(3975): n is a, c, g, or t
  misc_feature (3978)..(3978): n is a, c, g, or t
  misc_feature (3981)..(3983): n is a, c, g, or t
  misc_feature (3986)..(3988): n is a, c, g, or t
  misc_feature (3990)..(3993): n is a, c, g, or t
  misc_feature (3997)..(3997): n is a, c, g, or t
  misc_feature (4000)..(4000): n is a, c, g, or t
tnnntncnnnnggnnnaaaaannntnntnnnnnnnaanttttnnnnnnntttnntnnnnnnggnnntttngggnnantnngnnnnntnnncnaaannntnnnnnnnaancnnnngnnannnnnnnnnannngnnnnnnnnnnnnnntnnttnncngntncnnnnnnntnnttnaannttnnntnnannnnnttttnnnnnnntnnngnnnnnnnnngnnnngnnnttnnttnngnannnntaagatgttgtaaatttacagaattaaaattatcctccaagngttcgtattgatttatttgaagatagaggcatgaaatctttattttgcctgtcgttatctcgctgtttcatattttatctttatctttgtctgcgaaaactattaaaatagcgaagacttaaaatgagagcaaaaacgatttttcttttattgataacgctccttctgacatcggcggtcaatgccaggtcacgttatcctaagcgtgaatttcggggtgcatggattcaatgtgtaaatgggcagtttcaaggaatgcctgcagagaagatgcagcagttattaatcagacaactgaacagcttacaagaagctggtattaatgctattatttttcaggtgcgtgctgaagcagatgccttgtataaatcatcttacgagccgtggagccgcttccttaccggggtgcagggcagggtaccgtcaccttattgggaccctatgcagtttatgatagatgaatgtcataagcgtggaatggagtttcatgcctggataaatccttatcgtgccaaaacaaagggaacggtagccttgtcgcccattcatccttacaacaggaaccctgaacgttttgtgacttatgccggacaattgtattttgatccggcattacctgagaatcgtaaatatatttgtaagattgtacgcgatattgttacccgttatgatgtggatgccattcanatggatgattatttttatccttatcctaatccgggagaggatttncccgacaatatcagttttgcacagtatggtcgcggatacagtaataaagccgattggcgacgtgacaacgtgaatgtgttgataaaggaaatccatgagacggtgcgcgagtgcaagccgtgggtgaagtttggaatttctccttttggaatttatcgtaatgtgaagagtgaccccaatggcagcaacacacgnggtttgcaaaattatgacganttgtatgctgatgtgttgatgtgggtgaacaatggttgggtggactataatattcctcaagtttattgggaaatcggtcatccggctgccgattatgatacattgatccgttggtgggcgaagaatgcttccgcccgtcctttgtatattggtcaggatgtgatgcgtacggtgaataagcccgacctccataatccgcttatcaatcagatgccggctaagatgaaactccaacgtgctttgcctactgtgcagggaagttgtcagtggtatgcttcggctgtggtggataatgcaggaaactatcgcaccatgcttgtaaaagattaccaccgttatccggctttgccgcctacatcgccatttatggatgataaggctcctgataaagtaaagaaagtgaaagatgtttggacacaggatggattgttgcttttctggcaggcaccaaaggcgaaaacggaaatggataaggctgtgcaatatgtggtttatcgttttgataaaaaagaaaaagtgaatctggaggacccttctcatattgttgctatcacgcgtgatacttattataaattgccttatgaaaacggcaagacaaaatacaactatgttgtgacggctctcgatcgtttgcataacgaatctaaaggggcaaagaagaaagtaaaactgtagacaaacagcataatagtactgagatattagtaagtaagaaccacgtttcacacgtgttatggggttaattngttgttntacaggtntttaangtgaaaggtttaactcaagccgccgagagcaacggattatgttcatgacaggtatgatgcgtggttttgtattttgggggaatagtttgaacacttaacatatcatatcaccaacaaagggaagaataagccgtttcttagggttggctaaggtcttttaaacggaagattattacagtctccgacagtggaccgtacagtccgttgcggtggactgtatagtccgttaccgtagactgtatagtccattgccgtagactgtagtaatccgactgacagacaggcataatagaaaggatgaaaacgcttagcccggctaatgaaacgacttagggagtttaaaacgtatgcagaggttgaaaaccggaggagacaacacacggtgacagaatcaagttctttttttgaagnncnnntnngnnttttnnannnaantcctncntttnnncnnntnntnnnntnnnannnntnnnaantnnnnannaanttnnnnnntnantnnnttttnnttnnntnnnttnnnnncngnnnannaaaangnannnnnannnnnnnnnnnnnnnnnnnannggnnnnnnnnnnnnngnnnnnnnnnnnnnannnntnannggnaantttncnntnnnnnttnnngnnnttncnnnnnannntnnttttnnngntnnttngnnnntnntnntnnngnaantnnnnnangnaannnnnaaannngnntttnnnnnnntncnttnnnncccnnnaannannnntttnnnnnntttncnnnnnnnnnnnngnnnnnnnnntnntngnntnnttncnnnnntnnnnnnnnnngnannnnnnnnnnnnnncngnnnttnggncntnntnggnnnntnnnantttnnnnnntnntngnnnntnnntnncnntnnnnttttnnntntnannnanttngnnannnntnnntttnnnnnntnntnncnnnnnaannnnnnccnntngnnnttncnnnnnnancnnnnnngnntnnngnnngnnnntttnnncngnntnnttngnannnnnnnnnnccngnnnntnnnnnntncnnnttnnnaangnnnancngnnnnnnnngnntttnnnnnnnanngnnnttncnnnnnnttngnntnnnnnnnngnannnnnntncntttncnnngnannnnnnncnnanngnannccntnccnntttnnnnncnnngnnnnnntnggnnnnnnnnnngnnnnnntngnannnnannnnncnnnnnnntnnnngntnggnnnannnnnnnnnnnnnnnannnnnnnnnnngnnannngnnannnaannnaannntnnnntttnnnanntnnnnnnnnancnnngnaannnnnnanngnngncngnnnnntnnnnnnnntngnnggnnnnnntnnnntnnttnntnanngnncnnaaaannnnnntnannnnnaaaangnnnnnnnaantnggnnnanntnnnnnnnnttnnnnnnnnnnnnnntngnttnnngnnngnnngggnnnnnnttnnnnntnnntnntnnannnngnnnnnnanngnnnntngnttnnncnntnncngnantnnngnnntnggnnnttttnntnncngnntnnnggnannncnnnnannnccnncnttnnngnnnannggnnnaannnnnttnnngnnntnnntnntnnnnggnannnncngnnntnnnnnnnnnnnnnnnnngnannnnnnntngnnnntnnnnntttnnnnnttnntnnnnnnnnnnnttnnnnnnnntnanttnntnaanncngnnnnnnnnnnncnnnnnnnnnnnncngnnttnnnaannnnnnngntnnntncnnnnnntnnnnnnnnnnnnntttnntnntnngnnntngggnnnnnnntnnntnntnncnnnnncngnntnntnnnncnnnangnngnnnnnttnnnnnnnnncnnnnanttngnnnnnnnnngnnnnnnnttncnnnnnannngnnnnntnnnnngntnnnnttnggnnnaannngnnnngggnaan

SEQ ID NO: 1558 - DNA, 4000 bp, Escherichia coli
  misc_feature (159)..(159): n is a, c, g, or t
  misc_feature (2146)..(2146): n is a, c, g, or t
  misc_feature (2929)..(2929): n is a, c, g, or t
ttctcctttttggattggcccatattctctccggccaggataaaggaagtactccgggaaactgaagttgaatttttacctccattcctttcaatcaattctttatattcatcacgactgtatttctggaaaacacctgatataacaattattttaccntcgaggacgtttcctttcagtatggttttattctcattgctgaatcttatgccggttgatttgagccgtttaatcatttcaaggttatctccatcagaaaaatatgtaacaatgcttgcagcaattttaggtccgatctcatagacacttgtcaattgctccgcattcgcattcatgaggtcatcaatagtcttgaatcttccggcgatggtttttgcaactgtctcacctacatgtcggataccaagggcaaaaagtactctgacataaggagtatcaatcgatttcctgatgctttttaaaatattggctgcagatttttcaccaagacgctccaatggtaccagctgttctaattttaaatcgtaaagatcggatatatttcttatcaggttattgttgaacaggagatcgatagtctcttctcccaatccgtcgatatccattgcctttctgctgataaaatgctcaattctgcctttaatctgaggaggacaatggaggtaatcaggacaaaaatgatttgcttcaccttcatttttaataagtgctgttccgcattctgggcagttcgaaataaagacaatcttcttattgttctcatttctgtatgagtgatcaactcccacaattttaggaattatttcgcctcccttttcaacataaaccatatcattaagatgaagatcaagcattgtgatctgatcggcattatgaagggttgcccgtttaacggttgatccggaaagaagcaccggttccaggtttgctaccggagttactgctcctgttctgcccacctggaatgtaactgataacaaccttgtagaggcctcttccgctttatatttataggcaattgcccagcggggtgactttgctgtaaacccaagttcctgctgctgactcactgagttgactttaacaacaacaccgtcggtatcgtagggaagatttttccgttctgattcccaataagaaataaattgaagcacctcatcaatactcctgcagagtcgtatactaccggcaactctgaatccccatcctgccgcctccataagattatcataatggttgttatgaggtagatcttcagccagaagaaagtaaaccatacaatcgagagatcttgaggctacaatcctggaatccagaagctttaaagtacctgcagcagcatttctggggttggcaaatggagctatttctgctttttgtctttcctcatttaacctgttgaatactgcccttggcataagtatttcgcctctaatcacaaaatccgaaggtgtaaccttaccagtaattttcaacggaatgcttctgatcgtttttacatttaaagtaacatcatcacctttattgccatcaccacgtgtcaccgcccttagtagggagccgtttttataaattatactgattgacgctccatcgaatttcgattcgcatacatactcaacaggttgtgagattgtcttatgtatcctgctgtcaaattctctgagctctccttcactgtacgtgtttccgagagacatcatagggtatgtatgttcgtattgttcaaattcctttgtaatgtcactgccaacgtgaagtgtaggtgaattctcgcttatgaattccgggaattttttctcaagagtatcaagttcatttaataatatatcgtactcaaaatcagaaattgaaggctgatttaaaacataatatctattattatgttcttcaattttcttcctgagaatatctatccttccctttgcttcagattttttcatcttcatagataatttttgattttctccgttcaccccgccccagggggaacgaaaaagaatttcatttccagaccccttcgattgtacttccacatttattacacttcccggcagttatggtatttgcagagatccggtaaccctgccggacaataatagtggagttgcatgacgggcatttggtattcgagatttcatttccnggtacatttccggtatatacatatttcagaccttcttctgttgcaatcctgaaggcgctatttaatatttcaacaggtgttggaggcaattgttcaagtttatgaagagggtagaacctgctgaaatgtaatggtgtgtttttaaacccattatcacttaaccacttgcacatattccttatatcatccagattatcagtccagtcgggaataacgagattagttatttcaagccatatccccatgtcctttaaaactttaagcgaatcgagtaccggttgcaattttcctccggttaacttcaggtaagtgctttcactgaatgctttgagatcgatattagctgcatcaataacgctgcagagctttttaagaggttcgttatttatatagccattcgatttgaagatgttttttaaaccggcacttcttgcaagagtagctgtttcgaaaacatattcataaaaagaggtcggttcagaataagtatatgctattgaactgcagttgtttttaatacattcttcaactactttttccggcatcatatcataatttcttgttttatcaggactggtctgtgatatcgtccagttctgacaattcagacaaaccaggttacatccggctgttgcaatagagaatgcttttgaaccaggaagaaaatgataaagcggttttttttcgacaggatcgacattgactgagcaaggattgccaaatgcaagcgtatataactttgagtcatgaacttttcgattattgcatttgctcagttctccntctttcagaacacattcattaggacagatcctgcacattattccccttgctgtttcttcctggaacattgcaattctcttgtaaatgctctgttcatcagatgacgtttctgaaaacattgactggcaggggaaacacatcaaaccggctgagagagccagtgattttttaagaaaatcacgtttgctgagatcacattctttcttactcattatacttttaagaattatgccaattaataataaacctacgatttgttccttattgtgccaaatagaattccaccaaaaatcattagggataataaaaaaacagaaccctgaatcccaaatacgggtacagcaaatcctgaaataaagataaagccaaaagcagaacctgcaaggtcagcgctgtatattgaaggtgaatcagagatcccttctgttttaagtgtaagttggcgaaagatgcgacctgtaattaatgcgggtaaaaaacctgaaaggataatcacgagtactgacatcaaaccgctttttagttctatcatataattatagctcaagccaaaaattatataaaatactatctggaagataacttggtttcttaatgaaatagtattcaggaatctgatattaattcctgaaccgacagcaagacccgtcatcaaccctgcaattatcaatccggtaagctggtacatatttcctaccataagctgaagagaaataagaatgattatttcaaatcctgcaagagctgaagagctgaaatacataagcatatttcttctttttattgctgtcactggcaatgcgaagacaataaacattaagattattgctggtatcttctcattgaggtttttgctgaactgatacgactggaaatggaaactggcaacaggaaaggctgatctgttttgttttattccgcgatcaataagcgcatttacttcctctgacttcttatttattgtttcatcatccaggaaatcggaatttacataaacatttttaatatttttcttatcggccagctggcagaatgataatgagattgtcttgtcagtggcaatgaaatata

SEQ ID NO: 1559 - DNA, 4000 bp, Escherichia coli
  misc_feature (48)..(48): n is a, c, g, or t
  misc_feature (228)..(228): n is a, c, g, or t
  misc_feature (279)..(279): n is a, c, g, or t
  misc_feature (303)..(303): n is a, c, g, or t
  misc_feature (327)..(327): n is a, c, g, or t
  misc_feature (415)..(415): n is a, c, g, or t
  misc_feature (423)..(423): n is a, c, g, or t
  misc_feature (492)..(492): n is a, c, g, or t
  misc_feature (540)..(540): n is a, c, g, or t
  misc_feature (727)..(727): n is a, c, g, or t
  misc_feature (1609)..(1609): n is a, c, g, or t
  misc_feature (1706)..(1706): n is a, c, g, or t
  misc_feature (2248)..(2248): n is a, c, g, or t
  misc_feature (2266)..(2266): n is a, c, g, or t
  misc_feature (2975)..(2975): n is a, c, g, or t
ggacagtatgacagtcgccttattttcgacacggcttatcatgtgcgncttctcgacagctttacggaagatacgcgtcgttggcggactgcctatgacaagacgtatgaaacatggaaaaaactgtgtcgtgaaagagattctttggaacatgacgaaagtgagaaaatacgtcttctcggtattttagattttcaaatacaggaaattgaagaagccaagttaacnaaaggagaggacgaaaagctggaagccgatattcgcacggcttctcatgcngaacacattacggaaggactacanaccgccatggccgctatggacggnagtgaacgtcgtcagggaatgacggacggtattgcggaaattcgccgcagtttgctgaaaaacgcatcgtatgacccgcgttttgagnccatggcngctaaggcggaggcgctttcttacgagttggaagagttgcgagacgaaatatcttcttatgcagacggnatgagttttgacggcccggcattagaccgaatgcagtctcgcttggcnacgattgaaaagttaaaacgtaaatacggattttccgtagaagatatattggcctttgctgaaaaagccaaggcggatcgggagaaactgagcgattcggaaaacgctctggctgacttaaataaacaaatctccagctgtgaaaagcaattacggcaagaaggcgatgatttatttcaggcacgcntggaagcggcagacttgtttaaagaaaagacggaagatattttacatcggttgggacttgaaaatagccgcatctcttttcgcatcgagcctatggaggctataagtctttccggagccgcatcggtggagctgtggttttcagctaatcggggcgagacggaacaacccttggcagaagtggcatccggcggcgaagtatctagaatcgccttggcattaaaatctattttccgagaaaaatatacggacaggaccgtagtttttgacgaaatagatgtaggcatcagcggggaaacagggttgcaagtagcggctcaaatgggacgattgggacggatgggtcaggttttttgtattactcacctgccgcagacggcagccattgcggacagtcactactttttgtataaagaagaaaaagaggggcggacggttactcaggtccgcaatttagataaagaagcccatgttaaagacattgcccgcatattttccggagacgataccagtgaggccggtatgcaggcagctgaggaaattattcgcaaggtcaaagggcgtgcctaggcacgctttttgtatacatgggcatatttcttgacgagcgttcttgagaagtttatcataaatagatacataatattccgatttatacggaggaaaaggcatgattcgagtattggtaagcggcgcagacggtcgcatgggaagcgaaacggttaaggccgttttggcagataatgaattggaattcgtaggcggcacaagtcttatgaatgtgggtaaagatgcgggagaagtcatcggtatttcttctttggggttacccttgtacgggagtttgaatgaagcgttaaaaatggcaaaacccgacgtagtngtcgattttacgacaccggcggctatttacggaaatgtaaagacttgtattgaaaacgggacgaatattgttgtcggtacgacaggtttgacggcanaacagcgtaatgaattggatgaagcggcaaaaaaagcggacgtagccgtatttattgcaccgaacttttctgtcggagccgtactgatgatgaagtatagtgcggaaatcgctaaatacttgcctgatgtagaaatcattgagctacaccacaataataaattagacgctccgtccggtacggccaaaatgacggctgaaaaaatagcccgtgctcgtcgtgaagccggtgcggaaccggctccggacaaaacacacgaaagtcttaccggagccagaggcactacggtggagggcatacccgtacatagcgtacggctgcccgggtatgtggcacatcaggaagtgcttttcggcggctacggggaaatccttacggtccgtcacgactcgttggacagaaaatcctttatgcccggcgttgtcttagccgtgaagaaggtggattcccgcaagggtgtgaccttcggcttggaacactatttataaactgtacaggaggctttacatatgagtacgaagaatccgtctgtagccattttnggggctaccggtgctgtnggacaggaatttatcagattaatagaagaacgcaacttcccgtacagttccttgaagttgttggcatccaaacgttcggaaggtaagaagctgacggttaacggtaaggagtatacggtagaagaagcgaaacccgaatcgtttgaaggcgttgacatcggcttgtttgccggcgggtccatcagtaaagaattagcccccgaagcggtaaaacgagggtgtgttgtcattgataactccagtgcctttcgcatggatcccgatgtaccgttggttgttcccgaagtgaatcctgaagacattcgtaagcataaggggattattgccaatccgaactgttcgaccattattatgctaatggccttaaagcctatttacgacttgtctaaaattactaaaattgtggtcagcacataccaggctgtatccggcgccggtaaggaaggcattgatgaactgcgtaaacaagtggaagatgttatggcgggaaaagaaccggtagcggaaatcttgcctacaaagagcttggataaacactatcccattgcttttaatctattgccgcaaattgatgtttttatggacaacgattactctaaggaagaaatgaagatggtcaatgagacacataaaatcttccatgacgatactattgccgttacaccgacaacggttcgcgtgcccgtattccgcagtcatgccgaatcgntttatgtggaaacggaaaaagaactgaccgttgaagaaattcgtcgtgctatcgatgcttttccgggggcacaggttcaggataatccggctaaaatggaatatcccatgcccttgtatacttcggaaaagtatgatgtgtatgtaggtcgcatccgtaaggatttatttaatcccaaagccgtcaatctttgggtatcgggggatcaaatccgcaaaggggccgctttaaatgcgttgcaaattgcggaatatatgataaaacacgatatataaggaggagtacgggttatgttgaagttcggaaacgttattacggctatggtcacgcccttttatgaaaacgggaatattgactttgacgagtttgattcattggcaagatatttgcttgaaaacggttcggacgggttactcgttgccggtacgaccggtgaaggtgctacactgacggaagaagaaagattgcgtcttttccggtttgccgccgatgaatacggcgatcgtactatgattatggcgaatgtaggttctaacaatacggcggctactgttgaatttgccaaaaaagctgagaaaaccggcgttgactgtctgctcgtaatagtaccctattacaataagccgaatcaggacgggtgttacgcacactttgcggcagtggcaaaggccgtatcattacctgttattatctataatgtaccggggcggacgggtggtaaaatcttgcctgaaacggtagtgcgactggctgcggacttccccaatattgtaggcataaaagaagccagcggtgacttggtggcggctacgaagattgctcgcgacactaaagacgacttccgcgtatatagcggtgaagacgcattgacattgcctattacagctgtcggaggcacaggggttatcagtgtggcatcacatattatcggcaaagaaatgaatgccatcgtacagtgctgcaaggacggagacatggaagcggctgcatctatcaatcaaaaataccttgatgtcatgacggga

SEQ ID NO: 1560 - DNA, 4000 bp, Escherichia coli
  misc_feature (629)..(629): n is a, c, g, or t
  misc_feature (3188)..(3190): n is a, c, g, or t
  misc_feature (3192)..(3192): n is a, c, g, or t
  misc_feature (3212)..(3220): n is a, c, g, or t
  misc_feature (3226)..(3227): n is a, c, g, or t
  misc_feature (3229)..(3231): n is a, c, g, or t
  misc_feature (3233)..(3237): n is a, c, g, or t
  misc_feature (3239)..(3246): n is a, c, g, or t
  misc_feature (3248)..(3248): n is a, c, g, or t
  misc_feature (3250)..(3250): n is a, c, g, or t
  misc_feature (3252)..(3252): n is a, c, g, or t
  misc_feature (3254)..(3255): n is a, c, g, or t
  misc_feature (3257)..(3258): n is a, c, g, or t
  misc_feature (3260)..(3260): n is a, c, g, or t
  misc_feature (3262)..(3267): n is a, c, g, or t
  misc_feature (3269)..(3270): n is a, c, g, or t
  misc_feature (3273)..(3276): n is a, c, g, or t
  misc_feature (3278)..(3278): n is a, c, g, or t
  misc_feature (3280)..(3281): n is a, c, g, or t
  misc_feature (3283)..(3283): n is a, c, g, or t
  misc_feature (3287)..(3288): n is a, c, g, or t
  misc_feature (3290)..(3293): n is a, c, g, or t
  misc_feature (3296)..(3296): n is a, c, g, or t
  misc_feature (3298)..(3309): n is a, c, g, or t
  misc_feature (3312)..(3313): n is a, c, g, or t
  misc_feature (3319)..(3319): n is a, c, g, or t
  misc_feature (3323)..(3323): n is a, c, g, or t
  misc_feature (3325)..(3329): n is a, c, g, or t
  misc_feature (3331)..(3331): n is a, c, g, or t
  misc_feature (3333)..(3336): n is a, c, g, or t
  misc_feature (3340)..(3340): n is a, c, g, or t
  misc_feature (3342)..(3342): n is a, c, g, or t
  misc_feature (3344)..(3344): n is a, c, g, or t
  misc_feature (3348)..(3350): n is a, c, g, or t
  misc_feature (3353)..(3353): n is a, c, g, or t
  misc_feature (3359)..(3359): n is a, c, g, or t
  misc_feature (3363)..(3363): n is a, c, g, or t
  misc_feature (3366)..(3366): n is a, c, g, or t
  misc_feature (3371)..(3372): n is a, c, g, or t
  misc_feature (3375)..(3375): n is a, c, g, or t
  misc_feature (3377)..(3377): n is a, c, g, or t
  misc_feature (3379)..(3380): n is a, c, g, or t
  misc_feature (3385)..(3386): n is a, c, g, or t
  misc_feature (3388)..(3391): n is a, c, g, or t
  misc_feature (3393)..(3396): n is a, c, g, or t
  misc_feature (3399)..(3405): n is a, c, g, or t
  misc_feature (3407)..(3410): n is a, c, g, or t
  misc_feature (3412)..(3417): n is a, c, g, or t
  misc_feature (3420)..(3420): n is a, c, g, or t
  misc_feature (3423)..(3424): n is a, c, g, or t
  misc_feature (3428)..(3428): n is a, c, g, or t
  misc_feature (3431)..(3437): n is a, c, g, or t
  misc_feature (3441)..(3444): n is a, c, g, or t
  misc_feature (3446)..(3447): n is a, c, g, or t
  misc_feature (3449)..(3449): n is a, c, g, or t
  misc_feature (3451)..(3459): n is a, c, g, or t
  misc_feature (3462)..(3464): n is a, c, g, or t
  misc_feature (3466)..(3466): n is a, c, g, or t
  misc_feature (3468)..(3468): n is a, c, g, or t
  misc_feature (3471)..(3472): n is a, c, g, or t
  misc_feature (3474)..(3474): n is a, c, g, or t
  misc_feature (3476)..(3477): n is a, c, g, or t
  misc_feature (3479)..(3480): n is a, c, g, or t
  misc_feature (3482)..(3483): n is a, c, g, or t
  misc_feature (3485)..(3485): n is a, c, g, or t
  misc_feature (3490)..(3493): n is a, c, g, or t
  misc_feature (3497)..(3497): n is a, c, g, or t
  misc_feature (3501)..(3501): n is a, c, g, or t
  misc_feature (3504)..(3504): n is a, c, g, or t
  misc_feature (3514)..(3516): n is a, c, g, or t
  misc_feature (3518)..(3519): n is a, c, g, or t
  misc_feature (3524)..(3524): n is a, c, g, or t
  misc_feature (3528)..(3528): n is a, c, g, or t
  misc_feature (3530)..(3530): n is a, c, g, or t
  misc_feature (3532)..(3538): n is a, c, g, or t
  misc_feature (3541)..(3545): n is a, c, g, or t
  misc_feature (3547)..(3552): n is a, c, g, or t
  misc_feature (3554)..(3555): n is a, c, g, or t
  misc_feature (3558)..(3558): n is a, c, g, or t
  misc_feature (3561)..(3561): n is a, c, g, or t
  misc_feature (3563)..(3565): n is a, c, g, or t
  misc_feature (3568)..(3568): n is a, c, g, or t
  misc_feature (3570)..(3577): n is a, c, g, or t
  misc_feature (3579)..(3588): n is a, c, g, or t
  misc_feature (3592)..(3592): n is a, c, g, or t
  misc_feature (3596)..(3597): n is a, c, g, or t
  misc_feature (3599)..(3606): n is a, c, g, or t
  misc_feature (3609)..(3609): n is a, c, g, or t
  misc_feature (3611)..(3617): n is a, c, g, or t
  misc_feature (3623)..(3623): n is a, c, g, or t
  misc_feature (3625)..(3626): n is a, c, g, or t
  misc_feature (3628)..(3628): n is a, c, g, or t
  misc_feature (3630)..(3631): n is a, c, g, or t
  misc_feature (3633)..(3641): n is a, c, g, or t
  misc_feature (3643)..(3650): n is a, c, g, or t
  misc_feature (3652)..(3652): n is a, c, g, or t
  misc_feature (3657)..(3661): n is a, c, g, or t
  misc_feature (3663)..(3663): n is a, c, g, or t
  misc_feature (3665)..(3665): n is a, c, g, or t
  misc_feature (3667)..(3667): n is a, c, g, or t
  misc_feature (3669)..(3669): n is a, c, g, or t
  misc_feature (3674)..(3674): n is a, c, g, or t
  misc_feature (3678)..(3678): n is a, c, g, or t
  misc_feature (3680)..(3681): n is a, c, g, or t
  misc_feature (3684)..(3684): n is a, c, g, or t
  misc_feature (3686)..(3691): n is a, c, g, or t
  misc_feature (3693)..(3693): n is a, c, g, or t
  misc_feature (3695)..(3697): n is a, c, g, or t
  misc_feature (3703)..(3703): n is a, c, g, or t
  misc_feature (3705)..(3705): n is a, c, g, or t
  misc_feature (3709)..(3710): n is a, c, g, or t
  misc_feature (3713)..(3713): n is a, c, g, or t
  misc_feature (3720)..(3721): n is a, c, g, or t
  misc_feature (3723)..(3725): n is a, c, g, or t
  misc_feature (3730)..(3731): n is a, c, g, or t
  misc_feature (3734)..(3734): n is a, c, g, or t
  misc_feature (3736)..(3738): n is a, c, g, or t
  misc_feature (3740)..(3744): n is a, c, g, or t
  misc_feature (3746)..(3747): n is a, c, g, or t
  misc_feature (3750)..(3751): n is a, c, g, or t
  misc_feature (3753)..(3753): n is a, c, g, or t
  misc_feature (3755)..(3760): n is a, c, g, or t
  misc_feature (3762)..(3764): n is a, c, g, or t
  misc_feature (3766)..(3770): n is a, c, g, or t
  misc_feature (3772)..(3774): n is a, c, g, or t
  misc_feature (3776)..(3782): n is a, c, g, or t
  misc_feature (3784)..(3784): n is a, c, g, or t
  misc_feature (3786)..(3787): n is a, c, g, or t
  misc_feature (3790)..(3792): n is a, c, g, or t
  misc_feature (3794)..(3799): n is a, c, g, or t
  misc_feature (3801)..(3805): n is a, c, g, or t
  misc_feature (3807)..(3810): n is a, c, g, or t
  misc_feature (3814)..(3814): n is a, c, g, or t
  misc_feature (3817)..(3821): n is a, c, g, or t
  misc_feature (3823)..(3823): n is a, c, g, or t
  misc_feature (3828)..(3830): n is a, c, g, or t
  misc_feature (3833)..(3833): n is a, c, g, or t
  misc_feature (3838)..(3838): n is a, c, g, or t
  misc_feature (3840)..(3842): n is a, c, g, or t
  misc_feature (3844)..(3844): n is a, c, g, or t
  misc_feature (3846)..(3847): n is a, c, g, or t
  misc_feature (3849)..(3852): n is a, c, g, or t
  misc_feature (3854)..(3855): n is a, c, g, or t
  misc_feature (3857)..(3860): n is a, c, g, or t
  misc_feature (3862)..(3865): n is a, c, g, or t
  misc_feature (3869)..(3872): n is a, c, g, or t
  misc_feature (3875)..(3875): n is a, c, g, or t
  misc_feature (3877)..(3878): n is a, c, g, or t
  misc_feature (3880)..(3880): n is a, c, g, or t
  misc_feature (3882)..(3884): n is a, c, g, or t
  misc_feature (3886)..(3886): n is a, c, g, or t
  misc_feature (3888)..(3891): n is a, c, g, or t
  misc_feature (3898)..(3902): n is a, c, g, or t
  misc_feature (3906)..(3906): n is a, c, g, or t
  misc_feature (3908)..(3909): n is a, c, g, or t
  misc_feature (3915)..(3915): n is a, c, g, or t
  misc_feature (3917)..(3917): n is a, c, g, or t
  misc_feature (3922)..(3923): n is a, c, g, or t
  misc_feature (3925)..(3925): n is a, c, g, or t
  misc_feature (3929)..(3929): n is a, c, g, or t
  misc_feature (3932)..(3934): n is a, c, g, or t
  misc_feature (3936)..(3937): n is a, c, g, or t
  misc_feature (3939)..(3940): n is a, c, g, or t
  misc_feature (3945)..(3945): n is a, c, g, or t
  misc_feature (3947)..(3947): n is a, c, g, or t
  misc_feature (3949)..(3950): n is a, c, g, or t
  misc_feature (3952)..(3955): n is a, c, g, or t
  misc_feature (3957)..(3958): n is a, c, g, or t
  misc_feature (3960)..(3961): n is a, c, g, or t
  misc_feature (3963)..(3967): n is a, c, g, or t
  misc_feature (3969)..(3969): n is a, c, g, or t
  misc_feature (3971)..(3972): n is a, c, g, or t
  misc_feature (3975)..(3978): n is a, c, g, or t
  misc_feature (3980)..(3980): n is a, c, g, or t
  misc_feature (3982)..(3984): n is a, c, g, or t
  misc_feature (3986)..(3987): n is a, c, g, or t
  misc_feature (3989)..(3989): n is a, c, g, or t
  misc_feature (3991)..(3991): n is a, c, g, or t
  misc_feature (3993)..(3995): n is a, c, g, or t
  misc_feature (3997)..(4000): n is a, c, g, or t
ataacctgctgcaccaataataattaatttatttgcagttcgcagcgttcccataaataaattactgatggcatcatttaatctataggtattcttctttattgctattccatataccaattctattaaaagagctaataagaaaaagggaactgcataggtaatataatccatgatttatattaacttatttaaagagaatttttaatacagcaggtttgaaatctttcaaacctgcatgaaatttaagttatataagctttagtttttaatcagcgaagtctaatccttttgctaattgaacttcccttttgtttgggttcacagactctctaaatggaacatctacaatttcaccgtcaactggaactccaggtgattcagaaaactcatcaggcaacctgactaataattttgttccaacctctgatgaggtccacggtacccatgcaagagcaatatttgtacccagttcaggagaccaccaaggagaagtaacataacccatgtcatttccatcggtatctgctattagccaaaaatcaggagcatagtctgttatttcttttcctccaagagttattccaaccattctcattttaaatggtggcgttccctggtcgatcatngtgcgttgtttttcaagcgcctctttaccaatataatctgcagatttattacgaggcacttggtaggccaggttaacctgaaagggtgaagtttcatgatctaagtcttgcccccaagataaaataccggcagcaattcttcgatggtgagctggagcaattaccattaaaccaaattcctcacccccctcaagaactgcattccatactttttctgcattctgatgagcatcgcggacataaatttcatatcccttctctccagtgaaccctgtttggctaataacaacatctgcaccaccaatttgagtttccataattccataataaggaacatctctaagctcttcaccagctaatttagccataagatcttctgaaagaggcccttgaatctggacagggcatacatcaatctcatcaataattacatcatattttttagtaacattgacgccttgcaaccatagcaataaatcactatctgaaattgaaaaccaaaattcatcatctgttaatcttaataaaacagggtcattaagaactccgcctttgtcgttacacaaaattgcatatttaccatttcctggttcaatcttcgttgcatcacgagtaataacgtaatcagtaaaagcttctgcatcaggtccttttactcttatctgtctttcaacagcaacattccacatagttactcgattcactaatgcctcatactcaaccatagcaccaccatcttcaggttttacatagcctcttgggtgataaatacgattgtaaacagttgctctccagcaaccagcttcatgagaaagatgccaaaaaggtgacttcctaactcgagttgaaatcaacatctgaacaggcgttcggccgctctgtctaaggttataaggtactacgcgatcgctttgatcaacactagggtgatttggattggtcatattaagttccccccgaaatttaaagttatgactacttaatgtatataatttacataagcgtttttaataaatttacgccttttttttaattttgtaaatcaaaatttatggggtttaaataatattttagaaagtatttatccgagtaaaaaaatgaggttaaaaattagttatttaatggttatctaaataatcttttactgcaattttgtcagctttcatgtctgatctaaaggcattaaaaagtttctgtttatgattaggcattaatccctgagacatatttttaatctgctgataaaaccatgccattgcaccaaatgcattaattaccttaattatagtaaacggactggaaggagaaaggattgaaggtcccagtgaaagagttttttcaagacttggtaattctttcagctcacctgctatcatttttttgacacagtaagggtctgcacataatggtcttcctattccaactatttggcaaatattactttttaaagcgtcttcgataccatccttagttctaaatcctcctgtaaccattaatggcaaagaaactgcctttctgatgtcctgggcgtattcaagaaaataagcttccctagcaacagtgctttcttttcttttttcatttcttttagggttaatacttagatcatcaacacctattagtttgggttgttcgtatgtacctcctgaaatttctataatatccacgccttcattttcaagcatctgtgcaacttgaatagattcactagctgtaaacccacctttttgaaaatctgcagaatttagttttactgaaatagggaaatctgttcccacctcttctctgcatctcttaataatttctaaatgaattctagctctattttgaatatttccaccccatgcatcagttctattattgatatcaggtgataaaaactctgataaaagataaccatgtgcagagtgaaattgaacgccagtaaagcctgcttctctagcaatttttgcagtgaaaacaaacctttctataacatctaaaatatcctcttcagtcataggggttgggatgccgtaattctttccaggaatttttaaaccaatatctgagggcgctaaaggtgaggaatttatttcaccaggagtttgtctgccagcatgtgagatttgcatccatagctgagtattattttttgttccagctgcagaccatgcctttaaatcatctaattgttctttatagttatttgaatctataactacatttgctggcccttctatatttcgacgatcaatttgaacattgccggttaataagatgccaatatcaccatctgcccatctctcatataaattgacatgtccttgatgcgccaaattgttgcctttagcaattcgttcagtcatcgctgctttgcaaatacgatttttaattacttgcccacatggcaatacaaaggattcgttaattatattagacattgattactccctaaagataaggagtatagcttaacagaagaagatggtgggcccggtaggactcgaacctacgaccaatggattatgagtccactgctctaaccaactgagctacaggccccttgttaaatcaacnnntncaagcatttctctaaaaaannnnnnnnnaaaaanntnnnannnnncnnnnnnnntncntnannannantnnnnnnannaannnnanannantttnnannnnttnannnnnnnnnnnnaannaaaaantaanannnnntnannnnaaantntntaannnaanaaaaancaanaantaagnnttngnannaaagnnannnntnnnnaannnnnnntnnnnannnnnnacnaannaagntgnnnnnnnaaannnnannantnnnnnnnnnaannntntnttnntnannannanncntatannnnaaanaaanttntttaaaaaannnannaaatnaaanangnnnnnnnttnnnnntnnnnnntnntanctncnnntcntnnnnnnnntnnnnnnnnnnaaanaaanntnnnnnnnnatnannnnnnnaattgnanntnanngnnnnnnnnncnnnnnnnncnaaaannnnntnangntntttanaaancnngantnnnnnntnannnatttantnaaanngtnatagttnntnnnataanntanannnannnnnannttnngntnnnnnnannncnnnnncnnnannnnnnnanannttnnncnnnnnnannnnntnnnnaaanaannnnntnttttnnnatntattntnnntnannannnntnnannnnannnnaatnnnncancnntntnnnanannnntaaaatnnnnntatncnntttttntnatatnntnaaanttnnntnntnntcaanananncnnnnanntnntnnnnnantnnatnnnnantnnncnnantngnnngnnnn

SEQ ID NO: 1561 - DNA, 4000 bp, Escherichia coli
  misc_feature (133)..(133): n is a, c, g, or t
  misc_feature (331)..(331): n is a, c, g, or t
  misc_feature (481)..(481): n is a, c, g, or t
  misc_feature (553)..(553): n is a, c, g, or t
  misc_feature (712)..(712): n is a, c, g, or t
  misc_feature (1748)..(1748): n is a, c, g, or t
  misc_feature (1985)..(1985): n is a, c, g, or t
  misc_feature (1992)..(1992): n is a, c, g, or t
  misc_feature (2054)..(2054): n is a, c, g, or t
  misc_feature (2066)..(2066): n is a, c, g, or t
  misc_feature (2080)..(2080): n is a, c, g, or t
  misc_feature (2225)..(2225): n is a, c, g, or t
  misc_feature (3066)..(3066): n is a, c, g, or t
  misc_feature (3516)..(3516): n is a, c, g, or t
acaaaagttgcttacaaaagaaactttcagtctagacacggaaacaacaggaaccgatcccatcaccgcaaaactggtaggaatgagtttcagctacaccgaaaaccaagctttctatgtccccgttcccgcngaacaaaacgaagcacaaaaaattgttaatgagttccgaccggtatttgaaaaagcaggagtactgaaagtgggacaaaatatcaagtacgatatgctggtgctaggcaactacggagtagaggtttgcggtccgctgttcgacactatggtagcacactatgtgctgcaacccgaactgcgccataacatggactancttgccgaaatctacctgcattaccagacgattcatatagaagaacttatcggacctaaaggcaaaggacagaaaaatatgcgcgacctccctcccgaagctatatataagtacgcgtgcgaggatgccgatgtcaccttaaagctaaancatgcactggaaaaggaactgaaagagcaaggagccgaaaaactcttttacgaaatagagatgcccctagtncccgtcctcgtctatatggaaagaaatggcgtgcgtgtagacacggaagcactgaaacaaacctcggaacatttcacagcccgcatgaatcaaatagaagaagaagtacatcaattggcagggacagagttcaacattgcatcgcccaaacaagtgggngaagtcttgtttgacaagctacgcatcgtagaaaaagccaaaaagacaaagaccggccaatacgtgaccagcgaagaagtattggaaagcttgcgcggaaagcatgaaatagtgggcaagattcttgaacatcgagggctgaagaaactactcggaacttatatcgatgccctaccccttcttattaatccggcaacgggcaagatacacacgtccttcaaccagaccgtgaccgccacaggacgcctcagttcgagcaatccgaacctgcaaaacatccctatccgcaacgaagacggcaaagaaatccgcaaggcatttatcccggaagacggatgcgagttcttctctgccgactattctcagatagagctccgcatcatggcccacttaagcggtgacaaaaacatgatagaagctttccgcgaaggagacgacatccatgccgctacagccgccaaagtatataaaatagccatcgaggatgtgacacgcgagcaacgcagcaaggccaaaaccgccaacttcggtattatctatggcatatcggtattcggattggcagaacgcatgaatgtcccccgtcaggaagccaaagaactgatagacggctatttcgatacctatccgcagatcaaggaatatatggacaagagcatcgaacgcgcacgtgccaacggttacatcgaaactattttcggccgtaaacgcttcctgccggacatcaattcacgcaatgccgtagtacgcggatatgctgaacggaatgccataaatgctcccattcagggaagtgcagccgacattatcaaagtagccatggttaaaatattccaacgctttcaatctgaaagtatacgctctaaaatgatacttcaggtgcacgatgaattaaacttcagtgttgtgcccgaagagaaggaaaaagtacagcaaatcgtaatggaagaaatggaaaaagcctatctgatgcaagtgcctctaaaagcagactgtggctggggaaacaattggttggaagcacattaaaaagaanatataatcactaacacactatatataaatatattaaaggagacctgcagttggtctcctttctttatctgcctattctgattgtatactcaaaaatctatttatcctctttccctaaagaatctccggtctgccagtccaaagataaacaaccgccattcacccactattcctctgttattcaagataaatacataaactcctttctctctctttaaatacattctgttacatattnaaagtanctaattcttaatatttgtttatttagtgacatattgcaaaaatatcatctttttattgcagntttgttaggtanttcaatttcttttngtacatttgcaccgcttttgaaaacaatatgaaagtaacaatctaatatactgatatcatgaagaaaattatttttttgaaaggaatgctctctgtagtaatgttgtttattgccagccttacaatttccgcagcaaagccgggngacaacctggttcacaacactgaagaagtaaacggagtaatcatttcggaaactgttttcaagatggacggtaatatgctgaccaattatatgaagcacaattataagtacgatacaaaccaacaacgtaccgaagatgaaagtcaaaaatggaacagcaacaaaaactgttgggaaaataacctctgcatccgttatattcacggaaataagagcattactaccgaatattataaatggaattctaagaagaaagaatatatactagtacctgaaatgaccgtaactatggataaataaaatgttcatttaactaacaatctaacacttttcataaaattttaaacaaaaaggcagtcgcgatgactgccttttttcgtagctccaagccaattctatctttaatatgaagcacgataaaaaaagaatggttatctttgcaggcaaattaatggataataatcaaaaaaacagatagataatggctttacaatgtggcattgtcggccttccgaacgtaggaaagtcgacactttttaattgcttatcaaatgcaaaggctcaagcagccaacttccctttttgtacaatcgaaccaaatgtcggcgtaatcactgttcccgatgaacgtttgaccaagcttgccgagctggttcatccgggacgcatcgttcctaccactgtcgaaattgtggatattgccggtctggtgaaaggcgccagcaaaggcgaagggttaggaaacaaattcttagccaatattcgtgagacagacgctatcttacacgtactccgctgctttgacgatgagaatgtaactcacgtggacggaagtgtagancctgtacgcgataaagaaatcatcgataccgaacttcagctgaaagatttggaaaccattgaaagccgtatccaaaaagtgcagaaacaggcacagaccggaggtgacaaggcggctaaacaaacatacgaagtgcttgtcagatacaaagaagcattggagcagggcaagtctgcccgcaccgtacaatttgaaagcaaagacgaacaaaaaattgccaaagaattgttcctgctgacttccaagccggtgatgtatgtgtgcaatgtggacgaagcaagcgcagtcaacggtaacaaatatgttgaaatggtgcgcgaggccgtcaaagaagagaacgcggaaatcctagtggtagctgccaaaacagaagccgacattgcagaactggaaacatacgaagaccgtcagatgttccttcaggaagcaggtttggaagaatcgggtgtnaaccgtttgattaaagcagcttacaaactgttggatctggaaacattcatcacagccggagaaatggaagtaaaagcatggacttaccgcaaaggctggaaagctccccaatgtgccggagtcatccataccgactttgaaaaaggctttatccgtgccgaagtcatcaaatacgaagactatattcaatatggttcggaagcggccgtcaaggaagccggaaagatgggcattgaaggcaaggaatatgtggtacaggatggcgacatcatgcacttccgcttcaatgtataaaacaaacgattaatatgaataaatttcttatcataggaaccggcggcgtgggaggtagcatcgccggttttcttgctttagcaggaaaggacgtaacgtgcattgcccgtggcaaacacctggaagccatccgcgaaaaaggacttcacctgaagtcggatttaaaaggcgaacattatcttcccgtaaa

SEQ ID NO: 1562 - DNA, 4000 bp, Escherichia coli
  misc_feature (46)..(46): n is a, c, g, or t
  misc_feature (81)..(81): n is a, c, g, or t
  misc_feature (84)..(84): n is a, c, g, or t
  misc_feature (111)..(111): n is a, c, g, or t
  misc_feature (168)..(168): n is a, c, g, or t
  misc_feature (183)..(183): n is a, c, g, or t
  misc_feature (261)..(261): n is a, c, g, or t
  misc_feature (267)..(267): n is a, c, g, or t
  misc_feature (321)..(321): n is a, c, g, or t
  misc_feature (345)..(345): n is a, c, g, or t
  misc_feature (357)..(357): n is a, c, g, or t
  misc_feature (360)..(360): n is a, c, g, or t
  misc_feature (363)..(363): n is a, c, g, or t
  misc_feature (369)..(369): n is a, c, g, or t
  misc_feature (378)..(379): n is a, c, g, or t
  misc_feature (429)..(429): n is a, c, g, or t
  misc_feature (450)..(450): n is a, c, g, or t
  misc_feature (570)..(570): n is a, c, g, or t
  misc_feature (615)..(615): n is a, c, g, or t
  misc_feature (663)..(663): n is a, c, g, or t
  misc_feature (679)..(679): n is a, c, g, or t
  misc_feature (684)..(684): n is a, c, g, or t
  misc_feature (789)..(789): n is a, c, g, or t
  misc_feature (837)..(837): n is a, c, g, or t
  misc_feature (855)..(855): n is a, c, g, or t
  misc_feature (948)..(948): n is a, c, g, or t
  misc_feature (954)..(954): n is a, c, g, or t
  misc_feature (966)..(966): n is a, c, g, or t
  misc_feature (1259)..(1259): n is a, c, g, or t
  misc_feature (1508)..(1508): n is a, c, g, or t
  misc_feature (1676)..(1676): n is a, c, g, or t
  misc_feature (1988)..(1988): n is a, c, g, or t
  misc_feature (1991)..(1991): n is a, c, g, or t
  misc_feature (2010)..(2010): n is a, c, g, or t
  misc_feature (2255)..(2255): n is a, c, g, or t
  misc_feature (2968)..(2968): n is a, c, g, or t
  misc_feature (3697)..(3697): n is a, c, g, or t
  misc_feature (3700)..(3700): n is a, c, g, or t
  misc_feature (3856)..(3856): n is a, c, g, or t
  misc_feature (3925)..(3925): n is a, c, g, or t
  misc_feature (3952)..(3952): n is a, c, g, or t
acctacgaaaagaagaacgagtttaacatcggcgtggacgccggcntgtggaacaaccgcatcaacgccaccgtcgacgtntanacgcgcaacaactacgacgaaatcggnccgatggtgacgcagggcatgagcggacagatcgtaaattggggcaacgtggccganatgaaatcgaacggngtggaagtgagcctcacctcgaccaacctcaagcagaaagacttcagctggacaacgagcttcgtcttctcttacacnaacacngagatcaccaagctgttcaacaacggacgtgtgatcgatctcgtgtcgggtaanggtttcgccatgaagggtttcccngcccgcgccctnttntcngtgccnttcctgggnntgaacgacgccggcatccccctcttccgcaacgagaagggcgaagtgacnaccgacgacatcaatttccangaacgcaaccacaccggcttcctcaaatatgagggcccgacggatcccaagtacgtgggttcgctcggcaacgtgttctcttacaaaggactccacctgaatgtgttcctcacctactcntttggcggcgtggtgcgcctggatccgaaattccgcacgcgctanaccgacatgacctccatgacgcagacgttcctcaaccgctggatggcncccggcgacgagaaantgacnaatgtgcccggcatcttgagcaaacgccagtacacgcaaaaccgccaactgcgttatgcctacaatgcctacaacttctcgtcggtgcgcacggccaaatccganttcatccgcctcaaagagatctccctcacctacgatctgccggcatcnctcttcaaagacaaggcnatccacgacgtttccgtcaaacttcaggccaccaacctcttcttgctctactctgacaagaaactccacggacaggatcccgaattcctcaangccggnggtgtggcttcncccatgcccaagcagtttaccctcacactcaaattcggactctgatcaattcgacagttagcatgaaacattatattgcttctctcctcttgggtgccgccacactgggcacttccggcacgttgacctcgtgcaatgactatttggacaagtatcccgacaagcgcatggagcttcgcacgcccgatcacttggcacagctcctcacctcggcctaccctcaggtgcacccggcctacttgctcgaaatgtattcggacaacacggatcgccatctctcgccttcgtgggcngaagtggatcgcttccaacgcgaagcctaccaatgggacgacatcaccgacgtgggcgaaaacgaatcgccgcaaatgatttggaactcccactatctcgcggtcaacacggccaatgaggtgctgagcttcatcggcaaacaaaaggaccaatcggctttccgcgcccaaagcggcgaggccaagctgtgccgcgcctatgccatgctctgcctggccaacgtgttctgcgaagcctacgatcccgcnacggcagcttcgcacttgggcctgccttaccccacggaaccggaagaccgcccgggcattacttatcaacgtggcacgctggccgagctttatgcccacatcgacaaggacatcaccgaaggtttggccgaagtgggtagcacttacaccacaccgaagttccacttnacgcccgaagccgcgcacgctttcgccgcccgcttctacctttacaaacaagactggcagaaagccgtggatcacgccacgaaagccctcggcaaccagcccggcaaccaactgcgcaactgggcactctggaacaaacaggggctcaacggcgaggccatgcccaacgaatatgtgcgttcgagcgcgaaaaccaacctcttgctccaagtggtgatttcggcttgggggctctacagcggcccttacggcacaggcggtcgctactgccacggtcgcagcatttccgacaaggaaacgttcaactccacnggnccttggggcgaaagcgagngcgctttcaactacaccgtgggctccaactccggccaaccgcagatcacgctcaagaagttgcccatcaacttcaaattcatcgaccgcgaagccggcatcggtagctactattcggaatattcggtgttcaatgccgacgaaacgctgctggttcgcgccgaagcctacgcacgcctcaaacaatatgcgcaggccacggccgacatcaacacggaaatgacggctttcgcccgcaaacccaanacgttcaccacgacgcagctcgcggacttctacaaaaaggtgaaatactaccgtccggacagcgccacggtgcgcaaagcgttccacatcagcgagccgctcgacaccaccacgcaagaaccgctgctgcaatgcattcttcatctgcgccgcatccttacggtgcacgaaggtctccgcatgcaagacgtgaaacgctacggcatcacgatctatcgccgcgatttcgacgccaacgacaagtttgtcaccgtcaccgactccatgcccgccggcgatccgcgccgcgccatccaacttccgcaggatgtgatctcggccggcctcacacccaatccgcgtaaaaccctcactgccaaatgaaactccggatgaacaagatactcctcgccacgctgctgctcctttcgtgcttggggctcagcaattgctcggacgacgctccgaaaggcgccagcattttccccaccacccccgtccggcgcaacgccttcgacacctggctgctcaaaaactacacgaacccttataatattgagttcaaataccggctcgaagacgcagaaacggactacaactaccaccttgtgcccgccgactcggcgaaaacggccaaattggccattctgaccaaatatctctggtttgatgcctatgccgaagtggccggcgtgaactttgtcaaggccaatgttccgcgcaccatcgtggcngtcggcattccgggctacacacgtcagcgcacaatggtgctgggtagcgcagaaggtggctacaaagtgacgctcaacaacatcaattcgctcgatagcgtcacgctgaccaactacggcgcgatgacggaattctatttccacacgatgcaccacgagttcacgcacattctcaatcagaagaagccctacaacacggccttcaacctgatttcgaagtccgactacgtgagcagcaactggtcgcaccagaaagaaagcgacgcccaccgcgccggtttcgtttcgccctacgccatgagcgacggcttcgaggatttcgccgagaccctggccttctacgtcaccctcacccccgcacagtggaacgacatcctcaaagatgccggcaactcgggcgcaccgatcatcaaccagaagctcgaaatcatcaaagactacatgctcacgtcgtggaatgtcgacctcgatcggctgcgggcctccgtgcttggccgcggcgacaacgtgcgtcatctcgatctccaacacctcaagtaacttctccccatgcgcatccttcataccctcgtcatcgcacttgccgccctcggggccgccagctgcgccaacgacgaaaaagaacttttcagcctccccgcggctgaacgcatcgaccaagtggtcaaaaacgaccgcaccgctctcgaatctgcgcccaacggctggaaattcgactactttctcggncgngactactcaggtccgggcgtttcgatgatggttaccttccgaaacggcaaggccacgatggcttccgacgcgtcggacaccgcactcttccgcactgccgactacgatgtggtgaaagatcaaggcccggtgctgactttcaacaccttcctcgancccatccacagtttggcgggcggcatggccagcttccccgaaggtcgtcagggcgactacgagttttcnatcctctccacctcggccgacaccatncgcctgcgcggtaagaagtggggcaacgacatgttgctcacccgcaac

SEQ ID NO: 1563 - DNA, 4000 bp, Escherichia coli
  misc_feature (2)..(2): n is a, c, g, or t
  misc_feature (6)..(7): n is a, c, g, or t
  misc_feature (59)..(59): n is a, c, g, or t
  misc_feature (68)..(68): n is a, c, g, or t
  misc_feature (70)..(70): n is a, c, g, or t
  misc_feature (76)..(76): n is a, c, g, or t
  misc_feature (79)..(79): n is a, c, g, or t
  misc_feature (84)..(84): n is a, c, g, or t
  misc_feature (87)..(88): n is a, c, g, or t
  misc_feature (96)..(96): n is a, c, g, or t
  misc_feature (98)..(98): n is a, c, g, or t
  misc_feature (106)..(106): n is a, c, g, or t
  misc_feature (121)..(122): n is a, c, g, or t
  misc_feature (125)..(125): n is a, c, g, or t
  misc_feature (132)..(132): n is a, c, g, or t
  misc_feature (137)..(137): n is a, c, g, or t
  misc_feature (159)..(160): n is a, c, g, or t
  misc_feature (176)..(176): n is a, c, g, or t
  misc_feature (182)..(182): n is a, c, g, or t
  misc_feature (190)..(190): n is a, c, g, or t
  misc_feature (196)..(197): n is a, c, g, or t
  misc_feature (205)..(205): n is a, c, g, or t
  misc_feature (212)..(212): n is a, c, g, or t
  misc_feature (214)..(215): n is a, c, g, or t
  misc_feature (220)..(220): n is a, c, g, or t
  misc_feature (259)..(259): n is a, c, g, or t
  misc_feature (373)..(373): n is a, c, g, or t
  misc_feature (377)..(377): n is a, c, g, or t
  misc_feature (382)..(382): n is a, c, g, or t
  misc_feature (387)..(387): n is a, c, g, or t
  misc_feature (393)..(393): n is a, c, g, or t
  misc_feature (541)..(541): n is a, c, g, or t
  misc_feature (874)..(874): n is a, c, g, or t
  misc_feature (907)..(907): n is a, c, g, or t
  misc_feature (1145)..(1145): n is a, c, g, or t
  misc_feature (1536)..(1536): n is a, c, g, or t
  misc_feature (1704)..(1704): n is a, c, g, or t
  misc_feature (1707)..(1707): n is a, c, g, or t
  misc_feature (2834)..(2834): n is a, c, g, or t
  misc_feature (3215)..(3215): n is a, c, g, or t
  misc_feature (3233)..(3233): n is a, c, g, or t
  misc_feature (3979)..(3979): n is a, c, g, or t
gncctnngcgccagcagcctcaaaagcagccttagctttatcagcggttgccttatcanccttctccntnatggtngcnggtgnggnntcaactanancctttgcntcttttaggccaagnntgnagttaantgcangtacctctttgataactgcaannttctgagaaccagcancctcanggatgatngtgaanncatcttgngcagcancnnctgcnccgccagctgcgccaccggctgctgctgcagcaactggngctgctgctgttacatcaaactctgtctcaaatgctttcacaaactctgttagttcaaccaaagtcatatctttgaactgacctaatagatctggggtatttagctttgccatnttcntttcnttttnttctantcccgactccaactcttggtatgagtacgggggttgggggtcggtttagttttctgtgctttcagcagcaggtgccgcttcggctacaacttcaggtgttgcatcttgtgcaacgactgcttctgcaacaacttcaggagctgcttcngcaacgactgcctctgctacaacttcaggagctgcttgcgcaactggtggagcaactggtgctggtgcacctgcctccatcttgatgcgaagaccatcaaatgttctagcagccttagacattgatgctttaagtgcaccggcaatcttggcaagtagaacttcgcgagattcaagattagcaagttgcataatctcagcagttgttactgccttaccatcaaaaattccacccttaataattagaagtggattttccttagcaaaatcacgtaatgctttagcagcatcaattgggtcacctttaataaatgcaacagcagatggaccagcnagcattgctggatctagatcaacaccggcttcntttgctgcaattttagttaaagtgttcttaactacggagtacttgttttttacaccaagtgatcgacgtagttgctttaataatgtagcggatagaccacggtactcagtaagtacagttgcatttgcggtgcggaaatcttctgcgatctctgcaacagcagcgctcttatctggggttgccatttggcatcctttctaaataagaaaaacctcggcgcataaatgcactcgaggtnatcgattacacctatgcgggctgtttttcaacaattaccttttaaagatttactttaaaagacctgcagtctttggttttctgtctttctaattattttattaattagcctgactgaataagccaagggtaggcggtaaggcctacccaagtcaaaattacttatttattggatctgggctccaccatcacgagcaactgaggtatcaagttggattcctgggctcatagttgatgaaacagtagctgacttaataaagcggcctttagatgatgcaggctttgctctcattacctcttcaattgctgcagcataattttcagcaagttgttcagcagtaaatgaaactttaccaattacaaagtgcaggtttgagttcttatcaactctnaactcaatctttccacctttaatatcagtaacagctttagcaacattggttgtaacagttccagtctttgggtttggcattaggccacgaggtccaagaacttttccaagtcggccaacctttcccattaattcaggtgttgatacaactgcgtcgtaatcaagacgnccntttgaaacttcatcgattaattcatctgcgccaacaatgtcagcaccagcagcacgtgcctcttcagctcgctcaccaccggcaaaaactaaaactctggcagtcttaccagttccgtgtggcaagttaacggtggaacgaatagcttgatctgctttctttggatccacacctaaaaacaatgcgatatcaacagttgcatcgtatttaacagttgaagtctctttaactaacttcatcgcctcacctggcatataaagattttctaactttatcttctcggcggcggccttatatttcttactgcgcttcatttcttctcctcttaattaatcttgaaagggttttcaagattggggttgtggtgtttgcgaaccagcgaggttctcccacattatttatttttaactagagacggtaatacccatcgaacgagcggtaccggcaataattcgtgaagccatctctaagtcattagcatttagatcaaccatcttttgcttggctatatcttcaacctgtgccttagttagatttgcaactttatctttatggggaactgctgatcccttttcaattccggcagccttaagaattaatcgtgaagctggtggagttttagtaataaaagtaaatgagcgatcctcaaacacagtaatttcaactggaatgatgtttcctttttggctttcagtcgcagcgttatacgccttaacgaagtccatgatgttcacaccatgctggcctaatgctggtcctactggtggcgccggtgtggctgctccagcctgaatctgcagcttaataagtgcggttacttttttctttggtgccatggttttttccttttctcttctcgttaaatcttttgtacctgatgaaatgaaagttcaactggagtctcgcggccaaagatagagactaatacctttaactttgcttgctctggcatgatctcagagatagttgctggcaaggttgcaaacggaccatccataacagtgatggattcaccaattgcataatcaatatccttcatctcaatcttgccgcccttcttaagtgggcgtggagctaagatgttttcaacttcagaaagcgtaagtggtgatggatgatgagcgttnccaacaaagccggtaacacctggtgtgtttctaacgcatgaccatgactcatcagataattccatacgaactaatacataacctggaaatacgttgcgctttactactttaattgcgccattcttaagctcgcgaacctcttcttcaggaacttcaatctggaagataaagtcctccatatttaaagattgaatacggtttactaaatttcctttaaccttcttttcatatccggcgtatgagtgaacaacaaaccactcacctggtgcgttgcgaagggcggcgcgaaactcagcgttctcatcattttcttcactaacactctcatcagttacatcttcaataactggcgcaattacctcttcaacaactggtgctacntcggtaacagctagtgcngcttcaaatgcatccactggtggattagctggggtatcaattgacatcatattttcctagatcccttagccgaatacccagaaggtaatttttgttaaaactaaatcaaatattgaaactactaaaataataaatccaacgaatactaaaaccacagctgtgtaggtggttaattgatttcgagttggccaaacaacttttactaattcagaaataatttggcggtagaacaggccgatgcgaccaaagagccctttggcttcttcagttgagacaatctcttcgctcatctacctattccttttcttttcagttcttacttacttcttactaattaccgaactacttgcagggcaggagggactcgaacccccaaccggccgctttggagacggcaactctagccaattgagctactgccctttgtcccgaattaaggcatgaaaaatcatgacctaatacaagcgccgggggcgaaagtgtagaggaggtagtagtcgaaggtaaaactgagataaatatgaagcctcttttaagcgtagatggcacacttaagccccatgagcgcatctgaaaaacctagagtttcaaaacgaattgcagctatcgcagagtcagcaactcttgcagttgatagcaaagctaaagcgctaaaggcagccggtcggccagtaattggttttggcgccggtgaaccagattttccaactcctgattacattgttaactctgcaattgaagctgtnaaagttgtagctaatcaccgc

SEQ ID NO: 1564 - DNA, 4000 bp, Escherichia coli
  misc_feature (184)..(184): n is a, c, g, or t
  misc_feature (226)..(226): n is a, c, g, or t
  misc_feature (295)..(295): n is a, c, g, or t
  misc_feature (959)..(959): n is a, c, g, or t
  misc_feature (1619)..(1619): n is a, c, g, or t
  misc_feature (1964)..(1964): n is a, c, g, or t
  misc_feature (2015)..(2015): n is a, c, g, or t
  misc_feature (2613)..(2613): n is a, c, g, or t
tggacgctcatcttttgtgtcatacactgcaaatacaatatttttaaagtggtacatccacttttcttcgacaagaacttgatacatatcattggccacatcctttggaggattgccaaatgctccacatccccacgcaccaagaattaaggtgtcatagtgctcctttgcggccacctgaatncccaaacgaaatttatgtcttctctcttcgcccaactcttcngagtttaattttcctgcctttacacgagtatttggtgccggcaaggacataacagaaacttgatagggntcaggcaaaaaacttccatctgcccttcgaaagacttcgacatccttagagagcaataaatagtcaaggtctgtgttgcttgccacattctccttattggcctcatacatttctaaggcttggctgccactaatggactgatacaaactgctctgacggcaaagtacctcttcttgtgcattagctccacgcagatatccaccacctggattatatgcattggcaaaactaaggactaaaatcttcctgccgctctccctcatttgccaagctgcatcaaaactatttaggtcattgacaatgacattggtcgaatcatacatcatttgattgccaacatgcaaattggcaagtagatctggtgtgtaaacttccacggcctgccgcctgctctttggaatggtaagctctatttttttgtcattcagtgtataaaaacctagcctcagaacatccatattttctgtcgctattttttttctggattctctactcatattcccacactcttttgctttattttttcttatatggaactttagctgctggcactacctttgaagctgcacgcaaatgagcactctgatcatcaaagaaaatatgtgcaccaaatgcagacaaaacctcactcttttttattccgccaagaaaaaaggcctcatcnatgcgaacattccacgcccgcaatgtccggatcactctctcatgtgcaggtgcatttcttgctgtcacaagtgctgttcgtatcggaactgcatctggtggaaattgctgctgcacataggaaatggtctttattaacttggcaaagggtccctcaggcaatggcttttttgcattctcttgttcatacaaagtaaatgcttctaagcccttctcctgatagattttttctgcttcatctgaaaaaagtacggcgtcgccatcgaaggcaattcgaatttgtggaatttctgcttttggattgatcttgacttctggataagaataaattagacctgctgccacccctgcatcgacagcttcttgcacatctgacccatttgctgataaaaagagatcggtatgaaatgcatttaaatactttacaatcggtgcaccgccaaccaatgcggctcgggtaatatctaaaccatagtgttcaatagaattgaaaatacgcagactggtgtctgctgtattccttgacataataataatctctgtcaacttttttccgcctgcattcagctggtgcaatgcccgtaccaaagaaaaagccgttcccggctttagtacatcattttcgtgctccctttgatactttgcatagatctctattccntcggtttcaaaaattgcattttccctctctaaatcaaacaatgccctcgaagagatccccacaaccagctttccatctaattgaaatgccattgctcacctcaatgtatcctacaatattactccactattgtataatcttttcagataattaacaatacctttattaattttattcactgaaaagagtatatcataatttctatagctagaaaagagctagaaaaattctcataccaattgtaagatttttgttatatatttagacaactcattcaatatgtatcattacgcaaaaatgctggtcttcaaaacaaaaaccagcatctaattctatattctctangctttctgaattttctgaatactttccatttcttctactatttttctattntttagaaattttgaacctatagcaatgagtaaaaagagaatggctgctacaggatagaaccaaactaaacgattggttgttccataaatttctaaaattccctgaaaaatacttccaatggtcaaagtcaccacgaccgcattccatgcacttacggtaatattccttggctctttttttgccctcttgctcgccaaaagataggcaaagcttcccagacaaagtggaatcataaaggcatagatcatataataggaatacacttcatggctaaacttttcatagattgcaccaaaaatagcaataaaaattgcaaaaatcatatgtccaaaaatattatctcgataaatcttatccaatgtagacaatatcgctcaccttcctctctcgaatatctcttcccgatgttgttggcttattgattaaacttccctgaaataccatcgtggatgagccaccgccatctaagttgtaggctgtctttgcccccaagctcttcataaattgtgccagctgatacagcgaaagtccttcgctctcctgtgttcttccatcggagaccacaaaaagatagtgattgttatcgatcagcccaatngctgttcttggattgctcgccatggctcttccaacctctgcatcggttgacacactcacctttccctcactcacaagtcctgggccaaatgaaaatgcctgccaaaccccttgattaactaattcctgtgcggtcacggttgacggatcaaccaccttcatactgccatcggcatagatacaaagtacatcttcacttcctgcctcatctcggtagactacaccatttcgaatcacatagccatcctctcttgccccatagtaatccccattaatagataaaatggcatttttttcactggcaatctgtgaagttgtctctgtgacattttttccataggtatcactggcaaaggccgtctttagtgattgtgcagaatcaagcgtaatgtcagcgacatagaccttcgtgttttcataggtgtattcctttaagctgatgttctttccatcttggctgtagcttttgatctcctttccaccatctgtgctcgtcttcgtctggttgctcgctactgtcgtctcacttttacttttattggcacttgatgtgctgttttttgcactggatgactttgttgtctttgtagccgatgtcgctgcctttgttgtcgtattggcaaatgcagaggtattcacgcttgttgtatttacctgatatgctcttgaaataacaaaagtatccattgaaatatacactgtaaatgccaatattgatgtcaaaaatagaatattccacttatgctttttcatataaatctccctcccgagttccttttttaaaaacgaattgtctctgtacactccagctgatgacaaacatcataatctctgtgataatctttgccaaataggcgttgatgccaaaagaaacaattcctctgagcaatatcacatttcccaacaaaatgcatagagcaagtgtgatatatttgggcaaagattcgatggctgcctcttggcttttaaatacaaacttccgattgaggctgtaatttaggcttgcactgaccattctagccaaaatacttgaaactaccattgcccccgaaatcataaataacagacaatacaatccataatctaccaaaaaactagtgagtgacgacgaagcaaagcgaataatctctttatagattcgataagagtccttgattgtagaaaaatgagatgatcgattgtcattgagatacaccgttgcaatctccacctctttgatatcttcctttctcgctaattccaagagtacattcatctcatattcatatcgttcacctcgaacggaaagcatttcttccaccattctgtcagaaaatgcccgaagtcctgtctgtgtgtcaaagacatctagtccgctactgaccttatataccatccgagtgatactg

SEQ ID NO: 1565 - DNA, 4000 bp, Escherichia coli
  misc_feature (3629)..(3629): n is a, c, g, or t
  misc_feature (3736)..(3736): n is a, c, g, or t
ttccatccaatactgtcgtaccgccaaagtcaggcaaatagtagacggaactgttgccgtgttccagcgctccgaaccctttaccggcaagtgttcggatggctttaatgattgttccaattttaatttcttggccggtaaacagtccttcgaattctgtatggtctttgatataaaaaatgaagacataattatctacgggaagatcgccctccaaaaaggcttcaatggccttcatactggtcgctacctgcgcatatatctcctctgatagttcacgtccattttcagtaaagacacctatggttactttggctccgccgagctgaaatgaagtggtatcaggccggctgaccattactgggcagtctagaaattcatggtaattgcgtgcatagaaattctgagtattaccgtaactgtagctttccatagcgcttaggccgaagaggctggggcttttagtaatctcgagcgatacggggaggtcttcctgtccttcgaaaaagccgaagtaacctgcggcatttaaaaggaagttcgtgcgttcttgattgttcgttcccgccggttcaaatactttattcttgcgaatttgcgcatcaaatgtgtcgtcggcccaatattcaaggcgctcaggttttccgtagatggtaaaagtattgtcctttcgtttaaccttcagtaatgctccatcgctgccgtaagcttgaaaatcttgaataaatcgaccgtagtctagcgtggcataggtgcccggaatggttgcagggaaatgaaagttgtacgtacgctgttttgtggtcaattgaagcgatctagcatctacggaaactttaactcgatcgtctatcacttgcgtgaggtcaatggtgtaggaatgcatacccgcatgttgccctaaagagggcaatgtgaggatgaggaatagggaaaggagtttgattttcatcttttaaagatactatgctattcagtaagacaacgaaaaacagatcgagggttgcctcggcatagaatgatttaaaaaaagaaagccccacgactttcgtcgtggggctcactaacactctgaaacgtatgattaagccgcctctgtcttagactcgatagccaaagagtagattacaagaccaaatccaattttgttgattgcatcagcaaggttgtagcacaagttcagtacttcctcgtttgcttcgatacctaggtccattccgaagaatccacctgctgtacctaagatgtaaccgatagggtagataccccaaccgatgattacaaatttagccaaagcactgtttgcttttgctactgcaccaccagcgttgtttgccaatttcgcaacgtctcctttccataccatccatacgatgtagaagtaagcagcaccagaaatagcaccccatacccaagaaacagcgtcatttgcgtagaatgcctcaccgatgtaaccggtaactaacattgcaactgaagctaggatcagtttgtacaagattgactttgtacctccagctttctttgtgatcaagtagaactcaacacacataagtggaacggttaacgtccagtctacataacgtagaacaactggacttccattaccggcagcgtagaaatcacgcatgtagtagtagtgcactgctgcaataccagtaataagcccactaacgagcattgaagttttccactcgtctgcaactctacttctttcgaagaagaagaatactgaagcggccaacatcgccatgtaaccggcgaagaatgtgaacgatacgtaatcgttcggatcgaatcccatagatccgtctaaaaataatgacatggtgttaaaaattaaaggttataactaccacttaacttacgaagaatacttttgttcacgacagactaaaaataagttaaaacactcatatttatagccatatttatcgatttcagctatttatacagctatttagcaacatgtatagaacaaaatatatatgaaaatgttgtgctaaatataaagggtctaatcgacatttaatcaatggagcgttacgatataggttttttgggaatgggtgccgcaaatggtttgcttttgcttgaattggagcgtagaaatatcttgcaccagttcaaaatactcattcttgaacccgatgcgaaacttaaaaacgataagacctattgtttttgggcggattccaaacatgaaatccgcacgcgacttaaagatgtattgttccaccagtgggatacgctcgatacggtggatggtctggaggcgttagaagatcaacattattatatggttgaaagtagcgcactatataataaggttaaatcggttgcgcaatcgtacgaaaacatcgtttggattagaggagctgttgatggtttaaggacagaacaagaaggcgttttagtttcaagcggagactattcgtgggaagttcagcaagtgttcgatagcaggcccccaaacattaaagagcccatggggccgcttgtcttgcaaagttttgtgggttggcgcgttgagctcaaggaagcgtactggaccccgaatgaaatgacgttgatggattttagtattcctcaaaacggctttacgcagttcatgtacgtgcttccaaccggaactaaggaagctttagtggaaatgacgcgcttcggcagtgaacaattgccgcatgaattggccagtaatcatcttcgaaattatcttctttctagaggcttgtcttttgaaattcaacacgaggaacgtggagttattcccatgacgcaatatgccgaggtcaaagatcaggatgcacgtattgtttctacaggtgcccgtgcaggaagggttaaggccactacaggctatgcttttaagagcatgtttgagcatgcgagagaattggcagaaagtattgcgcaggagcgtaaagaatcgtcgtggttgcgtttgcctaagagcactatggatcgattcaatttttacgatcatctgctgctgcacatcttgaagcataaaccacactggggtaaagaaatatttgaaaccttattcgagactcagaaggccaacaaggtctttcaattcttagatgaaaaatcttcctttaagtgggagttaagcatgtttgctcgtttgcccatcatgaaatttttatgggcattagcggcttcttttgtggctataattgtggctaagcccgcgcgctgggctccagtagtattcacggttttagcgctcgtagcggatgcttttttgccgctatccgtgacttatggcctgcaagccgtgctcgttttcctgttgtttctttatggcataccccatggcgcattagacggttacagccacgccaaccaggaccgattaccgaaattcattttgcgctactgcttcatcatgctgatggtcattttgttttgggctgcaagtccagtcataggattatccgccttcttaatttacagcgcgtggcatttcggggaaacggacctgcgcgagtggggctttcctagtattggtctttcgtttttatgggggactttactattgacgctgatacttatacctcattcgatggaagtgaacacagtgcttgaagtcatgggtattagtaaagtaacatggtctacgnaattcatggatatggtttacagaatggcgctgacgctgggactttttatgggcctttggtttcgctcgatcccctgggtggttgccgtggtgacactcggtttgacngcgacaataccgttggctactgcattcggtatttactttgtcttgcaacacagtctgtcgggttggaaccacctaaagttgtcgcacaaatggacgaacacggaaatgtggatgaaagccttgccgtttaccattggtgcagtggcgctcttcttattggtgtttagattcgataaaaactccctgttggcgtggtcgagttactttttagtattccttagcgccataagcttaccacacatttacttcatgtcgaagctttac

SEQ ID NO: 1566 - DNA, 4000 bp, Escherichia coli
  misc_feature (14)..(14): n is a, c, g, or t
  misc_feature (108)..(108): n is a, c, g, or t
  misc_feature (111)..(111): n is a, c, g, or t
  misc_feature (568)..(568): n is a, c, g, or t
  misc_feature (942)..(942): n is a, c, g, or t
  misc_feature (1767)..(1767): n is a, c, g, or t
  misc_feature (1991)..(1991): n is a, c, g, or t
  misc_feature (3051)..(3051): n is a, c, g, or t
  misc_feature (3069)..(3069): n is a, c, g, or t
  misc_feature (3094)..(3094): n is a, c, g, or t
  misc_feature (3430)..(3430): n is a, c, g, or t
  misc_feature (3432)..(3432): n is a, c, g, or t
gcgactccatcggncgtccgttcttccgccatgagcctcgacaagcccacccctgacgccatcgatggcgccgaactccgcttcgccctcgtggccgcgggttacaanggngagctggtccaggccctgaagaagaacgccatcaaaggcctgcgcgccgccggcgtgcccgccgcctcgatcgtcgaagtcgccgtccccggctccggcgagatcccttacgccgcctacatgtcggccatgaccggtgattatgactgcgtcatcgccctcggcgtcgtcgtcgccggcgacaccccgcaccacgagatcatcgcgcactcgacggcccaggccctccaggacgcggccatccgctccgaagtcccgatgatcaacggcatcgtcgtgacgaacacccgcgagcaggccgtcgcccgctgccagggttcgctggaccgcggcacggaattcgcccacgccgccctcaccatggcccgccaccgcgtcacgctcggcgcccgcctcgaccaggtcgaggacgaggaacgcaagcgcggcggccaggaacctttcgcccagaactgancgatggacaacgactcgcctatctccgcctccgcgcgcgccaagatccgcatccggatcaaaggcgtcgactaccgcatggcggaccagaccgcggccgacatcatcgccagcgtcgtcggctccggcgcccgcatctccggacccttcccgctgccctcccaggtcgaggaaccgcgcacggccctccgtgaggagatccgcagccatcgccgcctgatcgagatcatcggctccaaccagaagaccgtcgacgcgttccgccgccacaacgtccccgccggcgtcgagatcgccatcgtcgccccggaagaaccggtcgtcccggaccccgccgcgccgcccgccaagcgcaaccgccgccacgacagccgngtcgtcgcgatgcagttcctctgctcgtgggaagtccagcgccacgccgacatggtcacggccctcttcgacttcttctccgaacgcccccagccccgcgaatattacgccttcgccgaggagctcatccagggcgtcatccgcgacctcgccctcatcgacgagatcatcggcaagtacgccaagaactgggccttcggccgcatcgcccgcgtcgacctcgccatcctgcgcgtcgccatcttcgaactcatgcgccgcacggacatcccgccggtcgtgagcatcaacgaggccgtcgacatcgccaaggagttctcgaccgaggaatccaagcgcttcgtcaacggcatcctcgacagctacaaggaagagctcgggcgcgacccgcgcaaggccgagggcggctgagccatggcgggcttcttcgagcgactgaagtccggcctgagccgcacggccgaggccgtggccaacctgctggcgcgaccgatggacgccgcgtccgccgagcagctgcgcgagcggctgatcgccgccgacttcgggccggccaccgccgacgaggtcgtcgaagccgcccgcgccgcctggaagaccgaagcctcgctccgcaagacctcgcccgccgaagccgcggccgaaagcatcgtccgcgcgctgggcggcgagaccgccgcggcgcccgcccttacgaagccgcacgtgatcatgctcctcggcgtcaacggggccggcaagacgaccaccgccgcgaagctcgcctggcgctggcgcgaggaaggcaagacctgcctgctcggcgcgtgtgacaccttccgggcngcggccggagaacagctttccgcctgggccggccggctcggcgtcgaagtcgtcggcggcgccgccggcgcggaccccgccgcggtggcgttcgatgccgtcaaggcgggcgtcgcgcgcggcgccgacctcgtcatcctcgacaccgccggccgcctgcacaccaaggcgcacctcctcgaagagctgcgcaaggtcgtccgcgtcacgacgaaggcccacgncggcgcgccgcacgagaagtggctcgtcctcgacggctcgctcggcgccaactccatcgagcaggcccgcatcttccacgaagccgtcggcctcaccggcctgatcgtgaccaagctcgacggcaccgcccgcggcggcgcgctcgtggcggtggtccgcgagctcggcgtgccggtccgcttcatcggcgtcggcgagcagccggccgacctccagcccttcgacgcgcgtgcttacgcccgttcgatcgtcggcctggccgagtgaggttgtcttgccagcgggggtggctcgccccagcgtgacctcatgtcggccgagaccgtcaccgtcgaactaggctcacgctcctaccccgtccgcatcggggccgggatgcgccgcgaggccttggccgccgccgaacgtcgtctggccgccggccagaagtgcgtcgcgatcacctcgcccggcgtcgccgccgcgcagtccggcttcgcggccgaactcgcgcgcctgatgcccgtgctggccaccgctgcggacggcgagacggccaagtcggccgccgaactggcccgcgtctgggacttcctcgccgccaacggcgtggcccgcgacggcgcggtcttcgcgctcggcggcggcgtcgtcggcgacctcgccggcttcgcggccgcttcctatcagcgcggcgtcgatttctaccagctcccgaccacgctgctcgcgatggtcgacagttccgtcggcggcaagacgggcatcaacctttccgccggcaagaacctcgtcgggaacttccaccagcccacggcggtcttcgccgacaccgacctgctggccaccctgccgccgcgcgaattcgccgccggcatggccgaggtgatcaagcacggcatcatcgccgacgccgacctcttcggtctcctcgaacagaattcgccgctcgcctggaaccatccgctcctcccgcgcgtcatccgccgctgcgtggagatcaaggccgccgtcgtcgccggcgacgaacgcgagaccagcgcccaaggcggacgcgcgctgctcaacctcggacacacnttcggccatgcgatcgangcgaccgccggctacggcgcctacntgcacggcgaagcggtcgccatcggcctcgtgatggccgcccggctttccgccgagctgaagcactgcaccggcgcccaggccgaacaggtcgaggccgtgctgaaatcccacgccctgccgaccgccctgcgcgcgccgctcaggctcgacccgatgctcgccgcgatgcgccgcgacaagaaggtccgcggcggcaagctgcgcttcgtcctgcaggacggcgtcggcgcggccagcaccgcggacgacgtgcctgaagaggccgcggtccgcgccttgctcgccggcggcgccgtccgctgaggccgtccgcttgacccgggccgtcagagcntnttggatacgccatgccccgcctcctctgcgcctgcctgctggcagcctccgtcatcctgcgtgccgcggagacgccggaaccaggcaagacctacttcggtcgcaatcagtacgtcgaatacatcgccggcagcctgcccttcgtcctgtcggccccgcacggcggacgcgacaagcccgccgaacttccggaccgcgagaagggcaccttcgctttcgacaccaacacccaggaactcgcccgcgccatcgacgacgagttcgtcgcccgcaccggccagcacccgcatgtggtcatctgccgcgtcacgcgtcgcaagatcgactgcaaccgcgagatcgtcgaaggcgcggcggggaacccgctgaccgaacagtcctggaaggacttccaaggcttcatccggaccgcccagcaggcggtcgtcgcgaagcatggccaaggattctacatcgacctgcatggacacggtcacgccgatgcccgcctcgagctgggctatgcgcacgatcgccgggagttcggcctgccggacgccgagttggccaagccggagttcatcaggaa

SEQ ID NO: 1567 - DNA, 4000 bp, Escherichia coli
  misc_feature (64)..(64): n is a, c, g, or t
  misc_feature (70)..(70): n is a, c, g, or t
  misc_feature (190)..(190): n is a, c, g, or t
  misc_feature (391)..(391): n is a, c, g, or t
  misc_feature (1985)..(1985): n is a, c, g, or t
  misc_feature (2463)..(2463): n is a, c, g, or t
  misc_feature (2511)..(2511): n is a, c, g, or t
ataatattgagatttaaagattaaagaagtaccaataacaacaaaaattcctaaaaaaatttcntatggnattatttttcgtttataaaataaaggttccaaaaatgaagttaaaaatgcccctaatgaaagcacactaagggtaattgagacattagaaactttaatcgcttgaaaaaaagtaatccantgtaaagaaattaatactccgcaaaaaagcaatttaattagaatcttattagaaacttttatgtttattttaaaaattattgcaaaaagtattaaaataacaaaagcaattaacattctataccaaactaaacttaaagagcttacagatattaatgaacctagtattgcagtaaatccaaaaatgaaaactataaaatgnaaatgtaaaaaactattaagtttatttttttgcatttttcaaaaaataaatagctaataataaaaaagcaaaatttggtatccatgcacctaaaaaaggagataaatttgatttacttaccatcactgcaaaaaacttatcaaaaaaaacaaatgtaaaagcagtaatgataccaaatgctaaattaattcccattccttcccttcttttgaatgatgaaacagagacagcaagcaatgttaatacaaatgtagaaaaaggtatactccatcttttatgtctaactaataaatgattatttattaatggagatccactttctatttctttatcaataaaatcattaagctgaaaaaaattttgtgtttctgccatataatttagactagaaagttcatcgattttaaaagaaaatattgtgtctttaattcttttagattcaattaactgactgtcgttcttgaaagttcttttaaaataatcgttcaaacgatatatactatcttctgaaacccatctgatgtttcgggcagttattttataacttaaagaattatcgataaatttttcataagaaaaatcataagccatttctcttgtaggattataactactcacataaataaaatcgttttcattaacctgtttgtaaatcttagaagtttctcttgattttttattttttttcaaatatttatattgaaattcattatattttttattcttttctggaactataaacatgcctgaaaaaagggcaaaaacagctataattgaagctgcaatcataaatggctttaaatatctattaaaagaaatacctgaacttagaatggcaataacttctgaattattggctatttttgatgtaaaccatattacagctaaaaaaacaaaaattggataaagagtatttccgaaataccaaacaaaatttaaataataatctacaatttcattaaacggcacgtcgaattcttttaatttatctattttttcagataaatcaactaatattccaattggaataaataataataacattgcagtaaatgttatcaaatattttttaattatatagttatctaaaattttcaaaaaattataatttattatccatttgtctaaccattagttttttccaagttaaaaaagtaccatttaaaatttgatttctagcttctctaaccagccataaatagaaggctaagttatgaattgttgcaatttgtcttcctacagcctcttttacagtaaataagtgtcttaaatatgcttttgaatagtacgtgtcaacatatgaataattatcattatccaaaggactgaaatcattttcccattttttatttttaatattaattcttccctgagctgtaaatagcataccatttcttgcatttcttgttggcattacacaatcaaacatatctacaccaagtgcaatattttctaataaattaataggagtacccactcccattaaatatctaggtttttcttcaggaagtacattacatacaacttcagtcatagcatacatttcttcagcaggttcaccaacagataaacctccaatagcatttccaaaagnattggtctcagatataaattctgcagactgtaatcttaaatctttatatacactaccctgcacaataggaaacaaagtttgagaatagccatgttttggatcggttttcttaaactcattgatgcatctaatcaaccatctatgtgtcatatgcatagattttttagcataattatattcacatggataaggagtgcattcatcaaaggccattattatatcggctccaattgatttctgaatgtttattgctctttcaggtgtgaaaaaatgaaaagagccatcaatatgagatttaaacttaaccccttcttcattaatttttctatttgcagataaagaataaacttgatatcctccactgtctgtaagaattggagatttccaattcataaacttatggattcctcctgcttctgaaataatttcaggtcctggtcttaaatataaatgataattatttgctaaaattacatcnggattaatttcattttttaaaaccatttgatctactcctttaacagangcagctgtaccaacgggcataaaaattggagtttgtataactccatgatcagtttcaattttacaagctcgagctttagtttcagaatccttatgttctaatttaaatttcatataataaaagaccaaatataatcatctatagttattaaaattatctatttacaattgttaattaattatgtatttaattatcaaaataagtttgctatggatgtctatataattaaatttataattatataaataatctatgcaaaacaatttaaatgagttaactactcaagtaagaagagacattcttagaatggttcataaagttaattctggacatcctggaggatctttaggatgtgctgaatttttagttgtgctttataatgaaatcatgattagaaaagaagattttgatatggatggaattaatgaagatatatttttcttgtctaatggtcatatttcacctgttttttacagtgttttagctagaactggatattttcccgttgaagaattaaatacatttagattactggattctagattacaaggccatcctacaactcatgaaggtctaccaggtattagaattgcttccggatctcttggtcaaggattatcagttgctattggagctgctgaagccaaaaaactaaacaacgattcaaatttagtttatgtacttatgggtgatggggaattacaagaaggccaaaattgggaagcaattatgtatgcttcagctaagaaaattgataatctgattgctactgttgatttgaacggaaaacaaattgacggagcaactgatgatgtacttccaatgggaagtatcaaagaaaaatttgaagcttttggatgggatgtgttagaaattaaaaaagggaataatattgaagatatttcaaaaggattgttaactgcgaaatcactttgcggtaatgaaaaacctatttgtatattacttaatacaatgatgggtaatggtgtggattttatgatgcatactcacgcatggcatggaaaagcaccaaatgatgaacaactggcttctgccctttctcaaaacaaagaaacttttggagattattaattaaaaaccacttaacaatgaaagaatatacttacacagaaaaaaaagatacaagaagtggttttggagccggattagcggaacttggaagaaaaaatccaaatgttgttgcgctttgtgcagatcttatcggatcattaaaaatgaataaatttattgaagaaaatcctaatagattttttcagatcggaattgctgaagcaaacatgatgggtatagcagcaggattaacaattggcggtaagattccttttactggtacttttgctaatttttctactggaagagtttatgaccaaataagacaatcaatcgcttactctggaaaaaatgttaagatttgtgcttctcacgctggggtaacacttggtgaagatggagcaacacatcaaatact

SEQ ID NO: 1568 - DNA, 4000 bp, Escherichia coli
  misc_feature (12)..(12): n is a, c, g, or t
  misc_feature (26)..(26): n is a, c, g, or t
  misc_feature (36)..(36): n is a, c, g, or t
  misc_feature (57)..(57): n is a, c, g, or t
  misc_feature (60)..(60): n is a, c, g, or t
  misc_feature (90)..(90): n is a, c, g, or t
  misc_feature (102)..(102): n is a, c, g, or t
  misc_feature (105)..(105): n is a, c, g, or t
  misc_feature (120)..(120): n is a, c, g, or t
  misc_feature (122)..(122): n is a, c, g, or t
  misc_feature (126)..(127): n is a, c, g, or t
  misc_feature (144)..(144): n is a, c, g, or t
  misc_feature (349)..(349): n is a, c, g, or t
  misc_feature (962)..(962): n is a, c, g, or t
  misc_feature (1151)..(1151): n is a, c, g, or t
  misc_feature (2350)..(2350): n is a, c, g, or t
  misc_feature (2692)..(2692): n is a, c, g, or t
  misc_feature (2695)..(2695): n is a, c, g, or t
  misc_feature (2710)..(2710): n is a, c, g, or t
  misc_feature (2758)..(2758): n is a, c, g, or t
  misc_feature (2799)..(2799): n is a, c, g, or t
  misc_feature (2830)..(2830): n is a, c, g, or t
  misc_feature (2833)..(2833): n is a, c, g, or t
  misc_feature (2869)..(2869): n is a, c, g, or t
  misc_feature (2881)..(2881): n is a, c, g, or t
  misc_feature (2884)..(2884): n is a, c, g, or t
  misc_feature (2886)..(2886): n is a, c, g, or t
  misc_feature (2899)..(2899): n is a, c, g, or t
  misc_feature (2992)..(2992): n is a, c, g, or t
  misc_feature (3094)..(3094): n is a, c, g, or t
  misc_feature (3300)..(3300): n is a, c, g, or t
  misc_feature (3757)..(3757): n is a, c, g, or t
  misc_feature (3767)..(3768): n is a, c, g, or t
agcgtctgcgtngtgccgcgctcgangtcgagcacncgaagatcgatcgcattgccntcntacgacgagaacaccacgtaccgcccgtcnggcgaccagtcnggntgatagtcgtagcgngntccnntggtgagctggcgcgcntcggtcgtgccgagtcgctggcgccacagggagccctgcatggagtagatgacgtcctttccatcgggcgaccacgtcacggcgctcgggccgctcgtggcctgtgggacgtacatctcgcgccagtagtacgcgtgcgggaccttgacctgtggcagcacttgctcgcgctgtggcgcctgagcgctcgcggctgcggtcaccnccagcgtcaggagcagggcgctcgttgtcatcccgagcggagcgagggatcgcggtcgtcccgacagagggccctctacctggagactcgcgatccctcgcctggcggctcgggatgacatcacgtgcgcagctcgccgagcagctcgtccatcatcccgagcgccgtatcgacgtcgtaggtatcgataacgagcggcggcgccaggcgcagcgcgctcttgccagcccccagcagcaggaggccgcggcggaacgcccgctgcaccagctcgtgcacgagctcggacgccggctcccgcgttgcgcgatccttcacgaactccacaccgatcatgaggccgacgccacgcacgtcgccgatcgcttcgtgacgctcggcaagccggcgcagaccggccacgagacgctcgcccatcgctcgcgcgttcgtcgttaggccgccctccacgaggtccagcgtggccagcgcggccgcgcaacacaccgggttcccgccaaacgtcgagccgtgcgccccctgcccccacttcatcacgtcatcgcgcgcgatgatcgcgccgatcggcatcccggagcccagtcccttcgccgtgagtagcacgtcgggctcnacgccttcgtgttcgcaggcgaacatcttccccgtgcgtccaatgccgctctgcacttcgtccatcacgagcaggatcccgtggcggtcgcacagctcacgcagggcggtcagaaacccgcgcggcggtacgacgtatccaccctcaccctgaatcggctcgacgaagatcgccgcgacgtctttcggntgcagtcggcgagcgaacagctcagtctcgatcgagcgcacacagtcgagcgtgcactccgaccggtcgcggcaatgctggcagcgatagcgattcgcgtacgggacgtggtaaacctccgggagcattggcccgaaccctgcgcgctgcgtcaccttgctcgatgtcaggctcatcgcgccataggtgcgcccatgaaacgcgccgtcgaacgcgatgagcgccggccgtcgtgtcgagtttcgggccaacttgatggcgccttccaccgcctcggcccccgagttcgtgagaaacacgcgctttttgctcggccccggcgcgatccgcgcgagtcgctcgcagagcgcagtcatgtcctcgtagtagaagtccgtgccgcagatgtgcaggaaccgcgacgccgccgcctgaatcgcggcgaccacctgcgggtgcgcgtgccccgttgccgcgaccgcgatgcccgccatgaagtcgagatagcggttcccgtccacgtcttcgatcatcgcgcctttaccatgcgagacgacgagcggatactccttgatgtacgacgtggaagcggccgctacgtcccgatcgatcaccgcctgcccgttaggccccggtggcgggacgacgatgcgagggtagtcacgcttggtggtagcggtagccggtgtctgcagaatctcggtagccataggaggagctctgttgatagtccgtagtcgttagtctttagtctttagctaacgactatcgactatcgactaacgactggtagaatgatccgcgacggatgtcgcgcgtcgtgatgaatcgttatgcgggccgagcgcgtgcgggcagattgggtctccgacgcgccggtctggaggttgcgtgcgtagttcggcgcgaacgaggacatgacgtgaacgcgaatgcggtggccttgcttgaacgtgttccctgtcaacagtcccggcagtcgcagtagatacacgcggcgcggctcgagcagcgaacgacgtgccgtgcggtcgcggtagctcgcgcggatcacgtcggatcccggggccatgaggttgtacgccgttccgtccggcgcgacgtcgagcaccttgacccacaggtccgcgtcgggtgcgtccgccgcgaggtacacttccgccgcgattgcacccaccacttccacgtcgttggcgagcggaggtgtctcgaaggtgagnacgtcggaacgcgaggcgagctcgcggtagtcgtgcgcgccgctccgatcggcgtatgggtcggtaacaggctttgccggattggcgacgtaggcgctcgtcggtcggcgcgagtctggtcggcgcgcggacagttcgccgatgcgcgacccttcggcgggcgccgacaagtaaagcgtgtccgagcgcgtcccgggaatcggccagcggtcggcttcgcgccagcgattgtctcccatgacgaacacgcgcaccggtggctcgcggtccactccgttgtccagatcgcgcacgtagcgatccatccaacgaagcacggtctcgtcgtagtcgatggtcgcntcnggaccgttctcgcgntcgcccgctttcgtccgccccgtgccgccgacgccatgtggccacggnccgatcacgaaggcggcccgcgactggccgcctgctcgcgnagtcgttaggcccatgaagttcgtcgtcgcnccntcggggccgtacgcctcgtcgtaccatccggacatncccagcaccgcngcncnggtgcgtccatancgcgggcgaagatccgcccaatcccaccatgaatcccacggcgggtggcgcatccactcgtagtaccacggcgcgatcggcttgaagtccggnacggcggcgagcggcagctgccagagaatccgctggcgcgcctcatcccaggttcgctcggcctcttcatcggtcgtcggtccggccacgccatggcggcgntgcagctctccgccgacgtcttcccacacccagccggcccacgagttgtcccacacgccgccggcgtagaagaacatgttcgcggtcgcgaacgtcatggccgggaccatcgccttgaggtgcggcgggccctccacggccgcgagccactgaaccgcaccgggataggacagaccgaacgttccgacggagccgctcgaccacgnctgacgcgccgcccattcgatggtgtcgtagccgtcgagcccttcgtgacgatagggctcgaactcgccgtccgacgcgaaccgcccgcggacgtcctgcataacgacagcatatccgcgcgcgaccgccttcccgaacgtggtgtagtccgactgcgcggcggatttgccgtatggggtgcgatacagcagtaccggaaacggccccgagccctgtggccgccagacatccgcacggagtacgacgccgtcgcgcatcggcaccgcgacatcgtgctcgcggacccaggtggtttccgcggtcgccgccggggtctgcgccggtgcgcccgtcgcaatccaggcgatcacgaagaccacacccgacgctctgccgatcatcgcgccgcgaggcccccgctcgacgcggtcttcgtcgttaggcccgatgcgacgatggccgcctcgagccggtccncgatcatcgnnatctcgtcctccgtgatgatgaacggcggcgccaccatcacgaggtcgccgcgcgtgccgtcggcgtggcccacgttaggccacacgacgagcccgagatcgagcgccgccgccgtcagtcgctcggcgacgcgggcctcgcgcgcgaacggcgctcgtgtgtccttgtcctcgaccagctcgacgccggccagcaggccgcgcccgcgcacatcacccacgtgcggcagct

SEQ ID NO: 1569 - DNA, 4000 bp, Escherichia coli
  misc_feature (2170)..(2170): n is a, c, g, or t
  misc_feature (3507)..(3507): n is a, c, g, or t
  misc_feature (3577)..(3577): n is a, c, g, or t
  misc_feature (3794)..(3794): n is a, c, g, or t
ttgccttttttcaaaaagattttttgcattaaactgcagcaggttagcactatttctaattggttgttcccacaggcgggttactcggtcggcaagcaggttaatgtcttcaagaatgtcagaattgggggccgcgacattcaacgtcttactttccttaaaggtttttgaaactgcaggatcggtaaaaagacaaccaaaaaaatcacttctaagcattaaaattttattgaaagtattttccaatgatccaagtaaatccaattcgtttggcaaattacatttgttgattataatcctaggtctgtaacgaatccaactctgttcggctttttgtgctacattcctgtcaattgtagaaatttcatccaacagaccccgtacggtcaggacttcatccatcacagtgcggttgtaagagtccctcaacttttcgtcaaggaaagtgttttttggcatagaacgctcaattactctaaaagcaaaaagtttgaggaaagtaagcatgtttactgttgaagcatgctctgcagtagtgataatcatccccaattgtgtcattccaaaataatccaaggtattgtaagtacttccgcttccaaggtccaatataagatattcacattccaattgtctcagattgttaatgagtcgcattttttgtgagtgatgcatgtttgccagaaacggacttctaacatcaccagcaagaaacttgagattctcattttctgtttctacgagcaaatctttcagtttgctgtatcgtgcgcgtaaaaaatctccgatgccaggattagtattgtgtattcccagacaggtatgaagatttgatcctccgaaatcaaggtctgcaacaataacctgtttgccaagtttcgccaatgcaattgccaagttagctgctataaagcttttaccaactccaccttttccacttgcaattggtataatagttctattcatagctgatccaagtttagttattaaaagtataaatcaaatacgtcagttccattggagacaggataaccaagaaaaaacataaaagcaaataaaagaattttctgcaatattaagctactgtcaattaatccagagtaagctcaaaaaacactacttccggatgtggattgttgtaatactgatctgtctcaacaaacccaagagacttatagagtccaactgcggactgcatgctgtttaaggtgtccaactgcattctggtatattttttatcaataccgagttgcacaattttttcagccagcaatcgccctaaaccagtaccacggtataatggtttaacgtaaagacgtttcatctcgcatacatcatcacttaaaggccgcaaacctgcgcaacctacacaatccaactcatcccatgcaaggaggatacagccttcaggtgcagcgtattttccgggaagatgttccagttcgtcctcaaagccttgaaaagacagactgaatcccaatgattcagcataatctatgaacagctttcgagcattgtcaaaatcagctggactatgagcaaagtcgatccgaacagacattttataaattatacatgaagactagttcaaaatgagttgtcatttcagtacatgcagcaatacgggatttgtaagaatatgaaaaatttgtcctcagcctgcatcaaacactgtcatgagttcccaaatttaaaatgaattaaaataatagtcaaaatttttgtttgtctgaactcaatatagtctattttacgtaatccaaatatgattcttaaacccaccaaataaaaaaacgaacacaatcaacaaatagggatgccatccaaagtaatggtaaattcggttgcggtgagtaaagagtactgaaggctgacacagttatcagcaaaagaatatttaaagaactgttattaatgaaaaaataaagctaactgtgtgttgaatattattaaatgacttttcattttgcaagtttttaagtagcattgaaggtgaataaaataattacagcaacatttgtcatcaaggaaaaactttatgagtaaaaaagcaaagccaaaaccagaagtccatgaatatcaggctgagatgcagaagcttctcgaaattctggtacattcattatacacggaacgagaaatctttctccgtgaacttgtctcaaatgcntctgacgcactgagcaaggttcaattgactacattgacagaagaaaaagttctggacaaagacacagaactccagatcacaatttccttggatgaagagcagcgaaagattgttatagaagactccggttgtggaatgacaaaggaagaattggttgaaaatttgggaacaattgcaaattccggaacgctaaaatatttagagcagttacaaactgagaacaaatctgcagaaaatctgattggacagtttggagttggtttctattcagttttcatggtagcagatcgtgtggaattaaccacccgttcctggcaagaagatgctaaagcctggcaatggtcttccgaaggaggaggtcaatatgaaattattcctgttgattttaagcagcgcggcacgcgtgttactgtgtttctaaaggaagatgccaaggaattttgcagtgagtggcgtcttgaatcaattataaaaaaatactctaactatcttccttttccggtaaaagttaaggataaaacgatcaaccaggtaaaagcgatttggacgcagtcaaaatctgaagtgaaagatgatgaatataaagagttttacaagcagatttctcatggtcagcaggatccgtttcatcatttgcattttaatattgacgccccaattcagtattatgccctgttgtatttccctgaatcagtaggaaatgaagtgctttatgcacgagagagcaaagatattgcgctttatgcgcagaaagttttgattcagaccggcaacacagacctccttccatcatatttacgttttgtgaatggggttgtggattcagaggatttgccgctgaatgtgtcccgggaaaacgtacaaaaaaatgtgctgattgaaaaaattaaaaatagtttaactttgcgtgtgttgaaagagttgcagacactggcagaacaaaatgttgaaaagtacggaaaattttggcaaacatacggaactttgcttaaagaaggagtttcttctgactttaagaacaaagacagattgaaggacctgttgcgctttaactcttccatatcagaagattcttcaacggacgtgactcttaaagattatgtcagcaggatgcgtgaaggacaaaaagacattttctatgttaccggaggttcgcgtgaggcaatattacacaatcccaatctggaatattttcgcagacagggcttggaagttttgtttctaacagatcaaattgatgattttatggttgttgatctaagggattatgatgggaaaactttaaaaaatatatcccagggagatatagaaggaattaatgacagtgacatgtctgnagcagaatcttcactttccaaggaagaaaaaagtgatattcttgcatttttcaaaaaacagcttaaggancgtgtcagtgaggtctctgactcaaaacgcctggtggacagcccctgttctctggtgactccaaaggatggaatgactgcacaaatggaaaagatgatgaaaatgatggaccagaaatttcagggggaaaagcgtaacctggaagtcaatatgggacacccgataattcaaaatctttctgagattctacagaaaaataaaaaacacccttttctcnaagaaactgtggagcaactctacgaaaattcattgttggttgaaggtttactcgaaaatccagtgcagattttgtcccgttatcagatgtttatggagtcggcaagtgcgtatgaattggagaaactcaacagagtagagtgagaaaggatttttggggagatccgataaactgttggaagaaaaatgatggtgggcagtcgtttg

SEQ ID NO: 1570 - DNA, 4000 bp, Escherichia coli
  misc_feature (1196)..(1196): n is a, c, g, or t
  misc_feature (1199)..(1199): n is a, c, g, or t
  misc_feature (1202)..(1202): n is a, c, g, or t
  misc_feature (1949)..(1949): n is a, c, g, or t
  misc_feature (1952)..(1952): n is a, c, g, or t
  misc_feature (1964)..(1964): n is a, c, g, or t
  misc_feature (1967)..(1967): n is a, c, g, or t
  misc_feature (1979)..(1979): n is a, c, g, or t
  misc_feature (1985)..(1985): n is a, c, g, or t
  misc_feature (2674)..(2674): n is a, c, g, or t
  misc_feature (2887)..(2887): n is a, c, g, or t
  misc_feature (3607)..(3607): n is a, c, g, or t
  misc_feature (3730)..(3730): n is a, c, g, or t
tggagagtatcaattatcaacattagaacctcatttctatattaaactaaaacaatcaatgaaagaattgaatcgagatgattttgatcatgttgaaagtatattgttagaattatttagaatgagaagaggtaaaattgtaaagcttgcagattctatcaaactaaattctgatatttataatcaattaacagttgaagaaaatattttttacaaaactatctatgataatagtaaagaatttgaaaatcaagtgaggggagaaaaaaatgagtagttctcaaactagtacatttacagattctgcattatctgataaagtaaaagaatttcttactagattcaaagataaacaaggcaattacaagtacgttgatgcaattgatgcaatgatgccaaaaaatgcaaaatacattgtagttgattataatgatcttgtaactgaacctcacatagaaattatattttctgaaaatccagatagaatttttgatgcttttgcaagagcaataaaagaagcattacaaacaagatttccagaatatgctgaaaaaattaaggaagaagttcgtgtaagaatagctaattttccacttgaaagaagtttaagacaaatcaatgctgaaacaattggaaacattaccagtgtttctggaatggttgttagagcatctgaagttaaaccccttgcaaaagaattaatttttgtttgtcctgatgaacatactaccaaaataattcaactaaaaggaatggatgcaaaaattccaatagtttgtgataaccctagctgtaaacaaagagattttgaattaaaaccagaatctagcaagtttattgattttcaaattcttagattacaagaattacctgaggatttacctccaggacaattacctcattacattgatgtcactattaggcaggatttagttgataattcaagacctggcgatagaattattcttacaggtgtagttagagtagaacaagaatctgttgctggcgttcaaaggggtcatagtggcttgtatagattacgaattgaaggaaataatatcgaatttttaagtggtcgaggttctaaaactgatagaaaaattggtagagaagaaatctctcctgaagaagaaaaacgaattaaatctcttggtcaaagttctgatgtttatcaaagattaattgattcatttgcnccncanattcaaggtcagtcattaatcaaagaagctattttgttgttgattgttggttctaaccaaagattgttaggtgatggtagcaagattagaggtgacattaatgtatttttagttggagatcctggtactgcaaaaagtgaaatgttaaaattttgtgcaagaattgctccacgaggtttgtatacttctggtagaggttcaactgctgcaggacttacagcagctgtagttcgtgataaaacaggaataatgatgttagaagcaggtgcagttgtacttggtgatcaaggtttagttagtatagatgaatttgataaaatgaaacctgaagatagaagtgctctacacgaagttatggaacaacaatccgcaagtattgcaaaaggtggtattgtagctacactaaatgctagaacgtctatcttagctgctgcaaaccccatgtatggaaaatatgatccttttaaaaatatcacagaaaatgtaaatttacctattccgttattgacaagatttgatttgatttttgtagttagagatattcctactaaagaaagagatacacaaattgcaaaacatatcattagaagaaatacaactttgggaactgataaaaaatctgtaattgaagttgatttgttaacaaaatatctttcatatgcaaaacgtggtactcctgaattaacaaaagaggctgaagcaaagattcttgattattatttacaaatgagaaatgtagagtctganganatgattactgtnacncctagacaattngagggnattatcagactttcaactgctcgagcaagattactcatgaaagataaggttgaagaggaagatgctgagcgtgcaatatttttaattcaaagtatgcttcaagatgcaggtgtagatgttaatactggtaaagtagatcttggtgttttacaaggaaaaccaagaagtgaagtttcaaaaatgcaattatttatggatattttgaaaagtttagaaggtgataacaaagtggcagttgaagaaagaacatttgttcaagaacttgaaaaaagtgaaaaatttactgaagaagaagcaagaaattacattagaagaatgcttagagaagcatctatttatgaatcaaaacccggtcattataaccgagtatgaaaatagaaaaattaaaacttccagactctgcaattgattttttaaaatcacaaggatttgaaaaattatatcctccacaagctgattgcattaaatctggattattggatggaaaaagtattttagtttctgcacccactgcaagtggaaaaactttgattgcaatgcttgcaatacttaattatctttcaaaaaataatggtaagattatttatcttagtccattacgtgcattggctgctgaaaaatttgcagaatttaaaaagttagaaaaaatttcaattggcaaaaaaattaaaacaagtatttctactggngattttgaacacattgaaaaaaatttagaaaatagtaacgtgttaattttaacaaatgaaaaaatggattccattattcgacatggtgctgaatgggttgatgaaattggtttagtaatatctgatgaagttcatctaattggagatgaaagtagaggccctacacttgaaatgattttaactcatctcaaactattggatttaaaacctcanattgtaggtcttagtgcaacaataactaattctgatgaaattgcaaaatggcttgattgtaaattagttaaaaatgattggcgtcctgttcctttatctgaaggggtctatgatggaggaaaagtaatgatgagtgatggtgaaatatttgaagtaaagcccagtttacgaggaattcctatcgatttaggcgttcaatgtgttcaacaaggtggccaatctctggtatttgctgaaactagagtacgttcaaaatctcttgcaacaaaagctgcagacatagtttccgaaatgctagaaaaaaaagaattaacatcattagagaaaacatcaaaacaaattctggcagaaaatgaacacacagaaattgtaaaaactttagcaattcttgttaaaaaaggagttgcatttcatcatgctggattaaatcaaaaatgtagagaaatagtggaaaaagaatttcgtaaaggaacaatcaaacttttatcttctacaccaacgttggcagcaggtgttaatcttcctgcaagaagagttgtgatttcaaatattaatcgatacaatgcaaaagttggtgcaaatagacccattagtattttagaatacaaacaactttgtggaagggctggaagaccacagtatgatgattatggagaatccataattgttggaaatggaaatgctgaagatttaactgaatattacattcacggtgaaccngaaccaattatttcaaaaattactgatgataaatctcttagaactcatattctaagtgtaattgttacacatcctggaataaaaaaagaagaacttcttaaattctttttacaaacattaggnggattacaatcatctaaagcaactctaagttttgcaattaacatcgctttacgttttctttctagtcaacaattaataattaaaaaagatgaaagatttgctgctactccatttggaaaaaagacatctatgctttacattgatcctttaactgcaacatcttttagagataccatagataatgtatcacaacaacgaaaacatacatttggatttttacatttaataacaacttgtgaagaattttttcctaaattctcacttcgaaac

SEQ ID NO: 1571 - DNA, 4000 bp, Escherichia coli
  misc_feature (416)..(416): n is a, c, g, or t
  misc_feature (486)..(486): n is a, c, g, or t
  misc_feature (512)..(512): n is a, c, g, or t
  misc_feature (527)..(527): n is a, c, g, or t
  misc_feature (716)..(716): n is a, c, g, or t
  misc_feature (731)..(731): n is a, c, g, or t
  misc_feature (797)..(797): n is a, c, g, or t
  misc_feature (806)..(806): n is a, c, g, or t
  misc_feature (1241)..(1241): n is a, c, g, or t
  misc_feature (1334)..(1334): n is a, c, g, or t
  misc_feature (1440)..(1440): n is a, c, g, or t
  misc_feature (1574)..(1574): n is a, c, g, or t
  misc_feature (1805)..(1805): n is a, c, g, or t
  misc_feature (1985)..(1985): n is a, c, g, or t
  misc_feature (1992)..(1992): n is a, c, g, or t
  misc_feature (1994)..(1994): n is a, c, g, or t
  misc_feature (2123)..(2123): n is a, c, g, or t
  misc_feature (2429)..(2429): n is a, c, g, or t
ttctcagggaaattcctgcttcagcacaccctatggcggtcatggcaacaggatgttcaatgctaggaaatattgagcctgaaaagtctatagactctcaaatggactcaatcaatcgtatggttgcaacgatgccttcaattgttacttattggtataagttttcacatgagaacgaagatattagcttgattaatgatgaagatacaatggctggccatttcttgcgcatcttgcatggcaaaactccatctgatcttcatagaagagttatggatgcatcgctggttttatacgctgagcatgaatttaatgcatcaacttttactgctagagtttgcgcttcaacaatgtcagatatttactcatgtgttgtcgctgcaataggttccttaaaaggaccattgcatggtggngccaatgaagctgcaatggaaatgattgagaactggaaaactcgagatgaagcaagagaaaatattctanacatgcttgcaaacaagggaaaaatnatgggttttggtcangctatatactccgagcgtgatcctagaaatgcagtaattaaagaattttcaaaagagttatcacaagaatatggagatgactctttgtatcaagtttctgaagaagtagaaaaagttatgtgggatgagaaaaaattatttcctaatgctgatttttttcatgcttcagcatatttttacttgggcatnccaacaaaattattnacacctatttttgttatgtctcgagttactggctggacagctcactgcatggagcaaagagcaaanaatagaatnatcagaccaagtgcagaatatactggcccagaaacctctgtctggattgatttagaagatagggagtaaattatgtcgaataatgtagaactgaatataaggtcaggtcccgactctttgcttgttgaaattgcagaatatgtcacgaagcaaaatatagattctgagcttgctctttcgaccgcaagaaattgtttgattgataccgttggttgcgggttgcttgcgctgacctttccagcttgcacaaaaatgcttggaccaatcgtgccaggtacttcggtgccaaatggcgtcagagttccaggcactaattttttgctagacccggtaaagggagcatttgatattggatgtatcatccgatggcttgattataatgatacttggttagctgctgaatggggccatccatcagacaatctaggagcaatnctatcaatagctgattatgtatctcaagaaaatgtagcaataggcaaggatcctctaacaatgagagatgttttagagtgcatgattatggcncatgaaatccaaggcgttttagcactaacaaatagttttaatagggttgggcttgatcacgttgttttggtgaaagttgcatccacagctgttgtaacaaagctantgggtggaaactcagatcaaattatggatgctgtaagccaagcttgggttgatggacagagcttaagaacataccgtcatgcaccaaatgctggttcaagaaaaagctgggctgctggtgatgcaactagcagngccgttagacttgccttgataacactttcaggggaaatgggctatccaagcgtgctatcagcaccaacttggggctttgaagatgtttctttcaaaggagagaaactgtcattgagccaaccgtttgatacttacgtcatggaaaatgtattgtttaaaattagtttccccgctgagttccacgctcaaacagctgttgaggctgcagtgacactgcaccctgaaatagtnaatagacttgatgaaatttctaatattgaagtcactacacacgaatcagcaattaggattatttctaaatcaggcgtgttaaataaccctgctgaccgagatcattgcttgcaatacatgattgcaattggattaatccatggagatcttattgctgagcattatgaagatgacgttgcnagtgatncnagggttgatgcgcttagagagaaaatgactattaaagaagataagcgttatacagcagagtacttagaagctgacaaaagatcgatcgcaaataaaatacaaatcttttttaaagatggctcatccacnaatgctgttgaagtagagtatcctattggccacaagcgaagaagggaagagggtattccagttttagaaaagaaatttgaaaaaaatcttggaaaaatatttgatcaagatcaagtcgatagtattttatctcaatgtctcgaccaagcagcgctcgaatctatgagcgtattagactttcaaaaattattttttgtagaaaagaattctttctaaaggttttcaggaatataccgcaaagcttcctggctaaagagaaaggtttgatctgaataatgtgctgatgcagggtctctggatgacccntaattatgcatcccataaataatttttccctcatcttgttctgcaataataaaaaatagcccatctccacctgacatatccaaacttttggtttgagagttaggtgttccgtatacagctcttaatgtatcgactgagccctgaattgggtaggatcttccgccacgtgaaattgtatttagcttgccccagggatctgaataatttctgcccattgtcgaagatattttttcacactcttttctggaagattcataagaaggggtaggcttgctattcatttctgatatccattcttgagccatgatgcacattcccagcccagcatcagtattttcaaaagtagttttaccatcccaggcctcaaccgtctttttaacatcttggtaagatgcggccattgattttaggtattgatattgtcttgagttttttgaataagagttatcaaacttaatctcaataaaccgatctaagtctattaaatcatcagtagaaaaaagttcatttgcaacatgagaacgattcgtcaatcttttttcaaaatctacatgctcatttattttttgttgctttagcgagtgcttgcccattactgaaaagggattttgatttgtgctttgaatccagccgttcaaaggattaataaatgttgggagattgtcaacaagtattccggcatcccaattttcttttgaagcagacaccttaatgatttgccttgcttccaatgcattaattcgcattggtattcttccgttatagaaatagcctatatttctttgagaatccatagttacaaagttaaagctgggtatttttctgctttttagcttctcaccaaaatcgtatacatcttttgcattattaatttcataccaaccatccatttcatcaaaagaatattccttagaatgtttaagagcaaaagactttccatttatttctagtactggaccaaattttgaatatttaaattcttgttttgtcttaagtgtaaggatgcccaaaattttaaaagataaataatcttcctcaattttgaagggtgcccactcttcatctaagagatattgatttgagttatctgggttgatggtaagttcaaaaatatccataacatctgggcgatttactgttgcgccccagccaatattttcattgaatccaacattaacaagaaaagaacctggaaagtttcctccatgagccctccacccagaatcactctcaatattcagctcataccaacccacaggtcctgccaatggttgatgagagttaattagaagaaacgaagatcctgaatcagttttaattgaatttacagctatggcatttgatccagtaggaatagattgagtttcttgttttgtcatttgcgctaaatctctatccaagccagcaaaaaataaatgctgtatatacgaccccgctaaaacatcctcctgagaaataggatgaagggaaagattaactttatctggattactttttgcatattcatttaccccatcagcatatgcttgggccatagccagaacatttgatgaaagctgtttttttgcaag

SEQ ID NO: 1572 - DNA, 4000 bp, Escherichia coli
  misc_feature (3348)..(3348): n is a, c, g, or t
  misc_feature (3579)..(4000): n is a, c, g, or t
agcaggctctgccatatttcgtgctgaaggaaatgccactcagacttcctcttctcaatggagtggaatacgccacagccatgacaagacagttccccaatgtcagtgaactccttagcgaacattccctcagacaagccgtcgggaaactggctggaacagaaacacagctgttggagaaagataacaagaagcaattgtgtcggtacatcgaaagcgatgcgaaccagaagttactcgaatagcttcgcaacgacataggtaagattatctgacacaaagccatttggaggcgccaaactgtcaaatatatgttaatttttcatggctaatgagtatatttctgaacaatcagactacaattagaaataaatgtagtaactttgtacacaaaataaagtataaaggcatggaaggcaagagatacagcaacagttttacctcctcaggaatggtaaaagaagaaggaagggcagcatactacaaactgctggacagcgtgcgtgatggtgatactgtacgcattaagcgcggggtgtatgccactgccgaacagttggccgacactatgattgatgttgaagccattgttccgggtggagtgctatgccttttctccgcatggaatgtgcatggacttaccacctcgctgccacaagcctaccacattgccgtgaagagaggcaggaaagtcacgctcccggtcttcccaaaaatcgaactgcaccacatcactaacacgatgtttgacataggtgtcgaagaacagataatcagcagctatcgcatccatatatacaataaggaacgatgcgtatgtgatgccgtgaaataccgcaacaaggtcggtatggacgtttgtgccgaagtggtaaacagctatctggcactacccggcagaaacctttccctgctttttgactatgccgacaaactgagagtaagaagaatccttgaacagtatattgcactaaaactatgagtgaaatcaaaaactatggaaaatccatcagggcaaggctgctcaatgtagccaagcaggaggaagtgttctatcagaccatcctgaccagatactttcaggagcgtctgctgtaccgtatttcccagacacgttatcgtaataacttctacctgaaaggcggtgcgttgatgtacgcctacgagagatttgccgcccgtcccacattggacatagactttcttggcactcacatcagcaatgatggcgaacgcatagtcgaagcattccgtgaaatatgtgcggttgattgcaaagaggatggtgtacagtttgcttgcgacaagattgaaccccagaacatcaccgagttcaaggattatcatggtatccgtctgagtattccagtgacaatggactctatcgcgcaagtgctcacgatggacattggatttggggatgtagtgacaccgcatcctgtttcattggactaccccctgttgttagagggactgcccgaagcaagtatccttgcctattccacagaaaccgtgatagcggagaagatgcacgccatcatagatttggcagaccaaagtagccgtatgaaagactattatgacatataccacctgctcacatcattccaatatgacactgccattttgcaggatgccatcaaccatacctttgagaatcgtcacacaccctataatgctgacacaatgtttttcagggaagacttccccaatcatcctcagatgcaggttcgatggacggctttcctgaggaaggctactatcaatagtgccctgtcatttcccgaggtggcgcgttggcttcaagacacattaagaccatattggacagcatacggacgtatgcaacactgaccgaacttgcttactaagatactcttctatgcggacttggttactctacattgattcaaatgtaactaagtctgcattttattttgcgcaaattcaaagcgaaatcgctattttattgcaattttcccttgtcataaaggaggtgtgtcaaaatgcgcaccttcttttttttaagcacaaagccccgactttcacaagctggggctttgttattacctaaagattttgtatctttaggcataagattttcactatgacaaagatacattttcgtccttataattccaaccaaacagtgctttttcctcaaagaattgacgaggatattgcagagcatgatccagttcggatggttgacgctctggttgagagcctgaaccttgaaagtttcaggaagttgtataaggaatgcggccgcagcccttaccatcccaggatgatgctcaaggtcattctctatgcctatatgaacaacgtctattcctgccggaaaattgaaaagctccttcatcgtgacatccattatatctggcttgccggatatgagaaacctgatttcattaccatcaaccgtttccgcaaccgggtgaaaaaggaaatcaacgaggtatttacccaaaccgtactccttctctcttccaaaggcttcatcaggctgaatgtggaatacattgacgggacaaagattgagtccaaagccaataagtatactttcgtctggcgaaaaacggttgagcggaactgtgaacgcctgatgaagaagatacatgtcctgttagggcagatagacgatgtcatcgcccaggagaactcatcggaaagcaatgaggagattgagttcactccggccatgctgactgagatggctggagaattgcggaaagcacttgaacaggttcctgagccctccacgaaagaggaaaagactgcgttgaaaaagaaacgcaaacagctgaaggaactggaagaacacagggacaagctgcaggaatacgacaaccgtctgaacacgctacaggacaggaactcctattccaaaacggacaaggacgctactttcatgagaatgaaggaggatgccatgcgtaacggccagacaaagcccggttacaacctccagatcggcaccgagaaccagttcattaccgattttgcactctttccgaaccctacggatacactgaccatgatacctttcctgcaatccttctcaagcagatatgacaggttggcccatacggtggtggccgattccggctacggttctgaggagaattaccgcttcatgtcagaaaacggtatggcgggctacgtcaaatacaactacttccacatggaacagcggccgagattcaaaccggacccgttcagggcggaaaacttctactacaatgaagaacaagacttttgtatctgccccatgggacagaagatgcaaaggatagggactagacatgtgaaaacagcatccggatatgtcagcgaaaatgccangtacagagccatcagatgtgaaggctgtccgctaagatgccgatgttttaaagcaaaggggaacagaacgatagagttgaatcacagactcagaaaatacaagcaaaaagccaaagagttgctctgctcagaggaaggactgaaacacagaggacagagatgcatagaaccggaagccgtgttcggacaaatgaaaaacaatatgaattacaaacgtttccaccattttgnnnnnnnnnnnnnnnnnnnnnnnnnnnnnnnnnnnnnnnnnnnnnnnnnnnnnnnnnnnnnnnnnnnnnnnnnnnnnnnnnnnnnnnnnnnnnnnnnnnnnnnnnnnnnnnnnnnnnnnnnnnnnnnnnnnnnnnnnnnnnnnnnnnnnnnnnnnnnnnnnnnnnnnnnnnnnnnnnnnnnnnnnnnnnnnnnnnnnnnnnnnnnnnnnnnnnnnnnnnnnnnnnnnnnnnnnnnnnnnnnnnnnnnnnnnnnnnnnnnnnnnnnnnnnnnnnnnnnnnnnnnnnnnnnnnnnnnnnnnnnnnnnnnnnnnnnnnnnnnnnnnnnnnnnnnnnnnnnnnnnnnnnnnnnnnnnnnnnnnnnnnnnnnnnnnnnnnnnnnnnnnnnnnnnnnnnnnnnnnnnnnnnnnnnnnnnnnnnnnnnn

SEQ ID NO: 1573 - DNA, 4000 bp, Escherichia coli
  misc_feature (804)..(804): n is a, c, g, or t
  misc_feature (1008)..(1008): n is a, c, g, or t
  misc_feature (1035)..(1035): n is a, c, g, or t
  misc_feature (1039)..(1039): n is a, c, g, or t
  misc_feature (1302)..(1302): n is a, c, g, or t
  misc_feature (1404)..(1404): n is a, c, g, or t
  misc_feature (1407)..(1407): n is a, c, g, or t
  misc_feature (2126)..(2126): n is a, c, g, or t
  misc_feature (2171)..(2171): n is a, c, g, or t
  misc_feature (2174)..(2174): n is a, c, g, or t
  misc_feature (2276)..(2276): n is a, c, g, or t
  misc_feature (2297)..(2297): n is a, c, g, or t
  misc_feature (2330)..(2330): n is a, c, g, or t
  misc_feature (2402)..(2402): n is a, c, g, or t
  misc_feature (2459)..(2459): n is a, c, g, or t
  misc_feature (2685)..(2685): n is a, c, g, or t
  misc_feature (2819)..(2819): n is a, c, g, or t
  misc_feature (2833)..(2833): n is a, c, g, or t
  misc_feature (2848)..(2848): n is a, c, g, or t
  misc_feature (2855)..(2855): n is a, c, g, or t
  misc_feature (2858)..(2858): n is a, c, g, or t
  misc_feature (2867)..(2867): n is a, c, g, or t
  misc_feature (2906)..(2906): n is a, c, g, or t
  misc_feature (2909)..(2909): n is a, c, g, or t
  misc_feature (2924)..(2926): n is a, c, g, or t
  misc_feature (2928)..(2928): n is a, c, g, or t
  misc_feature (3011)..(3011): n is a, c, g, or t
  misc_feature (3065)..(3065): n is a, c, g, or t
  misc_feature (3080)..(3080): n is a, c, g, or t
  misc_feature (3920)..(3920): n is a, c, g, or t
cgcgtggctaccgcgcggcgttgggcactcgtgacggtttcggcaagctcttggcggcgggcctttccacggttatggtgcttcagctcttcgtggtggttggcggtgtaacccggttaattccgctgaccggtttgaccacaccgtttatgtctgccggtggttcatccctggtggctaactggattatcgtggcgttgtggctttcgatttcgcataccgcgcgagcgcctcacgtcgtggtcgggttcgacgttcccgaaagtatcgaccacgaagactacagctatgaatctgagggcgcaaccagcgttctcgcccgtatttcaactcaacaagcaggaggtgaccgcaatggatagggcaattcgccgcatgtggatggccgcaggttgcgtttttatcctgctcatgggtacgttgagctatatccaattcttcgacaccgaatctctcaaagataacccgtggaactcgcgttctctgtacgataactacggtgccaaccgtggctctatcgtggtcgatggaaccgaaatcgcctcgtcggtgaaatcggatgatgagtataactatcagcgcgtgtactctgagccggaaaagtatgcggcgctgacgggttatttctcgtcagtgtacggttctaccggtgtcgagtccgctatggacaaggagctttcgggtacttccgacagccagttctacgatcgtgttgctcagctcttctcgggttcttcggcacgcggtgcgagcgtcgagctcaccgtggattccaagcttcaggagcttgctaacaacctgctncagggccgtaagggttctattgtggcgattaaccccaagactggcgaaatcttggcgatggcctcgtctccctcatatgacccgaatacgctcgcatcccacgatgggtctacggtagtcagcaactatgaggaactgaactcgaatccgaataacccgctttacaaccgtgctattgcgggtaacacctattcgcccggctcnaccttcaagattattgatgccgtcgcngctntggagtccggcaaatatgatgcgaactccacgatcgataaccccgcacagcttccccttccgggaaccaatgtgtcgcttccgaactatgcgggcggtcagtgtggaggacgcaccaaggctacgattgaatgggctatggcgcagtcctgcaacactccttttgcgcagatcgcaatggatttgggtgaagataggatctctaggactgccgaaaactttggttatggtcaggatttgaagattccgctggcggtggctaantcgagcttcccgaagggtatgtcgcagagccagctggcgcaggcatccgtgggtcagtacgatgtacgcaccaccccgctgcaggtggcgatgacttctgcngcnatcgctaacggcggtgtgcagatgaagcccaatatgattcgttctgtcaaaaccagtaacttgagcgtgctctacgagttctcacccgagaagttgcgcacctcaacttctactaaagtcgccgatcaggtgaaacaatggatggtgaactctgtggataacggtattgcccgtaacgcaggcgtgcccgggtataaggttgctggtaagaccggtaccgcagaaactacgggtggtttgaataactcttggtttaccgggtttgcacccgccgatgatcctcagatcgccattgcggtggtctatgaggatatggatgcaacaaccggttcccagctttcgacaaatgcaggtaaacaactttttgaggcggtgttgaacaagtgaggccttcggctgatatcaccttgggcgggcgctacaccctaaccgaacgtatcgctatcggcggtatgggtgaggtctggaaagctcgcgacaaggttctcggacgcaccgtcgccgttaaaatcctgaaagaggagtatacgggtgaccccgggttcttggagcgtttccgtgcggaggcgcgccatactgcgctcctgaaccaccccggtgttgccaatatgttcgattacggtgaagaggataactctgcatacctggtgatggagctggttccgggtgagccgctgtcgagcatcatcgagcgcgacggcacgctgccgccggatcgnatcctgaactttattgcgcagacggctcgcgcgttggctgctgcncangctcagggcctcgtgcaccgcgatgtgaagcccggtaacctaatgatcaccccggatgaccgggtgaaggttaccgacttcggtattgctaggcttgcgaancaggttccgctgaccgctacnggtcaggtgatgggtacagcccagtatttggcncccgaacaggcaaccggtcaacctgcaaccccgtcctccgatatgtactcgctgggtattatcgggtacgantgcctggtcggtcaccgcccgttcacgggtgaatcacagatcgcgattgctctagcncaggtgaacgatccgccaccgccgctgccggagagcatcccggcgcccgcccgcgccttgattatgtgcctgcttgctaaggatcctgcggagcgtcctaaggatgctaccgcgctggcatccgctattgatgctattcgccgtcgcgatattcctgcggcgattaaggccgtgcccacgctggaggcgttcttgccggagaatctggatactgcccagacctccntgatcgccgagcctatttcggcatccgccgctccgaagttcggatctgggtcgcacttcacgcccggtccttcgaccgctccgattcctgagcccgggtcaaaggctgcggccgcacgtacggcacaacagggnccgaagaaacgcanctgggtatggatcgncgctatngtngcggcactngtgcttattctcggtatcctctgggctgtctgggcggcnaanagccgtgcaaccccnnntncgaataccaccagctcggcaacacccagctctgcggaaggtaccgtcacggtagccaccccgagcgaggagtcctcggctgcnagcagtactcagaagcagaaaattaacctgcaggcacgcagctacgagggtcgnccccttcaggatgtngtcaatgacctgaagaacctgggtctttcgcccaggactgaaagtgttgagtctgaagagccagccaacaccgttctgtcgatttcaccggctggttcggtagacgaaggcagcaccattaccgtgcgttattcaagcggttccaggggcgcgaccctacctaatgttgatgggaagaactacgaagaggcttctcggacgattacctcgcttggtgttgacgtgaaccttcacttcgagcattcggacaccgcacagcccggtacggtgctgcgcaccagcccttcttctggcactaaagtgtcagttcctagtaaggtagagatgtatgtagctaatgagtcttcaggtacgaggacggattctgactcgtcgccatccgcagctacgccttcaggcgcgtcgacttcttctagtcctcgtactgggcgttagtgtctgagtccactcacatcaaaaactatttttaccccaggagaacgtatggacctgttggttcctgaaacggtagatggccgttataaggtactcgatgttatcggtaccggtgcgatggctaccgtatacgcggcggaggatactcgtctcggtcgtaaggtcgcgatgaagatcctgcgcccggagcaggcccaagacaaaaccttccgttcacggtttaaacgtgaggcggaggctgtcgcatccctgaacaaccccggtatcgttgcggtgtacgacacgggcgcttattccccgtcagatcccaacagcggatacggtgttgatgatgccgccgacgatgacgaggctaagatcccgtacatcgttatggaatacgttgatggcaggacgctgcgcagngtcctttcgtcgggcgggtacattcccgtgcgtgatgcggtggggtacgcagagcagcttttgagcgctctgaaatacag

SEQ ID NO: 1574 - DNA, 4000 bp, Escherichia coli
  misc_feature (354)..(354): n is a, c, g, or t
  misc_feature (373)..(373): n is a, c, g, or t
  misc_feature (869)..(869): n is a, c, g, or t
  misc_feature (931)..(931): n is a, c, g, or t
  misc_feature (1991)..(1991): n is a, c, g, or t
  misc_feature (2315)..(2315): n is a, c, g, or t
  misc_feature (2517)..(2517): n is a, c, g, or t
  misc_feature (2525)..(2525): n is a, c, g, or t
  misc_feature (2643)..(2643): n is a, c, g, or t
  misc_feature (2933)..(2933): n is a, c, g, or t
  misc_feature (3095)..(3095): n is a, c, g, or t
  misc_feature (3712)..(3712): n is a, c, g, or t
cgcagaaacccttgattatggatccattttgtgtgaatcttatggcatgcccgaaattattgccttgcacccggaagcttcctggtcccaaatttcgccaatcgatgcagattgggacgccgcagacccagtaatgctcggcgccatgtttagtcacatggtgttaatccgcacttttgaagagtgtgtgttgcagttagccggtgaagggctgattcacggaccagctcactccagcatcggccaagaaggcggtgcggttggttcggccttagcccttattgccggggatactgtgaacgggtcccaccgcggtcaccatcaatttcttgccaaagtgctggcgcatttggncccagagggcattgatccntccggagaacttgagcaaccaattcgtgaagtgctgttgaaaacgctggcggaaatctgcggcctggatcgtgggtttagccacggtcgtggcggttcaatgcatttgcagtgggaggaggccggtgcaatcggcaccaacgccattgtcggcggtggcgtcccgttagcggcgggttcgggttgggcccatcagcacgccggaactaacaacgttgccgtcacttactttggtgatggagccgcaaacatcggatctacacttgaatccttcaatctcgccgctgcgtggaaagttccagtgtgcttctttattgaaaataatctgtacgcagtgtcaacgacggtatttgaagctacgggtgaaccgcgactttctgcccgtggtcctggattcggaatcacgagtttcaaagtcgatggcatgaatccactcgcggtctttctcactatgcaagcagcgaatgaacacatgagatcaggcaatggcccaacgntcgttgaggccgacgtgtaccggtacttccaccaaaacggcccgttccccgggagcgcattnaaataccgcactaaagaggaagaagcgtcatggcgcgcccgtgatccaatcgatcaagttgcctttcacctcgtacgtcgcgagattcacacccaaaacacacttgattcattcattgagcaagccaacgcactcatggtcgagatcacctccgtgcttctggagcccgtcgagggtggcaagcccaatgaacgccgcattaagccttccgagtggccagatcctgcttttgtcaatgtcggggtccgcggcgacctttccgaactgcaagggtctcactacaaggatcgtgaagactttgagggtgaaatcgccgaagtcaaattcatcgatgcggtttccggggtcatgttcaatcgcatggaaaaggatccacgtgttgtgatcatgggcgaggacattcaccggctcaatggcgggaccaatggcgccacccgaggattaaaggacaccttccctgatcgggtacttggtaccccgattagtgagaatgcatttaccgggctagccggtggtatggcgctcgatggaagattccggccggtgattgagttcatgtacgccgactttatgtgggttgccgcggaccaactcttcaatcagatcggtaaggcccgtcacatgttcggtggaaaaagccccgtcccgctagtacttcgcagcaaggttgccatgggcacaggttacggctcccagcactccatggatccagccggaatattcgtcaccaacccgggttggcgagttgtcgcaccctctaatccatttgactacgtcggtttaatgaatacggctctaagttgtgacgaccccgttgttgttctcgagcacgtggacctctacacctccagtggccccggtgttcccgatacatacgactatttcctccccgttggaaaagccgcggtcaaaaaatctggttcagaggtcacagtgatctcttatctagccatgaccaattacgtcatggccgctgtggaaggtcaaagtgcgattgatgctgaagtcatagaccttcgctggcttgatcgggccagcatagactgggataccattggtnccagcattaaaaagaccaacaaggtgatcattgcagagcaaggcgcattgggtacttcttatggaggctggctctccgacgagattcaacgtcgttacttcgattggcttgatcacccggtcctgcgagtgaccgggacgcaaagttctcccagcatcagcaaagtcctcgaacgggccgcgattgctcgcaccgaggaaatggaagcagcactgagtgcgttggcgaaggattaccatggctgaattactcctcatgccagaagttgcaacgggcacaacatcagcggtcctatctgcctggccgatgccggaaggttccacnttcaaagcgggagacattcttgcgatccttgaaacagataaagccgtcgttgacgttgaagctgaagctgacggaattatgcacacccacttagtttctgccggaacggacgtcaatattggcgtccccattgctctgaccgccgcggtgggcgagcagattacagataaatcagcggcactacaggaattgggttatcaanccgacccngtcacgcatccggtcgaactaagcgatgtcccagctgcgacaccaaccccggcgagcccctccaacagcggtcgaatttttgcaagcccactcgcccgcagggtcgcccgcgaacgcnacgtagacctcaccagcgtggttggcaccggaccttccgggcggattcgacgcaaggatcttgaactcgctgcgctcactcctgcgctatcacccgcattttctatgccaactattgcatctactccgatcgcagaaaccgctcaatccggcacctcgatccagatcccacatacgaaattgcggaaagtgatcgccaaccgtttaactgaaagtaaaaccacggtccctcatttctatcttcgcgcgagcatgaaggttgaccgtttaatggcgatgcgggcagaactnaatgacgactcgaaagttcgtatctcagtaaatgatcttctcatcaaggcaatcgctgccactcacattcgggttcctgaactcaatgtgatttggactcccgatgctgttgtgcaatttgcatcggtcgacatttccatggccgtagcaacagaccagggncttttcacccccacacttcgttcggtggaaaatatgagcatcacgcaagttgcattgacgacaaaagacttcgctcagcgtgcccgaaccggatcgcttcgccaaaatgaactcgaaggtggaagcatctcaatttcaaatctaggcatgttcggggtggaagatttcgctgcaataattaatccgccacaagccagcatcttggcggtcggggggatctccactgagccagttgttgtcaacgaccaactcaccaccggtcaactaatgcgcgctaccctctcagttgaccaccgccccgttgatggtgcgaacggtgcccgctggctacaagagttcgtgactcttattgagtcaccgagcaaaattcttgcttaggctgtccacaaaaaatatactgcgcaagttactccaagccagtaagcgcgtcaggttttttgggctggatggtattaacgatgacggccatgaacgccaagataactccaagaataagtggcgcatccagatagccgttgacaactaggtcgagcacgagtgaaccaactagttgtcccgaaattgccaataaactcaagcgcagtactccaacttttcccaccacccatgacgtggtngcaatgaaaatcacgccgacgacaccaccaaagtagagccagaggggcccggatggaagggccctgggcgccacggttcccaccaataccatgaccccaaataccaggatcaaaattgacgcacccaccacaaagttcaaccatgcagccaccagcggttcacccgagacatcacgcaccctaccgtttattgcttgttgaactgacacaccaataccggcgacaaaacatagtgccacaagccagatcggaatctcagcgctatccagccgtccagataccgctacg

SEQ ID NO: 1575 - DNA, 4000 bp, Escherichia coli
  misc_feature (29)..(29): n is a, c, g, or t
  misc_feature (73)..(73): n is a, c, g, or t
  misc_feature (83)..(83): n is a, c, g, or t
  misc_feature (134)..(134): n is a, c, g, or t
  misc_feature (173)..(173): n is a, c, g, or t
  misc_feature (188)..(188): n is a, c, g, or t
  misc_feature (203)..(203): n is a, c, g, or t
  misc_feature (212)..(212): n is a, c, g, or t
  misc_feature (224)..(224): n is a, c, g, or t
  misc_feature (251)..(251): n is a, c, g, or t
  misc_feature (296)..(296): n is a, c, g, or t
  misc_feature (359)..(359): n is a, c, g, or t
  misc_feature (362)..(362): n is a, c, g, or t
  misc_feature (365)..(365): n is a, c, g, or t
  misc_feature (391)..(391): n is a, c, g, or t
  misc_feature (428)..(428): n is a, c, g, or t
  misc_feature (438)..(438): n is a, c, g, or t
  misc_feature (440)..(440): n is a, c, g, or t
  misc_feature (442)..(443): n is a, c, g, or t
  misc_feature (452)..(452): n is a, c, g, or t
  misc_feature (467)..(467): n is a, c, g, or t
  misc_feature (515)..(515): n is a, c, g, or t
  misc_feature (529)..(529): n is a, c, g, or t
  misc_feature (543)..(543): n is a, c, g, or t
  misc_feature (554)..(554): n is a, c, g, or t
  misc_feature (575)..(575): n is a, c, g, or t
  misc_feature (606)..(606): n is a, c, g, or t
  misc_feature (614)..(615): n is a, c, g, or t
  misc_feature (639)..(639): n is a, c, g, or t
  misc_feature (747)..(747): n is a, c, g, or t
  misc_feature (749)..(749): n is a, c, g, or t
  misc_feature (782)..(782): n is a, c, g, or t
  misc_feature (791)..(791): n is a, c, g, or t
  misc_feature (899)..(899): n is a, c, g, or t
  misc_feature (908)..(908): n is a, c, g, or t
  misc_feature (941)..(941): n is a, c, g, or t
  misc_feature (947)..(947): n is a, c, g, or t
  misc_feature (1067)..(1067): n is a, c, g, or t
  misc_feature (1073)..(1073): n is a, c, g, or t
  misc_feature (1109)..(1109): n is a, c, g, or t
  misc_feature (1151)..(1151): n is a, c, g, or t
  misc_feature (1235)..(1235): n is a, c, g, or t
  misc_feature (1241)..(1241): n is a, c, g, or t
  misc_feature (1304)..(1304): n is a, c, g, or t
  misc_feature (1512)..(1512): n is a, c, g, or t
  misc_feature (1539)..(1539): n is a, c, g, or t
  misc_feature (1616)..(1616): n is a, c, g, or t
  misc_feature (1675)..(1675): n is a, c, g, or t
  misc_feature (1719)..(1719): n is a, c, g, or t
  misc_feature (1965)..(1965): n is a, c, g, or t
  misc_feature (2004)..(2004): n is a, c, g, or t
  misc_feature (2061)..(2061): n is a, c, g, or t
  misc_feature (2068)..(2068): n is a, c, g, or t
  misc_feature (2124)..(2124): n is a, c, g, or t
  misc_feature (2169)..(2169): n is a, c, g, or t
  misc_feature (2187)..(2187): n is a, c, g, or t
  misc_feature (2193)..(2193): n is a, c, g, or t
  misc_feature (2208)..(2208): n is a, c, g, or t
  misc_feature (2295)..(2295): n is a, c, g, or t
  misc_feature (2301)..(2301): n is a, c, g, or t
  misc_feature (2304)..(2304): n is a, c, g, or t
  misc_feature (2307)..(2308): n is a, c, g, or t
  misc_feature (2310)..(2310): n is a, c, g, or t
  misc_feature (2313)..(2313): n is a, c, g, or t
  misc_feature (2325)..(2325): n is a, c, g, or t
  misc_feature (2355)..(2355): n is a, c, g, or t
  misc_feature (2373)..(2373): n is a, c, g, or t
  misc_feature (2379)..(2379): n is a, c, g, or t
gcgatttagtatgcgatgagaccaacctngcctataaggcttataaggctttggcgcctttttgtgaagtgcngcgccctgtncatatccgtctggaaaaacggcttcccgtggcagcggggctggccggtggnagtgccgactgtgccgctgttttgcgcggcttgaatcgnttttgggaccttaanctgaaagcttccganttggaacgnatcggggcggcnttgggggcggatgttcccttttgtgtnaccggcggcacggtccgcggtagcggtatcggtgatattctcacncctttgccgtcattgccggcatgggaagttcttatactgcatccccatgtctgcgtcgagacnggnaangcttatgatctctttgataaggccgngtcggtatcttttgtcgatgtaggtgaaatggttgantccgtgcgtngngnntcttttganggtatttgcagggcnatgggaaatacctttgagtccttcatagtgccgctcgttcccgaagtnagtgagtgtaaagnggctttaagtcgtntcgggctcaancctcttatgtcgggaagcggncctaccgtttttgcccttgtaccgcctgagngagacggnnctttttttgcgaaacggttggaanaagaaatgaaaaatacggatgtaatgttaacgtccttaatataggaagggattaaagtgaacaaagaacataaattggaacccatacgcttggacacgtataagcccntncgtgacgttgtcagtgaagctctaagacaagcnattaaaganggcatattaaaacccggagaacgcttgatggaaattcaactggccgatgagttgggcgtaagccgtacgcctattcgggaagctattcgcaagcttgaattggaaggntttgtcgtnatgataccgcgtcgcgggacgtatgtagccganatttcnttaaaagatgtagttcaggtatttgaaattcgcagtgctttggaagagttggccgccggccttgcggcagaacgcatcacccccgacgaattggaagaactggaacgtattttagtaganattaangaatatatagaccgtgacgaatttgataaaatcgtngatacggatattcgttttcacggcgttctctatcgtgccagncgtaataacagactggtcgatattttacataatttacgggaacaaatgcttcgttttcgttccatatcgatgcattatcccggncgtttngccgcaacgtgggaagaacacagacagttggtggaaagcattgctaaccataacagtgttcangctcgaaaaatagcaaaaaaacatatggaaaattcggaaaaaacccttataatgggtattaagcgggataaggattcagcccgattggtacaagaattatttccgcactaagaaaaggagtaatacatggaagcaaatatgaaggtagataaataccacgagcatgaagattcatttgaagcattcttaggatacttggctaaggganccttcgtactcatgttcggccgactgnttattgcctgggctatgggtaccttataatcttataataagagtacaagaggctgtcatgcgaaagggaagcgaagntcgtttttgtatgtatgtacaaaaacgaaacgcttctctttttatttctcgttaaaggntggtatagatgaaatataatgcggttactgaagaattgttgcangaattgcgacaggttgtgggagaaaaatacgtaaagacggatccgtccgtcttggatatatataaggccgatgaaagcctggctccgtcttattgggttatgcccgaagcggtggtgttgccggcggatgcacgggaaacggcggaaattgtgaaacttgccaatcggtataaagtgcccttaacgcctcgcggtgccggaaccagtgtcagttgcggagccgtaccggcacaaggcggtattgtngttcttacggagcggatgaaccacattcttgaatgcagngaagagggaatgtatatggtcgtcgaagccggcgtaagaacggcggatattcaggcnttggccnagtcgaagggacttatgtatgccggcgacccgtgtagtgccgacagctgtcttatnggcggaaacttggcaaccaatgcgggcggtaacaaagcggttcgntacggcacgacgagaaancaggtntattccgttgaagtngtattgcctaacggaaaaatcgcaactttcggcagcactttgaaaaaatgctctaccggattttgtttagatcaactgattatcggnagtganggnacnntnggnattattacaaangccacgttgaaactcgtgcctttaagcccntttcatgtagacgttctngcagtntttacaaaattaagcgacgctgccgaagcggtacccaaaatcgttaaagccggtattaacccgacgtccgttgaatttatggacgtatccttcgtgcgcagtgcttgtgagtactgcaaactggatttgccgcacaaggaagacggctattatgacatcattactattgaggcttttaacgaagcggaactggatgaaaaaacggaaaaattgatgaagatttgcgaagaatgtcatgctacagacgttgtagaggctgacgatcgcgtttggagcgtacgccgtaattgcctggaaagtacgcgaacctattcgaaagtgggcacatcggaagacttggtcgttcctgttacgaaaattgcagattgcataaaaacgctgatggaagaaagcaagaaatatgattttcgtcccttctgtctggcccatgccggtgacggaaatattcactttcaaatcctgaaatgtgatatgagcgatgaggattgggaaacacagttggaacaattccgggctgttgcctatccgtatgtatactctttaggcggtaggctttcgggagaacacggcatcgggctgaaacgcttgaagtatatggaaaaatacacggatccggtagaactggaatttatgaaaactataaagcaggccgtggaccccaactggattatgaatcccggcaaagtgatagagccttaaaaccggtataattagactaactattaaaagtcaattggaaaataagattttttgaataagacatcaccagatgttttagatagcccggaggcaggcttaagcctcaatcagtaccttgaaaatcgcatgacaaatagaacatctaaacaggtgctctcagaaaaggatgtgaagttaatgaattatcttcggtaggcttcgcctgtaagttccattcggtatatggtgcgtaccagttttttcgttgcatgaccgatagcaacattatagtgcttgccttcgcctatcttctttgagaggtaagctccgaaattctcatcccacttgcagacaaatttcgcggcattgaacaaagcatatcttagataacgagaacctcgtttctccatatgagaatagctagaatccagttgacctgattggtaggtagaaggtgacaaccctgcaaatgccagtatctgatcagcatagttgaatcgagtgaagtcaccaatctctgcaaggatcatagctcccatacgatagctaatcccagggattgtcataatcggagagttacaagtgtccatgatggatttgatggaatcttcaatttcatcaatctcttccgtcatcaccttaatcaaatggatggtgtgctttagttccattgattttgccggtatcacagagccgatagagtccctggcggtgtttcttaaagtaatcgccatatctcgtccgtaatggcctttagaggctgtttctaggagatttttgagatgggtaagatgacattcggtaatgtaagaggctccgggaagtttggacagcaaggaatacaccgaagccatatgaaggctggggacgagtttttccagctccggaaaaaggatgtttacaagacgagctacggaagatttgagttttgcccgctcctgaa

SEQ ID NO: 1576 - DNA, 4000 bp, Escherichia coli
  misc_feature (127)..(127): n is a, c, g, or t
  misc_feature (451)..(451): n is a, c, g, or t
  misc_feature (606)..(606): n is a, c, g, or t
  misc_feature (730)..(730): n is a, c, g, or t
  misc_feature (751)..(751): n is a, c, g, or t
  misc_feature (841)..(841): n is a, c, g, or t
  misc_feature (1315)..(1315): n is a, c, g, or t
  misc_feature (1426)..(1426): n is a, c, g, or t
  misc_feature (2926)..(2926): n is a, c, g, or t
atcccacagcgtgagaggatcaatacttaacccgaagctgaagaaaaagatagctccaaagaaatcacgaaacggtacgacaagatgttcaatacgatcgcgatgttccgtttcagaaaatacaagnccaagcaataacgcaccaattgcttctgccacgtgaattgtttctgagaagcctgccacaaaaaacaataccgcaaaaacgacgattataaagatttcgtttgatgaaatatttaaaagtttatttagtagcggcgtggcttttcgagcaatgataaagaacagcatcatatagccaaacgcaattaaaatagatgttaaagatccagcaagcgatccgtggtctccaagcaccaaccctgaaacgacagaaagataaacggctaagaaaatatcttcaaacatgatgatccctaatatcagttccgtttctggattcgctgtncgttttaaatcaaccaatacttttgcgacaattgcgctggacgaaatcgtaataattccagcgataatcagcacttcaagaagaggatttcctgtcaggtatccatacaataatcctaaagtgaagttaattaaaatataaatagatcctcccancgcgatggacctgcctgatttaattagctttccaactgaaaattctaatcctaaataaaagagtaaaaagagaactccaattctccccatgaattcaataatctcttggctttcaataaacttnaaactgaatgagccaaactcnggagcatggggaccgaccgccatgcccagcagaatgaggaatggaataatcgtaaatttaaatttatgtgctagtatagccgctaaagcnactagtaacaaagctgtcccaacttcaaatactaaatgatccaattatgaactacctccttgtgaaagcaattctttaatgagcgtttttaaatttcctctttcaccagagatgacaagcgtatctccttcttcaattaacgtatctggtcctggggtggataattttttttgcgtgtttttaatgacggcgatgatagtgacatcatagttgctgcgaacgtcaatttcaccaattgttttactgtgagctttcgcttgtttttcaactttgtaccattcaatcactaagtcattgaatgccacttcaatggtttccattgcttttggcttgtaaatcatgccgcctaaaattgcagctagctgtcttgattccgtatctgttaacgtaatgtcaaaaatgctttcttctaaatctttttgatcgaagtggtagatttcacgtcgtccatcatcatgaatgataacgactacncggtttcctccgcttgtctcaatttcaaatttacggccgattcctggtaactccgtttctttaatcatcattgaatgatcactcctataaagtttttaaaaagaatttttnaattttgccgcgttatttgcatagaaaatccgcatagcaaataagcctaagaatagttggtaattttaggtttgaagaaaaggctgtggaaatttcaaccttttttatttaattgaggtaacttgattgaaagatttttggataaaaaagtgttttcttgaggataaaatacgcaatttgatgcgtcggaatgatgagtttggcactcgtccatactaaagcaaaagttactatcacgctttgtatgagggatcctatttgtttaacgctgtgcttagctcctggagacatgtgcacaatatccgtgtaatgctgaaccgaactttttgtgaccttcactttttcaaagtcgttatcaataaatttatctggcaaactcgcaaaaggcaaacagaatatcatgcataacaataagctcatccatacatttttcatcatctcacctctctttcttctgaactagtatctccttacttaaaagtatacgtactctgaaattcaatttcaagcaataagttttttttataaagatttaccttttttataatattttcttaacgtcattctttttagatatgtatgcgacacttaaaaaaatatacaaaaagctggctttctaagaagaaagccagctcatgttatagttcaagttctcccattcgaaggagttctacgactgcttgagaacgccccttgactccaagcttttgcatcgcattagaaatatgatttcgaactgttttttcgctaatgaatagttcactcgcgatttcttttgttgttttgtcctgtactaaaagctcgaatacttctcgttcacgctttgtaagtagcggtttaggttgaaactctttttctttcaatgtaaccctccttgcctgatcctgagttgaactatcggatgggtgtaaatttagtcaacatatcttatgtgcggtatgcctacgcggttactagttttagaaaaaatatgcaaaaaactcttttttacctttaaaaaagaaaaaagcctgaagaaagagccttcaagccattttcatatatttgataaacaccttttcatctcttcattccaaggcacgctttttcccgtttctttagaaatttgcaccattgttcctctcccggtgagtacaacctctctttgctcattttgaatcatatagtgtaaatcaaccgacgaacgtccaattctatgagcttttacaaaaacagatagcacgttgccaaaatacacttgtttgacataatcgcactgcaaatcagccaccaccggtatcgttccctcatgctcactcgtccacttttgcataaagccaatatggtgaaagaattccgtacgtatttgttcaaaataaacaaaaggaaccgtattatttaaatgcccaaacatatctgtttccgaaaatcttaccttgatctcctgcttaaacgaaaatgactctttccaatgatccatgtcttcaatatacgaaatattattcatctgtatttcctccnttcgtcatagacaaaataaaacctctccgcgtggagaggttttgagtgattatacttgatcgctaccaaagaaacttctgaatgcttgaattgttgtatcgcggttcaaagctgcgattgaagtagtcaatggaattccttttggacatgattgaacgcagttttgagagttcccgcagttcgctagtcctccatcacccataatcgtctctaaacgttctcctttatttaacgcaccggttggatgggcattaaacaagcgaacttgagaaagcggtgctggaccgatgaagtttgacttgtcgtttacgtttggacaagcttctaagcaaacgccacatgtcatacacttggataactcatacgcccactgacgtttcttttcaggcatacgcggtcctggacctaaatcgtatgtgccatcgattggaacccaggcttttactttttttagtgaatcaaacatacggctgcggtctacttgcaagtcacgaaccacaggaaatgttttcattggctgtaagcgaattggctgttctagtttatcaacaagagccgtacatgactgacgaggtttaccgttgatgaccattgaacaggctccgcatacttcctctaaacagttcatttcccagtttatcggagcaacctctttacctgaagcatcaacagggttacgtctgatttccatcagtgctgaaataacgttcatattcggacgatacggaatttcaaactcctgattgtaaggagcagattcagctgaatcttgacgtgtaataatgaagcgcactgtcttttggactgtttgttgttcactcattgattaacgaaccccctcttgttgtttttttggtttttcatcttttttctttgtgtagtcgcgcttacgcggtttgattaacgatacgtctacctcttcataatggaaagaaggagccgttttcttatccacaaaagatgccattgttgtttttaagaattcttcatcgttacgatctgggaaatctggcttataatgagcaccgcgactttcgttacggttgtaagctcctagcgttacaacacgtgaaa

SEQ ID NO: 1577 - DNA, 4000 bp, Escherichia coli
  misc_feature (1991)..(1992): n is a, c, g, or t
  misc_feature (2073)..(2073): n is a, c, g, or t
  misc_feature (2304)..(2304): n is a, c, g, or t
  misc_feature (2318)..(2320): n is a, c, g, or t
  misc_feature (2324)..(2324): n is a, c, g, or t
tcctggggtgggccgatcttgacgagcggtgccgctgccagcgacggcatgacctcccgctcggagagcaggtcgtcgaccttgacgtcagtcgtcatggcgtcacttcgcagagtgggcaggattcaccggccagctggtcacagtcgcaagggcagatgtcctcttcgacgattcggagaactcgctcagtcactcttgtccttcttctcggccgaggccttggcgatcttggtggcggaatcctcgggagattcctcacatccctcgcaggggagcccggccctgatcccagcctggacgagaccgagcccgatgccgacgagcaggccgccggcgatgatcagcccgagtgacttgcccttcactttccgatcccccagaggtacttctcgatcttgcggctggtcgtattcggaggcgtctcggcgagcgaggattgcttcgtaggctcggagggcgtcacttgcttcaacttctccacctccgcccggaccagctcctccatcgagcgctcctcctcccgtggcgtcggcggcttcgtctccgttttggtcgagctgggcgaggtatcggtcgagtcctccaccgtcaccgacccggagtccaggagggaccccaggacctcccgcaccgctgtcttgatctcgtcggcgaggctctcctttttcggtgatggctcctccttcacttctgtttcagtcattccgaccctttccgtaggtgccaggattccggcaggtcgcagccgagctccagcgctcgcttggtgatgtggcgacggacacgctcacggtcacccgccgcggtgcgcccgaggtcgcggatggcgttctcgacatcggtgcagtcattgatcgggtagcgcggctcttcgccctcagtgaggggagggagggccttgccttccgataatgcggcgcggcgtcgagccgctgaccatcttgccaacgatcccacctcccaggcgttcgagcagcggcgcgaagcgctcgtagatcgagagcaggcggtcgagcttcgcttcgatccgcgccaggtgctcggcaagctcctcgcccataccctttaatggtataccattggaggcgtgaccgaggtactgatcggagccgaggatcgggcgacggcgcagttggcccgcctggagatcgtggcgacgatcctcgcccagctggtggcctgctacctggcgctctccgccctcgacgacgggacgacctggccgacgattgtctggcactggaagcgttggcgtcacagcctccgcaaccggatcgagttccgggtgccgtcgtggccggtgatcgccgaggcggaacggatcgtgagagagggagccttccatggctgaagcggaagcaggcgtagagttctcgatcggcgacttcctcctcggagccaaggtcgacctcgaggccaagcttgactcgatcgagaaacacctgggggacatcctcgcccgcgaggagcgctacgagcgggagggaccggtcttcgtcgccctccaggcctccggcgtcgtcgacgcctcctccgaccccttgtacctcgacctcggcggccccacctacgggcgggcctgggaggtccgccagctcgtcatcggcgggatcacctgggcgacggcggtcgccggcaacgccgtggtcttcgcccagccggtcgccccctccacccttaccggcgtcggcctcggcaacgtccaggatcacgccgccagcctcccctccgtggccttctactccggcggccagttccacgtccgccacccgaaccgcatctacgtcgccatcctctccggcaccgcctcgacgcagtaccaggccgtcggcgacgccttccacgtccccgacgtgggcacccgcgggctcttctcggtatgagcggcttcccgcaggcggcatcggccgctcagcctccgctggcgtacagcgacctgttgggctggtccttcgacccgactggctacggcggcgggctggctctanntaatgcggcgacggtctacgtctcccgcatcccgctcccctcgcagatcctcgtcacgaacatcctcgcttacatcaccgncatcggtggcaccctgacccacagttacctggcgctgttcaattcgctgggcacgatcctcggccagaccgccgaccaatcgaccggcggcacgggttggggcacgggcggggccaccgggctgcacaccgtcccccttaccactcccgtccaatgcgcgccactgacagccaacgatttcctctacgccggggtctacagtgggacggatgtctccttgccctcgctccnagcggccgacaccnnnctcnccgcgtttgccaacgctgggacggctgccaaccggctccgtgccgggaggatcgcccaggcggacacggcgaccctggcctcgatcgtcgtcgccagcctcagcgccacggcgatttactggttcggcctcagctaaggagagacatggagatcctgaaaggcgccgactccgcagtcccccagcccggcctctaccctggccacgacgtctggggcgtctacatcgccggcgccacgcctcacgcctggacccacgccgaggtcgccgccctcagaagcggtggcgtgcgcggcgtgctgcccatcgtcgttccgtcacagaaagaggagtggtggctggagaacgaggggtacggagtcctcgaagggctggtccgggaagccgtcgcctggggcctgccgcacggggcgccgctggtcttggacgtggaggaagctcagagcgtcaagatcggctccgggacctgccactgttgggcgatcgcctgcctcgcccacggctacatcccctggctctacggcccggcggggttcctcgcccgcgaccactggtgccaccactggctcgcctcctgggtcgttgccagcggcgtcgaccatgaccccccggagaagttgctcgccaactacctcggctggcagtacgccggcaacgtcgaaggcggtcggatcgaccgtgacatcttcgccgcccgtcacacttacctgacacctgaaaggaccatcgtgacagagcaatatatgaaccccgcagaggcggccttcgggacgcccgtcccagtaccagaagcgccgacatcaggcctgccgacggccgaggaggtcgccaaggtcgaggacatcccggccgacgccgagcccgtagcccaggaagaggccaagccggccgtccagaccgtcgaggccgcagaagagctccccgacctcaccgccgcggccaaggccaagctccacgcctgggtcgactcttttttttagatgagactcctcaccctcccctggcggctggccttagtgctcgtcgaagtgatagcgttcctgctcttcctctcagcgggggcagcggccctcgtctggcaactcctaccggaaaggacacaacgatgggcacaccgactagcccgactgtttcagtagcgggggtcgtctcggttccgaagaagctcgccacctacatccacgagatcgtcgacgccgtccacaaggaggcggcgttggtgatgggtatcctcgtcgccctcggcgtcacgccgaccccggcggcagactccaaggtcacctcgggcatcctcgtcggctacgctgccgtggcgcaattggccgagaagttcttcgccaagagctgatggctcaccagcaagtctctggcaaaggtggcaggaccgctgaaaaacgtgtagcgaaaagggcacggagaacccttctcgccatcgaaataccgcccgcactacgcgacagcgcgagccgagccacacacgcccacggcacgaccgtttccgaggtcgttaggcaatccctctatgcctacgtcgagcgcgccgaaaacgcggcacctgagagagaggggcactaatggcaacgggccgcgggctacttcgggatcaagaaagctgacccgaaaatgaggcatcacaacaagggtcggatggaccgagagggtattaccggagccgtt

SEQ ID NO: 1578 - DNA, 4000 bp, Escherichia coli
  misc_feature (73)..(73): n is a, c, g, or t
  misc_feature (478)..(478): n is a, c, g, or t
  misc_feature (535)..(535): n is a, c, g, or t
  misc_feature (1326)..(1326): n is a, c, g, or t
  misc_feature (1404)..(1404): n is a, c, g, or t
  misc_feature (1434)..(1434): n is a, c, g, or t
  misc_feature (2276)..(2276): n is a, c, g, or t
  misc_feature (2552)..(2552): n is a, c, g, or t
  misc_feature (2558)..(2558): n is a, c, g, or t
  misc_feature (2969)..(2969): n is a, c, g, or t
  misc_feature (3071)..(3071): n is a, c, g, or t
  misc_feature (3086)..(3086): n is a, c, g, or t
  misc_feature (3167)..(3167): n is a, c, g, or t
  misc_feature (3275)..(3275): n is a, c, g, or t
  misc_feature (3447)..(3447): n is a, c, g, or t
  misc_feature (3500)..(3500): n is a, c, g, or t
  misc_feature (3539)..(3539): n is a, c, g, or t
  misc_feature (3740)..(3740): n is a, c, g, or t
  misc_feature (3788)..(3788): n is a, c, g, or t
  misc_feature (3818)..(3818): n is a, c, g, or t
  misc_feature (3821)..(3821): n is a, c, g, or t
  misc_feature (3824)..(3824): n is a, c, g, or t
  misc_feature (3833)..(3833): n is a, c, g, or t
  misc_feature (3917)..(3917): n is a, c, g, or t
aaacactaacaaccatggtcacgtccccgtgctgcgcgaacgagtcaccgaactcctcgccccagccctctgnaacaccaccacaaacccacccatcatcctcgacgccactttaggcgccggtgggcacagcgaatacttcctcaccacattcccgcaggtacacataataggactcgaccgcgacaccaccgcactggcccaagccgccacccgcctggccgacttcggcgaccggatcaccacactccacacgcgcttcgacgattttcccacagccatccaagccgccgccgacgccggcaatgcaacatgccaagctgcactcacagaaggtatatccggggcactcttcgacctgggtgtgtcatcaatgcagcttgaccaggtgaaccgcggttttgcctatcgggttgatgcaccgctcgacatgcggatgaacaactccgaaggcattaccgcggcggaaatcctcaanacctacccccacggcgacctcacccgcatcctcaaaacctacggggacgaacgattngccagcaaaatcgccaccgccatcatccgcgaacgcgaacacgcccccttcaccacctccgcgcggctcgtcgaactgctctataacaccatccccgccgccacccgacgcaccggcggccaccccgccaaacgcacattccaggcactccgaatcgaggtcaaccaagaactcgccgccatcaccaatgtgctaccccgcatcgccgacgccctcatccccggtggccgggccgtcttcatggcctaccaatctttagaagacaaaatcattaaaaaatacttcgccgaaatcaccacctccaaaaccccccggggacttcccatggaactccccgaatacgcggccaaattccggctggttacccggggcgccgaaaaggccacccccgcagaaatcgccgacaattcccgagccgcccccgtccgggttcgcgcaatcgaaaaacttgccaccagcaccaatagaaaggagacttcaaaatgacaaccaattaccgaatccgtgacacccgtatccgcagcggccgccccatcaacacctacaccccttaccggccgacccgtccggcacggtcgcttgcgcgcacccaacaatcccaagaccacagccgaaacgacaccgccctcctcgtcgaagaccggcccagccgcaccggcacatcaggccgggcaatccccaccgtccccacccaggcgccaccccgacggcgcatgcagcgcaaagccggatcccaacaggtattttccaaccggggcaaacggatcgtgcgccaacgcgtcgacccgagncgcatccgcttcgtgctagcactcacactcctgctcggcgccggcgtgtttatagccatgatgctctccaaaatatcnaccgaacaaagtttcgagatgcaggagttncagcaccacgaatccaccctgcaaaaccaggtggaaaccctcaaccgtgacctgcaaaacgcctctgccaccgcggagatcgcccgccaagccaaagacctaggcatggtgatcccggaccagcccggcattctggcaaaaaatgaatcgggcgacatacacgagcaacgcgcgccaggcaccgtgacgcgtcctatagttgatgtcaatggtcagcaagttcggccacaggtggcatccagtgatcccaaggccacaaacgaagtctcccaacggctgaatgaggctccccggattacaccccggacctccaatgttgcaccatacatttctaatcgaaattaatttcgaacggtagaaccgtatctgtcaacattccacaatattccaaggtgtcatttgtgaatcagtcgaactcacgcgcgtctcgcatgcgtcgaaaagctagcagtaacacgcaattccacaacgataccgcggacccgaagaatgggctcaaccggatagccgacaaacccgcaaccggacctgccggcggacccaccaccggaccaggtggcggacaacgccgaatcatgctcggccggctacgaatcctcagcgccggcgtattcctgctctgcctcatggtcattgcccgcatggcctgggtacaactcgtgtggggacccgacctcagcagcctggcggcggaacaacgcacccgcatctacaccgacccggcgcgccggggggcgatcaccgaccgctccggccaacagttggcctacaccatgcaggccagatcactgactgtgtcaccgaatgtgctgcggcgcgaattgccgtatgtggcgaaacancagctggcgtcggacgagaattacgttcaagggtccgaagaaacccgcaaccaaatgattgaggcgaaggttgcggacatcatgacggagtattcggaagaaatccccaagattattgagaaggctcggacggaaaaacaggccgccaaggccacgaaaaccgtgacgggcagcacgaaggggctcaaggatgcggccaagaagagtgaggtgaagccggaagatattgtggcgaagctgaaggccgattcgaattatgaggtgttggtgcgcaangttganccggatgtggcggccggtatttcggagaaatattatggtattgccgcggatttgcaggatgtgcgccagtatcccaatggggcggtggcgtcgaatgtgatcggcaagatcagccaggatgggcagggccagtttgggtttgagtcggcgaatgattcattgctgtcggggattaatggccggaagtcgattgaggtgtcgaccgatgggcaggcgatcccgggcaccgtgacggacgatgtgccggcgacgaatggggcgaatgtgacgctcaccctggatttggatttgcaaacatatgtgcagcagcagttggagcaggcgaaggcgaattcgggggcgaagagcgcgtcggcggtggtgctggatgcgaagacggcgcaggtgatggccatggcgacgagtgattcnattgatccgatgggggatattaaaaagcagctggagcaggggaaagagtttggtaatagcacgatttcggcaccgtttgagccggggtcggtggcgaagatnattacggcggcgggngcgattgaaaacggggtgaccagcccggacgaggtacatacggtgccgggcagtatcgacatggcgggggtgaatgtgaangatgcgtgggatcatggtccggcgcagtacaccacgacggggatttttggtaagtcctccaatgtggggacgctcatgctggcggagaagctgggggaggacaagttngaccagctcttgactggttttggggtgggtcgggccacggggatcgagttgccgagcgagtcggaggggctgttgccgcagcgggcgcagtggtctgggggcacgtttgcgaatctgccgattgggcagggcatgagtgtgacattgttgcagatggcggggatttatcagnctatagcgaatgggggggagcggattgcgccgcggattatttccgaggtgcgngatggtcatggtgcggtggtggcccagccggagccggancgcacccgggtggtgagtgaggagacggcccggacggtggtgaatatgttccgggcggtcacccagtcggattcgagtgggttgcagcagggtaccgggtcgcaggcggcggtaaaggggtaccagattgcagggaagaccggcacggcgcagcaggtggatgcggcgacgggggcgtattcccattcgaaatattggatnacgtttgcgggtattgcgccggcggatgatccccggtttgtggtggcnttgatgttggataatccccaacggggggtncanggngaggggggncagtcggcggcgccgctgtttcatgatattgcgtcgtggctgttgaatcgggataatgtgccgccgtcgccgccgatggagggncagttggtgctgcaggtgcagtgatgacggagtggtgattcggccatggggtgtgatgtccgggttaccctcgatcggttacc

SEQ ID NO: 1579 - DNA, 4000 bp, Escherichia coli
  misc_feature (1)..(2): n is a, c, g, or t
  misc_feature (4)..(7): n is a, c, g, or t
  misc_feature (9)..(17): n is a, c, g, or t
  misc_feature (19)..(25): n is a, c, g, or t
  misc_feature (27)..(43): n is a, c, g, or t
  misc_feature (45)..(54): n is a, c, g, or t
  misc_feature (56)..(56): n is a, c, g, or t
  misc_feature (58)..(59): n is a, c, g, or t
  misc_feature (61)..(63): n is a, c, g, or t
  misc_feature (65)..(72): n is a, c, g, or t
  misc_feature (74)..(79): n is a, c, g, or t
  misc_feature (81)..(90): n is a, c, g, or t
  misc_feature (92)..(93): n is a, c, g, or t
  misc_feature (96)..(101): n is a, c, g, or t
  misc_feature (103)..(104): n is a, c, g, or t
  misc_feature (106)..(110): n is a, c, g, or t
  misc_feature (112)..(112): n is a, c, g, or t
  misc_feature (114)..(126): n is a, c, g, or t
  misc_feature (129)..(129): n is a, c, g, or t
  misc_feature (131)..(137): n is a, c, g, or t
  misc_feature (139)..(140): n is a, c, g, or t
  misc_feature (142)..(143): n is a, c, g, or t
  misc_feature (145)..(154): n is a, c, g, or t
  misc_feature (156)..(158): n is a, c, g, or t
  misc_feature (160)..(165): n is a, c, g, or t
  misc_feature (168)..(186): n is a, c, g, or t
  misc_feature (188)..(188): n is a, c, g, or t
  misc_feature (190)..(194): n is a, c, g, or t
  misc_feature (197)..(204): n is a, c, g, or t
  misc_feature (207)..(217): n is a, c, g, or t
  misc_feature (219)..(219): n is a, c, g, or t
  misc_feature (221)..(224): n is a, c, g, or t
  misc_feature (227)..(231): n is a, c, g, or t
  misc_feature (233)..(241): n is a, c, g, or t
  misc_feature (243)..(246): n is a, c, g, or t
  misc_feature (249)..(250): n is a, c, g, or t
  misc_feature (252)..(252): n is a, c, g, or t
  misc_feature (254)..(257): n is a, c, g, or t
  misc_feature (260)..(260): n is a, c, g, or t
  misc_feature (262)..(262): n is a, c, g, or t
  misc_feature (265)..(265): n is a, c, g, or t
  misc_feature (267)..(270): n is a, c, g, or t
  misc_feature (272)..(272): n is a, c, g, or t
  misc_feature (274)..(275): n is a, c, g, or t
  misc_feature (280)..(286): n is a, c, g, or t
  misc_feature (288)..(296): n is a, c, g, or t
  misc_feature (298)..(305): n is a, c, g, or t
  misc_feature (308)..(317): n is a, c, g, or t
  misc_feature (322)..(329): n is a, c, g, or t
  misc_feature (331)..(331): n is a, c, g, or t
  misc_feature (334)..(336): n is a, c, g, or t
  misc_feature (339)..(342): n is a, c, g, or t
  misc_feature (344)..(353): n is a, c, g, or t
  misc_feature (356)..(356): n is a, c, g, or t
  misc_feature (361)..(362): n is a, c, g, or t
  misc_feature (373)..(373): n is a, c, g, or t
  misc_feature (427)..(427): n is a, c, g, or t
  misc_feature (445)..(456): n is a, c, g, or t
  misc_feature (460)..(466): n is a, c, g, or t
  misc_feature (468)..(469): n is a, c, g, or t
  misc_feature (471)..(471): n is a, c, g, or t
  misc_feature (475)..(476): n is a, c, g, or t
  misc_feature (478)..(480): n is a, c, g, or t
  misc_feature (483)..(485): n is a, c, g, or t
  misc_feature (487)..(491): n is a, c, g, or t
  misc_feature (494)..(495): n is a, c, g, or t
  misc_feature (497)..(497): n is a, c, g, or t
  misc_feature (499)..(499): n is a, c, g, or t
  misc_feature (501)..(501): n is a, c, g, or t
  misc_feature (504)..(504): n is a, c, g, or t
  misc_feature (506)..(506): n is a, c, g, or t
  misc_feature (509)..(510): n is a, c, g, or t
  misc_feature (515)..(518): n is a, c, g, or t
  misc_feature (520)..(522): n is a, c, g, or t
  misc_feature (524)..(526): n is a, c, g, or t
  misc_feature (529)..(531): n is a, c, g, or t
  misc_feature (534)..(537): n is a, c, g, or t
  misc_feature (539)..(541): n is a, c, g, or t
  misc_feature (543)..(543): n is a, c, g, or t
  misc_feature (546)..(548): n is a, c, g, or t
  misc_feature (552)..(555): n is a, c, g, or t
  misc_feature (557)..(557): n is a, c, g, or t
  misc_feature (559)..(562): n is a, c, g, or t
  misc_feature (565)..(567): n is a, c, g, or t
  misc_feature (569)..(570): n is a, c, g, or t
  misc_feature (572)..(572): n is a, c, g, or t
  misc_feature (574)..(577): n is a, c, g, or t
  misc_feature (579)..(579): n is a, c, g, or t
  misc_feature (581)..(583): n is a, c, g, or t
  misc_feature (587)..(588): n is a, c, g, or t
  misc_feature (590)..(593): n is a, c, g, or t
  misc_feature (595)..(596): n is a, c, g, or t
  misc_feature (598)..(602): n is a, c, g, or t
  misc_feature (604)..(604): n is a, c, g, or t
  misc_feature (607)..(612): n is a, c, g, or t
  misc_feature (615)..(616): n is a, c, g, or t
  misc_feature (618)..(622): n is a, c, g, or t
  misc_feature (624)..(626): n is a, c, g, or t
  misc_feature (628)..(636): n is a, c, g, or t
  misc_feature (638)..(638): n is a, c, g, or t
  misc_feature (641)..(645): n is a, c, g, or t
  misc_feature (648)..(658): n is a, c, g, or t
  misc_feature (660)..(666): n is a, c, g, or t
  misc_feature (668)..(673): n is a, c, g, or t
  misc_feature (675)..(675): n is a, c, g, or t
  misc_feature (677)..(678): n is a, c, g, or t
  misc_feature (680)..(681): n is a, c, g, or t
  misc_feature (683)..(687): n is a, c, g, or t
  misc_feature (689)..(691): n is a, c, g, or t
  misc_feature (693)..(695): n is a, c, g, or t
  misc_feature (697)..(698): n is a, c, g, or t
  misc_feature (701)..(704): n is a, c, g, or t
  misc_feature (706)..(707): n is a, c, g, or t
  misc_feature (710)..(717): n is a, c, g, or t
  misc_feature (719)..(719): n is a, c, g, or t
  misc_feature (722)..(722): n is a, c, g, or t
  misc_feature (724)..(726): n is a, c, g, or t
  misc_feature (729)..(734): n is a, c, g, or t
  misc_feature (736)..(754): n is a, c, g, or t
  misc_feature (756)..(757): n is a, c, g, or t
  misc_feature (759)..(762): n is a, c, g, or t
  misc_feature (764)..(766): n is a, c, g, or t
  misc_feature (768)..(774): n is a, c, g, or t
  misc_feature (776)..(777): n is a, c, g, or t
  misc_feature (779)..(785): n is a, c, g, or t
  misc_feature (787)..(789): n is a, c, g, or t
  misc_feature (791)..(792): n is a, c, g, or t
  misc_feature (796)..(800): n is a, c, g, or t
  misc_feature (802)..(804): n is a, c, g, or t
  misc_feature (806)..(816): n is a, c, g, or t
  misc_feature (818)..(819): n is a, c, g, or t
  misc_feature (821)..(824): n is a, c, g, or t
  misc_feature (826)..(829): n is a, c, g, or t
  misc_feature (831)..(834): n is a, c, g, or t
  misc_feature (836)..(841): n is a, c, g, or t
  misc_feature (846)..(848): n is a, c, g, or t
  misc_feature (850)..(851): n is a, c, g, or t
  misc_feature (853)..(854): n is a, c, g, or t
  misc_feature (856)..(858): n is a, c, g, or t
  misc_feature (861)..(861): n is a, c, g, or t
  misc_feature (863)..(867): n is a, c, g, or t
  misc_feature (869)..(871): n is a, c, g, or t
  misc_feature (873)..(876): n is a, c, g, or t
  misc_feature (879)..(889): n is a, c, g, or t
  misc_feature (892)..(893): n is a, c, g, or t
  misc_feature (899)..(901): n is a, c, g, or t
  misc_feature (904)..(905): n is a, c, g, or t
  misc_feature (908)..(917): n is a, c, g, or t
  misc_feature (920)..(920): n is a, c, g, or t
  misc_feature (924)..(927): n is a, c, g, or t
  misc_feature (929)..(932): n is a, c, g, or t
  misc_feature (934)..(937): n is a, c, g, or t
  misc_feature (940)..(940): n is a, c, g, or t
  misc_feature (942)..(944): n is a, c, g, or t
  misc_feature (946)..(952): n is a, c, g, or t
  misc_feature (954)..(963): n is a, c, g, or t
  misc_feature (965)..(970): n is a, c, g, or t
  misc_feature (972)..(972): n is a, c, g, or t
  misc_feature (975)..(979): n is a, c, g, or t
  misc_feature (981)..(984): n is a, c, g, or t
  misc_feature (986)..(988): n is a, c, g, or t
  misc_feature (990)..(1000): n is a, c, g, or t
  misc_feature (1002)..(1005): n is a, c, g, or t
  misc_feature (1007)..(1016): n is a, c, g, or t
  misc_feature (1019)..(1020): n is a, c, g, or t
  misc_feature (1025)..(1025): n is a, c, g, or t
  misc_feature (1027)..(1032): n is a, c, g, or t
  misc_feature (1035)..(1036): n is a, c, g, or t
  misc_feature (1040)..(1044): n is a, c, g, or t
  misc_feature (1046)..(1049): n is a, c, g, or t
  misc_feature (1053)..(1057): n is a, c, g, or t
  misc_feature (1059)..(1061): n is a, c, g, or t
  misc_feature (1063)..(1066): n is a, c, g, or t
  misc_feature (1068)..(1068): n is a, c, g, or t
  misc_feature (1070)..(1071): n is a, c, g, or t
  misc_feature (1074)..(1079): n is a, c, g, or t
  misc_feature (1083)..(1084): n is a, c, g, or t
  misc_feature (1086)..(1086): n is a, c, g, or t
  misc_feature (1088)..(1091): n is a, c, g, or t
  misc_feature (1094)..(1095): n is a, c, g, or t
  misc_feature (1097)..(1097): n is a, c, g, or t
  misc_feature (1101)..(1101): n is a, c, g, or t
  misc_feature (1104)..(1107): n is a, c, g, or t
  misc_feature (1112)..(1112): n is a, c, g, or t
  misc_feature (1114)..(1121): n is a, c, g, or t
  misc_feature (1123)..(1131): n is a, c, g, or t
  misc_feature (1133)..(1135): n is a, c, g, or t
  misc_feature (1137)..(1142): n is a, c, g, or t
  misc_feature (1144)..(1144): n is a, c, g, or t
  misc_feature (1148)..(1151): n is a, c, g, or t
  misc_feature (1154)..(1155): n is a, c, g, or t
  misc_feature (1158)..(1159): n is a, c, g, or t
  misc_feature (1161)..(1164): n is a, c, g, or t
  misc_feature (1166)..(1168): n is a, c, g, or t
  misc_feature (1170)..(1172): n is a, c, g, or t
  misc_feature (1174)..(1174): n is a, c, g, or t
  misc_feature (1179)..(1179): n is a, c, g, or t
  misc_feature (1181)..(1183): n is a, c, g, or t
  misc_feature (1186)..(1189): n is a, c, g, or t
  misc_feature (1191)..(1192): n is a, c, g, or t
  misc_feature (1194)..(1194): n is a, c, g, or t
  misc_feature (1196)..(1196): n is a, c, g, or t
  misc_feature (1198)..(1198): n is a, c, g, or t
  misc_feature (1200)..(1200): n is a, c, g, or t
  misc_feature (1202)..(1207): n is a, c, g, or t
  misc_feature (1210)..(1213): n is a, c, g, or t
  misc_feature (1216)..(1218): n is a, c, g, or t
  misc_feature (1221)..(1221): n is a, c, g, or t
  misc_feature (1223)..(1225): n is a, c, g, or t
  misc_feature (1227)..(1228): n is a, c, g, or t
  misc_feature (1230)..(1238): n is a, c, g, or t
  misc_feature (1240)..(1240): n is a, c, g, or t
  misc_feature (1242)..(1243): n is a, c, g, or t
  misc_feature (1246)..(1246): n is a, c, g, or t
  misc_feature (1252)..(1260): n is a, c, g, or t
  misc_feature (1262)..(1266): n is a, c, g, or t
  misc_feature (1268)..(1272): n is a, c, g, or t
  misc_feature (1274)..(1279): n is a, c, g, or t
  misc_feature (1281)..(1290): n is a, c, g, or t
  misc_feature (1292)..(1293): n is a, c, g, or t
  misc_feature (1296)..(1296): n is a, c, g, or t
  misc_feature (1299)..(1300): n is a, c, g, or t
  misc_feature (1303)..(1305): n is a, c, g, or t
  misc_feature (1307)..(1308): n is a, c, g, or t
  misc_feature (1313)..(1315): n is a, c, g, or t
  misc_feature (1317)..(1320): n is a, c, g, or t
  misc_feature (1322)..(1323): n is a, c, g, or t
  misc_feature (1325)..(1326): n is a, c, g, or t
  misc_feature (1328)..(1331): n is a, c, g, or t
  misc_feature (1333)..(1336): n is a, c, g, or t
  misc_feature (1338)..(1340): n is a, c, g, or t
  misc_feature (1343)..(1343): n is a, c, g, or t
  misc_feature (1346)..(1346): n is a, c, g, or t
  misc_feature (1348)..(1362): n is a, c, g, or t
  misc_feature (1365)..(1375): n is a, c, g, or t
  misc_feature (1377)..(1384): n is a, c, g, or t
  misc_feature (1386)..(1386): n is a, c, g, or t
  misc_feature (1388)..(1388): n is a, c, g, or t
  misc_feature (1390)..(1394): n is a, c, g, or t
  misc_feature (1396)..(1399): n is a, c, g, or t
  misc_feature (1404)..(1405): n is a, c, g, or t
  misc_feature (1407)..(1407): n is a, c, g, or t
  misc_feature (1409)..(1409): n is a, c, g, or t
  misc_feature (1412)..(1412): n is a, c, g, or t
  misc_feature (1414)..(1415): n is a, c, g, or t
  misc_feature (1418)..(1421): n is a, c, g, or t
  misc_feature (1424)..(1424): n is a, c, g, or t
  misc_feature (1426)..(1427): n is a, c, g, or t
  misc_feature (1430)..(1436): n is a, c, g, or t
  misc_feature (1438)..(1438): n is a, c, g, or t
  misc_feature (1442)..(1442): n is a, c, g, or t
  misc_feature (1444)..(1444): n is a, c, g, or t
  misc_feature (1446)..(1451): n is a, c, g, or t
  misc_feature (1453)..(1454): n is a, c, g, or t
  misc_feature (1456)..(1462): n is a, c, g, or t
  misc_feature (1464)..(1465): n is a, c, g, or t
  misc_feature (1468)..(1469): n is a, c, g, or t
  misc_feature (1471)..(1472): n is a, c, g, or t
  misc_feature (1475)..(1475): n is a, c, g, or t
  misc_feature (1478)..(1481): n is a, c, g, or t
  misc_feature (1483)..(1485): n is a, c, g, or t
  misc_feature (1488)..(1498): n is a, c, g, or t
  misc_feature (1501)..(1504): n is a, c, g, or t
  misc_feature (1506)..(1508): n is a, c, g, or t
  misc_feature (1511)..(1514): n is a, c, g, or t
  misc_feature (1516)..(1518): n is a, c, g, or t
  misc_feature (1520)..(1520): n is a, c, g, or t
  misc_feature (1523)..(1523): n is a, c, g, or t
  misc_feature (1989)..(1989): n is a, c, g, or t
  misc_feature (1992)..(1992): n is a, c, g, or t
  misc_feature (2190)..(2190): n is a, c, g, or t
  misc_feature (2534)..(2534): n is a, c, g, or t
  misc_feature (3906)..(3906): n is a, c, g, or t
  misc_feature (3908)..(3908): n is a, c, g, or t
  misc_feature (3910)..(3910): n is a, c, g, or t
  misc_feature (3915)..(3921): n is a, c, g, or t
  misc_feature (3923)..(3927): n is a, c, g, or t
  misc_feature (3931)..(3933): n is a, c, g, or t
  misc_feature (3935)..(3936): n is a, c, g, or t
  misc_feature (3938)..(3939): n is a, c, g, or t
  misc_feature (3942)..(3946): n is a, c, g, or t
  misc_feature (3950)..(3952): n is a, c, g, or t
  misc_feature (3956)..(3968): n is a, c, g, or t
  misc_feature (3970)..(3973): n is a, c, g, or t
  misc_feature (3977)..(3977): n is a, c, g, or t
  misc_feature (3979)..(3983): n is a, c, g, or t
  misc_feature (3985)..(3986): n is a, c, g, or t
  misc_feature (3988)..(3995): n is a, c, g, or t
  misc_feature (3997)..(4000): n is a, c, g, or t
nnannnncnnnnnnnnncnnnnnnngnnnnnnnnnnnnnnnnncnnnnnnnnnncnanngnnntnnnnnnnnannnnnncnnnnnnnnnnanngcnnnnnngnngnnnnngnannnnnnnnnnnnnccncnnnnnnngnngnnannnnnnnnnncnnnannnnnnccnnnnnnnnnnnnnnnnnnngncnnnnnccnnnnnnnntcnnnnnnnnnnntntnnnnggnnnnntnnnnnnnnntnnnnttnncntnnnnttncnggntnnnntncnnccggnnnnnnnannnnnnnnngnnnnnnnnccnnnnnnnnnnatccnnnnnnnngnccnnnaannnntnnnnnnnnnnggnctccnngcacataccancccgacagccttttgatacaggcgcgccgcaggaaatgaaaaatgtgcagaatngtgcagcctgtatttaannnnnnnnnnnntttnnnnnnntnntnaaanngnnnaannntnnnnnaanncntnanttnanggnnttttnnnntnnngnnnccnnnggnnnngnnntnccnnngggnnnntncnnnnttnnngnngnannnncngnnnaaannannnnanntnnnnnanccnnnnnnggnngnnnnngnnncnnnnnnnnncnggnnnnnccnnnnnnnnnnngnnnnnnnannnnnncngnnanncnnnnngnnntnnncnnaannnnannccnnnnnnnngncgnannnccnnnnnnannnnnnnnnnnnnnnnnnnannannnntnnngnnnnnnntnncnnnnnnngnnncnnaaannnnntnnngnnnnnnnnnnngnncnnnntnnnngnnnncnnnnnnggggnnngnngnnannnttncnnnnngnnncnnnnggnnnnnnnnnnnaannaaaaannnaannagnnnnnnnnnnacnaaannnnannnncnnnnagncnnntnnnnnnngnnnnnnnnnncnnnnnnanggnnnnngnnnncnnngnnnnnnnnnnngnnnncnnnnnnnnnnggnnggggnannnnnnggnncccnnnnngnnnngggnnnnnannntnnnncntnnccnnnnnntttnnancnnnnttnncnaaanggnnnnggggnannnnnnnntnnnnnnnnncnnncnnnnnncngggnnnnccnncgnngnnnngnnntnnncnggggngnnnggnnnngnngnancngncnnnnnnggnnnnttnnnggnannngnngnnnnnnnnncngnnccntttttnnnnnnnnntnnnnncnnnnngnnnnnncnnnnnnnnnncnnccnggnnaannncnnggggnnngnnnncnngnnannnntnnnngnnnaanccngnnnnnnnnnnnnnnnggnnnnnnnnnnntnnnnnnnntncntnnnnntnnnnaaaanngnanccntnnttnnnnccntnnttnnnnnnnanttantnannnnnntnntnnnnnnntnnttnncnnttnttnnnnannnttnnnnnnnnnnnaannnntnnnaannnntnnnantanatggaaccattgtaagcagcggagatcttccgcaggaggcagtaatgaatacattaaaactcagagattacactggaaaagcacttagcgagtgcacgattctggaactttacaacgcggcgctggccctgacgcaggacgcctgcaggaacaggggatacaacagcggaaagaagaaagtttactatatttcggcagaattcctgatcggtaaacttctttccaacaacctgatcaacctcggcatctacgatgatgtgaaagcggaactggctgaggctgggaaagacattacggagctggaggaatttgaatacgagccctccctcggaaacggcggccttggcagacttgcagcctgcttcatcgacagccttgcgacactgggccttcccgctgacggcgtaggcctggcctaccactgcggtctgttcaaacagtccttcgaggaccgcaagcagcacanganacctgactactggcgcaagtggggcatggccaactggatgaagcgcaccgacaagcactataaggtgcagtgcggcgatctggagcttctttccaccatgtatgagatcgatgtcacaggttacggaagcaagtgcggacgccttcgtctctttgacctggacacggtcaatgagggactgatcggctcgggtatcgnttttgacaaaaaagagatcgagaaaaacctgaccctcttcctgtatcccgatgacagcgatgaggacggaaagcttctccgcgtctatcaggagtatttcatggtcagcaatgccgcccagctgatcctcgacgagtgcgtggagcgcggcagcaacctgcatgaccttgccgactacgcggcgatccagatcaacgatacgcacccttctctggtcattccggaactggtgcgccttctgaccgaaaagggcattgaggagaaagaagcatatcagattgtgactgatgtctgtgcttacacgaaccacacgatccttgctgaggcactggagacatggcccnagcacttcttcaaggctgtcgtgccgcaccttatgccgatcatcaagaggatgaatgacgctgttaaggcaaaatatgaagaaccttccgttcagatcatcgacgagtacggcaacgtgcatatggcccacatggacattcactacagccactccgtgaacggcgtcgcgagacttcacactgacattctcaaggagacagagctcaacaatttctacaagctctatcccgagaagttcaacaacaagaccaacggcatcactttccgcagatgggtcatcgagtgcaaccctgagctgacagagctgatcaccgagaagatcggcgagggctggaagacggacgccagacagcttgagcagcttattccttacgcggaggatgagactttcctgcagtgcatcctgaacaggaagaacacgaaaaaacacaagttctccgcatggcttgaacaatatcagggcgacaaggttgaccccgagtccgtctatgacgtgcagatcaagcgcctgcacgagtacaagagacagcagctcaacctcctgtgggccatcgaccgttacctgcacatcaaggacggttacaggccgagaagaccggtcacggtattttttggcgcaaaggcagctcctgcctatgtgatcgccaaggatataatccatgcgatcctcgccttcagcagcatcgtgaacaacgaccctgaagtgagtccttacctcaaggtcgtcatgcttcgcaactacaacgtgtccatggcggagaaactgatccccgcatcggacatttccgagcagatctcactggcctccaaggaagccagcgggaccggcaatatgaagttcatgctcaacggcgctgtgacgctgggaaccatggacggagcgaacgtcgagatcgcggaacttgtcggggaagacaatattttcaccttcggacagtcctccgaggaggtcatcgagcactataagaacgcggattacgtcgcaaagaactggtataagaaggacaagagacttgccgcggctgtggacttcctggtcagtgaagagatgctcgaagccggcgacaggaagcttctcaagcagctctatgacgagctgctgggcaaagactggttcatgacattccctgacttcgagagttactgcaagaccaaggacaaggctctggcagcttatgaggacagaatgggctgggcgaagaagatggcagtcaatatcgccaaggcgggctacttctcctccgacagaacgatcgaccagtacaacaatgatatctggcatttggagaaagactgctgaccgcagggaacagaatatcgtgcagagaaaacccccggagatccgatttccgggggttttaacttgccccntnanggccnnnnnnnannnnnaaannngnngnnttnnnnnaaannngggnnnnnnnnnnnnngnnnntttnannnnncnncnnnnnnnngnnnn

SEQ ID NO: 1580 - DNA, 4000 bp, Escherichia coli
  misc_feature (17)..(17): n is a, c, g, or t
  misc_feature (21)..(21): n is a, c, g, or t
  misc_feature (107)..(107): n is a, c, g, or t
  misc_feature (167)..(167): n is a, c, g, or t
  misc_feature (179)..(179): n is a, c, g, or t
  misc_feature (212)..(212): n is a, c, g, or t
  misc_feature (224)..(224): n is a, c, g, or t
  misc_feature (689)..(689): n is a, c, g, or t
  misc_feature (719)..(719): n is a, c, g, or t
  misc_feature (734)..(734): n is a, c, g, or t
  misc_feature (1196)..(1196): n is a, c, g, or t
  misc_feature (1402)..(1402): n is a, c, g, or t
  misc_feature (1423)..(1423): n is a, c, g, or t
  misc_feature (1483)..(1483): n is a, c, g, or t
  misc_feature (1985)..(1985): n is a, c, g, or t
  misc_feature (1988)..(1988): n is a, c, g, or t
  misc_feature (2043)..(2043): n is a, c, g, or t
atacatagttatgttgngcgngtcagatggtgcgcgccgagttagggacgcagatgacagatcttaaagcctatatgaccgacctaggtagacgcgcgcgcgatgcntcagcttcaatcgctaaagcgactacgggtcaaaagaacgcggcgctactggcaatagcncagcatatcgangacgcgcgtgaggtgctcctcgaggcgaatgcnctagacatggcngcgggtcaagaaaaggggctcgatgctgcgctactcgatcgcttagaactgacgactgcacgcatcgatgcgatgctcgaggggcttcggcaagtggctgcgctcgacgatcccattggcggcattagcgagatgaaaccacggcctagcggtatccaggtagggcgtatgcgtgtgcccctcggcgtcatcgggatcatctatgagtcgcgcccgaatgtgacctgcgaagctgcgagtctttgcctcaaatcgggcaatgcgacgattctgcgcggtggctcggaggcgctgaattctaatcaagcgattgcacgctgcatcgcgttagggcttgctgaggcagagttgcctaccgatgccgtgcaagtactagatcgccctgatcgagatgcggtaggccatttgattactatgcccgagtttgtcgatgtcattgtcccacgcggtggtaaggggttaatngaacgtattagtcgcgattcccgcgtaccngtgatcaaacatctngacggcaattgccacctgtacatcgagtcagatgctgatttcgataaggcggtgcgcgtggcaatcaacgccaagacccagcgttatgggacctgctgcacgctggagtcattacttatcgacgacgcaattgcagaagcgcttttgccttcgctcgccgccgaatatgctaatcatggggtggagttaaggggatgtgccagagtactttctcttgttccgacggcgatcgcagcgaccgaagaagactggggagaggaatatcttgctcctattctatcggtcaaggttgtcagtggcctggatcaggcaatagctcacatcaaccattacagttcggggcacacggaatctatcattaccgagaatttcacaaaggcgcagcgttttttgcgtgaagtggattccagttcggtaatgattaacgcgtcgactcgattcgccgatggcttcgaatatggnctcggcgccgaaattggtatatcgactgataaacttcacgcgcgaggccctgtgggtttagaaggcctgacttcgcagaaatatatcgtgttaggggatgggcatatccgcacatgagtaagagagtcggtgtctacggtggaatgtttgacccagtgcactgcggtcatctcgccgtagccgagctcgcgctggaggcacttagnctcgatcacgtgcttttggtnccctgtaaactccctaatcaccggcatgcagcgagtgcgactggtgctcaacgccttganatgttgaccctcgcatgtgcggacagcgcccaactcgtcgcgagctctattgaactagagcgagagggtatttcttatagtatcgatacgctcgcgcagttaaagaacgacgatccgagcacggatttcgtcttcgtgcttggaagagacgcgttcgaggggctgcctctctgggatagatgggagcggcttttggatgaaaatttactcgcggtggtttcacgtccggggatatctgtatcacgcgaaagcgcagagctaacgcagctcgcttcgcgaatggtgagaagtccggaagcgcttttcgatggaggcaggggcaaaattattctgctggaggagttacagaatcatttgtcgtctacacgcgttcgcgcggcgctttctggggtaaacggtcgcactcaatcgacagatatgaggttggatgactggttaccggacacagtacgcgcctatatcgagactcatgatctctacagatagacgtagatttaacttnatntagctaacttaattaattgatttacaaggaataagtattgaaaaatttaaaggcncttaaaagcgaccagttagccgagctggcagtaactgcgcttagtgacatgaaggggcaggaaatacgcagcattagcgttaaagggctgacctcgattacggacttcatggttatcgctactggttcgtctagtacgcatgtgaaagcgcttgccgattcagtcgataaggcggcaaaagaggctgggcaaaccgttaaaagcattgagggcaaactagcggcagaatgggtgctagtcgaccttggcgatgttgttgtccatctaatggttgccccaatgcgcgcgctttataatttggaggagctctggagttttaagccaccaactgaggaaatcaccaccgagaccgcagtcgagcatgaaacttaagttaattagcattgggaccaaaatgccgcgctgggtgcaggaaggggttgatgaatacagtaaacgaatcgttggtgatttgggctttagtctcctagagctcccgatggccaagcgcaccaaggctcagagccccgaggtatgtcgcgagaaagagggcgaggcgattctagcttccgtgcaagacgccgattatgtagtaagcctcgaagtgttaggtaagccgcttgatacaccggcgctcgccgcgagactcgagcacttcaagagtcaaggtcgaaatatttgccttttggttggtggtcccgatggattgtctaaggcatgcgcagcacgtgcagatgagagctggtcgctttcggcgatgaccttacctcaccctctggtgcgcgtaataatggtcgaacaactctatcgcgcgaacagcctgagcaaagggcacccataccatcgagcgtgagtactaggaatagagcgttagcagcgagccaaataataggtaaagctttcgcgcacagacagtgtcgaacttacaaacggtgagaagcggagtgaagagtggaaggtaggtggcagctcaaagatcgggaggctgaacgaaggcttttcgcgagacgcatgctcgttgcgagcatcgtcgttgcgtttctgttcgctgcattgctggtcaaacttattaaccttcaagtcacccaatacgattattttgctgcgcgagcagatggcaatcggctccactcgcagtatgtgccccccgcacgagggctaatattcgatcgaagcggcgaactgcttgctgataaccagccgatttttaatctttcggttgtgagagaacgggtcgacgatatcgaggcgactttcgagctgttatcttcgcttattcgcctcgctccagaggatgttgagcaattcagagaaaggctcaagcgccgccgagttcctttctcctcagttccacttcgctatgtcctcaccgaagaggaaaaggcacgcgtgtcggttaatgcgcatcgtcttcctggtattagcattgagccccaatttgtgcgcagctatcctactggtgaactcaacgcgcacgcgattggctatgtatctgagatcaatcgtgaagagctcgacgcgtttgccgaggatgcgcgtgaaaattatggcgggacgaatcacataggtaagacaggaatcgagcgcacctacgaggctcttcttcacggcgaggttggctacgaggtagtcgagaagaacaatcgcggtcaggtcatgcgtcggcttgaacgcacggacccaattgccggtaagaatctgacgcttttcctagaaaatcgattgcagcgtgtcgctaccgaagccttaggtgagcatcggggcgcggttgtggcaattgatcctgcaaccggtggaatcctagcaatggtcagtaagccgggctttgatcctaatttgttcgtgacagggataagcaatgccgactactcgcagctcataaccgacactgtcaatacgccattattcgacaggaccgtgaatccctatcctccggcgtcgacggtaaagccttttatcggtcttggtggtttgcagc

SEQ ID NO: 1581 - DNA, 4000 bp, Escherichia coli
  misc_feature (177)..(177): n is a, c, g, or t
  misc_feature (180)..(180): n is a, c, g, or t
  misc_feature (183)..(183): n is a, c, g, or t
  misc_feature (1254)..(1254): n is a, c, g, or t
  misc_feature (1407)..(1407): n is a, c, g, or t
  misc_feature (1416)..(1416): n is a, c, g, or t
  misc_feature (1462)..(1462): n is a, c, g, or t
  misc_feature (1542)..(1542): n is a, c, g, or t
  misc_feature (1992)..(1992): n is a, c, g, or t
  misc_feature (1994)..(1994): n is a, c, g, or t
  misc_feature (3149)..(3149): n is a, c, g, or t
  misc_feature (3269)..(3269): n is a, c, g, or t
  misc_feature (3293)..(3293): n is a, c, g, or t
  misc_feature (3306)..(3306): n is a, c, g, or t
  misc_feature (3387)..(3387): n is a, c, g, or t
  misc_feature (3412)..(3412): n is a, c, g, or t
  misc_feature (3506)..(3506): n is a, c, g, or t
  misc_feature (3518)..(3518): n is a, c, g, or t
  misc_feature (3732)..(3732): n is a, c, g, or t
  misc_feature (3789)..(3789): n is a, c, g, or t
  misc_feature (3801)..(3801): n is a, c, g, or t
  misc_feature (3804)..(3804): n is a, c, g, or t
  misc_feature (3816)..(3816): n is a, c, g, or t
  misc_feature (3828)..(3828): n is a, c, g, or t
  misc_feature (3849)..(3849): n is a, c, g, or t
  misc_feature (3900)..(3900): n is a, c, g, or t
  misc_feature (3912)..(3912): n is a, c, g, or t
  misc_feature (3924)..(3924): n is a, c, g, or t
  misc_feature (3933)..(3933): n is a, c, g, or t
  misc_feature (3936)..(3936): n is a, c, g, or t
  misc_feature (3942)..(3942): n is a, c, g, or t
  misc_feature (3954)..(3954): n is a, c, g, or t
  misc_feature (3963)..(3963): n is a, c, g, or t
gaacaggtgaaaagtggacgagcagtaggggaattaaatcaccctgaaggtccaacaattaacctggataaagtttcacataagattacagatctcagatttgaaggaagtaatgttattggaaaagcatcaattcttaaaacccctatgggacaaatcgttgaaggtttgctcganggnggngttaagcttggtgtatcaagtcgtggtatgggtagtcttgtacagaagaatggtactagttacgtgggcaaggattttatgcttgcaactgtagatatagtccaggacccttccgctccagaggcatttgtcaatggaattatggaaggtgttgattggatatggaataacggtatcttaactgcacaagaaattgaatcaattgagactgaaataaagcgtactcctaagaagcatttagctgaagcagagatcaaagcgtttaaaaatttcctctctaaactttaattcttaataggagaatataaaatgtcattagaagacgcaattaaatccactgctgttgcagaggaagaggctgtgttagacatctctgaagatgctgagctagattctgaagaagagctcgttgaaaacgaagttggaaacgaggaagaagctttagatgaagtagtagccgaagcaaaggttgaagaagacgaagatgaagacaaaaaagacgaagaaaaagtcgaagagtctgcacctgtagtccctaaaactaaagctggtgttattaacgctgcattggagatgtttaaaaaggccaaaaaagaagacgcgcaaaagctatatgctaaattgacaaaagtagaagaatcagaagacgatggatcagttgataaaacaattgatgctgttgctaaagataagaaagcacctaaagctaagctagaggctgctgactattctgaagatttggatatcttagtagctgaagaagctacattgtcagatggattccgtgttaaagctggtgcaatttttgaagctgcttacgcaagtaaagtaggtgctgaaattgataggctagaaggcgaatacgcgcaaaatcttgaagaagaagtcgctgatattcagagctcactcgtagaaaaggtagattcataccttaactatgttgttgaaaactggatgaaagaaaatgaagtagcagtagagactggactaaggtctgaaatcgctgaagactttatgagtgcacttcaggtagtattcaaggaacattacattgaagttccagaaggtaangttgatctagtagatgagttatcatcacaggttgctgagctagaggaatcactcaataaaaccacagaagaaaatattcgtttatacgagtcaactcaatctttagaaagagctgaaatcgtaagaagacattcttcaggcttggctgaaacngaagctganaagttatcatcattggtagaagacattgaattcgataacgctgaanctttcgaaatgaaagtatcagttgttaaagagtcatacttcaagcaagatgttactgaatcagttgacgaagtaaatgcngcaattggaaatgaagaagctgacgaagttcagtctatctctaattcaatggctgcttacactcaagctataactaaatctattaaataaaacataaacctaaggggaaataaaaaatgtttaacgcagataaaaatctagtagagaaatggactcctgtccttgatcacgaagatgctccaagcatcggtgacaagcacaagagagctgttactgctagactcttggaaaaccaagaaatcgcactacaagaaaacagagctcattctgattttcaacttaatgaaacagcagctaacgctactggttctggtattagtaactttgatccagtattgatctctcttgtaagacgtgcaatgcctaaccttatcgcatacgatatcgcaggcgtacaaccaatgaacggacctactggtctaatcttcgcaatgaagtcaagatacaccncncaagatggtgctgaagctttacataacgaagctgatactgatttctcaggaactggtacacatcaagctgatcctactggattggtcggtgtagctgattctggagacgcaggtacttctatcgctgatgaagctgatactgtatctactttcggttctggtatcactacagctaatgcagaagctaaaggtacagctgtacccggttcagctatttcaagtgctaaccagtttggccaaatggctttctcaatcgaaaaggctcaagtactagctaactcaagagctcttaaagctgaatacactatggaacttgctcaagatcttaaagcaatccacggtctagatgctgaaggcgaattagctaatattctttcttctgaaatccttgcggaaatcaacagagagatggttagaactattcttactaaagctaaaatcggtgcacttcaagcaagtgttgcacttaaaggtgtatttaacgttaatactgattctgacggaagatggatggttgagagatttaaaggtctcatcatgcaactcgaaagagaagctaacgtaatcgctaaagaaacaagaagaggaaaaggtaattttgtactttgttcttctgatgttgcttcagcactagcagcagctggtcttttagactacactcctgctctttcaactgacctaaatgttgacgatactggtaatacttttgctggtgttcttaacggtagaatgaaagtatatatcgatccttatgctactagcgatttcgcttgtgtaggttacagaggttcaaatccatacgacgcaggtatcttctattgcccatacgttcctttaactatggttaaagcgattggcgagaatgacttccagccaagaattggattcaaaactagatatggaatgcagcagaacccattcgtgggaacagctacaggtgcgggtactaaccgtgtcaacccatatttcagaatctttagagtagacggaattatggtgtaaaccgtaattagttaattctaattctgatgaagaggggtcttaggatccctctttttttgtctgagttctatgctaaaagacttataaatagtattaggagattattatatggctacactaacttcaaataaaaactatttaagtcctgttggntttaaatttactattgacaatcaattgtaccctaatttagaatacttttgtactgcagtatctttaccatcaattagtattgctgaagcaccaatgcctttcagaggagctaatgtaggntttactggagacagaattacattngatgatttaactnttaagtttaatattactgaagatatggataactataaggaaacttttgattggattcataatatagttaatgttggagagnaatttaaatctgatgccattttaantatattaacctcacacaataacgtaagtaaaactattaggttctcagatgtttttcctattagtttaagtggtgttgaatttacaacaggtgcnactgaaattgantacttacaagcagacgtaacttttaaatatacctcgtttgaatttatataataactactatcatatatagtagtataggaaattaattatgttagatattgaaaaaatattagaaatgtggaagaaagactcaaacattgatgaaatgcaacttgacgaatcttctaaagactcagcaaaactccacgcaaaatacctcgaatttgtaacacanaatcgtttagatcttaagaaaagagaaatggaatttaaggtcttacttaaagataantggttacactanaanggaaaaatgtcnaaagaagatatngacgatagaggttgggattangatccattaaatggattaaaggtattaaaaggggatatggattattactangattcagatccngatattcaaaangctcaagcncgnattgantatcttaaaacnactgcaganacattaaaagaaattttagataatgttaagtggagac

SEQ ID NO: 1582 - DNA, 4000 bp, Escherichia coli
  misc_feature (86)..(86): n is a, c, g, or t
  misc_feature (416)..(416): n is a, c, g, or t
  misc_feature (419)..(419): n is a, c, g, or t
  misc_feature (458)..(458): n is a, c, g, or t
  misc_feature (692)..(692): n is a, c, g, or t
  misc_feature (770)..(770): n is a, c, g, or t
  misc_feature (788)..(788): n is a, c, g, or t
  misc_feature (947)..(947): n is a, c, g, or t
  misc_feature (1040)..(1040): n is a, c, g, or t
  misc_feature (1055)..(1055): n is a, c, g, or t
  misc_feature (1262)..(1262): n is a, c, g, or t
  misc_feature (1289)..(1289): n is a, c, g, or t
  misc_feature (1364)..(1364): n is a, c, g, or t
  misc_feature (1376)..(1376): n is a, c, g, or t
  misc_feature (1379)..(1379): n is a, c, g, or t
  misc_feature (1388)..(1388): n is a, c, g, or t
  misc_feature (1481)..(1481): n is a, c, g, or t
  misc_feature (1616)..(1616): n is a, c, g, or t
  misc_feature (1922)..(1922): n is a, c, g, or t
  misc_feature (1985)..(1985): n is a, c, g, or t
  misc_feature (2490)..(2490): n is a, c, g, or t
  misc_feature (2497)..(2497): n is a, c, g, or t
  misc_feature (2502)..(2502): n is a, c, g, or t
  misc_feature (2509)..(2509): n is a, c, g, or t
  misc_feature (2511)..(2511): n is a, c, g, or t
  misc_feature (2513)..(2513): n is a, c, g, or t
  misc_feature (2518)..(2518): n is a, c, g, or t
  misc_feature (2535)..(2535): n is a, c, g, or t
  misc_feature (2540)..(2540): n is a, c, g, or t
  misc_feature (2543)..(2545): n is a, c, g, or t
  misc_feature (2549)..(2550): n is a, c, g, or t
  misc_feature (2553)..(2576): n is a, c, g, or t
  misc_feature (2579)..(2586): n is a, c, g, or t
  misc_feature (2588)..(2588): n is a, c, g, or t
  misc_feature (2590)..(2602): n is a, c, g, or t
  misc_feature (2604)..(2606): n is a, c, g, or t
  misc_feature (2608)..(2620): n is a, c, g, or t
  misc_feature (2622)..(2637): n is a, c, g, or t
  misc_feature (2639)..(2647): n is a, c, g, or t
  misc_feature (2649)..(2652): n is a, c, g, or t
  misc_feature (2654)..(2657): n is a, c, g, or t
  misc_feature (2660)..(2661): n is a, c, g, or t
  misc_feature (2663)..(2664): n is a, c, g, or t
  misc_feature (2666)..(2672): n is a, c, g, or t
  misc_feature (2674)..(2682): n is a, c, g, or t
  misc_feature (2684)..(2685): n is a, c, g, or t
  misc_feature (2687)..(2690): n is a, c, g, or t
  misc_feature (2693)..(2694): n is a, c, g, or t
  misc_feature (2696)..(2696): n is a, c, g, or t
  misc_feature (2698)..(2701): n is a, c, g, or t
  misc_feature (2703)..(2725): n is a, c, g, or t
  misc_feature (2727)..(2761): n is a, c, g, or t
  misc_feature (2763)..(2767): n is a, c, g, or t
  misc_feature (2772)..(2799): n is a, c, g, or t
  misc_feature (2803)..(2887): n is a, c, g, or t
  misc_feature (2889)..(2897): n is a, c, g, or t
  misc_feature (2899)..(2903): n is a, c, g, or t
  misc_feature (2905)..(2912): n is a, c, g, or t
  misc_feature (2914)..(2933): n is a, c, g, or t
  misc_feature (2935)..(2943): n is a, c, g, or t
  misc_feature (2945)..(2950): n is a, c, g, or t
  misc_feature (2952)..(3036): n is a, c, g, or t
  misc_feature (3039)..(3129): n is a, c, g, or t
  misc_feature (3131)..(3167): n is a, c, g, or t
  misc_feature (3169)..(3176): n is a, c, g, or t
  misc_feature (3178)..(3210): n is a, c, g, or t
  misc_feature (3212)..(3223): n is a, c, g, or t
  misc_feature (3225)..(3240): n is a, c, g, or t
  misc_feature (3243)..(3258): n is a, c, g, or t
  misc_feature (3260)..(3264): n is a, c, g, or t
  misc_feature (3266)..(3267): n is a, c, g, or t
  misc_feature (3269)..(3295): n is a, c, g, or t
  misc_feature (3297)..(3314): n is a, c, g, or t
  misc_feature (3316)..(3468): n is a, c, g, or t
  misc_feature (3470)..(3512): n is a, c, g, or t
  misc_feature (3514)..(3524): n is a, c, g, or t
  misc_feature (3527)..(3537): n is a, c, g, or t
  misc_feature (3539)..(3560): n is a, c, g, or t
  misc_feature (3562)..(3572): n is a, c, g, or t
  misc_feature (3574)..(3618): n is a, c, g, or t
  misc_feature (3620)..(3628): n is a, c, g, or t
  misc_feature (3630)..(3641): n is a, c, g, or t
  misc_feature (3643)..(3797): n is a, c, g, or t
  misc_feature (3799)..(3830): n is a, c, g, or t
  misc_feature (3832)..(3974): n is a, c, g, or t
  misc_feature (3976)..(3981): n is a, c, g, or t
  misc_feature (3983)..(3984): n is a, c, g, or t
  misc_feature (3986)..(4000): n is a, c, g, or t
ggctctaaagagtaatcgtcatcgcaggaggaaagaaaatgggtaaaacaaaagggcgtttaaccctaccaagtgaatcgaatttncttgaacagactaaagaattgctcgaccgttggggtgcagatgcaattcgtgatagcgatggaacgaaactcgatgaagcaaccaaacaattagatgcaaaaatctatacaacctactttgtagcacgtaaccataatgatttcatcaaagatcatatggaagagtgccaacaaatcttcgtcatgtcaaaattctggttagcaacagaagatacgctaacgattccatttatggaaggctacttcgaagaccaagtgcaaccagactatgtacatgatccaaaaagatattgggaagtcatcgaccgtactactggagaagtggttccngtngagagatggactgtccatgaagaaaacaacacgattacnattgaaggcactcgtcctttccatgagtatacagtgtcgtttctagtgtatgcgatttgggatccaactcaaatgtacaatcatattacgaataactggggcgatgttcctcacgatattccatttgatgtacgtggacctcattcaaatcaattcatgcactcttatttaaaacaatggttaaaagacaatccggatactgatgtggttcgttttacaacgttcttctatcanttcacattaattttcaacaacttaggaaaagaaaaatttgtggactggttcggatatggtgccagcgtttcagtcgcngcacttgaagcttttgcnaaggaaaaaggctatcgcttaagagcagaagacatcgtggatgaagggtactataactcaacattccgcacaccaagtaaagcgtacttagactatatcgacttcattcaagcattcgttgctagagaagctaaaaaattagtcgacgaagtacacgangctggtaaagaagccatgatgttcttaggagataactggattggtacagaaccatacggaccatacttcgaacaaatcggattagatgcagtngtgggttctgtcggnggcggagcaacacttcgtatgatttcagatattccacacgtaaaatatacagaaggaagattcttaccatacttcttcccagatgtattccgtgaaggaaatgatcctacgattgaagctaataaaaactggttatcagcaagacgtgccatcatgcgtaaccctgtagaccgtatcggatacggcggttatttaagtcttgcatanaaattccctaaatttgtcgactacatngaacatgtaacagatgaatttagagaaatctacgatatcgtaaaacatacaaaaccatatactggtttgaaagtngccatcttaaangcntggggacgnttaagaacttggcaagcacacatggttgcccatgaacttccatacaaacaaatctattcttaccttggaattatggaagccttaagtggtgcnagtgtggacgtaagctttatcagctttgacgatatcattaacgatggagttccagaaggtgtcgatgtcatcatcaacgcgggggatgccggtacttcatttagcggtggagaggtttggaagaatgaaacgctnattacacgtattcgtgaattcgtgtataacggcggcggatttgtcggagttggggaaccaacagccgttcatcatcaaggaagattcttccaacttggagatattttgggtgttgaaagagaaatgggatatagcctttcaacagataaatactttacaaaagaattgaaagaacactttattatcgaagatattgaagatgttcataagattgactttggggaaaatattaaaaacgtgtatggcttaacgagtgcaacagaagtacttgaatttagcaatccgaaagtaagcgcaggtggcgtngaagaaggaatcgttcttccagccaatgccgaaggaaaagaattcggggaaatccatcttgcngccaacccttacggaaaaggtcgtggggtttacattgcaggacttccatacacaccagaaaatacaagattattaatgcgtgcgttattctacgcagcgaataaagaaagtgaattaacaaaatggtatgcaagcaatccattagtggaagtacatgcttatcctgaaaaaggagtgtatgcaatcgtgaataatacgaacgaattgcaatcaacactcgtttatgatggagcaggtgtatcaagaactgtggaacttgagccaagcgaaattagatgggagaagatatcatgaatcctaaagtgaaaatttggatccgcgtcgtattgatgttggtattcttatatgtagttattttggggcatcagatgattggcaaagaaggcgttgcaacaatgcttgttggcttagctggattacttctcttgctatgggattacaatcgtccgtactctaaatcgatgaagcgttaataaaacttaactaggaacaggggcttgtttancaacaanccccngttcctntntncatanacacaatatttaaaaanaaaanaannnaaannaannnnnnnnnnnnnnnnnnnnnnnntgnnnnnnnntntnnnnnnnnnnnnnannngnnnnnnnnnnnnncnnnnnnnnnnnnnnnntnnnnnnnnnannnngnnnnaannannannnnnnnannnnnnnnnanntnnnnttnntncnnnntnnnnnnnnnnnnnnnnnnnnnnncnnnnnnnnnnnnnnnnnnnnnnnnnnnnnnnnnnntnnnnnttttnnnnnnnnnnnnnnnnnnnnnnnnnnnngggnnnnnnnnnnnnnnnnnnnnnnnnnnnnnnnnnnnnnnnnnnnnnnnnnnnnnnnnnnnnnnnnnnnnnnnnnnnnnnnnnnnnnannnnnnnnnannnnntnnnnnnnntnnnnnnnnnnnnnnnnnnnnannnnnnnnnannnnnnannnnnnnnnnnnnnnnnnnnnnnnnnnnnnnnnnnnnnnnnnnnnnnnnnnnnnnnnnnnnnnnnnnnnnnnnnnnnnnnnnnnnaannnnnnnnnnnnnnnnnnnnnnnnnnnnnnnnnnnnnnnnnnnnnnnnnnnnnnnnnnnnnnnnnnnnnnnnnnnnnnnnnnnnnnnnnnnannnnnnnnnnnnnnnnnnnnnnnnnnnnnnnnnnnnnannnnnnnnannnnnnnnnnnnnnnnnnnnnnnnnnnnnnnnntnnnnnnnnnnnnannnnnnnnnnnnnnnnaannnnnnnnnnnnnnnntnnnnntnntnnnnnnnnnnnnnnnnnnnnnnnnnnngnnnnnnnnnnnnnnnnnngnnnnnnnnnnnnnnnnnnnnnnnnnnnnnnnnnnnnnnnnnnnnnnnnnnnnnnnnnnnnnnnnnnnnnnnnnnnnnnnnnnnnnnnnnnnnnnnnnnnnnnnnnnnnnnnnnnnnnnnnnnnnnnnnnnnnnnnnnnnnnnnnnnnnnnnnnannnnnnnnnnnnnnnnnnnnnnnnnnnnnnnnnnnnnnnnnnnannnnnnnnnnnaannnnnnnnnnnannnnnnnnnnnnnnnnnnnnnnannnnnnnnnnnannnnnnnnnnnnnnnnnnnnnnnnnnnnnnnnnnnnnnnnnnnnnannnnnnnnnannnnnnnnnnnnannnnnnnnnnnnnnnnnnnnnnnnnnnnnnnnnnnnnnnnnnnnnnnnnnnnnnnnnnnnnnnnnnnnnnnnnnnnnnnnnnnnnnnnnnnnnnnnnnnnnnnnnnnnnnnnnnnnnnnnnnnnnnnnnnnnnnnnnnnnnnnnnnnnnnnnnnnannnnnnnnnnnnnnnnnnnnnnnnnnnnnnnnannnnnnnnnnnnnnnnnnnnnnnnnnnnnnnnnnnnnnnnnnnnnnnnnnnnnnnnnnnnnnnnnnnnnnnnnnnnnnnnnnnnnnnnnnnnnnnnnnnnnnnnnnnnnnnnnnnnnnnnnnnnnnnnnnnnnnnnnnnnnnnannnnnnannannnnnnnnnnnnnnn

SEQ ID NO: 1583 - DNA, 4000 bp, Escherichia coli
  misc_feature (9)..(10): n is a, c, g, or t
  misc_feature (15)..(16): n is a, c, g, or t
  misc_feature (18)..(18): n is a, c, g, or t
  misc_feature (22)..(22): n is a, c, g, or t
  misc_feature (24)..(27): n is a, c, g, or t
  misc_feature (31)..(31): n is a, c, g, or t
  misc_feature (34)..(36): n is a, c, g, or t
  misc_feature (39)..(40): n is a, c, g, or t
  misc_feature (43)..(48): n is a, c, g, or t
  misc_feature (51)..(51): n is a, c, g, or t
  misc_feature (59)..(60): n is a, c, g, or t
  misc_feature (64)..(64): n is a, c, g, or t
  misc_feature (66)..(67): n is a, c, g, or t
  misc_feature (72)..(76): n is a, c, g, or t
  misc_feature (78)..(82): n is a, c, g, or t
  misc_feature (87)..(88): n is a, c, g, or t
  misc_feature (103)..(103): n is a, c, g, or t
  misc_feature (135)..(135): n is a, c, g, or t
  misc_feature (140)..(140): n is a, c, g, or t
  misc_feature (143)..(145): n is a, c, g, or t
  misc_feature (147)..(147): n is a, c, g, or t
  misc_feature (161)..(161): n is a, c, g, or t
  misc_feature (166)..(168): n is a, c, g, or t
  misc_feature (172)..(175): n is a, c, g, or t
  misc_feature (180)..(181): n is a, c, g, or t
  misc_feature (187)..(187): n is a, c, g, or t
  misc_feature (190)..(190): n is a, c, g, or t
  misc_feature (196)..(199): n is a, c, g, or t
  misc_feature (201)..(204): n is a, c, g, or t
  misc_feature (208)..(208): n is a, c, g, or t
  misc_feature (210)..(211): n is a, c, g, or t
  misc_feature (213)..(214): n is a, c, g, or t
  misc_feature (216)..(220): n is a, c, g, or t
  misc_feature (224)..(225): n is a, c, g, or t
  misc_feature (228)..(228): n is a, c, g, or t
  misc_feature (232)..(233): n is a, c, g, or t
  misc_feature (235)..(235): n is a, c, g, or t
  misc_feature (662)..(662): n is a, c, g, or t
  misc_feature (1170)..(1172): n is a, c, g, or t
  misc_feature (1711)..(1711): n is a, c, g, or t
  misc_feature (1888)..(1888): n is a, c, g, or t
  misc_feature (1987)..(1987): n is a, c, g, or t
  misc_feature (1991)..(1991): n is a, c, g, or t
  misc_feature (2245)..(2245): n is a, c, g, or t
  misc_feature (2699)..(2699): n is a, c, g, or t
  misc_feature (3319)..(3319): n is a, c, g, or t
  misc_feature (3484)..(3484): n is a, c, g, or t
gcgcgccgnngcggnncncccncnnnnggancgnnnccnngcnnnnnntgncgccccgnncggncnncaggnnnnngnnnnnggccnngctcatgtccaccgncagcaccgccgccgccatctccaccgccgccncccgnccnnngntcgtgggcgatccntcccnnngggnnnngatcnncggcgncgngccccnnnngnnnnacgncnncnncnnnnncacnncgncgcnngncggcgcgtggctgtcgcccgcggcgcaggcgcggatccgccaccgccccatcaccatgcgcggcgtcttcaccttcgatctcgaacgaaccacggacccaggcgcgaaagcgaaagcggcggccgcatgagcggggatcacccacaacaaggatatcgctgcgttacgcagcgatcgaagaaatacttaactctcgtcaatgccttaccgcgcgatccgtggcgcaggctactgcatcctggcaacgccagccccaacatgggacggcccgacggcctcaaaagaggcggcgccaagctgacccagcgcgcgcgccagctccagcttcagaatctccatcgcgcgccgcgcgcctgcggcgccgcccgcgccgacgccgaacgccagcgcccgcccggtgaaggcgaagtcggcgcccagcgccctngcgcgcaggatgtcggcgccgcgccgcacgccgctgtcgaggatgatcttcatccggtcgccaaccgccccgccgaccgcctttgcgacgcccggcagcgcctcgatggtcggcggcccgaacgcgacctggcggccgccgtggttcgagacgacaatcccgtcgcagccgatctcggcgcagcgcagcgcgtcgtcggggtgcagcacgcccttcaccagcagcgttccccgccagcggtcgcgcaggcgcgcaaggtcgcgccaggtgaaggcgggcgtgatcagcgtcttctggacgtcggcgtaggacgtggcggcttgcagcaggtcggcatagttcgcgatgccgggcttgccatggcgcagcgtctccagcgaccagcgcgggtgggcgagcagtcccagcgcgacctccggcgtgatccggaacggcacgctcaactggttgcggatgtcgcggtcgcgcttgcctgcggcgggcacgtcggcggtcaccatcatcaccnnntagtccgccgcctcggcgcgcgcgaccaggctttcggtcaccgccgcgtcgccggagacgtagagctggaaccagcccctgccgtcggcggcctccgccagacgctccagcgtcgtcgaggcggcggagctggcgacataggggatgttctcggcggcgcacagccgcgcgaggatcaggtcggcgccgggccagaacgcgttcagcatcccgatgggcgccatgccgaacggcaggtcgaaggtctggccgaacagcgtcgcgcgcgtgtcgatcgcggagacatcgaccatgtagcgcggcgtgagctgcacctcctcgaacgcttcgacgttgcgccgcagattgcgctcggattccgcgccgccatcgaccagatcgaaggcgaagcgcgggatccggcgccgggcgcgccgccgcaggtcttcaatcgacgccgcgcgctcaaggcccatcagatcgaccatccgccgtcgatggcgaaggcctgaccggtggtgaagccggacagatcgcccgcgagatagcacaccatctcngcgatctcctcgggcgtgccgaaccggcccatcggctggcgcgcggtgaaggcggcgtgcgccttgtcgtaatcgcccgtggcggtgagacgctgtttcagcgaggggctttccaccgtgcccggacagatcgcgttgcagcgcacgccctggcccacgaagtcggcggcgatgganttggtcatgccgatgatcgcggccttggaggcgccataggcgaagcggcgcggcgcgcccttgaggctggagaccaccgaggcgatggtgatgatcgancccnggccctgcgccagcatccccggcagcaccgctttcgtcagccggaagatcgccttggcgttgaggtcgaaggaccggtcccatgtcgcctcgtcacagtcgaggatggtgccgtcatgcacatagcccgcgcagttcacgaggatgtccagcggcggcagggaggcgaccagcgcttgcaccgcgcctgcgtcgagcacgtcgagccggtgcgcggtgatgcgctccgccccggcggcgaggtcctgcactgcngcgccgtcgatgtcggtggcgatcacggcggcgcccagtcgggccagcgcctcggccgaggcgcggccgatgccctgaccggcggcggtcacgagggcggtttttccttgaagggtctgggtcatgggtcctctctcagcgcgccagccagccgccgtccaccgtcaccacgcttccgtggcaataggcggcggcgtcggatgacaggaaaacggcggccccggcgatctcggacggctcggcgaagcgccccgccgggatgcgcgccagcagcgcgcgcgaccgctccggatcgtcgcgcagggcctgggtgttgtcggtggcggtgtagccgggcgcgatggcgttgacgttgacgccatgcgccgcccactcgttgcacagcgcccgcgtcaggccgatcacggcgtgcttgctggcggcgtaggcgggcacgcgcagcccgccctgcgtncccagcacggaagacacgatcacgatcttgcccgcgccttgcgccaccatgcgccgtccggcggcctggctcagcagccagaccgagtcgaggttcaccgacaggacgcgccgccagtcggcgaaagccatgtccgccgagtcgccgcgatggatgatcccggcgttgttcaccaggatgtcgagaccgcccagcgcatcggcggcgaagccgatgacgtctccggcggcggcttcgtccatgtcggcgaagtcggcccgcacggcggcggccttgcggcccaggctctcgatccggaccatcgtcgcgtcgggctggtggctgcggaaggtcagcgcgacatcggcgccggcggcggcgagggcgagggccacgccctcgccgatgccggtggcgccgccagtcacaagggccttgcggccggtcaggtcaaacggactggccatcgtcagtagcggttcgcgatcggcagttcctcggcgggaaacagcgagatcacctcgcagccggtcggggtcaccaccacctcctcctcgatccgggcggcggagtagccgtcggcggcggggcaataggtctccagcgcgaacaccatgccggtctggatctccatcgggtgntcgaggctgacggcgcgcgagatgatcgggcgttcgtgcagcgcaaggcccaggccatggccgaactgcaggccaaaggcggcgtcctcgctgggaaaaccgaattcctcggccttcggccagaccttcgcgacggtgtcggtggtcacccccggcttgatcagngcgatggaggcgtcgatccactcgcgggccttcacataggcgtcattctgcacaggcgtggcgcggccgatgttgaaggtgcggtagtagcaggtgcgatagccctgatagctttgcaggatgtcgaagaacgcctggtcgccggggcgaaagtaacggtcggtgaagttgtgcggatgcgggttgcagcgctcgccggaaatggcgttgatcgcctccacatcgtcgctgcccatctcgtagagcagcttgttggacagcgcgacgatgtcgttctcgcgcacgcccggtttcagttcttcatagatcatgtgatagacgccatcgaccatggctgcggcctgggtcagaagctggatttcgtcccagttcttgatctcgcgcgccgccagcatgatctgctggccatcgatcaccttgatcccctcctcctgaagcgcgtggaacatggcggtctcggcgtagtccacgcccaccggcatgtcggccatgcctgcgtcgcggatcaggcccgcg

SEQ ID NO: 1584 - DNA, 4000 bp, Escherichia coli
  misc_feature (2192)..(2192): n is a, c, g, or t
  misc_feature (3512)..(3512): n is a, c, g, or t
  misc_feature (3737)..(3737): n is a, c, g, or t
gcaactagctcgggcatggaggtcatttccaccctcctcgccattactgcaccaataatcgcaccaccaagcatcaagggaaccagcagttcgaagttggaaaccttaccacttaaaaaggtagccagtacggcaatcgtcattccgacaatgccgtagagatttccccttcgggcagtctcctgtttagaaagacctccaaggctgagaatgaaaaagatagcagacactaggtaagccatggtaaccaagccatcgctcagaggataaaaagatgatatatttcctgagttcattacttacggaacattttcagcatgcgctgagttacgagaaatcctccggccacattgatggtggccacaaagattgccaccccagcaagccagggattagccccagaaacaaagagcataccaccgatcaggatgattccactaatcgcgttggttacactcatcaatggggtatgcaaagatggtgtcacattccagaccaccatgtaacccacaaaacaggcgagaacaaagacggtaatctgatcgagaaattcactcgatccattccagcccagggcaagcagagcaaacgagagcaaacccagcaaaaacccaccggaaagtagtgggtttttagtttttttctctttcccaagttcttccggcttagcctctggctttttggttggggcgaccgatgtttccaccggtggtgggggccagcttaatttaccctgatcaagaaccatagctccacgaaccacctcatcttcctgattgatcttaaaatcatctgcctgcccaagcaactggacaaacttgaccaggttgttcccgtagagccggcttgactgggtgggcagacgggagggaaagtcggtgtatccgattatggtgaccccgtgtgcgaccttggcctggccgctttcggtaagctcgcaattccctcccccctcggcagccaggtccacgatcaccgaacccggcttcatactccggaccatctcctcggtgataagcacgggtgatttcttgccgggaatcatcgccgtggtgataatgacatctacctccgcggcctgctcggcaaaaagtttcatttctgcctcgataaattctttactcattaacttggcatacccaccggaaccagcaccatcttcctcgaaatcaagttcaagaaaggcagctccaagacttttcacttcttccttaactgcaggcctggtatcaaaggcacgcacgatcgcccccatgttacgagcggcaccgatggcagcaagaccagccaccccggctccgatgatcaaaaccttggcgggaggcactttcccagcggcagtgatctgcccagtgaagaagcgaccaaacacatgcgaggcttccactaccgctcgatatccagcgacattggccatcgaactaagggcgtccatcgactgagcacgggaaatgcgcggcacgcagtccatcgccagcagattgatttttcgatccgccagtttttggatcagttcctcatttctcgcagggtagacaaaactgataagggtggctccttcacggattcctcccgcttcgtccattgaggggggagtgacttttaaaataaggtcgcacttccatacctcggcggcatccgcagcgatgcgggctccggcctcctcataggcagaatcggctaggttagccgctttgcccgctcccctttcaatcaatacctcgtatccgagcttggcaaaggctgcgacattttccggagcaatggccactcgcttttccgaagggtaggtttcctttggtatagcaattatcataatagtaagatgaattctgtcccaatctaaggatcgttggcaaaggtaaagtggatatcctcagaaagtatctttcacgaaatttttaaaatttgtaggcaattgggttttggatcgacgggaactcaaaggagaatggtttcggctcgtcaaatgatgaattcatgatatggtaaactttaatttagccaatctttgaaacaaaggctcacaagtggatggaattcataagaaaagtgggcaaaggttcaaacttggccattaagagccaataacaataccccaattttatcttatgactgaagaagaactcccccaaggggagcatgattcggaaggtcctcgttttgaggacttcgatcttgccccagcaatncaaaaagcggtagcccgcgttggctacgaaactccctctcctattcaaaggcggtctattcctcccttgctggagggatgtgatctcttaggagttgcccaaaccggaactggtaaaaccgcagccttttctctcccgctcctgtccaggctcgatccagatctgaaagtcgttcagatgttgtgcctcgcaccgacccgagaacttgcgattcaggttgctgaagctatggaaacatttgctgaagatattcccggtctacgtattctggcggtctatggaggtactggttacacggaacaaattcgtgaactcaagcggggtgctcaaattgtggtaggcacgcctgggcgcgtcatggatcatgttaagaaaaagtacatgaaactcgaccaggttaaggccatggttttggacgaggctgatgaaatgctcagcatgggattcatcgaagatatcgagtggattttggaacaaactcccagtgaccgtcagaccgctcttttttccgcaactatgcccaagcctattcggaagttggccgacaagcacctcaatgaacccgttgaaatcacgattgaggtaaagcgggaaaatgctcccaacatccgccaacgattccttaaagtacgcccgcatgagaaaatcgacatgctcagtcgcattcttgaaatagaaaccttcggtgcgatgcttatctttgcccgcactaaaaatgcgactacagatattgccgagacccttatggccaaagggtatccagcagaagcacttaatggtgatatgcctcaaaaattaagggaaaaaacggtggatcgccttcgtaagggacatgttaaggttgtggtcgccaccgatgttgcggcccgtggcctggatgtggatgtcatcacccatgtggtcaattatgatgctcccttcgatctagaatcctatactcaccgaatcggtcgcacgggtcgtgcaggccgtgagggagacgccatcctttttgtcaccaataaggaaatgaggatgctcaatgccattgaaagaacattaaaatccaaatgcgacgagtacaaattccccaccttggaggagatgaatgagcgtaaactgggggagtttttcacccgaatggaagaagctctaacctccaatgatcttacagattacaggcaagctattcaaaaatttcttgaagaaagtggtaaggattccatcgatgtagctgctgccctagcctacctggatgctggtaaaaaacccttattttacgatgaaatgcccaccgcacccaaaggtcccaaaagagagaggcgcgagcgtggcggagancgggatgatcgctatgtaaataacaacgatttgcaaagctaccgcgttgaggttggtgaatatcatggtgccgaaaagcgagatctggttggtgcgattgccaatgaaatcggcatggattcaaaattcatcggcaagatccgaatgttcaaagatcactcatttatcgaccttcctaaagatatgcccaaagaggtccatgaggcccttaagcaagtttgggtncagggacaccagctcaatatctcagttgatcgtggaagaccacgacaagaaggcagaggaggaaagttcagaggcaagggaggtggcggcttccgcaagggtggaggattccgcaaaggggatggccgttccaaatctggaggtggcttcaaaggtggtggaaaattccacaaagaaagataggaagggtcacagcccctttcactttcgattatttcctcaaagaaaaaacttcctgtaaaagctacttggatgtagcccaa

SEQ ID NO: 1585 - DNA, 4000 bp, Escherichia coli
  misc_feature (319)..(320): n is a, c, g, or t
  misc_feature (322)..(323): n is a, c, g, or t
  misc_feature (326)..(326): n is a, c, g, or t
  misc_feature (328)..(328): n is a, c, g, or t
  misc_feature (330)..(332): n is a, c, g, or t
  misc_feature (334)..(336): n is a, c, g, or t
  misc_feature (338)..(338): n is a, c, g, or t
  misc_feature (340)..(340): n is a, c, g, or t
  misc_feature (343)..(343): n is a, c, g, or t
  misc_feature (345)..(345): n is a, c, g, or t
  misc_feature (348)..(348): n is a, c, g, or t
  misc_feature (351)..(351): n is a, c, g, or t
  misc_feature (358)..(359): n is a, c, g, or t
  misc_feature (361)..(361): n is a, c, g, or t
  misc_feature (365)..(365): n is a, c, g, or t
  misc_feature (367)..(367): n is a, c, g, or t
  misc_feature (369)..(369): n is a, c, g, or t
  misc_feature (376)..(380): n is a, c, g, or t
  misc_feature (384)..(384): n is a, c, g, or t
  misc_feature (388)..(389): n is a, c, g, or t
  misc_feature (397)..(399): n is a, c, g, or t
  misc_feature (401)..(401): n is a, c, g, or t
  misc_feature (403)..(403): n is a, c, g, or t
  misc_feature (406)..(406): n is a, c, g, or t
  misc_feature (409)..(409): n is a, c, g, or t
  misc_feature (414)..(414): n is a, c, g, or t
  misc_feature (416)..(418): n is a, c, g, or t
  misc_feature (421)..(422): n is a, c, g, or t
  misc_feature (427)..(428): n is a, c, g, or t
  misc_feature (431)..(431): n is a, c, g, or t
  misc_feature (434)..(436): n is a, c, g, or t
  misc_feature (439)..(439): n is a, c, g, or t
  misc_feature (447)..(450): n is a, c, g, or t
  misc_feature (452)..(452): n is a, c, g, or t
  misc_feature (454)..(454): n is a, c, g, or t
  misc_feature (460)..(460): n is a, c, g, or t
  misc_feature (462)..(463): n is a, c, g, or t
  misc_feature (471)..(471): n is a, c, g, or t
  misc_feature (475)..(476): n is a, c, g, or t
  misc_feature (484)..(484): n is a, c, g, or t
  misc_feature (488)..(488): n is a, c, g, or t
  misc_feature (490)..(490): n is a, c, g, or t
  misc_feature (495)..(495): n is a, c, g, or t
  misc_feature (497)..(497): n is a, c, g, or t
  misc_feature (508)..(509): n is a, c, g, or t
  misc_feature (511)..(511): n is a, c, g, or t
  misc_feature (513)..(513): n is a, c, g, or t
  misc_feature (516)..(516): n is a, c, g, or t
  misc_feature (518)..(518): n is a, c, g, or t
  misc_feature (520)..(521): n is a, c, g, or t
  misc_feature (523)..(524): n is a, c, g, or t
  misc_feature (526)..(526): n is a, c, g, or t
  misc_feature (528)..(528): n is a, c, g, or t
  misc_feature (531)..(531): n is a, c, g, or t
  misc_feature (534)..(534): n is a, c, g, or t
  misc_feature (536)..(540): n is a, c, g, or t
  misc_feature (542)..(543): n is a, c, g, or t
  misc_feature (545)..(547): n is a, c, g, or t
  misc_feature (553)..(553): n is a, c, g, or t
  misc_feature (557)..(557): n is a, c, g, or t
  misc_feature (560)..(561): n is a, c, g, or t
  misc_feature (566)..(567): n is a, c, g, or t
  misc_feature (569)..(570): n is a, c, g, or t
  misc_feature (574)..(575): n is a, c, g, or t
  misc_feature (578)..(578): n is a, c, g, or t
  misc_feature (583)..(583): n is a, c, g, or t
  misc_feature (586)..(589): n is a, c, g, or t
  misc_feature (592)..(592): n is a, c, g, or t
  misc_feature (595)..(596): n is a, c, g, or t
  misc_feature (598)..(598): n is a, c, g, or t
  misc_feature (600)..(601): n is a, c, g, or t
  misc_feature (604)..(604): n is a, c, g, or t
  misc_feature (606)..(611): n is a, c, g, or t
  misc_feature (617)..(617): n is a, c, g, or t
  misc_feature (620)..(620): n is a, c, g, or t
  misc_feature (626)..(626): n is a, c, g, or t
  misc_feature (628)..(628): n is a, c, g, or t
  misc_feature (630)..(630): n is a, c, g, or t
  misc_feature (632)..(632): n is a, c, g, or t
  misc_feature (634)..(635): n is a, c, g, or t
  misc_feature (637)..(637): n is a, c, g, or t
  misc_feature (639)..(639): n is a, c, g, or t
  misc_feature (642)..(642): n is a, c, g, or t
  misc_feature (647)..(648): n is a, c, g, or t
  misc_feature (650)..(650): n is a, c, g, or t
  misc_feature (657)..(657): n is a, c, g, or t
  misc_feature (664)..(664): n is a, c, g, or t
  misc_feature (666)..(666): n is a, c, g, or t
  misc_feature (669)..(669): n is a, c, g, or t
  misc_feature (673)..(673): n is a, c, g, or t
  misc_feature (679)..(681): n is a, c, g, or t
  misc_feature (684)..(685): n is a, c, g, or t
  misc_feature (689)..(697): n is a, c, g, or t
  misc_feature (700)..(701): n is a, c, g, or t
  misc_feature (703)..(703): n is a, c, g, or t
  misc_feature (705)..(705): n is a, c, g, or t
  misc_feature (709)..(709): n is a, c, g, or t
  misc_feature (715)..(718): n is a, c, g, or t
  misc_feature (722)..(722): n is a, c, g, or t
  misc_feature (724)..(724): n is a, c, g, or t
  misc_feature (727)..(728): n is a, c, g, or t
  misc_feature (730)..(731): n is a, c, g, or t
  misc_feature (733)..(733): n is a, c, g, or t
  misc_feature (735)..(736): n is a, c, g, or t
  misc_feature (738)..(738): n is a, c, g, or t
  misc_feature (741)..(741): n is a, c, g, or t
  misc_feature (743)..(744): n is a, c, g, or t
  misc_feature (748)..(749): n is a, c, g, or t
  misc_feature (752)..(752): n is a, c, g, or t
  misc_feature (754)..(754): n is a, c, g, or t
  misc_feature (757)..(757): n is a, c, g, or t
  misc_feature (759)..(759): n is a, c, g, or t
  misc_feature (762)..(762): n is a, c, g, or t
  misc_feature (765)..(765): n is a, c, g, or t
  misc_feature (770)..(771): n is a, c, g, or t
  misc_feature (773)..(773): n is a, c, g, or t
  misc_feature (778)..(778): n is a, c, g, or t
  misc_feature (780)..(780): n is a, c, g, or t
  misc_feature (783)..(784): n is a, c, g, or t
  misc_feature (786)..(786): n is a, c, g, or t
  misc_feature (788)..(788): n is a, c, g, or t
  misc_feature (793)..(793): n is a, c, g, or t
  misc_feature (797)..(798): n is a, c, g, or t
  misc_feature (800)..(800): n is a, c, g, or t
  misc_feature (802)..(803): n is a, c, g, or t
  misc_feature (805)..(805): n is a, c, g, or t
  misc_feature (811)..(811): n is a, c, g, or t
  misc_feature (813)..(813): n is a, c, g, or t
  misc_feature (815)..(816): n is a, c, g, or t
  misc_feature (820)..(820): n is a, c, g, or t
  misc_feature (822)..(822): n is a, c, g, or t
  misc_feature (824)..(825): n is a, c, g, or t
  misc_feature (829)..(829): n is a, c, g, or t
  misc_feature (833)..(833): n is a, c, g, or t
  misc_feature (845)..(846): n is a, c, g, or t
  misc_feature (856)..(856): n is a, c, g, or t
  misc_feature (858)..(858): n is a, c, g, or t
  misc_feature (860)..(861): n is a, c, g, or t
  misc_feature (875)..(875): n is a, c, g, or t
  misc_feature (880)..(881): n is a, c, g, or t
  misc_feature (883)..(884): n is a, c, g, or t
  misc_feature (886)..(886): n is a, c, g, or t
  misc_feature (888)..(888): n is a, c, g, or t
  misc_feature (891)..(892): n is a, c, g, or t
  misc_feature (901)..(901): n is a, c, g, or t
  misc_feature (903)..(905): n is a, c, g, or t
  misc_feature (907)..(907): n is a, c, g, or t
  misc_feature (911)..(912): n is a, c, g, or t
  misc_feature (917)..(918): n is a, c, g, or t
  misc_feature (921)..(921): n is a, c, g, or t
  misc_feature (923)..(924): n is a, c, g, or t
  misc_feature (926)..(926): n is a, c, g, or t
  misc_feature (930)..(930): n is a, c, g, or t
  misc_feature (932)..(934): n is a, c, g, or t
  misc_feature (956)..(956): n is a, c, g, or t
  misc_feature (958)..(959): n is a, c, g, or t
  misc_feature (968)..(968): n is a, c, g, or t
  misc_feature (1977)..(1977): n is a, c, g, or t
  misc_feature (2343)..(2343): n is a, c, g, or t
  misc_feature (3541)..(3541): n is a, c, g, or t
  misc_feature (3544)..(3544): n is a, c, g, or t
  misc_feature (3571)..(3571): n is a, c, g, or t
  misc_feature (3625)..(3625): n is a, c, g, or t
  misc_feature (3628)..(3628): n is a, c, g, or t
aattccctaggattgattgacttggaaagagctgcgaagatatctggagccagattttatttcctgaaaaatgagcttgttctgatgaatcaagctttgacaaactatgctctggactttcttgttgaaaacgggtatcaattgattcagcctccgtatatgctgaagaacgatgcaattaaaggctccatcatcatggatgattttgaagacgtaatctacaaaattgaaaatgaagacctgtacatgattgggacatcagaacacgcaatggcttcaatgcatatggatgagatattggattcaaaaaaccttcctnntnnatncngnnntnnnantncangnttnagnaaggaannangagntnanggaaaannnnngaangggnnttttagannncntnaanttnaaaangnnnaannatttnnggnaannnacnctccaaannnntncnctgaanannaaagaatnttgnntataacanaaangntttancnaaatttggatnnancnttnangnntnnantnttnaanannnnngnnannnggaaantatnctnnaaaanntnngatnncgnggcanggnnnnccnggnnanannagnannnnnnaattgnttnttgttntnantntnncnanttncaagnnanaagattnaggatangncanagangaaaannnaannaagnnnnnnnnnttnngnanacantaaacnnnncccntntcnncnntnanngnacnanngtannaantnttnanaantancaaannantaatnanaanntnanagttncaanngnanngngaaaananannggtngnannaaanaaanaaaagtaaaatnnattatttttnantnnttattaattattantaaanntnncntnatnnaagttccancnnnanaggnnaaaanntcnanncncatntnnnaattaaatttttaaatttaatntnnaattgtttnttgtttgttaaaaaaaatcttaccacttttttatcaaatcagtttatagcaatgcaaaagtaacacaagatttaaaaaagggaataaagcaattgatgaaaaaccggttgagtgatgaacaagaaacaaccaagcccaccgaccagttgcatgtgtagactggtacaactggtgggttgttttacacaagtagttgcgaagaaagttatagaaatctgctaacgattctaaaaaaatttaatacaagaataacctacaaacgttaatggacattcaatttcgcaccagttttaattaattccacttgaaatccgaagtatctggaaagaacctatcaatgggcacaaattcgcgtccgaagatttcaccttgcggaaactcctttgtggcgacgacaacataaacatcttcattctggaccaatttgtgaagggtccttaaagatttacctttcaattctccttggagatcgtcagaagttacaccgcccacagcaactgtaccttcaacttcatgtttttttgatagcagaatatttgcctctttaaacctgtctttaactttgacttcctttgattcttgtaataaatccaaaagcatagttggatttttatttttggcgatgtcaccactattgtatagatatatgccggttatgttgtgaatattattcacattaatgttgtacacgagttgcttaaagtcctctctgaatttcacgccaacaaacccatgaggatcatttgtagatggcgtttgttcatgcgattcaagaatgctccagtacctgtctactggtactgcatttactgttgcgttagaatagatcgtgccaaacaacatgcacaagatacaaatcacagaaatgaaaattaaaattatattcattattagtctccttcaaatattatccaatttaattttttatctagttcagtaacatggctagattgttaaaaccgtcaaacgtctcatataacctaaaaacctattttttccattttccatngtatgaggacgttccgaaagtccaatttcctttgtataggtgttgtcaagtagtggtggaaatttgtattattttatttcacagtcaccaaagtcacgatcgccgtcaagcggactgaaggttccaattctgtcggttcccggcccacatctaaagtaatctgctccaggtccgcctctgagtgtatcattaccaggtccgccatacaggcgatcgtcaccttgtcctccatctaaaatgtcgttggccaatccaccatacaatacatcattttctgttcctccaaaaattttatcccgtccatcatccccatgcaattcatcatttccctgtcctccatctaaagtatcaaagtcgtcaccaccngttaaatagtcattacccgcagaaccattcaaaagatcgtcgccttgctgaccttcaatttcatcgttcccatccaatccgtcaatagtatcttgtccgttgcggccgcgaatatcatcatcggttattgttcccctaatattgtccgggcctgaggcgccattaatatcaactgctcgggaaactaaagctggtctagatagaaaaaatagactgcatacaatgattacgaatccaatttggtaaaacaaatcagaacttcctttacttgatattaccacagttttccaatcatttttgaattcaatacttattaaacatgattatgaaagttgggataaattgttagtggtattggaagcgagagtcagttctatttatattatactggcatatctcaatcagtggatttaatgaaactgaatacaacttggactgcatgttttttagtcttaagtttgtctcttgtgttagtaacagcacaaggaatttcaaataactactttaaattgtgggccgaaggatcgcaatcttcaaaaggataaactatttcaagagtatagtaaaaaggaaatcataaacggatttgctcagaaaccaattagtcttgacaatttagtccaagaagtaagtaatcaattacatagatacgaactggaaaaaatacctgcctcctaattaccggaatcatatactgccatctaccacttatcggtgttttaggttttaaattcaatagttgctcataatgaattatgggtcgaacaattccttcgtatagaattgccacagaaattgaaagaagtaaatggaatttatttgggcaaaaattgacgctttagcacctaagttttttgaaaataatgtgaggttggcattgtggatattgatgaggacgaaatgaggcccatgacggaacaggagatacagtaagcacagataaaagaaggataagtgacactataacacgaagacgtaggtattaatgttaaaatattaaactttataagtagtgctaccggcaatattttctatgttaaatcagaaaaatttgagcctaatcttagtaagtgcaacgttattttcactgatgtttgtagccgcggtaaactctaattttacctttgcgcagaatgagaaattcaaagcaaaactaaaaggagaaagtgaggttcctccagtaaattcatctgcaacnggnaaagccaaattcaaagtcaaggatggngtcattacaattaacgttaacgtaacaggattaaaagacataactgctgcccanatntatgccggggctaagggacaaaatggagaacctgtagtggatctattaaaggctggcaagcagaacaatgcaggcgagagaatcattgttaagggggaaattactgcttcggatcttcaaggtcctatgtctggaaagacactccaagacttccaaacagcaatgggtaatgaggagacatacgtcaatatacagacaagcgataatcccgacggagagataagaggacaaattaaagtaagcggtggtaacgcgacagaaacaggatctatgaatgaaaatgccactgctgacgttgaggatcccactgctgacgttgaggatgagtagttaagtttcatctaactcaagaaacctatttttttcattttt

SEQ ID NO: 1586 - DNA, 4000 bp, Escherichia coli
  misc_feature (6)..(6): n is a, c, g, or t
  misc_feature (162)..(162): n is a, c, g, or t
  misc_feature (175)..(175): n is a, c, g, or t
  misc_feature (349)..(349): n is a, c, g, or t
  misc_feature (370)..(370): n is a, c, g, or t
  misc_feature (628)..(628): n is a, c, g, or t
  misc_feature (640)..(640): n is a, c, g, or t
  misc_feature (646)..(646): n is a, c, g, or t
  misc_feature (820)..(820): n is a, c, g, or t
  misc_feature (1313)..(1313): n is a, c, g, or t
  misc_feature (1378)..(1378): n is a, c, g, or t
  misc_feature (1380)..(1380): n is a, c, g, or t
  misc_feature (1473)..(1473): n is a, c, g, or t
  misc_feature (1992)..(1992): n is a, c, g, or t
  misc_feature (1996)..(1996): n is a, c, g, or t
  misc_feature (3899)..(3899): n is a, c, g, or t
tccgcncaaatattctgtttcatttgtttttcctgttgctgctacaacattgtatcccaaatgtgacaatagagctactgatatgctcccgacacctcctgttgaaccggtcactacgatttcaccctgctccggagacactccgtgtttttgcagtgcatnaaccgaaagagcngccgtgaaacctgctgtaccataaaccattgcatctttgaaagaaagaccttccggaagtggaaccacccaatcagcaggaacgcgtatgtattctccaaaacctccggaggtattcatacctaaatcataactggtgacaatcacagaatcaccggtcttgaactgcgaatcngaactttctgtaacctttccngatgcgtctattccaggcgtgtgaggataattgcgagttacacctggatttccaatgcatgaaagcccgtctttataattcagtgaagaaaaatgtacccggatgagcacctcaccttccggaagatcgctgattgagcgctcggtgatttcacgggtaaaagttttttcgtcagttttactgaccaccaatgcgcgaaaagttgaaacattcatatctaattattcctttttttgtcagtctaaaaattttaccagnggcactattacngccagntcatcctcatcacaggtttcaagcctggaatcttcttttccgattttgacaatcagtattggaccccaacatggattttcattaaattcccattctgtctgtctttcctgcgatgctccttctccatcaaaataagccaggaatggtccgcccaactcttccatatcagtagantcacaacgtaataattcacaaagcatgtctaaattaagagtctcttctaaaagctctatactctgttcatccggatcaacatagatccatgttccaaattgtttaaaatcaatattcatctgccccacaaactcaacaagcagaaattactaaaaaaatgcagtttgaaatcgcagtcagatgttctttctgttatactttgattcttcaaaagacaaattcacaaaaaaatgctaaaaacatcagttacaatttacaccgatggtgcctgctcgcctaatccgggaattggaggttggggagcagttttgatttccaaagaacacaatctccgcaccgaactttccggctctgaagttgactctactaataaccgtatggaaatgactgctgccatcaaagccctggaagccttaaaaaaatcatgtgttgttaaactctacacagattccagttatctaaaaaatgcatttgagaaaaactggttaaatanttggcagaataacggctggaaaagtaaagcaagaaaacctgttgcaaataaagacctctggcttngnctgctcgaagtcagtaagaagcatgaagtttcatggcattgggtcaaaggtcattccgggaatcccgaaaatgaccgctgcgacgaacttgcngttcaggcccgaaagaaatttgcgaagtcaaactgattaataatcaaccgaattttgagtcttccactactacaaattatcccaaacggtttttactatttccttaacctgcgtatcagtgaatttaccatcaacactataaagtactttcccatctttagagaagagcactacgttactgttatcatcacttaacccccacttttgaacaagagttttttcaaggtcttttacatagactgttgttttatattcctcttgtttgcttttcagtttgatgttaatcgcaaaatttggaagccatgttgctgccatgttgatgactgcaacagaaccataattttctggagggtatttttctgccttgagagcttcacttacatggttgttcagatcagattcgtccggatcgacataaaaaaggacaaggacttttccggaaaccaattcctcactgctccactgagtaccatcaagtcttccacctaaatcatcttttagaacaattgttggtggaanttcnccaatgggcaattccccaaaaacaaaagttgaagaaataataaaaattgttaaaattgcgagtattttcatattatttttttgggcaaagggttattaagaatgcatacattaaaactaaaacaactcaattgaaagacaaaaatactattatccggaagcaggtgctggaatatccttaatattcaaacaacgcgggagtttaattgaaccgtctttttgttgaccattctctatgagggcaatcaaagttctggaaaccgcaattgcagttccatttagcatatggacaaatctgttttttcctgtttccgggtctttaaagcgaatgttcatgcgacgtgactgataatctgtacagtttgaagtggatgtcacctcgccccatttgccacgccccggcatccaggcttccaaatcatatttgcgataagctgctcctccaaggtcacctacgcaaatattaaccagctgatatgggatctccaaatcctggtaaatttgttcctcaatttcacgcattttttcatgcatttcttcagacttatctggatgggtaaaggcaaacatttctattttagaaaactgatgtaccctgtataatcctcgtgattcacgtccggccgcacctgcttctgtgcggtaacaatgagaaagccctgcatacagaatcggtaactgttccggttggagtacctgatcgatcaacaaaccgcccaaagttatttctgcagtcgcaatcagacagagatccgattcttctactgaataaatctgtgtttctgcaccacgtggattaaatccaataccgtccaaaatctgatgccgagccaagtccggtgtaatatgtactgtaaatccttctttttgcagcaaactcagggcatattgggccaaagctaattccaaaaatacagcctgatttttgaggtagtaaaacttttgtccagaaacttttgcacctccgtcaaagtcaatcaaatcaagtgcttccattaactcaacatggtccttaggttcaaaatcaaattcgcgttttgttccaacttcccgaattggaacattttcttcatcagtaaaaccttccggagattctggatgtgtcaagtttggaacctgcttgtgcaaatcaagccgctgctcaagcagttctcgaagtattgaatctttttccgactcttcttcacgcaagttttttgattcttcaatcagaggctgacgttcctcaggtggaattttgcctttcattttattactgatgtcattccgtcgttgtctgacagaatcaacttcagatgtaatctgccgtacttgctcatcaaatgctaacaatttttcaatatcaacgtcaacgttccgttttcggcaattctctgcaattacttcaggctggcttctgattatttttagatcaagcattcagtcaggtttcaggtttgagatttaagattctttgattgcagatttgcaatccacttttcatgttttatggttttgttgcaaaaactttttctggtcgcagtttatgaaatgcagtcagttcttgaatggcagatgcggttgctaaaaggttatgatcttcaaaacgccggcccattaattgtaacccaactggtaatccgtcactggttggtcttccaggaattgagattgcaggtgttcgtgtcaggtttgcaagtacactgcaaatatctgccaagtacattgccagtggatcttcatttttttctcctaacttgaatgcaggaaaaggagaaactggtcccagtataaaatcaaattcctcaaacagcaatgccacttgtttttccatccaagccctcacctgcacagctcgtccataatattgatcataataacctgaactgagtacaaatgttccaagcatgattctgcgttttacntccacaccaaaaccctttttcctggtagatgtgtatagtgatttcaaggatggctgatcctgcttccttattccgtaacgaattccgtcgaaacgtcccag

SEQ ID NO: 1587 - DNA, 4000 bp, Escherichia coli
  misc_feature (1986)..(1986): n is a, c, g, or t
  misc_feature (1992)..(1992): n is a, c, g, or t
aagttgaggttgtcaatcaaaaaaacacatatccaaaccaactgcactaatgaactagacaatatgggggtagatatcacacctcatccaagaaagaagttgaggttgccaatcaacaaaacatatatccagaccaactacattaatgaattggacaatgtgcaaggcctagcgcaaaaacttcatcccaacgctagagcataatattagcaccaacaatccaagaagctagtagattccctaaagtccattgagtcacttctttcacacgtgcagcatcagctagtagcaacctacaggggtcaaaggccctctaattcatcctttaaaattttactcaacaacaacttaaccaacctctttagtttatgacacttgaagaatttatggcatcacaacttggcctaaggacaatccatttcaagaagaaggggttggtggtgcaacactagaagcacaaggtgcaacaatagaaaatcaagcacaaccaacgcttgagccataaccacacaactcaagcaacaacaccaacattgaggctggtggctcaaaaaatgtgtaaggcactgatgcacatgttgatgcttcaaaagaaaaagacgccaatattgaaattggtgcatttgaggaaactaaaaaataaccccttactgaaggatttaaaaatgtacaagaagaaggcaacaaccttctagcaatgaggaggcagcaataacacagacaaagaagaggggcaaggatctgatgagttctttgaatttaagagagcctctaaatcatccaatccagtagattagtgaagaaaccaccatcatcgtcaaccaataaaacaaagttatttttaagttttttgcattttaattttagttttagtttttaaattgtgtgttagaagtagttttttttattattaagtatgcatgtcttaggtatcataggatgtaaataccttttggacatggttggattaggaactaagtagaaaaggaaaaatacactctaaaaaactgttttgaaatctgagaatgcaaggaaggaaagaagaaataaccatgagtacttaaaagcaaaattgacacaatgtaggtcagcttttagttaaaggttgacacatgaaagtgaatctgatcttgtgagttgagtgagccaaacacatcatgggagaatgagagaaacacataagtgattgagccataggttttgtgtctaattttttataattgttaaacatgattggcataaaaaggatcaaaggcaagttttctcgtgaaaatttctgcataatctagaccaaacaaccaccttgcataaatttttgaaaaatactccttttgaaccttggcctgaaacatgcaccctgagtctagaatgtatgtaacccaacctttcttactgatgagaaggatgcaacaaaggtgtgtgtgtgtgtatgtgtgtgtgtgtgccatgaaaggaaatggtgactttgaagtggataaaaaggaataaagttggggtatgctttgagcatacccaaaaatgcaaaaatacaaaatgcattttgaaattgaggcacctcaaaacaaaaaataatgtagcaaagcaagtcaatcaaaggtttactcaaaggaaaggaaaagaaaaagaaattgggttgagaaaaaacaaaaagaaaagaagactagaataactagactcattgcacttatacattgttgttatcctttttagtagtgagtcttgtttgtcttgtaagacaaagttctttcatagcccaaccacgttacaagcccaaaagaccatattgattttgccaattgtgtgtaggggtggcaaaacaggccagctagccacgcctttggcctatcaaaaatgggtcaggttgggttggctcgccactaagaaacgagttggacaattcaacccacctcaccttagggcgggctgggccacccccttttttaatttttttaatttttttaatttttcttttaactttttttttanattttntttataaattatatatatatatatatatatatatatatatatttaaacataaaaaataaaagaaaaaatggattggtgggtctaaatgggttggcctgccagttgagcgggctaggcgggccgggccacaaggttggcgggttggaaattctaacctggttcacccttttcaaacttgcaaacctctacctcgaccgagagacaaaaagtgatctgatcatgcaacaaagccactcattagcaaagactcaatatgaagaccaaaaagacacatgccaacaagaaaaactcacattcacaggagaatgaaacagacgagaaaaaggaagataaactaacttacctcaaacaagaaattgattgtttgatcttgatgagctctccgcaaggaactatccaccgatcttgaattttcaaaaggattaattgggagtgagcaacaaaagaagaagatggagctaaagatcaaggagaggatgcatttaaaaaaaaacgtttatgtgctttttgaattaaaacgggttgcttcatttcttttaaaataaaggcatattcacatttttaaagagttctacgattatcatcaaaacataatttattagaataattcagtatatctaaacgatctaaagttatatcatttttctaatttttcttgtggaattttgtactatactacacagataggaccaacaagaccaaatacccaaccctagccgtcaacttatagtcatgtttggtatagatcactaatcaactatatagaaagacaatacatacatggtggctaaggctacaaatcggtagggaccgcctactttaaacttaggaaataacacctaaatacgcagaatcaattcataggcatagtacttggaccttgatcaggcccacacaagtccaaaggagaccctgcagcgagccaataaaggcccagctcatgagccgggtaatctgtgattaatattctataaatatagatagaccccaacaattaaaggtacacaatccattaatactaaaaattaatatttaattttaagaattcttggtgacttaatcgttggagtctcttttgcatgtaatctccaagatattctcagctcaggataagataagatttatatcacattattgtccttgcaggaacaattttcaaagatcggttgtctccgtttgagaaggattggaccgattataaagcctcttttaccatatatatatataccgttttagtttctgttcattatttctacccagatctttagcttcttgcacaatcgtgttattcggacagaaatatcttatttatttgaattattaatgataattaaattgaagattacacactatatacttaataaaatgtaactgggtcatgttattcaattgcttctttattatctgtttgaagtaaagaatctgagtgaaaccaataatataaaatggtcgtttaactttgagaaattatttatgaaatgcaaaaggggtaataatattcataaatttcgataataaatagatagattagtttaaacatatactcctagaaaacaatttaaatgttgagttcttaaattaattctattatagattcaaggaaaggaaacattgtgaaacttttatttaaaaagtcttactgttatgtcacacaagtctttctgtttttatcaagagtacatcattgtcttgaaatcaactaatttccttgagcattgcaaatcttaaaactaatccctaatggattattgttctcgttaacagcatcacctaatggattattgctctcgttaacagcatcacctaatggattattgttctcgctaacagcatcagaaatgtgaatcgttgaaccttcttcacctctttctgaggttgattgtttcctagcatagggcacaagaaatttgtccataccagcagcaatagttagcagttctgctcgcaaaaacacacatttttgcatgatatactccaaaccaccagatttcatgagagctgcaacgta

SEQ ID NO: 1588 - DNA, 4000 bp, Escherichia coli
  misc_feature (6)..(7): n is a, c, g, or t
  misc_feature (9)..(9): n is a, c, g, or t
  misc_feature (15)..(15): n is a, c, g, or t
  misc_feature (17)..(17): n is a, c, g, or t
  misc_feature (24)..(24): n is a, c, g, or t
  misc_feature (27)..(28): n is a, c, g, or t
  misc_feature (30)..(30): n is a, c, g, or t
  misc_feature (35)..(35): n is a, c, g, or t
  misc_feature (42)..(42): n is a, c, g, or t
  misc_feature (44)..(44): n is a, c, g, or t
  misc_feature (46)..(46): n is a, c, g, or t
  misc_feature (53)..(54): n is a, c, g, or t
  misc_feature (56)..(57): n is a, c, g, or t
  misc_feature (59)..(59): n is a, c, g, or t
  misc_feature (66)..(66): n is a, c, g, or t
  misc_feature (69)..(71): n is a, c, g, or t
  misc_feature (73)..(73): n is a, c, g, or t
  misc_feature (75)..(75): n is a, c, g, or t
  misc_feature (79)..(79): n is a, c, g, or t
  misc_feature (81)..(81): n is a, c, g, or t
  misc_feature (83)..(83): n is a, c, g, or t
  misc_feature (93)..(93): n is a, c, g, or t
  misc_feature (95)..(95): n is a, c, g, or t
  misc_feature (98)..(98): n is a, c, g, or t
  misc_feature (100)..(101): n is a, c, g, or t
  misc_feature (115)..(115): n is a, c, g, or t
  misc_feature (118)..(119): n is a, c, g, or t
  misc_feature (121)..(121): n is a, c, g, or t
  misc_feature (123)..(123): n is a, c, g, or t
  misc_feature (125)..(125): n is a, c, g, or t
  misc_feature (135)..(135): n is a, c, g, or t
  misc_feature (143)..(144): n is a, c, g, or t
  misc_feature (167)..(169): n is a, c, g, or t
  misc_feature (173)..(174): n is a, c, g, or t
  misc_feature (180)..(180): n is a, c, g, or t
  misc_feature (183)..(183): n is a, c, g, or t
  misc_feature (200)..(201): n is a, c, g, or t
  misc_feature (203)..(203): n is a, c, g, or t
  misc_feature (207)..(208): n is a, c, g, or t
  misc_feature (210)..(212): n is a, c, g, or t
  misc_feature (214)..(214): n is a, c, g, or t
  misc_feature (219)..(219): n is a, c, g, or t
  misc_feature (223)..(224): n is a, c, g, or t
  misc_feature (226)..(227): n is a, c, g, or t
  misc_feature (230)..(230): n is a, c, g, or t
  misc_feature (243)..(244): n is a, c, g, or t
  misc_feature (248)..(248): n is a, c, g, or t
  misc_feature (257)..(257): n is a, c, g, or t
  misc_feature (259)..(261): n is a, c, g, or t
  misc_feature (263)..(263): n is a, c, g, or t
  misc_feature (266)..(266): n is a, c, g, or t
  misc_feature (268)..(271): n is a, c, g, or t
  misc_feature (274)..(275): n is a, c, g, or t
  misc_feature (282)..(283): n is a, c, g, or t
  misc_feature (286)..(288): n is a, c, g, or t
  misc_feature (290)..(290): n is a, c, g, or t
  misc_feature (295)..(295): n is a, c, g, or t
  misc_feature (299)..(299): n is a, c, g, or t
  misc_feature (301)..(301): n is a, c, g, or t
  misc_feature (306)..(306): n is a, c, g, or t
  misc_feature (313)..(314): n is a, c, g, or t
  misc_feature (322)..(323): n is a, c, g, or t
  misc_feature (326)..(326): n is a, c, g, or t
  misc_feature (328)..(328): n is a, c, g, or t
  misc_feature (330)..(330): n is a, c, g, or t
  misc_feature (332)..(332): n is a, c, g, or t
  misc_feature (337)..(338): n is a, c, g, or t
  misc_feature (340)..(341): n is a, c, g, or t
  misc_feature (345)..(345): n is a, c, g, or t
  misc_feature (347)..(348): n is a, c, g, or t
  misc_feature (354)..(354): n is a, c, g, or t
  misc_feature (367)..(368): n is a, c, g, or t
  misc_feature (371)..(372): n is a, c, g, or t
  misc_feature (375)..(376): n is a, c, g, or t
  misc_feature (378)..(378): n is a, c, g, or t
  misc_feature (381)..(381): n is a, c, g, or t
  misc_feature (385)..(385): n is a, c, g, or t
  misc_feature (387)..(388): n is a, c, g, or t
  misc_feature (391)..(391): n is a, c, g, or t
  misc_feature (393)..(393): n is a, c, g, or t
  misc_feature (398)..(398): n is a, c, g, or t
  misc_feature (414)..(415): n is a, c, g, or t
  misc_feature (417)..(417): n is a, c, g, or t
  misc_feature (419)..(421): n is a, c, g, or t
  misc_feature (424)..(424): n is a, c, g, or t
  misc_feature (426)..(426): n is a, c, g, or t
  misc_feature (429)..(429): n is a, c, g, or t
  misc_feature (436)..(436): n is a, c, g, or t
  misc_feature (438)..(440): n is a, c, g, or t
  misc_feature (447)..(447): n is a, c, g, or t
  misc_feature (454)..(455): n is a, c, g, or t
  misc_feature (458)..(458): n is a, c, g, or t
  misc_feature (460)..(460): n is a, c, g, or t
  misc_feature (463)..(463): n is a, c, g, or t
  misc_feature (465)..(465): n is a, c, g, or t
  misc_feature (470)..(470): n is a, c, g, or t
  misc_feature (472)..(472): n is a, c, g, or t
  misc_feature (482)..(482): n is a, c, g, or t
  misc_feature (488)..(488): n is a, c, g, or t
  misc_feature (491)..(491): n is a, c, g, or t
  misc_feature (494)..(494): n is a, c, g, or t
  misc_feature (496)..(496): n is a, c, g, or t
  misc_feature (502)..(502): n is a, c, g, or t
  misc_feature (505)..(507): n is a, c, g, or t
  misc_feature (512)..(513): n is a, c, g, or t
  misc_feature (516)..(516): n is a, c, g, or t
  misc_feature (518)..(519): n is a, c, g, or t
  misc_feature (521)..(521): n is a, c, g, or t
  misc_feature (524)..(524): n is a, c, g, or t
  misc_feature (527)..(527): n is a, c, g, or t
  misc_feature (529)..(529): n is a, c, g, or t
  misc_feature (532)..(532): n is a, c, g, or t
  misc_feature (535)..(535): n is a, c, g, or t
  misc_feature (538)..(539): n is a, c, g, or t
  misc_feature (542)..(542): n is a, c, g, or t
  misc_feature (544)..(544): n is a, c, g, or t
  misc_feature (547)..(547): n is a, c, g, or t
  misc_feature (556)..(556): n is a, c, g, or t
  misc_feature (558)..(558): n is a, c, g, or t
  misc_feature (561)..(561): n is a, c, g, or t
  misc_feature (564)..(565): n is a, c, g, or t
  misc_feature (567)..(567): n is a, c, g, or t
  misc_feature (570)..(570): n is a, c, g, or t
  misc_feature (573)..(573): n is a, c, g, or t
  misc_feature (576)..(576): n is a, c, g, or t
  misc_feature (582)..(583): n is a, c, g, or t
  misc_feature (586)..(586): n is a, c, g, or t
  misc_feature (598)..(599): n is a, c, g, or t
  misc_feature (601)..(601): n is a, c, g, or t
  misc_feature (604)..(605): n is a, c, g, or t
  misc_feature (607)..(607): n is a, c, g, or t
  misc_feature (613)..(614): n is a, c, g, or t
  misc_feature (618)..(618): n is a, c, g, or t
  misc_feature (622)..(624): n is a, c, g, or t
  misc_feature (626)..(626): n is a, c, g, or t
  misc_feature (631)..(632): n is a, c, g, or t
  misc_feature (634)..(634): n is a, c, g, or t
  misc_feature (639)..(639): n is a, c, g, or t
  misc_feature (643)..(643): n is a, c, g, or t
  misc_feature (645)..(646): n is a, c, g, or t
  misc_feature (648)..(649): n is a, c, g, or t
  misc_feature (653)..(653): n is a, c, g, or t
  misc_feature (656)..(659): n is a, c, g, or t
  misc_feature (661)..(661): n is a, c, g, or t
  misc_feature (664)..(664): n is a, c, g, or t
  misc_feature (667)..(667): n is a, c, g, or t
  misc_feature (673)..(674): n is a, c, g, or t
  misc_feature (679)..(679): n is a, c, g, or t
  misc_feature (681)..(681): n is a, c, g, or t
  misc_feature (683)..(685): n is a, c, g, or t
  misc_feature (687)..(688): n is a, c, g, or t
  misc_feature (697)..(698): n is a, c, g, or t
  misc_feature (701)..(701): n is a, c, g, or t
  misc_feature (708)..(709): n is a, c, g, or t
  misc_feature (716)..(716): n is a, c, g, or t
  misc_feature (721)..(722): n is a, c, g, or t
  misc_feature (725)..(725): n is a, c, g, or t
  misc_feature (727)..(727): n is a, c, g, or t
  misc_feature (741)..(742): n is a, c, g, or t
  misc_feature (746)..(747): n is a, c, g, or t
  misc_feature (749)..(749): n is a, c, g, or t
  misc_feature (752)..(752): n is a, c, g, or t
  misc_feature (754)..(754): n is a, c, g, or t
  misc_feature (756)..(758): n is a, c, g, or t
  misc_feature (760)..(760): n is a, c, g, or t
  misc_feature (766)..(766): n is a, c, g, or t
  misc_feature (768)..(768): n is a, c, g, or t
  misc_feature (770)..(770): n is a, c, g, or t
  misc_feature (774)..(776): n is a, c, g, or t
  misc_feature (784)..(784): n is a, c, g, or t
  misc_feature (789)..(789): n is a, c, g, or t
  misc_feature (795)..(795): n is a, c, g, or t
  misc_feature (797)..(797): n is a, c, g, or t
  misc_feature (801)..(801): n is a, c, g, or t
  misc_feature (803)..(803): n is a, c, g, or t
  misc_feature (805)..(805): n is a, c, g, or t
  misc_feature (816)..(817): n is a, c, g, or t
  misc_feature (820)..(820): n is a, c, g, or t
  misc_feature (826)..(826): n is a, c, g, or t
  misc_feature (828)..(828): n is a, c, g, or t
  misc_feature (831)..(831): n is a, c, g, or t
  misc_feature (833)..(833): n is a, c, g, or t
  misc_feature (837)..(837): n is a, c, g, or t
  misc_feature (841)..(842): n is a, c, g, or t
  misc_feature (850)..(850): n is a, c, g, or t
  misc_feature (854)..(854): n is a, c, g, or t
  misc_feature (856)..(857): n is a, c, g, or t
  misc_feature (859)..(860): n is a, c, g, or t
  misc_feature (862)..(862): n is a, c, g, or t
  misc_feature (864)..(864): n is a, c, g, or t
  misc_feature (866)..(867): n is a, c, g, or t
  misc_feature (876)..(876): n is a, c, g, or t
  misc_feature (879)..(879): n is a, c, g, or t
  misc_feature (894)..(894): n is a, c, g, or t
  misc_feature (906)..(906): n is a, c, g, or t
  misc_feature (908)..(908): n is a, c, g, or t
  misc_feature (910)..(911): n is a, c, g, or t
  misc_feature (917)..(918): n is a, c, g, or t
  misc_feature (921)..(922): n is a, c, g, or t
  misc_feature (932)..(932): n is a, c, g, or t
  misc_feature (934)..(934): n is a, c, g, or t
  misc_feature (937)..(937): n is a, c, g, or t
  misc_feature (944)..(944): n is a, c, g, or t
  misc_feature (951)..(953): n is a, c, g, or t
  misc_feature (959)..(959): n is a, c, g, or t
  misc_feature (962)..(962): n is a, c, g, or t
  misc_feature (969)..(969): n is a, c, g, or t
  misc_feature (971)..(971): n is a, c, g, or t
  misc_feature (975)..(976): n is a, c, g, or t
  misc_feature (978)..(978): n is a, c, g, or t
  misc_feature (980)..(980): n is a, c, g, or t
  misc_feature (982)..(982): n is a, c, g, or t
  misc_feature (986)..(986): n is a, c, g, or t
  misc_feature (988)..(988): n is a, c, g, or t
  misc_feature (992)..(992): n is a, c, g, or t
  misc_feature (994)..(994): n is a, c, g, or t
  misc_feature (997)..(997): n is a, c, g, or t
  misc_feature (999)..(1010): n is a, c, g, or t
  misc_feature (1012)..(1013): n is a, c, g, or t
  misc_feature (1015)..(1028): n is a, c, g, or t
  misc_feature (1030)..(1030): n is a, c, g, or t
  misc_feature (1032)..(1033): n is a, c, g, or t
  misc_feature (1035)..(1035): n is a, c, g, or t
  misc_feature (1037)..(1044): n is a, c, g, or t
  misc_feature (1046)..(1046): n is a, c, g, or t
  misc_feature (1048)..(1062): n is a, c, g, or t
  misc_feature (1064)..(1079): n is a, c, g, or t
  misc_feature (1082)..(1082): n is a, c, g, or t
  misc_feature (1992)..(1992): n is a, c, g, or t
gccggnngnctttgncnccggggnggnngncgccntcttttncntnttcttcnncnncnggggggntcnnngngnggancntngttttccccnancangnngggggggcccccgnagnngngngngaggggggcncgcggggnnttttggggggggttttttttttnnnagannatcccncgntttttgttttttcccgnngncggnncnnntntctcnaaanncnncgnaaaacaacaaaanngcgngcccccccngnnncncgntnnnngtnngcggcgnngannngnagaanacangntttcnccgccanngggggggnnggngngncncgggnncnnctgntnngggggngcccccccgccgnngtnntcnncnccncgcncnncgngnggccnttttttgtggtggtgnngntnnncangngcngcgcgtngnnnctcctcngcgcggnnctngnggntnccccngnggtttttctnccgccncgnggngnggaggnggnnnacatnncgntnntngtngtntntgnggngtnncangnggngcggcggcngntgntgnngncgncgnagncgtggnnggncggcggcgcggnngncgnnancccgcnntttngggnnnanaaaanngngagcngcgncnncnngaanaannnncnccncgngggggnncgggnangnnncnncgcgcgggnnatnttcttcnncgccganaacgnngtngnggccggggcggggnncacnntntangnannntngccccncngngcgnnntttctccncagcngcgtgntnctcncncncgtttttttcnnccnccacangngcntngttnttcnnttttttcnccgngnncnngngnanngcggcgcgncgntgtcggcggcggccnccgccgcgcccntngnngggggnnctnncccccgggancnccncgcgganggggggnnngtggtnctnccccccncnctcnncncncncgcncncgcncncgngnnnnnnnnnnnngnngnnnnnnnnnnnnnngngnngngnnnnnnnngngnnnnnnnnnnnnnnngnnnnnnnnnnnnnnnntanctagctaaaagtaaatgaagacaaccgacgcgtcgcgtctccgcgttccggagctcgcgcgttgtctctccatcactgtcaccgtcgcgatcactcgccctcgccgggaccgtgtgtgcgttcgatgccgtgcctcctcaaggtttcctggatcgcctcgcacgcctcgcccgcgcgtcgcacggagaactcgccgggcacggacaggtcgacgatggttgaccccgctcgagtggcggcaatgcgcccgccgtcgaagacgcacgcgcactcagaccaaaggtgctcgaactcctccaccgccagcgtgctgggcttcccgctcgggttcgcggacgtcagcgcgatggcgtggccgtacgcgcgagctaccgcgcggatgaactcggagtccgggacgcgcacgcccagcagcgcggcgtcgggattcaacgccgacgacagcggcgtgtcgtcggtttttctgcgtaacaagagcgtgatgggccccggcagcaactcctccagcaaacccgggtttaagtgcgcgacgtccgcgtacttgctcacgtcggatgcctcgccgacacacaccgcgagcgggacgtgatacgcgcgctgtttcgcctcgtacagcctctggatgcccttctcggaacacgcgctcgcggcgaggccgtaaatcgtgtccgtggggacgccgatcactttttcgcgtcgcagcgcctccaccgcctctgcgacgcgaggaagcgtcgcgggcaggacgcgcgcgcgagccgcgcgcgaggacatcatcgtcgctctcggtccggggatcgcgcacaggcgcgcggacgcgagcatttttgacacgagcagagcattgcgaatcgacgcgttccgaaggaccgaatcacaacacgtcgtcgtcgctttttgcaaacctctnaaccttcgtcgttcagtggcccgggcacgctttttcataacaaccggttgctctcgcgctatgcgcgactttccggaagcctgaggctgcgcacaccgcgtttcgtacaaatcaccccgccctccctccgcgtgatgctcgatgacgatcatggcccacgctacgcgctggtcaggtcatccttgaagtacaggtggatcaccggtatggcggcgtccgacggtatggacagcgcctcgaacgtctcggcgtcgtccaccaccccgttttcctccagcgtcttgtccaggtccacgtccacgaacttcagctcccggtccccgtctgggtcgcgccgcagaacccgccacgcgtacgactcggagtgccagttgtattcggcgtagcgcgtgcggatctcgcgcagcgtctcctcccccggcacctccagcaggtgctcctgtcgcgtcagcacgttcttcacgcgcaccgcgcgcggcttcaacgacaccgcgcccactacggaggtcctgtcctgccaccagggcgtcgtggggcgcgcgtcccattccacgctggggtcgttcgggggcacgtgcacgaaccgcccgttcgggcagtacggccgaacgaggttcgtcaccgggtcgacgtgcgtcttgagctcgacggttttcgcggcgtcgtcgccttcgtcgcccgcgcgcgtctcgaaccagtgcgagatgtccgagccggcgacccgcagcaggggctgcacgagcggcccctcgttctcggcgatcacgcgcgtgatgtcgtacacgtcgccgtggaacgacacccagcagtcgtcgggtgcgctgtgcgccgcgacctgcacgggtcgtcgcggggaggatggagaagaagcgtttcgcgtcggcggatgtcggggggcgcgtcgggagggacgaggggtcagcgcgcgtcgcgtggagccgaggacgcgcgcgtcgcgacgcgacggcgcacatcgacgcgtctcgtggtggttggagtgataggcgcgcgcgcggaaaagacgcgtgatctcgatcggtctcgcgtggaccgcgccgcgtcctccaccgggacgcgcggggtcggcatctccccttttgggtacgaccggtctcgcgcgcccgtcggggtgaggcgacccgtcgcgcgggtgcgtcggcggaggctcgggacgtacctccgcgggcgtgtagatgcgcatggtcgtgtcgcggcgaccgcgagtcgacgcggacaggcgttcgcgacgaacggtgtgatgacctggacggctccggcttgcttgtgtgggctcgacgtccacgtaaacgaacgtctccccacggcgcgaaaagcgcgccaactttttggtattcctcgggcaacaacgtcggcggaagatcttcgggagggtttgccgcgccgtcacagtccgcagcgccgcgcacactcgcccggctgagagcgtcgtcggccgcttcgcgcgctcctcagatcccaccggatctgatacgcgccgtcgcgaaggctgcgcccgtgaacgcctcgccaagcgccatgagcgcgaagaaggacatggacgtgtgggcccatttcggcgaaggcggtgccctgagcgtcgacgtggtgtcccggtccgaagccgaggagctctcggtgagggtggccgaactggaagatgaggtacgtcggagtgcgcgtcgcgatctccccgcgaaccccggcggatcttccgcgcgcgccgcgacggaccgcgattgcgcacgcgtcccgtcgacaattccgaggatcggccttcccgaagcgaacgctttcgcgcgaaagaagagcgaatcgtcgacgctcttcggcggcggagcccatcctgacctcgcccgattcccggacgttcgcgccccaccgacgcgtgaccgaaaacacacgaacgcacgtgacagctcgcgcgagcgcacgccaacgtcaccgagctcctcgccgaccgcgaggagtcccttcgccacgacgagtacgtcgagtcgatggtggagca

SEQ ID NO: 1589 - DNA, 4000 bp, Escherichia coli
  misc_feature (1924)..(1924): n is a, c, g, or t
  misc_feature (1987)..(1989): n is a, c, g, or t
  misc_feature (2872)..(2872): n is a, c, g, or t
ccagcgtcgccaatgccccagacgatttcgggcttaatgtcgtcgtgggggaaagcgcgcgcgcattgacggagaatcgtagcctccatttttcgagcaccagacgcatatgcgcgcgcggtcgccacgacgccaacgttgcgagatttgccgtgcgcggcggacgacgcgtctcggtgtagcgcgtaaaacctttcgcggtccataggcgctcgacgatctattggtgctctcgcgcccaagcctgcaccgcgccgctccctcgcgtgaatgcgcagtcgcaagcgtcgcgacatcgtgcgcgcggcgcgacgccgcgctagcgttcgctcgtgaatctctcgcgcggtcagtcgcagtgtctctatcccgcattgctgtggaacgacgcactgatctccatcgagagcaaagacgaatgacatcgcagtcaatgcaacgcgacggcctggatctcccaataccacagcaatgatcctgcgttgttgcacttgaggtgctggcagcgcctgttgttgcactggaattgctggcagcgccggtcgttgagcgcctgcctggcccgccgctgccgccgccgccgccgcctcctgcggtttgaacaagaaaccgatcgaacgcgcccccttcacgatggatgtcgcaaactcatatccacgcggcgcgcgcggtacgcggaaaaaactcttaataaaccacgatagagcgtgtttatcgaatgcgacgcgctcatcgccacgattgctacctggcggtttccccccttcgggatttagaaaccacgacgcgccacccgaccgagtggcggttacacatgtgacatcagccgacacgagatccagtaatgcactctgcggtatgttcatcgcgcatctagaacgtggcgcgcagaatgcacgacacaacgcgcgagatcgctttggtcgccactgtcgacggacgggcatctggacgaaattgggtggtcgcaaccgtcgcaactgctgcgcctgagcgttgcgccaattagtttggacgtgttcgcgtatgatctctacccatttcgcgcggtacagccgccgctgtcgaccgtcgcgtaagtctttcaacatgttgagattgcggagcgcggaccacacgcgggtaaagtgccgcatgtggtcatgaaaacctatcgccgcttcgcgataaaactcttcctcgcgcatagccgcgtcaacaccgacgccacgagctcgcgcccacgcgcccacgacggattgaaaaagcttgcggacgcccctcttcagcttgccgggagcgcgaacgtctgctctttgaatgagccattgaaagcttcgcgcgtctatcgcccccgcgccgacgccgtcatcgacgacttgctccccgtcactgtcgtcgtcgcctacaacgtgctgcagctcggctagttggccgtcgtcgagtgcgagcatgcgactaaagacattcgtcgtgttttcgagtagcgcagcgtcctcgtcttcaatcgccacgtttggtggccgattcggatcaaactgcgccacgtatccttgcgctgccttcttggcagcaagagaaaacgcggcacgcaaccaccgagcgttacgcgcgctcgacgccgtcacagcgggcaccatgcgcttgaccgtctctcgcgcgatgatatcgaccgcttcgcgcaactcgacttggagttcatactgcgcttccgcgggacgccccaccgccgcatcgagcctgttttcgatatccaccatgcgctcgccggcgcgatcaatcgcgcggtagagcgccgacgtcacccccggcctcttctgagcagagcgacgactgatgttacgcggcgccttagccaccacattcggtccatggccggtttgggaccaacacgcgcacacccgcgccaagacggcttcgagcgcatctagcacctcagcggtcngtatagacgcttcgagttgttgtcttctttgcatgtgttcttcgtcgatcacattcgatttgnnntaaaccgcatcaaatacgtaatcgaatgcgttacggcgcacctcgggttgttcgaggatttctcgcgtcgcggctcgagcaacgaagtcggacatgcgctgcacgtcgtcgtgatccgcgttccgcacgagaacgcgcgcgatttcacctaaacgcgtgggatcatttgcgcaaccgagattggcgagttcaagttggacgtgacgtttgatgcgcttctccacgtgcagccgtgcgttcgtctcgcaattcatgagaattcgagtcgctgcgcattgtacagttcgatacgtgaagacattgatatccggtccaatttcgacgtctttgaatcccgcgagagccaccttggcttctcgcagaataagatcgcgttcttcggccagcgccctcctcgcagcatccgcgcgccgtggatccacgtacgtggcgatgacggcatttacgcttgacaggcgggctcgttcgagtctatctatccgcgcttgtagccgcgggtttggtacacccggatttaaattgatcatctccctcgccatcgcgctcgtaacgtctttgaggcacgtctgaaagctggctattttactcaacagcgtgaactcttcgtcggccgccgccttggcgtcccatatgttgagtaacgcctcccatgcgtattcttgaatgaacaccgcggcgcgggcacacacgagcgacgcaagctctgtgccgccatgcattaccgcgaacatcatcctcatcgacgtcaacgctgcatctgcgccaagacgttgctcctctggcttccgcttaatcgcaccgcgctcagcctgcacgggcacgccagcgtcgagggtcccattccgcacgcaatgcacacccttgcgaaagcctcgaacgatgnccataactggatcgtcttgttggcggaagacattgaggtgctgcaacgtctccgacgatcggcgaaaagcggcggcatacgtgatgatgtctctccagcgcgcccgcatcgcgccatcgccatccccatcgcccgctcgttgacgttcgccgacttcggctaaaaatagattcaccacgtccggacgtcccagcgctccgagttgcgcaactgtgtggtttaaaatatggcgcacacgttctgcaaccatcgccacgaacgacccatcgttcctcagttcgcttttaacgtacgcatcgatgcgcgcgcggccttcgggagagcgctcgggaagctcgacatccaacatcctgattcccctgttggcgagctctgccaattttcgcacgcaatcatcccttatgacatcatccgctctggcattgcgtcgatccagtgcatgggcgggcacggcgtcacccaacgcccgttttataacaccccggtcggcgccgtgccaaccaaacgccacgtccaacacgactgtctccgtcaccttcagtcgttttatgtacctccgccaaatagctccggcctcacgtctcaatgccacgaccgcggcatctgcgcacgttccatagaaacgtcgcagagcgcgcaaattagttcgcggatccggcggcaacttcgtgccatccgtcggaagacgcaccgtcttccaatccgcctcttcctcctcctggtctccgcctctgcctccgcctctacctccgcctctacctccgcctctacctccgcctccgcctctacctctgcctctacctctgcctctgcctctggcgacttgggcgtcagccatgacgagcgtcgatgcacaccaaaatttcacagcctgaaaagcaggcgcgtctcggacgtccaacgcccctcggtcttcccttcgtccgagcgcaacgctcagtacgccacctggagcgcgttacccacgttcgcgcctcctcctggttactgcgatcgccaggaaatttagctcacttatcacagtgtcgtcgtcgagtgacaccgcgcgcagtgacgaccgcgtcacgcgcccgccatcgcgcgagatcgatcgccatcgcgacgcgacggttcgtcgatgatggcctg

SEQ ID NO: 1590 - DNA, 4000 bp, Escherichia coli
  misc_feature (1987)..(1987): n is a, c, g, or t
  misc_feature (1992)..(1992): n is a, c, g, or t
gggctccgaaatccgtgcgcggcaggaacacctgccccacggccatcagctcatccattcgcggcgtatggccggtgcgttcgatttgatcatagaagaatggcacaggaatttgcacatggatgccagccccgtcacctgttttgccatctgcatcgaccgcgccgcggtgccaaaccgctttgagcgcatcaataccggcctgaaccaccttgcggcttggcgacccatcgatggacaccacaagccccacaccacagctggcgtgctcttcagcctcagagtaaaggccattttcagccatatacttgcgcttggcttcttccgctttcacccagttcgcatcaaattttgtcatgctcatctcctaaaatgcccacgcgggacattgttatgtcgcaaaggtccagatccacgcaggcgcttattcagcggcgatggatcgggcctcgtcaaactgtgctaaaattgcagcggcgcagtcgcgaccgtcgcgaatggcccaaaccacgagcgaggcaccgcggacaatatcaccgacggcataaacgcccggcagccgggtttggccggtttcaaaatccgcccggatcgtgccccagcgcgtcacctcgagaccttcagcgccccaaagctgcggcaaatcttcgggttcaaaccccaaagccttgatcaccaaatccgcaggttccacataatctgccccgtcaatcaactctgggctttggcgtccggtcgcatcgggcagacccaaacgcattttctggacgttaaccccggtgacaggattgccaacaaacccattgggcgcggtcagccagacgaattcaacaccctcttcctcagcgttttgggtctcacgcagagatccaggcatatttgctttgtcgcggcggtaaaggcatttgacggaggtggcgccttgccggatcgctgtgcgcacgcaatccattgccgtgtcgccgccgccaatgaccacaacccgcttgctggccgcattcaagctgccatcttcgaattcaggcacagtgtcgccaaaaccatggcgattgctggcggtcaaatagtcaatggcttttacaatgccatccgctcctgatcccggccccgccagatcgcgggatttataaacgcccgtggcgataatcaccgcatcatgtttactgcggatctcatcaaagcttatgtccacgcccacattgcagttggtgacaatttctatgccgccctcttcaagctgggtcacacgctgcatcaccacatctttttcaagcttaaatccgggaattccataggtcaaaagccctcccgcgcgatcataacgatcatagaccgtgacctgcacaccggcccggcgcagcatatcggccgcagccaatccccctgggcccgcgccgatgatgccgacggattccccgcgggtcgcggcgggcttaatgggttgcacccatccctcagcccaggcggtatcggtgatatatttctcaactgacccaatggtcaccgtttcatggcccgactgttcgatgacgcaattgccttcgcacaagcgatcctgcggacaaatacggccgcaaatctcagggaatgtattcgtggcctggctgatgtcataggcctctcgaagccgcccctctgccgtcaggcgcagccaatcggggatattattgtgcagcgggcagtgggtttggcaataaggcacgccgcattggctacagcggctggcttgctctgcggccttatcctccgaaaattctgcatagatctcgccaaaatcatgcgcgcgatctgacgcttcacgcttttgaggcatgagccgtggaattttcacaaacttcagcatcggattttcagccataacatcctcgattcgcaacatcgctatatttttaagtacttctgacaaattaatgtcagcacagatgacctatataatagggaattcgatatggcgacactttcatgaaattttcaagctctttttaantccgnttcggacctatatttttgctggcgcttatacgccatgggtatatggtcccctggattgcagaggatcccaacacatgccgctttatcatctggtaataattgcgcttattcagggcataacagaatttctgccggtctcctcatcggggcatttgatcctcttgcccgggctgaccggcctcaccgatcaaggccccgtgattgatgttgccgcccatgtcggaactttattggcggtcatcgtctacttctggtcagatgtgcgccacatagtgcaaggtgttccgcaggtcctgcgcggccagtttgataccccctccgcgcggctgctcatcgccatgagcttggccacgctgcctgtcatggtgctgggcttgattttgaaactcactggcctgtcagacgccctgcgctccatcaccgtgatcggctggagcatgctggtattcggcattttactctattggatggatcaacgtgcccaatccacgcgccaactccaagacctgacattgcgagacgcgtggatccttgggctgtggcaagcactggcgcttatcccaggcacctcgcgttccggcatcaccatcaccggcgccctcaatgcgggcttcacgcgcaaagaggccgcccgcatcgccatgctgatgtcgatcccgaccattatcgcctctggcgcgctcacctctttagatttgatcggcggcaccgtgcccctgcgcgatacatctatcgtcgttgccctcagcttcgcagcagcgctcttggctctcagtctgatgatgcgcttgctaaacagcctgacctatacgccctatgtggtttaccgcataggactcggcctcacgctgctcaccataggctacagcggcggcctcgggtcgtgacgccctaggcttttagattttttgcagaggctttgatatcggcatattggcctgacacacggaagggccatagataatctggcaatacgctttccaatgccgttggctcaatctgtagatccgccaagcccatacagtcgccgctcggcacattgtccacgctcagactgtggatctggtcacgggtgatcggcatcggcgccaagccaaaactcagtttattggcaagcgtaaagcccgtggccatgagacgcgcaacaaacatcggcaagccgatgatcaaccgccgacgctggatgacatccaacatgcgctgcatcagaccgcggaaactgtcccgctcgggtccagccaactcataaatgccgcccgccgcgacacctgtcgcacccagcactacggcccgtgcgacgtcatctacaaacaccggctgaaattgcgtctcagccccgacgatcggcaaaataggaccaaagcgcgccatactcgcaaatctgttgaaaaattgatcctctgccccaaagacgatggacggtcgcacaatcattgcgcccggcatatgcgccaagacctccgcctcacccgccgcctttgagcgggaataggcgctgtcgctcgtcagatccgcacccatggccgagatatgcaccatttgcgcgataccaccttcagctgccaagcgcgcaatgcggccggcgccatgagtttgcacggcgtcgaaacgattgcgccctgattcttgtaatatgccaacgcaattgatcacagcatcggcgccgcgcaaagcccgctttaccgatgcgtcatcgcgaatgttgcaaaagaccggctcaacctgacctacaaccccataaggcttgacaaatatcgcctcattgggccgccgaacagccacccgaacccgccaaccagcctttgccatgcgccgcgcgacatagcgcccaacgaaacctgacccaccgaatatagttacaagcttagacatgatgacatcccaagtatttctctgtggaagggaggtactccgtgcaccgcctcatgacaagtccattccccattcgacagccgccgcaccccgatatgcggcgcgcgaaacctggcgcctaagggggccgcccaaa

SEQ ID NO: 1591 - DNA, 4000 bp, Escherichia coli
  misc_feature (2760)..(2760): n is a, c, g, or t
  misc_feature (2763)..(2763): n is a, c, g, or t
  misc_feature (3768)..(3768): n is a, c, g, or t
  misc_feature (3803)..(3805): n is a, c, g, or t
  misc_feature (3810)..(3812): n is a, c, g, or t
  misc_feature (3815)..(3815): n is a, c, g, or t
  misc_feature (3819)..(3820): n is a, c, g, or t
  misc_feature (3823)..(3823): n is a, c, g, or t
  misc_feature (3828)..(3830): n is a, c, g, or t
  misc_feature (3834)..(3834): n is a, c, g, or t
  misc_feature (3836)..(3836): n is a, c, g, or t
  misc_feature (3844)..(3846): n is a, c, g, or t
  misc_feature (3852)..(3852): n is a, c, g, or t
  misc_feature (3857)..(3858): n is a, c, g, or t
  misc_feature (3861)..(3861): n is a, c, g, or t
  misc_feature (3864)..(3864): n is a, c, g, or t
  misc_feature (3867)..(3867): n is a, c, g, or t
  misc_feature (3872)..(3872): n is a, c, g, or t
  misc_feature (3874)..(3875): n is a, c, g, or t
  misc_feature (3877)..(3877): n is a, c, g, or t
  misc_feature (3879)..(3879): n is a, c, g, or t
  misc_feature (3887)..(3887): n is a, c, g, or t
  misc_feature (3894)..(3895): n is a, c, g, or t
  misc_feature (3897)..(3897): n is a, c, g, or t
  misc_feature (3905)..(3905): n is a, c, g, or t
  misc_feature (3916)..(3917): n is a, c, g, or t
  misc_feature (3919)..(3919): n is a, c, g, or t
  misc_feature (3922)..(3922): n is a, c, g, or t
  misc_feature (3925)..(3925): n is a, c, g, or t
ggcgacgctaagacgctttatttaatcccaacgggcgaggtgccaatcactaacatggtgcgtgatacaattgttaaagaggatgacttgccacttaaatttgttggacatacgccaagtttccgttctgaagccggtgcttatggaaaagacaccagaggcttgattcgtcagcatcagtttgaaaaggtggaattggtgcaagtggttaaagcacaggattcgtatcaagcattagaagagctcacggcccatgctgaaggcatcttacaggcgctggagttgccgtatcgtaaagtggtcctatgtgcgggtgatttggggtttagtgctgctaaaacctacgatttagaggtgtggttgcctgggcaagatgcttatcgtgagatttcttcttgttcttgttttgaagattttcaagcaagacgtttacagcttagatggaaaaaccctgagactaataaaagtgaattgctgcatacgcttaacggttcgggtttagcagtcggaagaacgttggtggctgtgttagaaaaccaccaacaagcggatgggagtattaaaataccatctgttttacaaagctacatgggtggcttagacattattaattaataggagttaaatatgagtttattagatttagttatatcaccggcttacgctgaaggtgtagaattagcaggtgcgggatcgttaggtgggctgccatttttggcagttatgtttgtgttgatgtattttttactcatcaggccacagcaaaaacgcgccaaagagcacaaaaatttgttgtctgagctaaaaaaaggcgatgaaatagtaaccaatggtggtgtgattgggaaggtgatgtcggtggatgagtcgtttgcaactttagagattgcaaaggatgtggtggtgaaagtgcaaaaacaaggcattaaccaaaaattaccaaaaggtagtgctaaaatttaaacaataatactcaatttatcatagattatgaatcattactccggtttgaaaaacgcattaattgcttttttcttattacttgcctctttgtacgctctgcccaatatttttggttcagacttagcggtacagatatcgagcgcaggtgatgcagcaattgctcaaaccgatttagggaaagttgaaactattcttaaagacaagggcgtttcttataaatcagccgcattgtccaatcgtagaattttagttcgttttaatgatacggctaatcaacttttagctaaagattttcttaaaacagggttgggccgtaattacgtaacggcactaaatttagcgccatcggttccattgtggttggctgatttaggcggtaaggccatgtcgttaggcttagaccttagaggcggcgtgcatttcttacttgaggttgatatggaagccgtattggcaatgtcaattgataaatcctacaatgagttgcgtactattttgcgtgctgatcgtttgtataagagtattaaaaaagaaggcgacagtattgctattcgatttaaacaggttgatttaaaaaacaaggctgttgatttaattaattcagaactcagtgatttggtgattcttgaaactgataatcaagatgaattgcttatcaatgttggtattagcgacagggcgcaaaaagaagctaagcagagtgcattgaagcaaaatattaccacactcagaaaccgagtgaatgaattaggcgtggctgagccgattattcaacagcaagggaaagagcgtattgtggtgcaattgccaggcgttcaagatacggccagagccaaagagattttaggtgcagtagcaacactagaattcagattggtggatgaaaagaacgacccacaaaccgccattcagtctggaagaacgccgattggttcaaaactttattattttaaagacgggcgcccactgctgttaaaaaccagagtgattgccatgggtgagaacattactggtgctgctagcgggatcgaccaggaaaacagtactcctatggttagcattactttggacaatgctggtggtcgagccatgcttgacacgactaaaaaatacctgcaccaccgtatggcggttatttttattgaaaataaggttgaaacagtcattgaaaatggaaaaacggttaagaagcgcagtaccactaaagatgttattaatgcagcaaccatccaaggtacgttttcaaatcgttttcaaattaccggcatagacagtgcgcgtgaagcgcgtaatctggcattattactcagagcgggttcgctttctgcacccattgaaattattgaggaacgcactattgggccaagcttaggtgcagacaacattaaaaaaggcgtgttgtcagtgattgcagggtttgtactagtgctgttgtttatggcagtgcgttatcgcgtgtttggcatggtagccaatgtggcgcttacgcttaatttggtgatgattgttgccgtgttgtcgcttttgcaggccacattaactttgccaggtattgccggtattgtgctcacagtaggcatggcagtggatgccaacgtgcttatttttgagcgcattaaagaagagctcggcactgatagtaatattcaaaaagcaatctcgagtggttacgataaagccctgcttaccattgctgatgcaaacatcactacgctgattgcatcactggtgttgtttagttttggcacaggccctattaagggatttgccattactttatccattggtattgtcacntcnatgttcaccgcgattgttgtttcaagggcgattgtgaataagatttatggtggtaaaaaactgcaggagttatcgatatgaaggctttgaacgtccctacgattgattttgttggaaaacgcacttatgcgattgttttttctgtggtgttgattgctgtatctatattctcattagcaacgcaaggattgaagtttggtattgattttactggcggcactttgattgaagtgggctataaaaaatcagttgatttgagcaaggtaagagacactttgagtgatgcaaaattcaaaggtgccaatgttcaatatttcggctccaccaatgagattttaattcgtttagagcctcaagcaatttcaagtgcaaaattaagtacaaaaattattcgtttattgggtgatgatgttgatatccgacgagttgaattcgtaggacctaaggttggtgaagagttaaccaatgatggtggtttggcaatgctttatgcgctgatcggtattttgatttacgtggcttttcgctttgaataccgtttttctctgggttcaatatcggcattgatgcatgatgtgatcataaccttgggtattttttcattactgcaaattgagtttgatttaaccgtgcttgccgctattctagcagtgatcggctattcgctcaatgataccattgtggtatttgatcgaattcgtgaaaatttcttatccactcgtcacgttgatcctgaaaaaattattaatggcgcccttaatcaaactctatccagaactatcatgacctcagtaacgaccttgatagtgttgctggcattgttcttcttgggcggtgagattattcacagctttgctttggcattactgattggcgtgattattggtacgtattcttctatctacgtggccagttcaatgattcttaccatgggcatcaccaaagaggatttgctgccatcggaaaaagagaagcaagaaatcgactctcgaccttaacttcgtnttttgtctttttgtggcgttggattgcaaaaaaannnttggnnncanattnnaanatatnnncccncnaatttttnnnaacccnccttnnaanacnaanaaaananncncnaagggttntgttgtnntnagttggtngtaattttttnngnttntanttctattgcttaaatttctcaaacactaagcaagcgttcgttccaccgaaaccgaagctgttagacattacacga

SEQ ID NO: 1592 - DNA, 4000 bp, Escherichia coli
  misc_feature (1)..(6): n is a, c, g, or t
  misc_feature (8)..(22): n is a, c, g, or t
  misc_feature (25)..(40): n is a, c, g, or t
  misc_feature (42)..(55): n is a, c, g, or t
  misc_feature (57)..(73): n is a, c, g, or t
  misc_feature (75)..(115): n is a, c, g, or t
  misc_feature (117)..(182): n is a, c, g, or t
  misc_feature (184)..(213): n is a, c, g, or t
  misc_feature (215)..(238): n is a, c, g, or t
  misc_feature (240)..(248): n is a, c, g, or t
  misc_feature (250)..(255): n is a, c, g, or t
  misc_feature (257)..(453): n is a, c, g, or t
  misc_feature (455)..(455): n is a, c, g, or t
  misc_feature (457)..(512): n is a, c, g, or t
  misc_feature (514)..(551): n is a, c, g, or t
  misc_feature (553)..(589): n is a, c, g, or t
  misc_feature (591)..(593): n is a, c, g, or t
  misc_feature (595)..(599): n is a, c, g, or t
  misc_feature (601)..(615): n is a, c, g, or t
  misc_feature (617)..(617): n is a, c, g, or t
  misc_feature (619)..(671): n is a, c, g, or t
  misc_feature (673)..(708): n is a, c, g, or t
  misc_feature (710)..(711): n is a, c, g, or t
  misc_feature (713)..(730): n is a, c, g, or t
  misc_feature (732)..(732): n is a, c, g, or t
  misc_feature (734)..(804): n is a, c, g, or t
  misc_feature (806)..(818): n is a, c, g, or t
  misc_feature (820)..(859): n is a, c, g, or t
  misc_feature (861)..(904): n is a, c, g, or t
  misc_feature (906)..(947): n is a, c, g, or t
  misc_feature (949)..(1020): n is a, c, g, or t
  misc_feature (1022)..(1061): n is a, c, g, or t
  misc_feature (1063)..(1269): n is a, c, g, or t
  misc_feature (1271)..(1303): n is a, c, g, or t
  misc_feature (1305)..(1549): n is a, c, g, or t
  misc_feature (1551)..(1678): n is a, c, g, or t
  misc_feature (1680)..(1744): n is a, c, g, or t
  misc_feature (1747)..(1753): n is a, c, g, or t
  misc_feature (1755)..(1759): n is a, c, g, or t
  misc_feature (1762)..(1762): n is a, c, g, or t
  misc_feature (1766)..(1767): n is a, c, g, or t
  misc_feature (1787)..(1787): n is a, c, g, or t
  misc_feature (1796)..(1796): n is a, c, g, or t
  misc_feature (1810)..(1810): n is a, c, g, or t
  misc_feature (1813)..(1813): n is a, c, g, or t
  misc_feature (1992)..(1992): n is a, c, g, or t
  misc_feature (2488)..(2488): n is a, c, g, or t
  misc_feature (2695)..(2695): n is a, c, g, or t
  misc_feature (2794)..(2794): n is a, c, g, or t
  misc_feature (2831)..(2831): n is a, c, g, or t
  misc_feature (2894)..(2894): n is a, c, g, or t
  misc_feature (2896)..(2896): n is a, c, g, or t
  misc_feature (2900)..(2902): n is a, c, g, or t
  misc_feature (2906)..(2908): n is a, c, g, or t
  misc_feature (2911)..(2912): n is a, c, g, or t
  misc_feature (2916)..(2917): n is a, c, g, or t
  misc_feature (2922)..(2922): n is a, c, g, or t
  misc_feature (2926)..(2928): n is a, c, g, or t
  misc_feature (2931)..(2932): n is a, c, g, or t
  misc_feature (2936)..(2938): n is a, c, g, or t
  misc_feature (2940)..(2942): n is a, c, g, or t
  misc_feature (2948)..(2948): n is a, c, g, or t
  misc_feature (2952)..(2953): n is a, c, g, or t
  misc_feature (2956)..(2957): n is a, c, g, or t
  misc_feature (2959)..(2961): n is a, c, g, or t
  misc_feature (2963)..(2966): n is a, c, g, or t
  misc_feature (2970)..(2970): n is a, c, g, or t
  misc_feature (2972)..(2974): n is a, c, g, or t
  misc_feature (2977)..(2977): n is a, c, g, or t
  misc_feature (2980)..(2980): n is a, c, g, or t
  misc_feature (2982)..(2982): n is a, c, g, or t
  misc_feature (2984)..(2987): n is a, c, g, or t
  misc_feature (2990)..(2992): n is a, c, g, or t
  misc_feature (2994)..(2994): n is a, c, g, or t
  misc_feature (2996)..(2997): n is a, c, g, or t
  misc_feature (3000)..(3005): n is a, c, g, or t
  misc_feature (3008)..(3009): n is a, c, g, or t
  misc_feature (3012)..(3012): n is a, c, g, or t
  misc_feature (3016)..(3017): n is a, c, g, or t
  misc_feature (3020)..(3021): n is a, c, g, or t
  misc_feature (3025)..(3026): n is a, c, g, or t
  misc_feature (3033)..(3033): n is a, c, g, or t
  misc_feature (3035)..(3035): n is a, c, g, or t
  misc_feature (3037)..(3037): n is a, c, g, or t
  misc_feature (3039)..(3041): n is a, c, g, or t
  misc_feature (3044)..(3048): n is a, c, g, or t
  misc_feature (3052)..(3052): n is a, c, g, or t
  misc_feature (3054)..(3054): n is a, c, g, or t
  misc_feature (3060)..(3060): n is a, c, g, or t
  misc_feature (3065)..(3065): n is a, c, g, or t
  misc_feature (3067)..(3069): n is a, c, g, or t
  misc_feature (3071)..(3071): n is a, c, g, or t
  misc_feature (3078)..(3078): n is a, c, g, or t
  misc_feature (3081)..(3081): n is a, c, g, or t
  misc_feature (3085)..(3087): n is a, c, g, or t
  misc_feature (3090)..(3090): n is a, c, g, or t
  misc_feature (3095)..(3097): n is a, c, g, or t
  misc_feature (3099)..(3099): n is a, c, g, or t
  misc_feature (3101)..(3101): n is a, c, g, or t
  misc_feature (3104)..(3105): n is a, c, g, or t
  misc_feature (3107)..(3107): n is a, c, g, or t
  misc_feature (3109)..(3109): n is a, c, g, or t
  misc_feature (3111)..(3112): n is a, c, g, or t
  misc_feature (3116)..(3116): n is a, c, g, or t
  misc_feature (3118)..(3118): n is a, c, g, or t
  misc_feature (3120)..(3121): n is a, c, g, or t
  misc_feature (3124)..(3125): n is a, c, g, or t
  misc_feature (3127)..(3129): n is a, c, g, or t
  misc_feature (3132)..(3134): n is a, c, g, or t
  misc_feature (3136)..(3136): n is a, c, g, or t
  misc_feature (3139)..(3141): n is a, c, g, or t
  misc_feature (3143)..(3143): n is a, c, g, or t
  misc_feature (3145)..(3145): n is a, c, g, or t
  misc_feature (3148)..(3151): n is a, c, g, or t
  misc_feature (3153)..(3153): n is a, c, g, or t
  misc_feature (3155)..(3155): n is a, c, g, or t
  misc_feature (3160)..(3161): n is a, c, g, or t
  misc_feature (3165)..(3166): n is a, c, g, or t
  misc_feature (3171)..(3171): n is a, c, g, or t
  misc_feature (3176)..(3176): n is a, c, g, or t
  misc_feature (3179)..(3180): n is a, c, g, or t
  misc_feature (3184)..(3184): n is a, c, g, or t
  misc_feature (3186)..(3186): n is a, c, g, or t
  misc_feature (3188)..(3188): n is a, c, g, or t
  misc_feature (3192)..(3196): n is a, c, g, or t
  misc_feature (3202)..(3202): n is a, c, g, or t
  misc_feature (3208)..(3209): n is a, c, g, or t
  misc_feature (3211)..(3213): n is a, c, g, or t
  misc_feature (3215)..(3217): n is a, c, g, or t
  misc_feature (3219)..(3221): n is a, c, g, or t
  misc_feature (3224)..(3226): n is a, c, g, or t
  misc_feature (3228)..(3228): n is a, c, g, or t
  misc_feature (3233)..(3235): n is a, c, g, or t
  misc_feature (3237)..(3237): n is a, c, g, or t
  misc_feature (3239)..(3239): n is a, c, g, or t
  misc_feature (3243)..(3243): n is a, c, g, or t
  misc_feature (3245)..(3248): n is a, c, g, or t
  misc_feature (3250)..(3251): n is a, c, g, or t
  misc_feature (3253)..(3253): n is a, c, g, or t
  misc_feature (3255)..(3258): n is a, c, g, or t
  misc_feature (3262)..(3262): n is a, c, g, or t
  misc_feature (3264)..(3264): n is a, c, g, or t
  misc_feature (3266)..(3266): n is a, c, g, or t
  misc_feature (3269)..(3270): n is a, c, g, or t
  misc_feature (3273)..(3273): n is a, c, g, or t
  misc_feature (3277)..(3277): n is a, c, g, or t
  misc_feature (3281)..(3281): n is a, c, g, or t
  misc_feature (3284)..(3286): n is a, c, g, or t
  misc_feature (3288)..(3289): n is a, c, g, or t
  misc_feature (3293)..(3293): n is a, c, g, or t
  misc_feature (3295)..(3295): n is a, c, g, or t
  misc_feature (3298)..(3298): n is a, c, g, or t
  misc_feature (3301)..(3301): n is a, c, g, or t
  misc_feature (3303)..(3303): n is a, c, g, or t
  misc_feature (3307)..(3307): n is a, c, g, or t
  misc_feature (3310)..(3311): n is a, c, g, or t
  misc_feature (3313)..(3313): n is a, c, g, or t
  misc_feature (3315)..(3315): n is a, c, g, or t
  misc_feature (3317)..(3317): n is a, c, g, or t
  misc_feature (3320)..(3321): n is a, c, g, or t
  misc_feature (3325)..(3325): n is a, c, g, or t
  misc_feature (3327)..(3327): n is a, c, g, or t
  misc_feature (3332)..(3337): n is a, c, g, or t
  misc_feature (3340)..(3340): n is a, c, g, or t
  misc_feature (3342)..(3342): n is a, c, g, or t
  misc_feature (3344)..(3344): n is a, c, g, or t
  misc_feature (3346)..(3346): n is a, c, g, or t
  misc_feature (3350)..(3350): n is a, c, g, or t
  misc_feature (3352)..(3355): n is a, c, g, or t
  misc_feature (3357)..(3358): n is a, c, g, or t
  misc_feature (3360)..(3362): n is a, c, g, or t
  misc_feature (3368)..(3370): n is a, c, g, or t
  misc_feature (3379)..(3379): n is a, c, g, or t
  misc_feature (3383)..(3385): n is a, c, g, or t
  misc_feature (3387)..(3389): n is a, c, g, or t
  misc_feature (3391)..(3395): n is a, c, g, or t
  misc_feature (3399)..(3399): n is a, c, g, or t
  misc_feature (3401)..(3401): n is a, c, g, or t
  misc_feature (3404)..(3405): n is a, c, g, or t
  misc_feature (3407)..(3407): n is a, c, g, or t
  misc_feature (3409)..(3410): n is a, c, g, or t
  misc_feature (3414)..(3416): n is a, c, g, or t
  misc_feature (3418)..(3418): n is a, c, g, or t
  misc_feature (3421)..(3421): n is a, c, g, or t
  misc_feature (3424)..(3424): n is a, c, g, or t
  misc_feature (3426)..(3429): n is a, c, g, or t
  misc_feature (3433)..(3433): n is a, c, g, or t
  misc_feature (3436)..(3439): n is a, c, g, or t
  misc_feature (3441)..(3442): n is a, c, g, or t
  misc_feature (3444)..(3446): n is a, c, g, or t
  misc_feature (3450)..(3450): n is a, c, g, or t
  misc_feature (3452)..(3452): n is a, c, g, or t
  misc_feature (3454)..(3454): n is a, c, g, or t
  misc_feature (3458)..(3460): n is a, c, g, or t
  misc_feature (3462)..(3466): n is a, c, g, or t
  misc_feature (3468)..(3468): n is a, c, g, or t
  misc_feature (3471)..(3471): n is a, c, g, or t
  misc_feature (3473)..(3476): n is a, c, g, or t
  misc_feature (3478)..(3479): n is a, c, g, or t
  misc_feature (3481)..(3483): n is a, c, g, or t
  misc_feature (3486)..(3489): n is a, c, g, or t
  misc_feature (3491)..(3491): n is a, c, g, or t
  misc_feature (3494)..(3494): n is a, c, g, or t
  misc_feature (3497)..(3498): n is a, c, g, or t
  misc_feature (3501)..(3508): n is a, c, g, or t
  misc_feature (3511)..(3511): n is a, c, g, or t
  misc_feature (3513)..(3515): n is a, c, g, or t
  misc_feature (3517)..(3517): n is a, c, g, or t
  misc_feature (3520)..(3522): n is a, c, g, or t
  misc_feature (3525)..(3527): n is a, c, g, or t
  misc_feature (3530)..(3530): n is a, c, g, or t
  misc_feature (3532)..(3533): n is a, c, g, or t
  misc_feature (3536)..(3537): n is a, c, g, or t
  misc_feature (3539)..(3539): n is a, c, g, or t
  misc_feature (3545)..(3545): n is a, c, g, or t
  misc_feature (3547)..(3547): n is a, c, g, or t
  misc_feature (3549)..(3549): n is a, c, g, or t
  misc_feature (3552)..(3553): n is a, c, g, or t
  misc_feature (3556)..(3556): n is a, c, g, or t
  misc_feature (3562)..(3562): n is a, c, g, or t
  misc_feature (3566)..(3566): n is a, c, g, or t
  misc_feature (3569)..(3569): n is a, c, g, or t
  misc_feature (3571)..(3572): n is a, c, g, or t
  misc_feature (3574)..(3574): n is a, c, g, or t
  misc_feature (3576)..(3577): n is a, c, g, or t
  misc_feature (3580)..(3581): n is a, c, g, or t
  misc_feature (3585)..(3586): n is a, c, g, or t
  misc_feature (3589)..(3589): n is a, c, g, or t
  misc_feature (3591)..(3592): n is a, c, g, or t
  misc_feature (3595)..(3596): n is a, c, g, or t
  misc_feature (3598)..(3598): n is a, c, g, or t
  misc_feature (3605)..(3605): n is a, c, g, or t
  misc_feature (3608)..(3612): n is a, c, g, or t
  misc_feature (3614)..(3617): n is a, c, g, or t
  misc_feature (3620)..(3620): n is a, c, g, or t
  misc_feature (3622)..(3622): n is a, c, g, or t
  misc_feature (3624)..(3624): n is a, c, g, or t
  misc_feature (3626)..(3626): n is a, c, g, or t
  misc_feature (3628)..(3628): n is a, c, g, or t
  misc_feature (3631)..(3632): n is a, c, g, or t
  misc_feature (3634)..(3634): n is a, c, g, or t
  misc_feature (3640)..(3641): n is a, c, g, or t
  misc_feature (3644)..(3644): n is a, c, g, or t
  misc_feature (3647)..(3647): n is a, c, g, or t
  misc_feature (3649)..(3649): n is a, c, g, or t
  misc_feature (3651)..(3652): n is a, c, g, or t
  misc_feature (3656)..(3656): n is a, c, g, or t
  misc_feature (3658)..(3658): n is a, c, g, or t
  misc_feature (3661)..(3664): n is a, c, g, or t
  misc_feature (3667)..(3668): n is a, c, g, or t
  misc_feature (3670)..(3674): n is a, c, g, or t
  misc_feature (3676)..(3677): n is a, c, g, or t
  misc_feature (3682)..(3683): n is a, c, g, or t
  misc_feature (3685)..(3687): n is a, c, g, or t
  misc_feature (3690)..(3692): n is a, c, g, or t
  misc_feature (3694)..(3696): n is a, c, g, or t
  misc_feature (3698)..(3698): n is a, c, g, or t
  misc_feature (3701)..(3701): n is a, c, g, or t
  misc_feature (3703)..(3704): n is a, c, g, or t
  misc_feature (3707)..(3707): n is a, c, g, or t
  misc_feature (3712)..(3712): n is a, c, g, or t
  misc_feature (3715)..(3718): n is a, c, g, or t
  misc_feature (3720)..(3720): n is a, c, g, or t
  misc_feature (3724)..(3726): n is a, c, g, or t
  misc_feature (3728)..(3728): n is a, c, g, or t
  misc_feature (3730)..(3731): n is a, c, g, or t
  misc_feature (3737)..(3737): n is a, c, g, or t
  misc_feature (3739)..(3742): n is a, c, g, or t
  misc_feature (3744)..(3744): n is a, c, g, or t
  misc_feature (3750)..(3751): n is a, c, g, or t
  misc_feature (3757)..(3758): n is a, c, g, or t
  misc_feature (3760)..(3760): n is a, c, g, or t
  misc_feature (3762)..(3762): n is a, c, g, or t
  misc_feature (3766)..(3766): n is a, c, g, or t
  misc_feature (3769)..(3770): n is a, c, g, or t
  misc_feature (3772)..(3778): n is a, c, g, or t
  misc_feature (3780)..(3782): n is a, c, g, or t
  misc_feature (3785)..(3787): n is a, c, g, or t
  misc_feature (3790)..(3791): n is a, c, g, or t
  misc_feature (3794)..(3794): n is a, c, g, or t
  misc_feature (3796)..(3797): n is a, c, g, or t
  misc_feature (3801)..(3803): n is a, c, g, or t
  misc_feature (3806)..(3806): n is a, c, g, or t
  misc_feature (3811)..(3811): n is a, c, g, or t
  misc_feature (3815)..(3815): n is a, c, g, or t
  misc_feature (3818)..(3818): n is a, c, g, or t
  misc_feature (3820)..(3822): n is a, c, g, or t
  misc_feature (3825)..(3826): n is a, c, g, or t
  misc_feature (3829)..(3830): n is a, c, g, or t
  misc_feature (3833)..(3833): n is a, c, g, or t
  misc_feature (3835)..(3839): n is a, c, g, or t
  misc_feature (3841)..(3846): n is a, c, g, or t
  misc_feature (3848)..(3849): n is a, c, g, or t
  misc_feature (3853)..(3853): n is a, c, g, or t
  misc_feature (3855)..(3856): n is a, c, g, or t
  misc_feature (3858)..(3858): n is a, c, g, or t
  misc_feature (3863)..(3863): n is a, c, g, or t
  misc_feature (3869)..(3869): n is a, c, g, or t
  misc_feature (3872)..(3872): n is a, c, g, or t
  misc_feature (3877)..(3879): n is a, c, g, or t
  misc_feature (3883)..(3885): n is a, c, g, or t
  misc_feature (3887)..(3887): n is a, c, g, or t
  misc_feature (3890)..(3890): n is a, c, g, or t
  misc_feature (3893)..(3894): n is a, c, g, or t
  misc_feature (3896)..(3897): n is a, c, g, or t
  misc_feature (3901)..(3901): n is a, c, g, or t
  misc_feature (3909)..(3909): n is a, c, g, or t
  misc_feature (3911)..(3911): n is a, c, g, or t
  misc_feature (3913)..(3913): n is a, c, g, or t
  misc_feature (3915)..(3915): n is a, c, g, or t
  misc_feature (3917)..(3917): n is a, c, g, or t
  misc_feature (3919)..(3920): n is a, c, g, or t
  misc_feature (3923)..(3925): n is a, c, g, or t
  misc_feature (3927)..(3928): n is a, c, g, or t
  misc_feature (3930)..(3931): n is a, c, g, or t
  misc_feature (3934)..(3934): n is a, c, g, or t
  misc_feature (3937)..(3938): n is a, c, g, or t
  misc_feature (3940)..(3940): n is a, c, g, or t
  misc_feature (3944)..(3949): n is a, c, g, or t
  misc_feature (3951)..(3951): n is a, c, g, or t
  misc_feature (3953)..(3953): n is a, c, g, or t
  misc_feature (3957)..(3957): n is a, c, g, or t
  misc_feature (3968)..(3969): n is a, c, g, or t
  misc_feature (3972)..(3974): n is a, c, g, or t
  misc_feature (3979)..(3980): n is a, c, g, or t
  misc_feature (3988)..(3988): n is a, c, g, or t
  misc_feature (3990)..(3990): n is a, c, g, or t
  misc_feature (3992)..(3992): n is a, c, g, or t
  misc_feature (3995)..(3997): n is a, c, g, or t
  misc_feature (3999)..(3999): n is a, c, g, or t
nnnnnngnnnnnnnnnnnnnnngcnnnnnnnnnnnnnnnncnnnnnnnnnnnnnncnnnnnnnnnnnnnnnnngnnnnnnnnnnnnnnnnnnnnnnnnnnnnnnnnnnnnnnnnncnnnnnnnnnnnnnnnnnnnnnnnnnnnnnnnnnnnnnnnnnnnnnnnnnnnnnnnnnnnnnnnnnngnnnnnnnnnnnnnnnnnnnnnnnnnnnnnncnnnnnnnnnnnnnnnnnnnnnnnngnnnnnnnnncnnnnnngnnnnnnnnnnnnnnnnnnnnnnnnnnnnnnnnnnnnnnnnnnnnnnnnnnnnnnnnnnnnnnnnnnnnnnnnnnnnnnnnnnnnnnnnnnnnnnnnnnnnnnnnnnnnnnnnnnnnnnnnnnnnnnnnnnnnnnnnnnnnnnnnnnnnnnnnnnnnnnnnnnnnnnnnnnnnnnnnnnnnnnnnnnnnnnnnnnnnngncnnnnnnnnnnnnnnnnnnnnnnnnnnnnnnnnnnnnnnnnnnnnnnnnnnnnnnnncnnnnnnnnnnnnnnnnnnnnnnnnnnnnnnnnnnnnnncnnnnnnnnnnnnnnnnnnnnnnnnnnnnnnnnnnnnngnnncnnnnncnnnnnnnnnnnnnnncncnnnnnnnnnnnnnnnnnnnnnnnnnnnnnnnnnnnnnnnnnnnnnnnnnnnnngnnnnnnnnnnnnnnnnnnnnnnnnnnnnnnnnnnnngnncnnnnnnnnnnnnnnnnnngncnnnnnnnnnnnnnnnnnnnnnnnnnnnnnnnnnnnnnnnnnnnnnnnnnnnnnnnnnnnnnnnnnnnnnnncnnnnnnnnnnnnncnnnnnnnnnnnnnnnnnnnnnnnnnnnnnnnnnnnnnnnngnnnnnnnnnnnnnnnnnnnnnnnnnnnnnnnnnnnnnnnnnnnngnnnnnnnnnnnnnnnnnnnnnnnnnnnnnnnnnnnnnnnnnncnnnnnnnnnnnnnnnnnnnnnnnnnnnnnnnnnnnnnnnnnnnnnnnnnnnnnnnnnnnnnnnnnnnnnnnncnnnnnnnnnnnnnnnnnnnnnnnnnnnnnnnnnnnnnnnngnnnnnnnnnnnnnnnnnnnnnnnnnnnnnnnnnnnnnnnnnnnnnnnnnnnnnnnnnnnnnnnnnnnnnnnnnnnnnnnnnnnnnnnnnnnnnnnnnnnnnnnnnnnnnnnnnnnnnnnnnnnnnnnnnnnnnnnnnnnnnnnnnnnnnnnnnnnnnnnnnnnnnnnnnnnnnnnnnnnnnnnnnnnnnnnnnnnnnnnnnnnnnnncnnnnnnnnnnnnnnnnnnnnnnnnnnnnnnnnngnnnnnnnnnnnnnnnnnnnnnnnnnnnnnnnnnnnnnnnnnnnnnnnnnnnnnnnnnnnnnnnnnnnnnnnnnnnnnnnnnnnnnnnnnnnnnnnnnnnnnnnnnnnnnnnnnnnnnnnnnnnnnnnnnnnnnnnnnnnnnnnnnnnnnnnnnnnnnnnnnnnnnnnnnnnnnnnnnnnnnnnnnnnnnnnnnnnnnnnnnnnnnnnnnnnnnnnnnnnnnnnnnnnnnnnnnnnnnnnnnnnnncnnnnnnnnnnnnnnnnnnnnnnnnnnnnnnnnnnnnnnnnnnnnnnnnnnnnnnnnnnnnnnnnnnnnnnnnnnnnnnnnnnnnnnnnnnnnnnnnnnnnnnnnnnnnnnnnnnnnnnnnnnnnnnnncnnnnnnnnnnnnnnnnnnnnnnnnnnnnnnnnnnnnnnnnnnnnnnnnnnnnnnnnnnnnnnnnnccnnnnnnntnnnnnggnaaanncacgggaccgatcatacgcntcctgtttnacggctaagccgcnaangcaccaccgacgggtgctaatgtggctatggcggttagtggcggcgggctgaacacgtcgcccttgcgagcttcgtgcgtacacccccgctctatcaacgtcgtcgactacgacggccataagatgcctcgtcttgagggcggtttccggcttagatgctttcagccgttatccgcatngcgcgtggctgctgggcaatgccttgccagacaacccatacactagaggcgccgatcccccgttcctctcgtacttaagggaccttcccctcaggcatcaaagcgcttccaccaaaaagcaacaaacctgtctcacgacggtctgaacccagctcacgatcccttttaatgggcgaacaaccccacccttggcagctcatgcaccaccaggataggaagagccgacgtcgaagtagcaagcctccgggtcgataggaactctagccggagacgactcagttatccccggggtaacttttctgacatccatggcccgcataaatcaggctcatgggttcgctaggcccctctttcgagtcgtggactctcgttgggcaagtccacgtcaggctagcttttccccttacagttcacggtggatttctgacccacctaagctaacctttgggcgcccttgttatctttttgagggcgtggcgccccacccaaactgccnacctaccgttgttcaccttgcggtgttagccgtacgaacccggaagggcggtgtttcatcggtgcctcggaaccgaactagcgtccggccctggtaacggctcccgcctacgctacacatctagaatcatacggcagcggcagactgcagtaaagctccacggggtcttcgctttcaggtggaaggtactggactgtgcgccagtangtcagtttcaccggcctccacgcggggacagtagagctctcgttgggccttcatgcaagtcgccaattaagcgacaaggtattacgctcactgctgttncttcgcgtgacctgattcacgagggattcaggcgggncacgatttctcgtgacctcctcacgtcgccgtgagggtcggactttatcttcaccgctggcgngnggtnnncggnnnaanntctnngaggnttcnnnccnnttcnnngnnnggcctncccnncgnntnnncnnnncctngnnnttnttncngnnnnggnnncncnnggnnnnnnggnnttncccnnatnnggcnnatttttntnangnnncgnnnnnggancnttaagngggtnannntnacccccnccntttnnnggnccttnnncngnttnnancngnntttnanannccnncnnnggnnngnctnnngngnccnnnnananccttnngatnnggcgnccacntanntttngntnaaannnnnggggcncccttnncnnngnnncnnnccnnncncgcgnnngncncccntnnnncnnangnnnngggncnanttnnccnaatncccncgnnngnntttncnccnacncncctnggnntncncnccnngggncncctgnnnnnnttntngntncggncnnnngnntnnnccccannncccttttcncggnnncnnngnnnnngcgnanggnntngnncccnnncnccngcntnnnncccnttnnnncnntnnnggcncncngggnnntnnnnngnttnannnncnngnnnagnnnncnccnccnnccnnnnnnnntcngnnntnggnnnggnnnccncnnggnncnggaatntnanccnnctncccttncgcnttntnngntnnggnnaacnnttngnnccnncnaaccctnggnnnnngnnnnttncngngnanccnngncccctnnggnggngngnnttcncnccnnnnttnncnnnnncnnctccnngnnnccnnntnnnancgngnnccnccggnccnnnngncccnnntncnncccgcncnnnncncccccnnacaagnncncntttnggnncnnnnnnntnnnggnnncgnnctnanncccnnnccnttttngggnccnannntcnnggnnggngnnnnntnnnnnnanntttnanngntggcngcttcnaancccannncccnnntntcnganncnncggnctcccttngntntncncnntgnnncnncnnttnggnncnttannnnnngntngggnggtttcccttnnggnnnccaannttaccccngncnccnnncnc

SEQ ID NO: 1593 - DNA, 4000 bp, Escherichia coli
  misc_feature (1992)..(1992): n is a, c, g, or t
  misc_feature (2993)..(2993): n is a, c, g, or t
gattccacggctggcggtttttactaaatactgccaagccatttcctcacttctggctgcatcttcccagttgcctttaccagcagcttcttttgcactggcacgcaacggataatgcagtttgaactgctctacagcatcataaaactgcattgctgcatctacatggagtattttcctgtctgtcaactcttcaatgagttcatcagggtccatgtcatccagttcctctatttcacccatcactttctgtacacctactgcagatccaactggatctttggcattgcaaacattcagtgatgaatccactaacttaggacagacatagttaatgacaccggcaataactccgattgtgccattgttgactttcacctttttctcataatcacttttcgcgtcagcccaagcagactgcgaaaagcctgtcagcaaaaagactgagaatgctgtcactaacattccttttattaatttgtacatagtactcctctattaattttggtcgttatccgacacaagtattgaacaaaagacaactcaccctgctcaccggaagacttttcagcagttccggaagcaaggttggtggtttagggtttgaccagaaaataaccggtcatctccagatgcaatgctgagcagaactcagtacagtagaaggggtaaacgccttctttgtctgcaacaaatttgaaagttgcagtttcacctggctcaatactgccgtgaacgttgtaattatccactgcaaaaccatgaacctgatcctgcgcacgttccacatttgtgatgtgccatgtgatctcgtcacccactttaacctcaattacttccgggctgaagtgactgcggattgcagtagcgtaaatggtgactttgttgccgtttcgttctacacgctcattaccggcacgcacataatgttcaaagtcctttttgctgaagcgaatcaacggcttcaatttgtcagctttgatcatttgcacataatgtggttctcccagaggcagaggcatatcataaagcaactgcattggacggcccgctgtgatatcaatcaactgatggttctgcggatgcaaaggtcctacaggtgaaaaacggtcaatcgctaatttatttaatgcaatcagatactttccgtcaggatccacagtatcaccttctgcggtcaccaaatgaccgatattgtagtgaattggaattttattgagcactttacctttcaaataatcccaacgtacaaccatcgaatcgacatagagagaggtgtaaaccacacctttttctttgtcatactgagtatgcaatggtcccaaaccaacgtttacctgagtatgcattgattttttcatatccagaattggaattccccatgggtctttaccggcaaaatctttgttatccaccaatgccttgattttcttaaaatcataaacagttgtgtgagtatcaagttttccggaaacaatgatgtaacgtccgtcaggactgacatctgcaccgtgagggctttttgcttcaggcaggaggaagagagcattcgctgctaccatgtctttcatggaaagtactgcatgtccattaaatttagtgaacttgccggccttgaaaagtttctccgcagctttccagtttacgatgtgcatgtagtcagtgtctttagacgacataccagcttcgtttgccaggcggtgtttccacttagtgttgcctttaccaaaaccaccgatatagagttcagtgtttacggagttcgtgaaagaccaaccttcacttataccttttcctacatcactgatgtcctgcatatatggaggcatttcaacagtaaatgatttttcaggcagtaaccgaccctgcttactggcatacttgagaatgtttttcttatgttcttttaaaccacctgcaccaagtttctcagacacagcagccaaaaatgcggcttctccgtgaaattcttgattcatcaaggctttcagncctttggtaggaacaccctttttctttaagcgccgtagtgctttactggtaagagacatcaaagcatttctgtcaaacttccaatatgtaactccaccacgatacttttgctggtattcgtctagggaaacatattcttttccgtaaggagctggatattgtgctgcttccaaaacataatcagtgtttggagttacaaaagttccgccgtgttctgatttgaaaatcggatttacgactatctgctttgtttcaaaagttgacaaatcgatcacggcaatccgtggatttgctttgtcattgatgaaaaggtactttccatcgtaatcaccgttcgtttctgaaagagcaggatggtgagtatctccccagcggatttctcttccatcaatctttccttcttccaggattttcatactttctacttcaccataaccgtaaccctgccacggttcaggtgtaaaaaccgcgatatacttgagaatgcgcatcgaaggcactccatagacaatcacttgtcctgactgtcctccggaagaaaaaacaagatattcatctttctttcctgaaggattaaaagtttttgctgcggccagcaggtctttttcgcttaatccgcgttgcttcattacttcctgcagcgattgcgcataagctgctcccgctactgtaagagccacactcataacaactaccattcgcatgaccttcactagaacactcaacatcgttctactcctacatctagattcaacatttatataagcctcagaagaggccgagactccttttacttctatgacaagagcaccgaagaaggcaggaaaaaacctcgatattcagaatctcaaatatatctaaatgtgactatacgcaaatttacggagttaaatgccgaagaaggttctggcaaaatttccggagggaagaattaggaagaaatggacttttttggtgcagactaatcctgcgctgcataccactgataaacttgatgaagnccttccttcaaggggatacgtggcttccatcccaatgaattaattttggaaatatcaagaattttttggggagtaccgtttggatatgaactgtcaaagtcaagacgaccactaaagccgacaactttctgaatagtttccgctaatttccggatcgtctggtcttcaccacagccgacattgactattgctgaatcatcgtaactttccatcaaaaacaatagtgcctcagcaagatcatctgtatgtagaaattcacggcgtgctgtgccgttaccccaaatgttgactgattctgcatttgagagttttgcttcatgaaacttgcggatcagggcaggcagtacatgtgagttttccggatgaaaattgtcgtttattccatagagatttgtaggcattgcagaaataaaatttgttccgtactgttgattgtaactttgacaggttttgatacctgcaattttagccaacgcatatgcgtcattggttgactcaagttcgccggtcagcaaatattcctctttaattggctgagggcagagtttcggatatatacaggaactgccgagaaacattaatttttcaactccgtgactccatgcttcgtggatgatattcgtttgcactagtaaattctcacgcataaaatcagcagggtatgtgctgtttgcgtgtattcctccaacttttgctgccgccagaaaaacatattccggtttagtctcagcaaaaaatttctgcacagcaaccgcatccatcaattccagctctgcatgtgtacatgtaattaaattttcaaatcctttttgttcaagtgctctgatgattgcagaaccgaccaaaccgcgatgccctgcgacataaatacgggaatttattttcattacttatgctttttttcttgggggatttttatttatttttgcgaatccagacaaccaacgctgcaaaatattattcagtttcaataaatactatgtagctatcatacatttgattttcta

SEQ ID NO: 1594 - DNA, 4000 bp, Escherichia coli
  misc_feature (1040)..(1040): n is a, c, g, or t
  misc_feature (1446)..(1446): n is a, c, g, or t
  misc_feature (2897)..(2897): n is a, c, g, or t
  misc_feature (3263)..(3263): n is a, c, g, or t
  misc_feature (3777)..(3777): n is a, c, g, or t
agagcgtttgccagatggctgattgtctgtcgcttcattgcgcggcaagtgccgatacatttcatattttgaatgctgaccggttggcgatgatgaagccggatgcctatgtcattaatacggcgcgtggtgatgttgttgatgaagctgctttggcggtggcgctgtcggccagacgcattggcggggctgggctggatgtgtttcaaggtgagccggtcattgatccggcattactagctgcgccaaataccgttttattgccgcatctggggtcggcaacaatcgaaacgcgaacggcgatggggctaaaggttgtcgaaaatgcgcgtgccttttttgctggccagcctttgattgaccctgtttgaggtggatcgaatgaattttgacgcttcaagcgaagctttggttcgcaaaagctttgctgcggcgcttgccgctggacagcctgatcgcatcacccgatcggcctatatgtcgattaaccggcaaccaacggcggttattgcgcttggcaaggcggctggcgcgatggcaatggcggttcgcaacggtggctatgatggttcgggtcttgtcatcaccaccgatgaaaatcaccggcagattgatggttttgaatgttttgcctgtgcgcatccagttcccgatgagcgcggtctaaccgcggcgattgcggttgaaaatctggtcaaatcccttggtcagaccgatcatttgctgttgctgatcagtggtggcggctcggccttgttgccagcaccatcaagcggcatcagccttgccgaaaaaatcgcgctgaatgatgcattgctggcaagcggtcttgatattcacgcaatgaatgtggtccggcggttattttcacggctaaaaggcggccggttggcgcgtttggcagcacccgccaaggtaacgcaatttctgttatcggatgtgccgggtgatttgccggaatcaatcgccagcggccctgctgttgccgatccggtgccgcttgatgatgcgtttgcgctgattcaaaaacatggtcttgntcggctggattttgtgatgccgcatttgcaggcaatccgaaatgggacggcagacgggccagtgcgatcgggtgatccggtttttgatagggtgcaaaccaagattctggcaagcaatgcgcaatgccgtgatgcggcagcagactatatccgccaagccatgcccgatatgcattttctcgatgcgccagcccttgacggcgaagcaagccagatggcggtgcatctggcggcgcaggttataagccagcgccagcatcatgctggtaagccctatgcattggtgactggcggcgaaacaacggtgacgcttgatatgaatgatcccggcaaaggggggcgatcgcaagaattggcgcttgcctttgcgtcggcaatgacagctgccggatcaaatgcgccaaancaatgggtgattctggctggcggcaccgatggccgcgatgggccaaccgatgcggctggcggtattattgccgcgtcacaagattttgatcatgcggcggctcgggccgcgctgttatcacataacagctatgattatctcaaagcgcatgatcagctattgatggttggggcaaccggcaccaaccttgccgatctggttttgattgttgcgcaagattgaccatctagccaatggcgttttgccgcccgacatagcctgcataaaaaagggccggacaagacataaagtcctgaccgaccctgatttgcggataggattggcaaaccaaacaaactcccccaagctggctttgttcgccgcggcctatatcgcaaagctctataaatcgtcgtctaaattcgtgcagatctcctgctgttgatgcgtctgacctgcatctttgttgtgccttttttgcgggacttcaggcaaggaaaaaaaagcaaatttgaaaattgtaaaatatttacattttctatttacaggttatgctgaaaccccaggtaaagctgagccagcggccaagtggaggaaatgacgcgatgcaggaaaaaattcttgtcgggcataaattgcggcggtttcgcaaatctattggcctatcgcaaacagcgatggcggaaacgctggagatcagcccctcttatttaaatcttttagagcataatcagcgccctttgaccgttggattgcttcttcgccttggcaatagctttgatattgatctcaaagattttgccgaagatgacgcggctagcctttcaacgggcatgtctgaaatttttgccgatccattgctggcagatgagcaggtgccacgccgcgaaattcaggacatgatcaccgctgcgccaggtgcggcgcgcggcttggttacgctgtttcaggcctatcgcaaagtgcgtgatgaattagaggcgaccgcgggtgatggcggcattcggcagatgagcaaccctgttgaaaaggtacgcgctacattgcagcaggcgaataattactttccccttcttgaagaagcggcagatgaattgcgccgtacggccaaaattgaatcgattagtgattttggcctgacgggcgataatacgcttgccagccttgccgcccatgtgaaagacacgcttggccttcgcgttaggatcatgccggtagaggtgatgcaaaaccagcttcggcgctatgatctacatcgccgcgagattttgctaagtgaggcgttgcgtcgcccgcaacgacagtttcatcttttgattcaaatcgcgcttcttagccagcaagcggccttggacaaaatctgccaagatcaggcggttcaggatgcgcaggcgcaatccttgttgaaaatcacccttgccggttattttgccggtgccgttatgatgccctattcggcctttctcgattcngcaaaaagccttcgctatgatcttgacctattggggcgccggtttggttgcagctttgaacaggtctgtcaccgcctcaccacattgaatgcgccgaatgcgcgtggtatcccgtttttcttcattcgggttgatgatgctgggaatatttccaaacggcttgccgcggccggcatgcaatttgccacacatggtggcacctgcccgaaatggacgatgcacaaagcctttcggacaccggaaaagattttggcacaagcggccgaattaccaaatgggcagaaatatttcatgcttgcccgcaccgcgccaccattatggtcgccaaccttggcgcaatcgccggaatttgccgtcactcttggntgtgaattgcatcatgcccgcgatatgatttatgcggatcagattgatatttccaaatcggcgcggcttgaccagattggtgttggctgctcagtttgcgagcgaatggattgcacccaaagagcgcatccgcccattggccatgaattgcgctttgatgggccgatgcgccggatcggtctttatgaccttggtgtcaaaggcacaaacaataaataacctgcaaatatcttttcttccgaaatatcattggttttgcgaaccgatgcgtctgttcatgccgatggcaatggccggatttgtttgaaatattattacaaaaacggcgattttggctttttgaaataaaattaccaagcaaaatttgcctcggtttagtgccatgtgttgttttaaaaccacccgcgatctgctagcgtgtcgcatgagatttgatgagggccggtgcgggcatagatgcggtgaaatctgatctaacggtcacgaagatggcgtggaagcaatgatgcatganaatgaacagattgatcgcaaggatgacggcagtgaccggcttgcggcgctttatggcctgacgccaaaggttgaaacggcaattattgatgctgttcaggcgggcgctgttcgccgtcttcgcacgcttgttgcgccgcttcacccggctgatcaagccgatcttttggaacgcatgccagcgcggacagcggcgtcactcgtaaggtttcttggcgatcatc

SEQ ID NO: 1595 - DNA, 4000 bp, Escherichia coli
  misc_feature (347)..(347): n is a, c, g, or t
  misc_feature (2320)..(2320): n is a, c, g, or t
  misc_feature (2400)..(2400): n is a, c, g, or t
  misc_feature (2638)..(2638): n is a, c, g, or t
  misc_feature (2731)..(2731): n is a, c, g, or t
attggtgatgaactcgcgtgctgacgcggatggcgcgacccaagttttggtatataatacgggccttaaaatatttgacgcaggcgagtagatataaaataagcataaaataaaacctaaacgcaaatcttggcgtaagcggcatcttggggcaggcgaggtaattgggcgcgcttggcaagtcatttttaggtggtgtatgagacaggatgcccagtgccctttgtgctttggtgatggcaagccttccacctaatgcaggatacagcgatattttagagcataatctgcatttaatcagcgcggataaacagtgttgccctttgaaaggttggtgggtctttttngtcagaatttagggcgtttttgaccctattaagtaaaatgatccgttctaatactcgctgcgtttaactgggcagagcttacccaaatttcaaacgaaaaggcagggatcatgacagcaacagatcagtttggcttcggaactcagattagaaaatctccttattttgacgccacagttcgctggggggcaaaagggttttcggtttataatcatatgtatatcccccgtgacttcggagatcctgagcagaatttttggaatttggtgaacgaagcaatcctatgcgatgtcgccgttgaacggcaggtcgaagtgacagggcctgatgcggcagcgtttgtgcaactgttaaccccccgcgatctttccaaaatggcggtgggtcaatgtaaatacattcttatcacaaatgccgatggtgggctgttaaacgatccaattcttttgcgactggcagaaaatcatttttggatttccttggcggatagcgatattttactctgggcgcagggggtggccgtacattctggcttggatgtaagtatttgtgagccggatgtgtccccgttacaattgcagggccccaattctgggaaaatcatgaaggctttgttcggagaatctatagaagatctgcgctattattggctgcgcgagcttgagcttgagggcattccactgcttgtgtcacgcaccggctggtcaagcgaattgggttatgagatttacctcagggatggggcctatggaagtgagctttgggagcgcatcatggccgctggcgctcggtttggtctgaagccggggcacacgtcttcaatccggcgcatcgaagggggaatgctatcttatcatgcggatgcggatattcacacgaacccgtttgaactgggtttagaccggttggttaacctggatatcgaggcgaattttattggtaaatcttcgctgcgccgtatcaaggccaaaggggtagagcgcaaacaagttggtttggttttggatggcgcgcctttgacgggacccaataccagtttttgggccattacagataagggaaaaacgattggcaaggtgacctctgcggttttctcgccgcgcttgcagaaaaatattgcgcttgcgatggtgtctgtagatcgtactgccttgggaactgagctgcgtgttcttgcgggggcggagcagcgcaccgcattggtggttgaacggccattttttgacccgaagaaaaagatcacggccgccgcgctctcaaattgaacactctgtacaaagccaagctgccctttaaagcttgctttggctatgcggatgcaccggccaatcggcgcaattctttaggccagcagtctcgctcgcttgggacagccgattggtatggttttcatggtgtgatccgtggcaatatggggtgtacattttagtggctagactcgctctcctcccaaacagagagcctagccactaatgtctcaagcctgacatgacgagacgatgcaacacaactcaagctgcgttaaagcgacagtaatagcttaattattaagcaacacaagaacttttagatttgcatagaatgcatatcggcaatgcaatcttgtgcattgctgacagaggctggttttcgctatcaaagggtcagcaagtttctcctcccattaatttgctatcgttgaaaattctcctcccagatgttttcaatttttttggcagtgctttttagcactgcctttttttttgaacggaggcagcgcgcgccgtccgcgatcgtgacgctactttttctggggtgcttttatgccggttttcaatatttagcttgggcgatgcaaaatttgcgcaaaagcgccaaatcaaaacctgccgcgtgatgttcttttcggccagaaagcaattacagaagcaaaatatgggttgcctaaatatccgcaaattttgacgcgtagcgttaaattcgcccttttcctntaggaaggcagcatcgaccatcctgcgggcggttttttgccgttaagaacgtggtttacccgttgcgatggcgtatgaangcggcggggttacgcgtctcagaagccttggtatgggcactgctcaagcggttttgaacgcgatatgcgcgtgcacttcccctaatttcagcccgtattttttgatttttgcgcaagctctaatgcctcggtggtggcctcaagagacagtaaaattgaagcatggcggtttttaaattgagctgcggggtgcaaaacctcaagatcgtgaaacggatctgcaggtatcgggccatcngcggttaacatggcctgcaattctgcgcaggccacccgaacttgcatggcgctgcagccgatgatggctttggcggtgatgcacgcggcggcntgtcccaacgcgcaggcctttacgtcttgggtaaaggcagccacgcgcccttcgcagagttggagttcaacactcacgctggatccgcagaggggagaacgtttttttgcgcgagctgtcacatgctcaagctctgcataatgtggtaaatcggccgccaaggccaaaatctttttagagtataattttatcagatctgggtcgcccggcatagtctttccctttttcccgcaacacaatacataaggcgaagcagcgcagaagcaaaggtttgtaagaatggaatttaacgttgaggaacttgcatttaacgaagatggcttgattccagcgattgcgcaggatgccaatagcaacgaagtgctgatgatggcttggatgaatgcccaggcggtaaagctcacgcttcaaacagggcgggtaacctattggtcccgctcgcgtcgcgcgatgtgggtgaaaggcgaaacctcggggcatatccagaagctggttgagcttcgcgtagattgtgaccgcgattgcctgctgttgttgattgatcaaactgggcctgcgtgccatacgaatcgccgcagttgcttttacatcaccgtgcaggatggtgcagagcatgaacgcttgccgattctgctttaaggcgctgaaaataaacgttctgtgatatcttgggcagagtggccggcttttcgcaaactgctgagcgcttcagaatcgctgcgttttgccaagcgtttgcccgtttcatcccttatcaaggaatggtggtgataacgaggggtcggaatattcagcaattgttgtaacacgacatgaatttgcgtcgcggcgttcagatctgcgccgcgcaccacatcggtgatgttttgcgcatcatcatctatgaccacggcaagatgataggctgccccctgatcctttctgcgcagtaccacgtctccaacctgcgcaataagcgcctctgctttgagcgtgatccgtttcgaatgctgctcgccaaattcttcataggtcacgggtttttgtagggctttaacggctttgcgcatatccaagcgcagcgcgtcgccggggcgggcctgcgacaggctgcgatggcggcaggtgcccgggtagatgcggccatcgggcccaaattcgggcacgccttcttggggggctgctgcggcttgcgcaatatcggcccggttgcaacaacacggatagatcaatccggcgcgtgccagcgcatcaagcgctctttgataagtgtcggtttcctgcgattga

SEQ ID NO: 1596 - DNA, 4000 bp, Escherichia coli
cgcgcggaacgtgccatcatggtcaccttagatgcgctacaaactattccagcctttgcctatttgcttcctatcctgctgctatttggctttggcgtcgtggtggggctgattgcgggcatcttatatgccttccctccaatggtacgcaacacgctgcttggtctacgccgggttgcgccggaagtgatcgaatctggtttgatgtcgggggccaccgcgacccaattgttctttcgggtgcgcgtaccaagcgcagcaagacaaattatgttagggattaaccagaccacgatggcggcgttttcaatggtgatcattgcgtcaattattggtggggcctccgatattggctgggaagttttatcggcgatgcgcaaggcacggtttggtgaaagcttggtggcaggcgtggtgattgccttgatggccatggttatggatcgcataacggcggggtttgcaaaccgaaaaccaaaggaaacgacccttgtttccgaaccgttttactggcgtcaccaattcactttaaccgccgttacgggcgccttatgcctttatttaattagccttattttgccaccacttcaaacctatccaaagtcttgggtctacgacccttctggccctttaaacaacgcgatcgattatatcatcattgaatatgcagcctggattgcgctgattaaaacttgggcgttcttttacctaatgcttccaatcaaaatggggttagagcaggtgatttcgcccttttcttgggggttcacatttacccccgcattgaaggccggttatgctttgacggcactggcattgatggcgcttgcagggctgcgaagacggcagagacttgcggtggtgattggattgctggcgattatgctgttttttggattgacccgcatgccatggcctgcgctctggttgattatggcttttgtgtgctggcaattatctggtccaaagctggctttgtccgttttaatcgggctcgcctatctgttactgtcaggcatctggccgcagaccttactgagtgtttatctctgcggcattggcgtcgttttgtcattcacccttggctctgcactgggcattttggcctctgaattcaaatctgtttcgcgggttttgcagcccattaatgacacgctgcaaaccatgccactctttgtgctgctgatcccttttgtaatgatcttcaaaattggcgagttcacagccctcctggccgtgatggcttatgccatggtccctgcaatccggtattctgagcatggattgcgaagcgtaccacatgaggtggttgaagcggccacttgcatgggctgcacccgttggcaattattgtggcgggtaaagattcccttggctcttcccgaaatgatgctgggccttaatcagacaatcatgttcgggatttctatgctggttatcgcggccttagtgggcaccagcggcctgggtcaacaagtctatatcgggctgggagatggtgattttggcgttggtatgaccgccgggattggcatggcgattatcgcaatcatcgcagaccgaatgaccgctgcctggagcgtcaagctgcaggaacgctacacatcaaacccagccagctgaaggttagcgctatggtaaaaacacctgccctgcccctgacaagtacgcattggggcacctatcgcgccaaggtcgcgaatggccgcgtgcaagagctgctaccctttgagcatgaccaagacccctcgcccatcgggccaggcattttggatgtgcagcatgggccaatgcgcatagatatgcctatgatacgcaaaagctggttagagggcaaagctggccatagcaccgacttgcgcgggcgcgagccgttcgtggccgtaagctgggcggatgcgaaccgtctggttgcggatgagcttacgcgggtacgccgcgactttggcaatcaggcgatctatggcggctcttacggctgggcaagcgccggccggtttcatcatgcccaaagtcaactcaagcggttcttgaactgcatcggcggctttaccagttcaaaattcacctatagtttcgccgctgctgaggccatggtgccgcatatcctgggcagctttcgcgcgtatctggacacctgtacaagttgggaagtgatcagggaccacacgcagcttttcgtctgtttcggaggcgtgccgctgaaaaacggtcagatcagtcaaggcggcaccggctgtcatattcagcgcgaagccttgttggccgcaggcagcgcggggatcgagattatcaatgtcagccccataaaatctgacatgcttgaagatgttgacgctgaatgggtgcccctgcgccctaatacggatgtggcgatgatgctggggctagcgcatactttgcagatcgaagggcttacggatcaggcctttttggatcgttacacgcagggatttgaagcctttctgccttatttgatgggcgagcccgacggcatcgcaaaaaccgcggattgggcagctaagatttgtgaaattcctgcagagacgatccgcgcattggcccgccgcatggcagcccagcgcacgatgatttcactcagttggtcgctcacgcgtcaagaccatggtgagcaacccttctggatgggtataacattggcctcaatgctcggccagatcggtttgcttggtggcgggtttggatttggttacagcgcgatgaattacatcgggggcaaattcaaaagcatttccggagcatctcttccacagggaaaaaatccaattgaaaactttattccagtggcccgtatcactgacttgctgcttaacccgggtcggcccttcgattttgacggggtagagtacacatatcctgatattaaactggtgtggtgggccggaggcaatccttttcaccatcatcaagacctgaacctgatgatgcaggcttggcaaaggccagacacgatcatcgtcaatgagtggtgctggaattcacttgccaaacacgctgatatcgtgctgccctgcaccacgccgatggaacgggctgatatcgcgataaccccgcgcgacccctatgtggttgccatggcgaaactgacagaaccctttgcgcaggcccgcgacgattatgagatttttgccggtattgctgaggccatgggtgttgcagaggctttcaccgaagggcgtagcgctgctgattggcagaggcaaatatacgaacaaaccatcactcgagcccataaagacggcgttgagatgcccgagtatgaccgtattcttgataagggctggttcaaacttgcagagcctgcgcaccccaccgtcatgttagaggattttcgcgccgatcctgcggcaaatccgctgaccacgcctagcggtaaaattgaaatcttttcaaaaacggttgcagattttggctacgccgattgccccggacatccgctttggcaggaaccttatgaatggttgggcaatagggctgactatccacttcatctgatatcaaaccagccaaaggaaaaattacactcccagctcgatcatggttctgtcagcaaggcccgtaaagttggaggccgcgaaccattgcacatgcaccctgaggatgccgatatgcgcgggcttaaaaccggggatcttgtgcgcgcgtttaacgatcgcggtgcctgcctggcaggcattgtggttgaccccaccatgcgccctgcagttgttcagatgagcaccggtgcctggtatgatccagatgaaaccggtttgtgcaaacatggcaaccccaacgtgctgacccgtgacaagggcacatcaaaactggggcaaggccccagcgcccattcctgcctgatcgaggttgaactgttcacaggctcagcgccatctgtcacggcacatgcgccgcccaccatcctacgccccagcccagataacgatcgaatggagaagacatgagcaatcttcaagaagcctctgatttgcataacaac

SEQ ID NO: 1597 - DNA, 4000 bp, Escherichia coli
  misc_feature (477)..(477): n is a, c, g, or t
  misc_feature (498)..(498): n is a, c, g, or t
  misc_feature (1984)..(1984): n is a, c, g, or t
  misc_feature (1986)..(1986): n is a, c, g, or t
  misc_feature (1989)..(1989): n is a, c, g, or t
  misc_feature (2663)..(2663): n is a, c, g, or t
  misc_feature (2894)..(2894): n is a, c, g, or t
  misc_feature (2896)..(2896): n is a, c, g, or t
  misc_feature (2900)..(2901): n is a, c, g, or t
  misc_feature (2906)..(2906): n is a, c, g, or t
  misc_feature (2908)..(2908): n is a, c, g, or t
  misc_feature (2910)..(2920): n is a, c, g, or t
  misc_feature (2922)..(2922): n is a, c, g, or t
  misc_feature (2924)..(2927): n is a, c, g, or t
  misc_feature (2929)..(2931): n is a, c, g, or t
  misc_feature (2933)..(2937): n is a, c, g, or t
  misc_feature (2939)..(2941): n is a, c, g, or t
  misc_feature (2943)..(2945): n is a, c, g, or t
  misc_feature (2947)..(2948): n is a, c, g, or t
  misc_feature (2950)..(2951): n is a, c, g, or t
  misc_feature (2953)..(2953): n is a, c, g, or t
  misc_feature (2955)..(2956): n is a, c, g, or t
  misc_feature (2959)..(2960): n is a, c, g, or t
  misc_feature (2962)..(2963): n is a, c, g, or t
  misc_feature (2965)..(2966): n is a, c, g, or t
  misc_feature (2968)..(2972): n is a, c, g, or t
  misc_feature (2974)..(2974): n is a, c, g, or t
  misc_feature (2976)..(2981): n is a, c, g, or t
  misc_feature (2983)..(2987): n is a, c, g, or t
  misc_feature (2989)..(2992): n is a, c, g, or t
  misc_feature (2996)..(2996): n is a, c, g, or t
  misc_feature (3001)..(3003): n is a, c, g, or t
  misc_feature (3005)..(3005): n is a, c, g, or t
  misc_feature (3007)..(3007): n is a, c, g, or t
  misc_feature (3009)..(3018): n is a, c, g, or t
  misc_feature (3022)..(3026): n is a, c, g, or t
  misc_feature (3028)..(3028): n is a, c, g, or t
  misc_feature (3031)..(3031): n is a, c, g, or t
  misc_feature (3034)..(3036): n is a, c, g, or t
  misc_feature (3041)..(3042): n is a, c, g, or t
  misc_feature (3044)..(3044): n is a, c, g, or t
  misc_feature (3046)..(3046): n is a, c, g, or t
  misc_feature (3050)..(3051): n is a, c, g, or t
  misc_feature (3054)..(3055): n is a, c, g, or t
  misc_feature (3057)..(3062): n is a, c, g, or t
  misc_feature (3064)..(3065): n is a, c, g, or t
  misc_feature (3069)..(3075): n is a, c, g, or t
  misc_feature (3077)..(3086): n is a, c, g, or t
  misc_feature (3088)..(3088): n is a, c, g, or t
  misc_feature (3091)..(3091): n is a, c, g, or t
  misc_feature (3093)..(3093): n is a, c, g, or t
  misc_feature (3097)..(3100): n is a, c, g, or t
  misc_feature (3102)..(3102): n is a, c, g, or t
  misc_feature (3105)..(3111): n is a, c, g, or t
  misc_feature (3113)..(3128): n is a, c, g, or t
  misc_feature (3130)..(3130): n is a, c, g, or t
  misc_feature (3132)..(3132): n is a, c, g, or t
  misc_feature (3135)..(3135): n is a, c, g, or t
  misc_feature (3137)..(3138): n is a, c, g, or t
  misc_feature (3140)..(3141): n is a, c, g, or t
  misc_feature (3143)..(3144): n is a, c, g, or t
  misc_feature (3147)..(3148): n is a, c, g, or t
  misc_feature (3152)..(3154): n is a, c, g, or t
  misc_feature (3157)..(3158): n is a, c, g, or t
  misc_feature (3160)..(3161): n is a, c, g, or t
  misc_feature (3163)..(3167): n is a, c, g, or t
  misc_feature (3173)..(3174): n is a, c, g, or t
  misc_feature (3177)..(3179): n is a, c, g, or t
  misc_feature (3181)..(3181): n is a, c, g, or t
  misc_feature (3183)..(3184): n is a, c, g, or t
  misc_feature (3186)..(3189): n is a, c, g, or t
  misc_feature (3192)..(3195): n is a, c, g, or t
  misc_feature (3199)..(3201): n is a, c, g, or t
  misc_feature (3203)..(3208): n is a, c, g, or t
  misc_feature (3210)..(3210): n is a, c, g, or t
  misc_feature (3213)..(3213): n is a, c, g, or t
  misc_feature (3215)..(3215): n is a, c, g, or t
  misc_feature (3218)..(3219): n is a, c, g, or t
  misc_feature (3221)..(3226): n is a, c, g, or t
  misc_feature (3229)..(3230): n is a, c, g, or t
  misc_feature (3232)..(3232): n is a, c, g, or t
  misc_feature (3235)..(3235): n is a, c, g, or t
  misc_feature (3238)..(3241): n is a, c, g, or t
  misc_feature (3243)..(3243): n is a, c, g, or t
  misc_feature (3246)..(3247): n is a, c, g, or t
  misc_feature (3249)..(3249): n is a, c, g, or t
  misc_feature (3253)..(3253): n is a, c, g, or t
  misc_feature (3255)..(3255): n is a, c, g, or t
  misc_feature (3257)..(3257): n is a, c, g, or t
  misc_feature (3259)..(3264): n is a, c, g, or t
  misc_feature (3266)..(3267): n is a, c, g, or t
  misc_feature (3270)..(3270): n is a, c, g, or t
  misc_feature (3274)..(3276): n is a, c, g, or t
  misc_feature (3280)..(3280): n is a, c, g, or t
  misc_feature (3286)..(3286): n is a, c, g, or t
  misc_feature (3289)..(3289): n is a, c, g, or t
  misc_feature (3295)..(3295): n is a, c, g, or t
  misc_feature (3297)..(3302): n is a, c, g, or t
  misc_feature (3307)..(3307): n is a, c, g, or t
  misc_feature (3309)..(3309): n is a, c, g, or t
  misc_feature (3311)..(3311): n is a, c, g, or t
  misc_feature (3315)..(3315): n is a, c, g, or t
  misc_feature (3321)..(3323): n is a, c, g, or t
  misc_feature (3328)..(3330): n is a, c, g, or t
  misc_feature (3333)..(3334): n is a, c, g, or t
  misc_feature (3336)..(3336): n is a, c, g, or t
  misc_feature (3338)..(3339): n is a, c, g, or t
  misc_feature (3343)..(3346): n is a, c, g, or t
  misc_feature (3349)..(3357): n is a, c, g, or t
  misc_feature (3360)..(3362): n is a, c, g, or t
  misc_feature (3367)..(3367): n is a, c, g, or t
  misc_feature (3369)..(3369): n is a, c, g, or t
  misc_feature (3373)..(3377): n is a, c, g, or t
  misc_feature (3379)..(3382): n is a, c, g, or t
  misc_feature (3384)..(3389): n is a, c, g, or t
  misc_feature (3392)..(3392): n is a, c, g, or t
  misc_feature (3394)..(3395): n is a, c, g, or t
  misc_feature (3397)..(3397): n is a, c, g, or t
  misc_feature (3399)..(3400): n is a, c, g, or t
  misc_feature (3402)..(3402): n is a, c, g, or t
  misc_feature (3405)..(3405): n is a, c, g, or t
  misc_feature (3408)..(3408): n is a, c, g, or t
  misc_feature (3411)..(3411): n is a, c, g, or t
  misc_feature (3416)..(3418): n is a, c, g, or t
  misc_feature (3420)..(3420): n is a, c, g, or t
  misc_feature (3424)..(3424): n is a, c, g, or t
  misc_feature (3427)..(3429): n is a, c, g, or t
  misc_feature (3432)..(3436): n is a, c, g, or t
  misc_feature (3438)..(3440): n is a, c, g, or t
  misc_feature (3442)..(3443): n is a, c, g, or t
  misc_feature (3445)..(3446): n is a, c, g, or t
  misc_feature (3449)..(3449): n is a, c, g, or t
  misc_feature (3451)..(3451): n is a, c, g, or t
  misc_feature (3454)..(3456): n is a, c, g, or t
  misc_feature (3458)..(3458): n is a, c, g, or t
  misc_feature (3464)..(3464): n is a, c, g, or t
  misc_feature (3466)..(3466): n is a, c, g, or t
  misc_feature (3468)..(3469): n is a, c, g, or t
  misc_feature (3472)..(3476): n is a, c, g, or t
  misc_feature (3478)..(3480): n is a, c, g, or t
  misc_feature (3482)..(3482): n is a, c, g, or t
  misc_feature (3484)..(3484): n is a, c, g, or t
  misc_feature (3487)..(3487): n is a, c, g, or t
  misc_feature (3490)..(3491): n is a, c, g, or t
  misc_feature (3493)..(3502): n is a, c, g, or t
  misc_feature (3505)..(3505): n is a, c, g, or t
  misc_feature (3507)..(3508): n is a, c, g, or t
  misc_feature (3510)..(3513): n is a, c, g, or t
  misc_feature (3517)..(3519): n is a, c, g, or t
  misc_feature (3522)..(3524): n is a, c, g, or t
  misc_feature (3526)..(3526): n is a, c, g, or t
  misc_feature (3528)..(3529): n is a, c, g, or t
  misc_feature (3532)..(3533): n is a, c, g, or t
  misc_feature (3536)..(3536): n is a, c, g, or t
  misc_feature (3538)..(3539): n is a, c, g, or t
  misc_feature (3541)..(3541): n is a, c, g, or t
  misc_feature (3544)..(3544): n is a, c, g, or t
  misc_feature (3546)..(3546): n is a, c, g, or t
  misc_feature (3548)..(3548): n is a, c, g, or t
  misc_feature (3550)..(3553): n is a, c, g, or t
  misc_feature (3555)..(3555): n is a, c, g, or t
  misc_feature (3558)..(3559): n is a, c, g, or t
  misc_feature (3562)..(3563): n is a, c, g, or t
  misc_feature (3565)..(3565): n is a, c, g, or t
  misc_feature (3568)..(3569): n is a, c, g, or t
  misc_feature (3577)..(3579): n is a, c, g, or t
  misc_feature (3581)..(3582): n is a, c, g, or t
  misc_feature (3584)..(3584): n is a, c, g, or t
  misc_feature (3586)..(3589): n is a, c, g, or t
  misc_feature (3591)..(3591): n is a, c, g, or t
  misc_feature (3595)..(3599): n is a, c, g, or t
  misc_feature (3602)..(3602): n is a, c, g, or t
  misc_feature (3604)..(3604): n is a, c, g, or t
  misc_feature (3606)..(3606): n is a, c, g, or t
  misc_feature (3611)..(3611): n is a, c, g, or t
  misc_feature (3613)..(3613): n is a, c, g, or t
  misc_feature (3615)..(3616): n is a, c, g, or t
  misc_feature (3618)..(3620): n is a, c, g, or t
  misc_feature (3623)..(3632): n is a, c, g, or t
  misc_feature (3634)..(3635): n is a, c, g, or t
  misc_feature (3638)..(3641): n is a, c, g, or t
  misc_feature (3645)..(3645): n is a, c, g, or t
  misc_feature (3649)..(3649): n is a, c, g, or t
  misc_feature (3651)..(3651): n is a, c, g, or t
  misc_feature (3654)..(3657): n is a, c, g, or t
  misc_feature (3659)..(3663): n is a, c, g, or t
  misc_feature (3666)..(3668): n is a, c, g, or t
  misc_feature (3672)..(3676): n is a, c, g, or t
  misc_feature (3678)..(3678): n is a, c, g, or t
  misc_feature (3685)..(3685): n is a, c, g, or t
  misc_feature (3688)..(3689): n is a, c, g, or t
  misc_feature (3692)..(3696): n is a, c, g, or t
  misc_feature (3699)..(3699): n is a, c, g, or t
  misc_feature (3704)..(3705): n is a, c, g, or t
  misc_feature (3707)..(3708): n is a, c, g, or t
  misc_feature (3711)..(3713): n is a, c, g, or t
  misc_feature (3716)..(3716): n is a, c, g, or t
  misc_feature (3719)..(3720): n is a, c, g, or t
  misc_feature (3723)..(3723): n is a, c, g, or t
  misc_feature (3725)..(3725): n is a, c, g, or t
  misc_feature (3727)..(3728): n is a, c, g, or t
  misc_feature (3730)..(3730): n is a, c, g, or t
  misc_feature (3732)..(3733): n is a, c, g, or t
  misc_feature (3735)..(3735): n is a, c, g, or t
  misc_feature (3737)..(3738): n is a, c, g, or t
  misc_feature (3740)..(3741): n is a, c, g, or t
  misc_feature (3743)..(3744): n is a, c, g, or t
  misc_feature (3746)..(3746): n is a, c, g, or t
  misc_feature (3750)..(3750): n is a, c, g, or t
  misc_feature (3752)..(3752): n is a, c, g, or t
  misc_feature (3754)..(3754): n is a, c, g, or t
  misc_feature (3759)..(3761): n is a, c, g, or t
  misc_feature (3765)..(3765): n is a, c, g, or t
  misc_feature (3775)..(3775): n is a, c, g, or t
  misc_feature (3777)..(3779): n is a, c, g, or t
  misc_feature (3784)..(3784): n is a, c, g, or t
  misc_feature (3786)..(3786): n is a, c, g, or t
  misc_feature (3792)..(3793): n is a, c, g, or t
  misc_feature (3795)..(3797): n is a, c, g, or t
  misc_feature (3803)..(3803): n is a, c, g, or t
  misc_feature (3805)..(3809): n is a, c, g, or t
  misc_feature (3813)..(3814): n is a, c, g, or t
  misc_feature (3817)..(3817): n is a, c, g, or t
  misc_feature (3820)..(3821): n is a, c, g, or t
  misc_feature (3823)..(3826): n is a, c, g, or t
  misc_feature (3828)..(3829): n is a, c, g, or t
  misc_feature (3831)..(3837): n is a, c, g, or t
  misc_feature (3839)..(3841): n is a, c, g, or t
  misc_feature (3843)..(3845): n is a, c, g, or t
  misc_feature (3848)..(3849): n is a, c, g, or t
  misc_feature (3851)..(3852): n is a, c, g, or t
  misc_feature (3854)..(3856): n is a, c, g, or t
  misc_feature (3860)..(3860): n is a, c, g, or t
  misc_feature (3865)..(3866): n is a, c, g, or t
  misc_feature (3869)..(3869): n is a, c, g, or t
  misc_feature (3871)..(3872): n is a, c, g, or t
  misc_feature (3878)..(3879): n is a, c, g, or t
  misc_feature (3881)..(3883): n is a, c, g, or t
  misc_feature (3886)..(3886): n is a, c, g, or t
  misc_feature (3894)..(3894): n is a, c, g, or t
atcgtcgccccggtcatggtcggcgacgaggtcccctcctacctgatcaccatcgacccggcggacaacctcttcggtgaggacatgagcctgctggtgaccgagcacgccgcgaccatctgcggcgtcatcctcggccgcgagcgcgtggtcgcggccgccgccagaagggtccgcgacgacctggtggaaggcctgctgctcggccgcggccgggacaatgccgacgccggccggtgggccgcgcacctgggttacgatccggcccgggaccacaaggtggtggcgatcgcgttcgagctgccagccgggccggtctacaacggggccgccgccccgggagctccgcatcccggagacggcgcggcgctgcggcagcggatctgggagagcatcgagcacttcgtgaccacccgggcgcccgatgcgatcgtctcggcccgcgagtccgaggtcgtggtggtgacgaccaccccngaggcgccgaacgggcccgcnctggacgcgcgccagctggccgcctcctgcctggcccggctggccgagctcttcccgacggccaaggtcgtcatcgggatcggcgggacctgccgggatccgggtgagatcgcccgctcctacgcccaggcgcagcgcacgacccagaccctgcggcggctgggccgctccggcaccgtctcggcgttcagcgacctcggcatcctccgcctgctgctgcaggtgcccgacctggccgagctgcgctccttcgcctccgatgtgctcggcaagctcagcatgcacgagcacgagcacaagtcggagtacctgaccacgctggcctgctacttccgggagaacaacagcccgcagcgggcctcgcgcatcctgcacgtgcaccccaacacggtggcctaccgggtcaagcggatcgaggagatcaccgggctgcggctggacaactactccgaccggctcatcgcgcaggtggcgctggagatcctcgattcgctcggggacgagccgtgaccgctcccagccagaccccggcggtcctgctggccgggcggcgcgtgctggtctgcgacggcgcgatgggcaccatgctgcacgcggccggcgccgcgctcgaccggtcgctgcccgagctcaacctgaccgacccgggactggtcagcaccatccacgagagctacctgagcgcgggcgcggacatcatccaggccaacacgttcggggccaaccggctctggctcggcgaccacggcgtcggcgacaaggtggccgagatcaaccgggccggggtccggatcgcccgtgcggcccaggaccggtgcgagcgggacgtgctggtggccggctcggtctcacccgcggtgaccggcctgcaacggcgccgtaccggttcggccgaacgggccgaggtgctacgcgagcagatcgaggctctgctcgggcgcggggaaggccccggcgtcgacatcttgatcctggagaccttcggctaccttgacgagctcgtcgaggccgtcggcgtggccagcgagctgagcgacgtgccgatcgtcgcccaggccaccttcgccgacgacgcgcacacgctgggcggcgagaccccgcgcgaggtcgccaccgtgctgtccggcctgccggtggccatgctcggcaccaattgcaccatcggcccgcagcggatgctcaccgtggccgaggacctggtccggtacgcgtccgtgccggtcagcgcgcagccgaacgcgggccagccgcgccgcaccgggccgcgcagcttcgagttcagcatcggcggcgactacttcgcccgctacttccgccggttcgccgaggccggggtgtccctggtcggcggctgctgcggcaccacccccgcgcacatccgcgccgcggccggcgcggtcacggcgatccccgcgcgggcccggcgcacccacccggccggaaccggaatatccggaaccgtaatatccggaactggaacggccgngncanccggctccgtgccgttcgccgggaccctggccgaccagctggccgggcggcggttcatcgtcgccgccgcgatcgcgtccggcgggcgcccggccgaggcggtgcaggccgccgcggtgctgcaggcccagggcgccggggtgttcgcggtcctgccggcccagagcgcccgcacccattccgactcccttgacctggcgctgcacctgcagcagcaggccggcgtggagaccatcgccacgctgaccacctgggacaagaccatcatgaccctgcaggccgaactcctcggcgcgcatgccctcggcatccgcaacgtcatctgcacgaccggcagcccgccggtgctcggcgactacccggccgtggacggcatctgggaggtcgactcgctcggcctgatcgcgctgctggccggcctgaacgagggccgcgactccaacgggctcgccaccgccacccagacctcgttctgcgtcggcgcccgggtcaacccgggcgcgcgggaccaggaggccgagatcgcccgggcccgggccaaggtcagggcgggagcgcacttcctggtgagcaggccggtctacgagctggactcgctgctccggacggtgaccgcgctggagggcacgcaggtgccgctgctgctgtccgtcaccccgctgcgcagcttcgangaggccgactacctggccaacgaggttcccggggtgatgatcccgccggatacgctgcgggccatggagcgggccgcccacggggccgcccgcgcgaccggcatcgagctggccgtagccctggtccggcaggccagaaagctggtcagcggcgtcatcgtcacggtcgccgccgacgacccggcggtgctggcccccctcctgtccgcagccggctgaagcagggacatngncagnnggggncngnnnnnnnnnnncngnnnncnnncnnnnncnnngnnngnncnngncnncgnngnngnngnnnnncngnnnnnncnnnnngnnnncggnggggnnnantngnnnnnnnnnncggnnnnngnccnggnnnccggnngncntttnngcnncnnnnnngnnggcnnnnnnngnnnnnnnnnncnggncngggnnnncnggnnnnnnntnnnnnnnnnnnnnnnngncnagncnntnntnntcnncctnnnttnngnngnnnnnggggannaannngncnngnnnnaannnngggnnnannnnnncnggntnccnntnnnnnnggnngncgncgnnnnangcnncnccgncngncnnnnnnanncgntggnnnacgncggggnccncgccgncnnnnnnctggngncnggcngcagcnnngcggnnnaanngntnntccnnnnggnnnnnnnnnctnnnttcgncngccnnnnncnnnngnnnnnngangnngncnncnccnccncgncggcnnncnaccnccnnnatnnnnncnnngnngnnttncnggnnngncggggncngnnctnnnnngnnncngncgnagnngnnnnnnnnnncancnngnnnngctnnntgnnnancnncgnngangnncntgncntnannnncnccnnccnngncgnngggggggnnnanncngnnnncnggcnnnnngtngncnccccngncnncnnncannnnnnnnnngnngtnnnngccnccgncnggnnnnannnnnccnnnggcnnnnngntttttgncgnnggnnnnnccnggaanngnnggnnnggnggnnggntngnngncnngncnncnngnnanggcngncnggggnnnttcncccccctccncnnnggggncnggaacnncnnncggggncnnnnngcanngcngcnncnnnncnngnnnnnnngnnncnnnctnntnncnnncaangaacnncgncnntccccnncnnnccngaacgggnccggtccccggcgccctcaccggaacagccggtcgatgtagtccgcgccgatgccgttcttctcgtagtggtcgcggaccagcgcgatgtagtcgaacacgtcgaa

SEQ ID NO: 1598 - DNA, 4000 bp, Escherichia coli
  misc_feature (69)..(69): n is a, c, g, or t
  misc_feature (168)..(168): n is a, c, g, or t
  misc_feature (835)..(835): n is a, c, g, or t
  misc_feature (2449)..(2449): n is a, c, g, or t
  misc_feature (2477)..(2477): n is a, c, g, or t
  misc_feature (3105)..(3105): n is a, c, g, or t
  misc_feature (3213)..(3213): n is a, c, g, or t
atatatattcttgagggaaaagctgtttatcatcttaatcaagactgggttgaggtggaggcaggagantttttgtggcttcgagctttttgccctcaggcatgttatgcaggaggaccaggacctttcagatatttactttataaggatgtaaataggcatatgccntttttataagtttattggatattttttttaggcactattaagtagagaattaattcggttactttatccaaattttccgtggcaaaaccagcctcctggtagttgcgctccatgagcataaaatagccataaaaattctccatcattacatcgtacctgccaataatcacgcactccacttcgccaattattatcttctatccaccattctggtgcaatccgttctggtcccaatttagtttttacttggtataattttttcctccaaataaaatgatcttctagtcttgaatgctttggcacttctaatgcttctggtggccataaaaatgaaggtctattgcggtttgaagttggccagcttttcatgtcataatttgaccatgctgcatttaaaacctgccacgatttttcaggtatatgactttgagctggtatgtgtctgataattgcatctaatccaacttttgttcccagccgcgttattaggtttttaagtacgttattttgattttttattaccttttcatgcagatccaaattattaatggattgagattgtgtgataggacctacattgattgcttcaagtcggataatatcaatgccaaaatttggtttaatttcatctaatttgagcagtaaaacagagaagatacgttcaggntcattagtgaaacatgccagacttaccaaaagtgattgtgtttcattattactaaaacccaaatcaatttttaattcctgaaatcctaaaacagcagtttttaatttgttacataaacgaataagcaatttttctatagcgttcttgatatcctcaataagcccaataggttctggaaagcttattctcacaccaaaatgctttttgtcagtaattggtgaaattgtctctggcacatgtcctagtgcctggtctaatctggcaatcaatgtagggccaaagcgtctggcaagaggtgcccttggttgtttcaacaggtcttttacagattttaagccaagttggtttaatttagttactattttattttcaatacgcagtgatgcaattggaagtttagctaatgagttataagtatttcccgctggtgcaatgcgtattgcattatttttaagtaattgcgtcacttgctgttttgtatcgtctatttgtattttttttgtagcacggctacgggttgcgcgagcttcttgatcaatagaattacttttaaggtagctttctgttggcttgggagtaaagcgagctagtgcccaagcacctcctacagtatcagccactccacttgttacggtcaagccgaatgtttctgtacgagatacaattaaatcaagcattccttcttcaccaccaaataagtgtgcgcaacctttaatgttaaggatcactccgtcatagttgtcggctgctacccaaggtgtgaattgagtataccaacgacataaggcgtgtagaaaagttaattcgcattttacagatcgaacacgggtcattaattctgggcatatggcttttgcatcttgcaatggctggccgatatttaatcctgaattatgtgcaccgaaagatacggaagataatgtttgtgtattaccattattttcaattatcgcaagcttatgatttttttcgaatttgaaaattcgttgtacccgttctgccccaaaatatgggaaccataaagaaatgtatcttgggcttgacattctaacctcaaatgttcttgttttgttctatttatataatagatatattgtccagtttaataatcaagattgatactttttttttatattcagtgagctacatcctttatactggagaataaaaatgaaaacaaaaattatatgtttggcatcaatagcttttcttgcacttcctgtctttgcacatgaaggtgtaaaaaatgatgctgtgaagcagcgcatgcagttgatgacagtaattaaagatacgatggcaaaaattggtgcaatggcacgtggattggacccatttactgaagaaagtgcagcaaatgcaaagcaaacactattgctagccgcggcagatattgaagttaaatttaaattaaatgaaaccgacccactatcagaaagttctccagctatttgggaaaattgggaagattttgtcgaaaaggccgatgattttgcatttatgattgagggtcttgaaacaagttctgcagataccctggcagctgggcttgggaatataggccaatcttgtggttcatgtcacaaagcttatcggataaaaaaatagacccgncataatttaattttaaatttggtcctcngcttaagctttaaaggatacttacagcaatatttttcagggcccctgagttatactgattgcaaaatattttttgctgtgcaggatattaataacaatgggaggacattatgagaactcgtgctgcagttgcaatagaagctggaaaaccactggaagtgatggacgtcaaccttgaagggcccaaggctggtgaagttttagtggagataaaagctactggcatatgtcatacggacgaatttactttatctggttctgacccggaagggctgtttccggctatcctgggacatgaaggagctggtgtggttgtagaagttggtcctgatgtttttgacctaaaagttggagaccatgtaatcccgctatatactccagaatgtaggcagtgtgaatattgtctccatcccaaaacaaatctttgtcaagccattagagaaactcaaggacgaggcttaatgccagacggcaccactcggtttagtatgttggatggtactccaattctacattacatgggctgctcgaccttttctaatttcaccgttttacctgagatcgctttggctaagattaattcaaaggcaccgtttgataaagtttgctatattggttgtggtgtaacnactggaattggtgctgttattaatacagccaaagttgaaattggaagtcggaccattgttttcgggttgggaggcattggccttaacgtgatacaaggacttaggttngcaggtgctgatcaaattgtgggagttgacctaaacccgcagaaatcaaaaatggcgaaaaaatttggtatgacggattatgtgaatccaaacgaagtttctggggatctggttcaacatttagtaaatataacgaaaggtggtgcagattatacgtttgatgccactggtaatgttgaggtaatgcgagcagcgttggaaagtgctcacaaaggttggggtgaaagtataataattggagtagcccctgcgggagcggaaatttctactcgcccatttcagcttgttacaggtcgagtatggaaaggaacagcctttggaggtgcacgcggtcgcacagatgttccaaaaattgtggactggtatatggaaggaaaaatcgagatcgacccgatgattactcacacttttgggcttgaagaaattaacaaaggtttcgatttgatgcatgctggagaaagcattagatccgtagttgtgtattagttatagactagtgctgtccgtatttagccaaaaaaacttgcacaactccatctgcaacacgatcaatctcggcatctgtaaatttttgttggattccaaatagtgcttttgtgtaaaggtcggctttacacaattccgtaaactgatctgctgccaggtatagatcacttattttcaaacaaccttgttgctctgcatatttgaaatactcgataagcttagattggcccattaagggaccattttcataaaaacttttccctaaaattgggaatcgttcgatttcggaaacgcaaattcg

SEQ ID NO: 1599 - DNA, 4000 bp, Escherichia coli
  misc_feature (2011)..(2011): n is a, c, g, or t
  misc_feature (2064)..(2064): n is a, c, g, or t
caatgccaatggccacaccaatggccacagtaacacgcaaagctttaaccttgataaatccacccgatacttgatttgctttaatggccaccgctaagagcgagggctcagcaatggtggtagcaaagccaataaaaccggcaaaaatataaacccaataataagcataccagtttttaggattactgaccaaatcagatgatgtgagttgcgttgccataattttacctagtgggaaaagtgctttttctaggccaataattaaaaaagttagcccgatccaaaccaagataaagccaacaacaatgcgttgtaaatgtggaattttttgctttaagatgcctacttgaaaaataaataggatggcaataataggtaaaactgcccagaaggtttcaacaaagtgatgtggtagtgacatcattgaaaaattccaaataacatgatggcaataataggtaatagagaggcgatggcgatcataccaaagccatcaataagcggatttctggcacgaatactgctactaagacctacacctaatgcggttaaaaggggaacggtaattggaccagtggttaccccgccagcatcataagcaataccaatgataaaatcaggtgccagggtggtgctaaccattactaataagtagccgctaataattaaatactgaattggccagccttttaaaattttaatcacaccaataaccactgaaagtcctacagcaatagcaacggtataacgtaaggtttgagcataacgatgcagttcaacatcggtggtgataatgccgccaaactgggctacttttgcagcctcattggccatgacaattagatcgggttcggcaatggttgcaccaaatccaagtgcaaaagaaaaagccaatagccaagtgatagagccttttttaacaaaggagaaggccagtatctcaccaatgggaaataggccaagcttaagtccgtgcataaataaagataggccaatgagcacgaaccctgtgcctatgataatattatcaatattggggatgggtttctgtaatacaaaaatctgaaaaaaagcaatcaccagtacaatcggcgccaaatcttttgcactgtcagtcagattatgggcaaattgataaagcgtttttttcataagtgttcttttataagtgcactgaattataatacttgctcatgagtcatgtcatcttaattaacggaaaaaaacaaaccaaactgagtgtgttcaatcgcctagtgcaatttggcgatggattgtttgagacttgtatggctgttgaccagagattactattggctgaagcgcattttcaaaggttagaaaagggcgccaagcgtctaaaaattatccccatttcccgctcaatattaaccaaagagattgctaaagcggtctctatgtctaaactagatagagcagtagtcaaggttattctttctcgaggtgaaagtgctagaggttatggatatgataaatccatcgctcctactcgaattatcatagtttctagtgtgcctgatttgccgcagacttatacgctaagtttgtgcgatagtggttacgctactaatcagctattatctgaaattaagcattgtaatcgcttggagcaaattcttgcgcgtacccatcttaaaacgcaagaatgtattatgcttgatccgcaagcccaagtagtttctgttacgcaaggtaatattttcgctattaaaaatggcgtgctactaacaccaggattgagcgaatgtggcattgagggtacacgtcgccaagcgattatcgagctagctagaaaacaagggttatcagttgaagtctgctgtttaagtgttgcggagttgctggcttgtgacgaagtgtttattagtaatagtgtgatgggtattaggccgattagtcaaattaatgagcaaaaatattcacaacatcagattaccgatcgactcatagaggtttttaatcagcacctattaaaacgcggtaactcggntttattaaaacctaaaaaaaatcctttaaagatatgggctattgtttttttancactattcacggcttgggcaatgtgggcaaacaaaataaacatactcaagccgactgtttatcagctaccccaaggagcaaatatttattctactgctgataatcttaagcgttatggtttggttaattcaagccagtttgtggtgtgggcggcaaaagtgttaggggcgagcgaaacattaaaatcaggccattatgagctgacccctgataccagtgtattgagtttgctagatgatttttctaatgctcacgtagccacccggaaaatcaccctagtcgagggtcaaaccgtacagacgtattttcaaatgctaagtcaacaccaagccttaacaacaaaactttcttttgagaaaaccttacaaaacacaaatgccaagcctccgtatgacggacaattttggccagatacttatcaggttaactatgcagacagtgtgctgagcgtgttaaatagatcgcacgctttattgcaagaaaaattatccaaggcttgggataatagagctaaagatcacctactaaaaaacaaaaaccaattattaatactggcatctcttgttgaaaaagagactgctaatcatgcagaaaaggcaaaaattgcaggcgtgtttattaatcgtttaaaaaaaggtatgcgtctacaaactgatccgacagttgtgtacgctttaggtgatgcttatacgggaaaattaagcaagcaagatttatggtttaagagtccgtacaatacttatcgacataaaggcttgccacctggcccaattggatcagtgggcttggaatctttaaaggcagcagcgcaaccattgaaatctgattttttgtattttgtatctaaaaaagatggcacacatgcatttgcaaaaacttacaaacaacaccttattaatattaagaagcatctaaaataaaacctatgaaaacaggaaaatttattaccatagatggcgttgaaggtgccggaaaaagtacacaaataaaatttatttgtgactatttgcaagccaaaggtattaacgttgttttaactcgagagccgggcggtaccgatttgggtgaaaaaattcgccaacttttacttagcacccaaacccagccaatgcatagtgatagcgaattgctactcatgtttgcagctcgaaacgaacacattcatcacaagattattccggcattgaaaaaaggtgattgggtattgagcgatcgctttaccgatgcttcgtatgcttatcaaggtggcggcagagggttggatattgagcgtattgaacacttggagcgctgggtgttgggagatttcaccccagacatgacactactcttggatattcctgtggatcttggcatgtcgcgtgtggagtctagaggtgagaaggatcgcattgagctagaggcaaaggatttttttgagcgagttaggcaagcctacattgccagatcagaaaagtatccagaacgcattaagctgattgactcctccaaggagcgcgaacatactagcacccaaattgaacaaatattagcaacattatgaaccttccttggcacgatcaagcgctttcaaagttgcaaaaaatgatcgatcaaaaccacctgccccatgccttgttaatgactggcgctgaacagattggaaagtttgagttaatgcagcagttggtaggaattttgcttaaggatgacgcactaattagaaaagataatatccttcaagagcttgatcatccagtcttgattaggcgttctagctataccaatatgatttattgccgatctggtgagataaatgcaaatactaaaaatcgatctaaagatatccgcatagaccaggttcgcgctttttgtgaagcactaaacaaaacggcagacaatttgcaaatcggtgttattttttatggtgaccagatgacggtcaacgcagcaaata

SEQ ID NO: 1600 - DNA, 4000 bp, Escherichia coli
cgcctgatcgaaaagatgccgggcctcaagcgcgtttattactgcaactctgggtcagaagcgaacgaaaaagcgttcaagatggttcgccaaatcgcgcacaaacgatatggcggcaaaaagcacaaagtgttgtaccgcgagcgtgattatcacggcacgacgattgcgtgtttgtccgccggtggtcaagatgagcgcaatgcacaatacggcccctttacacccgggttcgtgcgggtgccgcattgtcttgaataccgcgcacaatgggatttgacaggcgaagcctatggcaaacgcgcagctgacgcgattgaagaagtgatcttggccgaaggtccagacacagtcggcgcattgtgccttgagcccgtgaccgcaggtggtggcgtgattacaccccctgttggatactgggaacgcgttcaggaaatctgtaagaaatacgatatcctgcttcacatcgacgaagtcgtttgtggcgttgggcgcacaggaacttggttcgggtaccaacattacggcatcaaaccagacatggtaaccatggcaaaaggcgtggcctctggctatgcggcgattgcatgtttggtaacgaccgaagaagtttttgacatgttcaaagacgactcgtctgatccgatgaactatttccgcgatatttccacctttggtggctgtacagcaggccctgcagcggcattggaaaacatgcgtatcatcgaagatgagaacctattggacaacaccaacgtcatgggcgcacggatgttggacaacctcaatgccttggctgaaaagcacaaggtgattggtgatgttcggggcaaaggtttattctgcggtgcggaattggtggcagatcgtgcaaccaaagaagctgcaaatgaaaagatggtccaagcggttgtggccgaatgtggcgcacaaggtgtgatcatcggggcgacgaaccggtccttacccggcttgaacaatacgctgtgcttcagccccgcgttgatttcaacagcagacgacatcgacaatattaccgatgccgttgataaagctttgaccaaagtatttggttgattggaaacgattgggcgcagacagcctgcgcccaatcatagcccgtctgatgcaagatagttttggtatttttggggaatctccgcaatcggacaaaacccagtcttgcgcgccgcgctcagaatatccgacgtcgattgctccagcggctgcaaaatgcagggaacgacattttttccaatcggatttgccgaactcataatcatacagcgcccttggaaaaatccgcgcgtcgtccatgtgcgtgtcgaaaaattatccacccccaacacgctgttgggcacacgtgtcgcatatacaatcgacaacgcttcattggtttgcaacatcacgcctctgtattctcgtgcagaaattggcgtcaaatccgaccgcttcatgcctggtgcgacaggatccaccccccgcaccatgcgcgcaccatttcgtacaaaaacgcgcaccatcccaatccaaatttgcgtatctatcaaaaaagacggccgatacatgagatgcagaccgtctggcagaatatcctgcaacatgttttcaggaacaaagtaatcccgcccaaacaaggtgtaattccaaacatccgaaatatccgcgtcgtgaggttggaacgcacctgtttccaattcgtccaacggctgcagcaaaatccgcgcatcgacgttaaaatattcgcaaatccgctttaacatgccgggctttggaaaactctcgccattcaaaatacggttcatctgtacgcggtttatttcaagactgtcagcaacctcggcaatcgtaccgacgcgcctgcacagctgtcgcaaatttttaccaaaaattagatgcgttgaaacaaaatcaacttcattcgtcactcaaaacaccccgatcaaatcttactttttaaatatagacatattaacaaaggacgcaacgctacccaaaagggtagtcctttttaggtccaaaagcaacgtatgacatgtggaccagccatcgctcgatactctatccaccaattacgcgcctatgattcatgtcgattcttccgcatcaatcataagtccagtttacgttgccgctttagtccaataaaataccctcatggcgattcctgtagaaaacttttatctcgacacgaactttcaagggacgttgcaggcgcgcatccaacagatgatcgcccaaggcatcctgatcggccgttttcgaacgggcgaacggttgccgtccacccgagcattggcgcggcatttgaaagtcagccggctgactgtcacgctggcctataccgaattattggcgagcgattacataacgtcgcgggatcgttcgggatatttcgtgtccgacaccgcgccagaggcgacacaatattcgacacccatagaacccaccgatgccattgattggacccgcgcgattggtcaaaaattcaccggtggaagctggccagaaaagccgcaaaactgggccacattcaaatacccctttatctatggtcaaaccgatccaaacctatttgatcatgcaaattggcgtttgtgtgcgttgaccgcattgggtgccaaggattttaatgcgctgacatcggattattatgacaaagacgatccaatgttggtcgaattcatcgcccgccaaagcctgccgcgccgtggaattttcgcaaagcctgaacagatcttggtgacgctaggggcgcaaaacgcgttgtggcttgcgacacaagtcttgctgacacagcgacgcacagcggtgattgagaacccgtgttacccagcgctgcgcgatattttggatcaatcgcgttgtcatgtcgaagcggtcgatgtcgataaacacggactaaaccccgacacggtgccaaacggtgcatcggtcatttttacgacgccaagtcatcagtgtccgacaacaacgacgatgcccgtgcagcgacgacaccatctgttgcaacgggcggcacaattggatgccttgatcgtggaagatgattatgaatttgaaatgtcgtcaacgacggcagcaacccctgccctgaaatccttggacaaagacggccgtgttatttacgtgggcagcttttccaaatccctatttccggggctgcggttgggatatttggttggggcagaaccctttatccgcgaagcgcgcgcactgcgggcatcaatcctgcgccatccacctggccatatccagcgcacggctgcatatttcctaagtttgggtcactatgatgcgttgatcaagcgcaccgcgcgacaatttcaaatgcgccgatccttgatgcaagatgcgatcaccgaatttggattgaccatcgcggggacgccgccaaaaggtgggtcgtccttttggatgcaagccccaaaacatatcaataccgtcgaattggcacgtaaactcgaaccgcatggcgtgttaattgaacctgcgcgatcattcttttcgggtgacactattcctaatcatttttatcgtcttgcattttcttcgatccctgacgggcgcatccgcgaagggataaaaataatttccgatgtgatttctgaaattggacctaaatcgtaaagccaactggccctattgaacatattgcgatacccgtaaggttcctgcaaaaggcgacagccctgattttcaaggagacaccgcaatgaaaatgacaaccgaagaagcatttgtaaaagttttgcaaatgcacggcatccaacacgcctttggcattattggatcggcgatgatgcctatttccgatctgttcccaaaagcgggtattaaattctgggattgtgcgcacgaaggatctgccggcatgatggccgatggatacacccgcgcgaccggcaaaatgtcgatgatgatcgcacaaaacggccccggcattacgaactttgtgaccgctgtgaaaacagcctattggaaccacaccccactgttg

SEQ ID NO: 1601 - DNA, 4000 bp, Escherichia coli
  misc_feature (1)..(1): n is a, c, g, or t
  misc_feature (4)..(4): n is a, c, g, or t
  misc_feature (8)..(8): n is a, c, g, or t
  misc_feature (12)..(12): n is a, c, g, or t
  misc_feature (16)..(19): n is a, c, g, or t
  misc_feature (22)..(23): n is a, c, g, or t
  misc_feature (25)..(25): n is a, c, g, or t
  misc_feature (31)..(33): n is a, c, g, or t
  misc_feature (36)..(37): n is a, c, g, or t
  misc_feature (40)..(41): n is a, c, g, or t
  misc_feature (45)..(45): n is a, c, g, or t
  misc_feature (47)..(47): n is a, c, g, or t
  misc_feature (49)..(49): n is a, c, g, or t
  misc_feature (51)..(51): n is a, c, g, or t
  misc_feature (54)..(54): n is a, c, g, or t
  misc_feature (58)..(59): n is a, c, g, or t
  misc_feature (70)..(70): n is a, c, g, or t
  misc_feature (76)..(78): n is a, c, g, or t
  misc_feature (80)..(80): n is a, c, g, or t
  misc_feature (82)..(82): n is a, c, g, or t
  misc_feature (84)..(87): n is a, c, g, or t
  misc_feature (90)..(92): n is a, c, g, or t
  misc_feature (94)..(95): n is a, c, g, or t
  misc_feature (98)..(98): n is a, c, g, or t
  misc_feature (103)..(103): n is a, c, g, or t
  misc_feature (105)..(105): n is a, c, g, or t
  misc_feature (111)..(111): n is a, c, g, or t
  misc_feature (113)..(113): n is a, c, g, or t
  misc_feature (115)..(116): n is a, c, g, or t
  misc_feature (118)..(122): n is a, c, g, or t
  misc_feature (124)..(127): n is a, c, g, or t
  misc_feature (133)..(133): n is a, c, g, or t
  misc_feature (138)..(139): n is a, c, g, or t
  misc_feature (142)..(144): n is a, c, g, or t
  misc_feature (146)..(148): n is a, c, g, or t
  misc_feature (150)..(150): n is a, c, g, or t
  misc_feature (152)..(152): n is a, c, g, or t
  misc_feature (154)..(154): n is a, c, g, or t
  misc_feature (156)..(156): n is a, c, g, or t
  misc_feature (158)..(164): n is a, c, g, or t
  misc_feature (167)..(167): n is a, c, g, or t
  misc_feature (169)..(169): n is a, c, g, or t
  misc_feature (171)..(173): n is a, c, g, or t
  misc_feature (176)..(176): n is a, c, g, or t
  misc_feature (178)..(178): n is a, c, g, or t
  misc_feature (180)..(183): n is a, c, g, or t
  misc_feature (189)..(193): n is a, c, g, or t
  misc_feature (195)..(199): n is a, c, g, or t
  misc_feature (201)..(202): n is a, c, g, or t
  misc_feature (204)..(204): n is a, c, g, or t
  misc_feature (206)..(208): n is a, c, g, or t
  misc_feature (210)..(210): n is a, c, g, or t
  misc_feature (215)..(215): n is a, c, g, or t
  misc_feature (221)..(222): n is a, c, g, or t
  misc_feature (224)..(224): n is a, c, g, or t
  misc_feature (227)..(237): n is a, c, g, or t
  misc_feature (239)..(242): n is a, c, g, or t
  misc_feature (245)..(247): n is a, c, g, or t
  misc_feature (252)..(257): n is a, c, g, or t
  misc_feature (264)..(268): n is a, c, g, or t
  misc_feature (270)..(270): n is a, c, g, or t
  misc_feature (276)..(277): n is a, c, g, or t
  misc_feature (279)..(279): n is a, c, g, or t
  misc_feature (282)..(282): n is a, c, g, or t
  misc_feature (284)..(284): n is a, c, g, or t
  misc_feature (288)..(288): n is a, c, g, or t
  misc_feature (292)..(297): n is a, c, g, or t
  misc_feature (300)..(302): n is a, c, g, or t
  misc_feature (306)..(307): n is a, c, g, or t
  misc_feature (309)..(309): n is a, c, g, or t
  misc_feature (311)..(313): n is a, c, g, or t
  misc_feature (318)..(321): n is a, c, g, or t
  misc_feature (324)..(325): n is a, c, g, or t
  misc_feature (328)..(328): n is a, c, g, or t
  misc_feature (331)..(331): n is a, c, g, or t
  misc_feature (333)..(334): n is a, c, g, or t
  misc_feature (338)..(339): n is a, c, g, or t
  misc_feature (341)..(344): n is a, c, g, or t
  misc_feature (346)..(346): n is a, c, g, or t
  misc_feature (349)..(349): n is a, c, g, or t
  misc_feature (351)..(352): n is a, c, g, or t
  misc_feature (354)..(357): n is a, c, g, or t
  misc_feature (361)..(361): n is a, c, g, or t
  misc_feature (363)..(373): n is a, c, g, or t
  misc_feature (375)..(376): n is a, c, g, or t
  misc_feature (378)..(379): n is a, c, g, or t
  misc_feature (382)..(383): n is a, c, g, or t
  misc_feature (385)..(385): n is a, c, g, or t
  misc_feature (387)..(387): n is a, c, g, or t
  misc_feature (389)..(390): n is a, c, g, or t
  misc_feature (392)..(401): n is a, c, g, or t
  misc_feature (403)..(405): n is a, c, g, or t
  misc_feature (407)..(407): n is a, c, g, or t
  misc_feature (410)..(414): n is a, c, g, or t
  misc_feature (416)..(417): n is a, c, g, or t
  misc_feature (419)..(423): n is a, c, g, or t
  misc_feature (425)..(427): n is a, c, g, or t
  misc_feature (429)..(429): n is a, c, g, or t
  misc_feature (432)..(432): n is a, c, g, or t
  misc_feature (434)..(436): n is a, c, g, or t
  misc_feature (441)..(442): n is a, c, g, or t
  misc_feature (444)..(444): n is a, c, g, or t
  misc_feature (447)..(447): n is a, c, g, or t
  misc_feature (449)..(452): n is a, c, g, or t
  misc_feature (454)..(454): n is a, c, g, or t
  misc_feature (456)..(470): n is a, c, g, or t
  misc_feature (472)..(473): n is a, c, g, or t
  misc_feature (475)..(480): n is a, c, g, or t
  misc_feature (482)..(484): n is a, c, g, or t
  misc_feature (486)..(487): n is a, c, g, or t
  misc_feature (634)..(634): n is a, c, g, or t
  misc_feature (649)..(649): n is a, c, g, or t
  misc_feature (676)..(676): n is a, c, g, or t
  misc_feature (697)..(697): n is a, c, g, or t
  misc_feature (802)..(802): n is a, c, g, or t
  misc_feature (915)..(915): n is a, c, g, or t
  misc_feature (1146)..(1146): n is a, c, g, or t
  misc_feature (1185)..(1185): n is a, c, g, or t
  misc_feature (1395)..(1395): n is a, c, g, or t
  misc_feature (1410)..(1410): n is a, c, g, or t
  misc_feature (1431)..(1431): n is a, c, g, or t
  misc_feature (1539)..(1539): n is a, c, g, or t
  misc_feature (1608)..(1608): n is a, c, g, or t
  misc_feature (1614)..(1614): n is a, c, g, or t
  misc_feature (2668)..(2668): n is a, c, g, or t
  misc_feature (3910)..(3910): n is a, c, g, or t
ngancctnaganttcnnnnatnncntttaannnttnnaannattnantnanttntttnntggttttattngtgggnnnantngnnnntcnnnannttntaatnanttttgnantnntnnnnnannnntgaaanctttnnttnnngnnntnanancngnnnnnnntgnantnnntgnantnnnnaaaaannnnnannnnncnnangnnntngatgntacagnnanaannnnnnnnnnncnnnncannnttgtnnnnnntgtgatnnnnntncttttnntnggntnattnattnnnnnngtnnncctnntncnnncctannnnctnnatnatntnntcannannnncngcnanngnnnnaggntnnnnnnnnnnngnnannagnncnantnntnnnnnnnnnngnnnanagnnnnnanngnnnnnannntnatnannntcatnntntgnannnntngnnnnnnnnnnnnnnncnntnnnnnncnnntnntgcgaatcatcagcgtgatcttcagagtgatcatcgtgagaatgattatgattgctatgatcctcttgagctgttttttgagactgaaccacttcgtgataaacgccaagagctttgctaatagaaattagctcatcttgttttgcngttaagcccttgaangatgaattaaaagctttagcaaagttntccaggtttcctagatctctntccggatcaacagagacaaatacaacttgaagttgatcactattttccattaactgtgatgcttggtttattttagagaggtcaattggacaaacatctggacangaagtgtagccaaaatacagaagcgcccatttatcatctgccacatctgataaatgagtgttttttgatgcatcatcgataaagttgagtttgtctgaaactgattttgcttnaggatataaggacgcagcaggagcaacagactttttgagttcctccatattgggcttgccaccaaagaagaagaaaactgcagcactaataatggctgcaagaataaggaaataaatttgagtactttttgtcataataagacctacaaatgtggcaattagttttgaagagcgttttcttttgtgaacattttgtgagcaaggttcacaagactcaagagcagcgcaagnccgattacattgtgcattgtggcagcaaacataggcagngacattactacattaataatccccagcgcaacttgaattgttagaagggcaagaactataagtaaactgtttctgagtgctttgtagtttctaagagcaaatgaaaaagtaattattgctgcagttacaacaagggcgccaacacgatgaaccatttggattgctgttcgtgtttcattttctaggacaccaaactcataatcaactccnagtggcccccaatantaggcattattaaagtccatntcatcaggccacatctctcctagacagctaggaaaatagtccccacaggcaagtgcagcatagttagtgctggtccaccctccaagaaaaatttgaaaaactagaagnacagtaacaatggcaagcattatcttatgcttgttgagaattggctgatcaagagtaagaggcttacgntcattnagaagcagccaaaagagaagagttgttgttgaaaagccacccaataaatgcatcgtaactatccctggatgtactaattccgttactgtccacatccctagggcgccttgaaaaccaaccaatagtagaagtgcagttggcaactttacagaacggagcgtgtccggcctcctaaaaattgccaataaaaagataataacaattgataggccaagtattgaagcggcgtagcgatggaccatttctttccaggcttttgctatatcaaggggcctgtcatattctgcagagatgacatctggaaccaacagctgaccatagcagcctggccagtcgggacatcctagtcccgcatcagcaaggcgagtatatgctcctaagatgacaactatgagagctaaaataaatgagaggttaagtgctttagagtacataaaatccagtaaatgaggcaaccattttagttaacaaagtagttgcttgattaaaaaattcaaaaaactttaaataaatgtgcatcttttatttaggggtttattcttttttttcaacaataggagtgtaattttttagcattcagtttgttggtgaaaaaagttcaatcaatattgagaataaaggtgaattattacttggtaaaaaagagataaacaggtatcatttggttgcattttttaattgaaacttgaaattgcacattcaagtactatttatatagctataaaaggtttaattcggagaatctatgaaactatttttgactattactagcgctattgcagcattattaggccctagatctgcttttgcagagtacacacttaatatgacaaaaggcatcactgaccttagccaggacatttactggcttcatatgatggcattttgggtttgtgttggtatcggcgttgtagtatttggtgctatgttctattcaatcattgcccacagaaagtcaaagggagctaaggctgcacattttcatgagagtacgacagttgaatttatatggacaggaattccaatcttaatcttaattgcaatggcaattccngcctccaaaacattgattgatattgaggtccttgaaaaggcagacatgactatcaaggttaccggcattcaatggaagtggcagtatgactatcctgaagaaggaatcagctttgtttcaaatttggcacaatcttcgagagacgttattaaggcatcacctgaggagcgtgaagctgttcacaaggaaagtgactaccttcgctcagttgacaatcatcttgttcttccagttgatacaacggttagatttttaattacttctaatgacgttattcataactggtgggttcccgcttttggcgtcaagcaggatgctaatcctggatttatcaatgatgcatgggctaagccaaatgaaattggaacttatagaggacaatgtgctgagctttgtggaaaagatcatgggtttatgccaattgtggtagacgttgtttctaaagccgactatgcggcttgggttgagagcaaacaggctgaaaaagttgctgaattagctagcgctacacaagaatggacagaggctgatttggttgcaaggggtgaggaagtttacaacgcaaactgctctggttgtcatcaaaaagacggctcaggtattccaggagtcttcccagcaatgatagggtcagaagtaacaaatggccccgcagattatcaaataggcatggttttaaatggcttaaggggaatgcctgcatttaagatgcttagcgatacagatattgcatcggtaattacctacgaaagaagatcttttggtaacaatggatcagttgttcaaccatcagatgttacatctgcacgttaatttaaggagaaacacatgagctcaactacagcggcagcagcacacgacgatcaccatcatggccctgaaaaaggactcctaagatgggttaaaacaactaatcacaaggatattggaacgctttatctgtggttttcttttgcaatgctcttggtgggcggtgccttcgctatgggcattcgttcagaattattacagcctggtttacaattgtttgaaccacaattctataaccagctgacaacaatgcatgggctgatcatggtatttggtgccattatgcctgcctttgtaggccttgcaaactggctgattcctatgatggtaggagctcccgatatggctcttccaagaatgaataattggagtttttggatactgccttttgctggcacgattctactgagcacattttttatggaaggtggngcacctgcttttggatggactttttatgctccactctcaacaacatttgcaccagattcaactgacttctttatctttgcaattcacttg

SEQ ID NO: 1602 - DNA, 4000 bp, Escherichia coli
  misc_feature (1689)..(1689): n is a, c, g, or t
  misc_feature (1715)..(1715): n is a, c, g, or t
  misc_feature (1728)..(1728): n is a, c, g, or t
  misc_feature (2726)..(2726): n is a, c, g, or t
  misc_feature (2917)..(2917): n is a, c, g, or t
  misc_feature (3430)..(3430): n is a, c, g, or t
tcttcacttgagacttagcggttactttctttacggctgcttttacttttgataataacgaatttttttttgccataactaaatcctcaaaaaatttctagacgccgaagtttacactttttgaaattcattgcaagctagaattatttagtttttgagcttgaagagtgttttccatcaaagtcgaaactgtcattggaccaactcctccaggtacgggtgtgatatatgaagcatttttgcttgctacctcaaattcaacatcacctactaatttgttatcaattctattgataccaatatcaataactattgctccttttttaatccattctcctcgaactagattttgctttccagcagcaacaacaactaaatcagcttgtcgtactttttcttctaaatttttggttctactgtgacaagatgtaatagtacatttttcaagcaataattctaatgccattgggcgtccaacattgtttgagactcctactattgttgcatccagcccttctaattctatatcggaagctttgagcatttttataacaccataaggtgtacaagatcttaatcttggttgtcgtatggcaagagagcctatattaaaaggatgaaaaccatcaacatctttatttgggctgatgagttcaattatcaattcttcattgagattttttggcaatggagattgtacaagaattccatcaacatctttatttttgttgagtgtattaattaaatcgtttaaatctgattgagttgtattagagggtaaatgatgagagacagattttattccaacgttttcacatgcagatttctttttatttacataaatagaagaagcaggatcatcacccaccaaaattacagcaaggcaaggtggcctaattccttcattttttctttgttgaatctcttctttgagtaaacttaaacattctttggaaatagcattaccatcaataatttttgcaaccatatcttaaaaataccttcattaaataaacaatatatattatcagaacataagccaaaatatatactatcttttaatataaaatttgaccgaaagccttatttacgctatatttgcgcgttcggggtgtagcgtagcctggtagcgcgcctgctttgggagcaggatgtcgggagttcgaatctctccaccccgaccagataaaaaaaagtaaatgcaagcccgttaaaatgctttactataatttagttagctgcccgtagctcagctggatagagcatctgccttctaagcagagggtcacaggttcgaatcctgtcgggcaggccaatttctatggtggctgtagctcagttggtagagccctggattgtgattccagttgtcgtgggttcgagccccatcagccaccccaatttgtttcttgtttctagttgtgaaatactctttataattttgataatagtaaataaatatgcaagacaaagacctggaaagatatagtcgacatattttgttgccagaaatagaatttgaaggtcaaaaaaagttacttcaaagtcattgtttaataataggcgcaggtggtttaggttcacctgttgcaatttatttggcagcatcagggataggtaagattacaatttgtgattttgatgatgttgatttatcaaatttacaacgtcaaattgttcataatgagnaatcaattggtaaaaataaagctgantctgcaaaagtanccattagtaaaattaactcagatatcaaagtaagatcaataaagaaccaattgaatcttgaggaagttaaagtcatagcaaaagaggtagatatcatattagattgctctgataactttgagacgcgttatgcactaaataaaattgcttatgatttaaagttacctttagtttcaggagcagcaataaaatttgatggccaagtgtctgtttttgattttagagctaaaacttcaccttgttacaactgcctttttccgagtgctgatgaagaacaaaatttaaaatgttctgatcatggagttttttctcctttggtagggttagttggttcaattcaagcaggagaggcgataaaggtactattaaatattggaacttcactaactggaaaattattgttaataaaccataaagataccaattttaagactttgaaaatccaaaaagataacctttgtgatatttgttcttaaatagctattttaaaaaaagttaaacctagacccatggtaaaattaaaaacttaaatccctaacttagttttatgaaaaaagaattatccaaatcattttcaccaattgatatcgagaccaaatggtaccaatattgggagtcaaacgattactacaaaattggggatgatgagtctaaaccaaattctttttcaattttattaccacccccaaatgtaacgggcactcttcatatgggccatggatttaatcaaacactcatggatatgcttactagatatcatagaatgaagggagaaaacactttatggcaacctgggactgatcatgcaggaattgcaactcaaattgtagttgagaggcaattagatcaaaaaggtatttcaagacatgatttaggaagagaaaaatttattgaaaaagtttgggagtggaagaaggactcaggaggtaaaatcacacaacaaatgcgtcgattaggtacttcaccagattggtcaagagaaagatttacaatggatnaaggcctatcaaaaagtgtcactgaagtttttgttaaattgtatcaagatggtttgatttatcgagggaaaagactagttaattgggatgtcacacttcaaaccgctgtatctgatttagaggttattcaagaagaagaagatggctttttatggcaaattaattatccacttaagaatgaaaagaatcancttactattgctacaacaagaccagaaacaatgttgggtgattctgccttaatggttcatccagaagatgatcgatataaaaagtttataggtaaaacagttttaattccgcttattgataaagagattccaataattgcagatgattatgttgacccaacatttggaacaggaattgttaaagttaccccaggacatgactttaatgattatgctgttgggataaggcatgatttaccaataataaatattttaactcttgatggccatattaatgaaaatggaacaaagctttatgagggcttagatcgttttgaagcaagaaaaaaaattattgaagatttaaaggaaaaaaaataccttgatagtataaaaaaacataaattaaaagttccaagaggagataggactaactcaataatcgaaccaatgttaactgatcaatggtatgtatccatgacaaaaccatctggttcagatgggaaaagtattgcacaagaggcactagatttngtagatagaggtgaaattaaattttatccaaataattgggtgaacacttacaatcaatggttagaaaatatccaagattggtgcatatcacgtcaactttggtggggccatcaaatacctgcttggtatggagagaatcaagaggtttttgttgcgcattcgtttgaagaagcatctgagttagctaagaaaaagggctataaaggttctttgaaaagagataatgatgttctagatacttggttttcatccgccctgtgggcattcacaacattagattggacacctgaatacccaaaaaaatctaacccagcgcttgataggtacttaccttcttccgtgctcgttacaggttttgatattatatttttctgggtagctaggatggtaatgatgacgaaatatgtcacaaataaaataccatttaaacatgtctatgttcatggattgatcagagaccaggatggacaaaaaatgagcaaatcaaaaggcaatgtccttgatcccattgatttaatcgatggcatttctcttgatgatctcttgaaaaaaagaactcaaggcctaatg

SEQ ID NO: 1603 - DNA, 4000 bp, Escherichia coli
  misc_feature (1)..(1): n is a, c, g, or t
  misc_feature (4)..(6): n is a, c, g, or t
  misc_feature (8)..(8): n is a, c, g, or t
  misc_feature (11)..(12): n is a, c, g, or t
  misc_feature (14)..(14): n is a, c, g, or t
  misc_feature (16)..(18): n is a, c, g, or t
  misc_feature (21)..(23): n is a, c, g, or t
  misc_feature (26)..(26): n is a, c, g, or t
  misc_feature (29)..(29): n is a, c, g, or t
  misc_feature (31)..(31): n is a, c, g, or t
  misc_feature (33)..(33): n is a, c, g, or t
  misc_feature (36)..(38): n is a, c, g, or t
  misc_feature (40)..(40): n is a, c, g, or t
  misc_feature (45)..(45): n is a, c, g, or t
  misc_feature (47)..(50): n is a, c, g, or t
  misc_feature (57)..(57): n is a, c, g, or t
  misc_feature (60)..(60): n is a, c, g, or t
  misc_feature (64)..(70): n is a, c, g, or t
  misc_feature (72)..(72): n is a, c, g, or t
  misc_feature (75)..(75): n is a, c, g, or t
  misc_feature (77)..(80): n is a, c, g, or t
  misc_feature (83)..(84): n is a, c, g, or t
  misc_feature (88)..(88): n is a, c, g, or t
  misc_feature (91)..(92): n is a, c, g, or t
  misc_feature (94)..(95): n is a, c, g, or t
  misc_feature (103)..(103): n is a, c, g, or t
  misc_feature (105)..(105): n is a, c, g, or t
  misc_feature (108)..(108): n is a, c, g, or t
  misc_feature (110)..(111): n is a, c, g, or t
  misc_feature (113)..(113): n is a, c, g, or t
  misc_feature (115)..(115): n is a, c, g, or t
  misc_feature (119)..(122): n is a, c, g, or t
  misc_feature (124)..(124): n is a, c, g, or t
  misc_feature (127)..(128): n is a, c, g, or t
  misc_feature (130)..(133): n is a, c, g, or t
  misc_feature (138)..(138): n is a, c, g, or t
  misc_feature (140)..(140): n is a, c, g, or t
  misc_feature (143)..(146): n is a, c, g, or t
  misc_feature (148)..(148): n is a, c, g, or t
  misc_feature (150)..(150): n is a, c, g, or t
  misc_feature (152)..(154): n is a, c, g, or t
  misc_feature (156)..(158): n is a, c, g, or t
  misc_feature (160)..(161): n is a, c, g, or t
  misc_feature (163)..(163): n is a, c, g, or t
  misc_feature (165)..(165): n is a, c, g, or t
  misc_feature (172)..(173): n is a, c, g, or t
  misc_feature (175)..(175): n is a, c, g, or t
  misc_feature (177)..(180): n is a, c, g, or t
  misc_feature (182)..(182): n is a, c, g, or t
  misc_feature (184)..(188): n is a, c, g, or t
  misc_feature (190)..(190): n is a, c, g, or t
  misc_feature (195)..(195): n is a, c, g, or t
  misc_feature (197)..(198): n is a, c, g, or t
  misc_feature (200)..(200): n is a, c, g, or t
  misc_feature (203)..(203): n is a, c, g, or t
  misc_feature (205)..(208): n is a, c, g, or t
  misc_feature (210)..(210): n is a, c, g, or t
  misc_feature (213)..(213): n is a, c, g, or t
  misc_feature (216)..(216): n is a, c, g, or t
  misc_feature (220)..(220): n is a, c, g, or t
  misc_feature (222)..(223): n is a, c, g, or t
  misc_feature (226)..(226): n is a, c, g, or t
  misc_feature (232)..(233): n is a, c, g, or t
  misc_feature (235)..(241): n is a, c, g, or t
  misc_feature (246)..(249): n is a, c, g, or t
  misc_feature (253)..(253): n is a, c, g, or t
  misc_feature (256)..(258): n is a, c, g, or t
  misc_feature (260)..(260): n is a, c, g, or t
  misc_feature (268)..(269): n is a, c, g, or t
  misc_feature (271)..(271): n is a, c, g, or t
  misc_feature (277)..(281): n is a, c, g, or t
  misc_feature (284)..(284): n is a, c, g, or t
  misc_feature (286)..(287): n is a, c, g, or t
  misc_feature (289)..(291): n is a, c, g, or t
  misc_feature (293)..(294): n is a, c, g, or t
  misc_feature (298)..(298): n is a, c, g, or t
  misc_feature (300)..(301): n is a, c, g, or t
  misc_feature (303)..(303): n is a, c, g, or t
  misc_feature (305)..(307): n is a, c, g, or t
  misc_feature (310)..(312): n is a, c, g, or t
  misc_feature (316)..(316): n is a, c, g, or t
  misc_feature (319)..(320): n is a, c, g, or t
  misc_feature (322)..(323): n is a, c, g, or t
  misc_feature (325)..(326): n is a, c, g, or t
  misc_feature (329)..(329): n is a, c, g, or t
  misc_feature (331)..(332): n is a, c, g, or t
  misc_feature (334)..(336): n is a, c, g, or t
  misc_feature (338)..(343): n is a, c, g, or t
  misc_feature (345)..(349): n is a, c, g, or t
  misc_feature (353)..(353): n is a, c, g, or t
  misc_feature (355)..(355): n is a, c, g, or t
  misc_feature (357)..(357): n is a, c, g, or t
  misc_feature (360)..(360): n is a, c, g, or t
  misc_feature (362)..(363): n is a, c, g, or t
  misc_feature (366)..(366): n is a, c, g, or t
  misc_feature (370)..(370): n is a, c, g, or t
  misc_feature (374)..(375): n is a, c, g, or t
  misc_feature (377)..(380): n is a, c, g, or t
  misc_feature (387)..(387): n is a, c, g, or t
  misc_feature (389)..(389): n is a, c, g, or t
  misc_feature (395)..(395): n is a, c, g, or t
  misc_feature (398)..(399): n is a, c, g, or t
  misc_feature (402)..(402): n is a, c, g, or t
  misc_feature (405)..(405): n is a, c, g, or t
  misc_feature (407)..(408): n is a, c, g, or t
  misc_feature (411)..(412): n is a, c, g, or t
  misc_feature (414)..(414): n is a, c, g, or t
  misc_feature (416)..(418): n is a, c, g, or t
  misc_feature (420)..(420): n is a, c, g, or t
  misc_feature (422)..(424): n is a, c, g, or t
  misc_feature (427)..(428): n is a, c, g, or t
  misc_feature (430)..(430): n is a, c, g, or t
  misc_feature (432)..(436): n is a, c, g, or t
  misc_feature (438)..(440): n is a, c, g, or t
  misc_feature (442)..(442): n is a, c, g, or t
  misc_feature (447)..(448): n is a, c, g, or t
  misc_feature (454)..(457): n is a, c, g, or t
  misc_feature (461)..(467): n is a, c, g, or t
  misc_feature (469)..(474): n is a, c, g, or t
  misc_feature (477)..(478): n is a, c, g, or t
  misc_feature (480)..(480): n is a, c, g, or t
  misc_feature (483)..(486): n is a, c, g, or t
  misc_feature (488)..(492): n is a, c, g, or t
  misc_feature (494)..(494): n is a, c, g, or t
  misc_feature (499)..(500): n is a, c, g, or t
  misc_feature (502)..(512): n is a, c, g, or t
  misc_feature (515)..(517): n is a, c, g, or t
  misc_feature (520)..(522): n is a, c, g, or t
  misc_feature (526)..(526): n is a, c, g, or t
  misc_feature (530)..(531): n is a, c, g, or t
  misc_feature (533)..(534): n is a, c, g, or t
  misc_feature (537)..(541): n is a, c, g, or t
  misc_feature (543)..(544): n is a, c, g, or t
  misc_feature (549)..(550): n is a, c, g, or t
  misc_feature (553)..(555): n is a, c, g, or t
  misc_feature (557)..(558): n is a, c, g, or t
  misc_feature (560)..(561): n is a, c, g, or t
  misc_feature (563)..(566): n is a, c, g, or t
  misc_feature (568)..(569): n is a, c, g, or t
  misc_feature (571)..(571): n is a, c, g, or t
  misc_feature (574)..(574): n is a, c, g, or t
  misc_feature (576)..(576): n is a, c, g, or t
  misc_feature (581)..(583): n is a, c, g, or t
  misc_feature (587)..(588): n is a, c, g, or t
  misc_feature (592)..(592): n is a, c, g, or t
  misc_feature (595)..(595): n is a, c, g, or t
  misc_feature (601)..(602): n is a, c, g, or t
  misc_feature (604)..(605): n is a, c, g, or t
  misc_feature (608)..(608): n is a, c, g, or t
  misc_feature (610)..(612): n is a, c, g, or t
  misc_feature (614)..(614): n is a, c, g, or t
  misc_feature (617)..(619): n is a, c, g, or t
  misc_feature (625)..(628): n is a, c, g, or t
  misc_feature (631)..(632): n is a, c, g, or t
  misc_feature (635)..(637): n is a, c, g, or t
  misc_feature (639)..(642): n is a, c, g, or t
  misc_feature (644)..(644): n is a, c, g, or t
  misc_feature (646)..(647): n is a, c, g, or t
  misc_feature (649)..(651): n is a, c, g, or t
  misc_feature (653)..(653): n is a, c, g, or t
  misc_feature (655)..(657): n is a, c, g, or t
  misc_feature (662)..(663): n is a, c, g, or t
  misc_feature (668)..(670): n is a, c, g, or t
  misc_feature (672)..(674): n is a, c, g, or t
  misc_feature (676)..(677): n is a, c, g, or t
  misc_feature (679)..(680): n is a, c, g, or t
  misc_feature (682)..(683): n is a, c, g, or t
  misc_feature (686)..(687): n is a, c, g, or t
  misc_feature (689)..(689): n is a, c, g, or t
  misc_feature (691)..(691): n is a, c, g, or t
  misc_feature (693)..(693): n is a, c, g, or t
  misc_feature (695)..(696): n is a, c, g, or t
  misc_feature (700)..(701): n is a, c, g, or t
  misc_feature (704)..(704): n is a, c, g, or t
  misc_feature (707)..(707): n is a, c, g, or t
  misc_feature (710)..(710): n is a, c, g, or t
  misc_feature (712)..(712): n is a, c, g, or t
  misc_feature (714)..(717): n is a, c, g, or t
  misc_feature (720)..(720): n is a, c, g, or t
  misc_feature (723)..(723): n is a, c, g, or t
  misc_feature (728)..(728): n is a, c, g, or t
  misc_feature (730)..(730): n is a, c, g, or t
  misc_feature (734)..(735): n is a, c, g, or t
  misc_feature (737)..(738): n is a, c, g, or t
  misc_feature (740)..(740): n is a, c, g, or t
  misc_feature (744)..(745): n is a, c, g, or t
  misc_feature (748)..(748): n is a, c, g, or t
  misc_feature (751)..(751): n is a, c, g, or t
  misc_feature (755)..(755): n is a, c, g, or t
  misc_feature (758)..(758): n is a, c, g, or t
  misc_feature (760)..(761): n is a, c, g, or t
  misc_feature (765)..(765): n is a, c, g, or t
  misc_feature (768)..(768): n is a, c, g, or t
  misc_feature (771)..(773): n is a, c, g, or t
  misc_feature (775)..(777): n is a, c, g, or t
  misc_feature (779)..(779): n is a, c, g, or t
  misc_feature (781)..(784): n is a, c, g, or t
  misc_feature (786)..(788): n is a, c, g, or t
  misc_feature (791)..(791): n is a, c, g, or t
  misc_feature (794)..(797): n is a, c, g, or t
  misc_feature (800)..(802): n is a, c, g, or t
  misc_feature (804)..(806): n is a, c, g, or t
  misc_feature (809)..(809): n is a, c, g, or t
  misc_feature (811)..(811): n is a, c, g, or t
  misc_feature (814)..(816): n is a, c, g, or t
  misc_feature (819)..(819): n is a, c, g, or t
  misc_feature (821)..(821): n is a, c, g, or t
  misc_feature (823)..(825): n is a, c, g, or t
  misc_feature (828)..(833): n is a, c, g, or t
  misc_feature (835)..(836): n is a, c, g, or t
  misc_feature (838)..(839): n is a, c, g, or t
  misc_feature (841)..(841): n is a, c, g, or t
  misc_feature (843)..(847): n is a, c, g, or t
  misc_feature (849)..(849): n is a, c, g, or t
  misc_feature (852)..(854): n is a, c, g, or t
  misc_feature (856)..(856): n is a, c, g, or t
  misc_feature (858)..(858): n is a, c, g, or t
  misc_feature (861)..(861): n is a, c, g, or t
  misc_feature (863)..(863): n is a, c, g, or t
  misc_feature (865)..(866): n is a, c, g, or t
  misc_feature (868)..(869): n is a, c, g, or t
  misc_feature (871)..(871): n is a, c, g, or t
  misc_feature (873)..(875): n is a, c, g, or t
  misc_feature (878)..(878): n is a, c, g, or t
  misc_feature (884)..(888): n is a, c, g, or t
  misc_feature (890)..(890): n is a, c, g, or t
  misc_feature (893)..(895): n is a, c, g, or t
  misc_feature (897)..(899): n is a, c, g, or t
  misc_feature (901)..(904): n is a, c, g, or t
  misc_feature (906)..(906): n is a, c, g, or t
  misc_feature (908)..(909): n is a, c, g, or t
  misc_feature (912)..(913): n is a, c, g, or t
  misc_feature (916)..(918): n is a, c, g, or t
  misc_feature (920)..(922): n is a, c, g, or t
  misc_feature (924)..(927): n is a, c, g, or t
  misc_feature (929)..(929): n is a, c, g, or t
  misc_feature (931)..(936): n is a, c, g, or t
  misc_feature (939)..(939): n is a, c, g, or t
  misc_feature (941)..(941): n is a, c, g, or t
  misc_feature (945)..(945): n is a, c, g, or t
  misc_feature (948)..(951): n is a, c, g, or t
  misc_feature (954)..(955): n is a, c, g, or t
  misc_feature (959)..(959): n is a, c, g, or t
  misc_feature (965)..(967): n is a, c, g, or t
  misc_feature (972)..(972): n is a, c, g, or t
  misc_feature (974)..(974): n is a, c, g, or t
  misc_feature (980)..(981): n is a, c, g, or t
  misc_feature (985)..(985): n is a, c, g, or t
  misc_feature (989)..(989): n is a, c, g, or t
  misc_feature (991)..(993): n is a, c, g, or t
  misc_feature (999)..(1001): n is a, c, g, or t
  misc_feature (1004)..(1004): n is a, c, g, or t
  misc_feature (1008)..(1011): n is a, c, g, or t
  misc_feature (1015)..(1015): n is a, c, g, or t
  misc_feature (1017)..(1018): n is a, c, g, or t
  misc_feature (1020)..(1020): n is a, c, g, or t
  misc_feature (1022)..(1022): n is a, c, g, or t
  misc_feature (1024)..(1024): n is a, c, g, or t
  misc_feature (1026)..(1028): n is a, c, g, or t
  misc_feature (1030)..(1031): n is a, c, g, or t
  misc_feature (1035)..(1035): n is a, c, g, or t
  misc_feature (1038)..(1039): n is a, c, g, or t
  misc_feature (1046)..(1047): n is a, c, g, or t
  misc_feature (1049)..(1052): n is a, c, g, or t
  misc_feature (1056)..(1057): n is a, c, g, or t
  misc_feature (1059)..(1060): n is a, c, g, or t
  misc_feature (1075)..(1075): n is a, c, g, or t
  misc_feature (1166)..(1166): n is a, c, g, or t
  misc_feature (1260)..(1260): n is a, c, g, or t
  misc_feature (1266)..(1266): n is a, c, g, or t
  misc_feature (1293)..(1293): n is a, c, g, or t
  misc_feature (1295)..(1295): n is a, c, g, or t
  misc_feature (1313)..(1313): n is a, c, g, or t
  misc_feature (1343)..(1343): n is a, c, g, or t
  misc_feature (1367)..(1367): n is a, c, g, or t
  misc_feature (1373)..(1373): n is a, c, g, or t
  misc_feature (1387)..(1387): n is a, c, g, or t
  misc_feature (1496)..(1496): n is a, c, g, or t
  misc_feature (1628)..(1628): n is a, c, g, or t
  misc_feature (1989)..(1990): n is a, c, g, or t
  misc_feature (2337)..(2337): n is a, c, g, or t
  misc_feature (2436)..(2436): n is a, c, g, or t
  misc_feature (2448)..(2448): n is a, c, g, or t
  misc_feature (2711)..(2711): n is a, c, g, or t
  misc_feature (2717)..(2717): n is a, c, g, or t
  misc_feature (2720)..(2720): n is a, c, g, or t
  misc_feature (2855)..(2855): n is a, c, g, or t
  misc_feature (3224)..(3224): n is a, c, g, or t
  misc_feature (3325)..(3325): n is a, c, g, or t
  misc_feature (3368)..(3368): n is a, c, g, or t
  misc_feature (3724)..(3724): n is a, c, g, or t
  misc_feature (3754)..(3754): n is a, c, g, or t
  misc_feature (3817)..(3817): n is a, c, g, or t
  misc_feature (3886)..(3886): n is a, c, g, or t
  misc_feature (3916)..(3916): n is a, c, g, or t
nttnnnanctnntntnnncannnctnaanancnacnnntntgtcntnnnntttcgtnttncttnnnnnnntntcntnnnnctnnaatnaanntnnttacttcntntcntnntntnctannnncncanntnnnnatttntntannnncntngnnncnnntnnantntcagatnntntnnnntntnnnnntncaatntnncnatntnnnnanttntcnaatncnnttntctcanntnnnnnnncttcnnnnttanatnnntngttttctnnancttctnnnnnaananntnnntnngttntnntntnnnaannnatanctnnanntnnaancnntnnntnnnnnncnnnnntttntncnaantnntcnaacnttgnntnnnnttcttcnantttttnaannttngcntnntcnngntnnntntnnnagnntntnnnnntnnngngattnntatagnnnncaannnnnnnannnnnntanntntannnntnnnnntnacctnnannnnnnnnnnnaannnatnnntgancacnntnntcnnnnnanncatannatnnntnnanntnnnntnntnatncntttgnnngttnntttnctnatatcnntnnatntnnntntannnttgcannnntgnntgnnngnnnntnanntnnncntnnntgatnnaatannntnnnanntnntnnatnnanananannaatnnatnttnatntntnnnnatnganttaanancttnntnntnttcnnttnaanaatnaananntagntcntgnnntnnngnannnnannnacnaannnnttnnngnnntgnanatnnncanantnnnaannnnnntnntnnantnnnnnantcnnnancnttnantnntnnantnnnttnatcaannnnntnaannnannnannnntntnnttnnttnnncnnncnnnntnannnnnnatntnattnttnnnnttnngctntgatgnnntaaanancttaannactnaatntnnnattgcnnnatncatnnnnaatntnncnantntnnntnnattnatnntttattnntnnnntacnnanntatatattatacagnataatcctatacttgttcaaaatttgcgaatcatttgttatatggtaaaatacctatacacatttaatatataaatatataaaggaaaaangttatggaaaacgaaaagaagatcaaaacgagatttctcagtgttccgacactgcttaaattcttattacttgtatctgtatgcttattctgcntagctntctatgtaaatagtcatccagaattantnaagaagacaacacctacnccagagcctacaacagctgcttcaacggtngaacctacggcatctgctttaccngcccanttaacagatccaancagtgttacggtattggttgataaaaatcactctctatcacgtgactttgtgccaacaaacttagctactccttatttacagagtactgcggatgtcatccaaatccgncaagatgttggtgatgcggctaagtctatgatttctgctgcggaagctgctggtattaagttatatgtaactgctggataccgttcttatgatgaccaacaaacactttatgaggaccgtgttagtaagttnggtgaaaaagaagcttctgatacaacagccaaagctggttatagtgaaaatcaaacaggtttagcactcgacttcacagatacagcaactggcacaagctctgtagatttcgcaaatacacctgctggtaaatggttatatgagaatgcacattcttatggctttatcctacgttaccctgataagaaacaggatattacaggatattcctatatgccatggcactatcgttatgttggtacagatgtttctaatgcaatgtacgaacaaggtggatccaatttaacatttgaagaattttatcagataacaaagtagaaaatctctactttgttttttgtatgtgtaaaaattaactagnnagtttttcatctattttcattctagcgttgacatttttcacttcaaaaagtattatttatgagcatatgttcaatatatagtaatttggaggtggcatgaatgaagagaacataccaaccaagcaagaaaaagaataaagctacacacggctttagagcccgtatggctactgtgggtggacgtaaagttatcaacagacgtagagctaagggaagaaaggtcttatctgcttaagaagccaccattggtggtttttttcttactgtagaggttagagatgaaagtaaagaatcgaattaaaaaagcggaagaattccaatctatgattaaaaagggggcaaaggtngtcaatcagtcgtttgtcgtctatcatcagcctaaagaaggagatgaagctcgtattggaatttctgtatctaagaagctaggaaatgccgtacatcgnaacctatataancgtcaggttcgtatgatgtgccatgaattggttgattttaaaaatacaaattacgatatggtcttgattatccgcttcaactattcttctcttagctatgaggagaataaaaataacttggaaaaactattaataaaggctaaaattaaatagttgaaacataaggagaaaatatgaaatttacccctcgtacaaagaaactacttgccttgatggcaattgtgacaatcgtagtgacagctacaggttgtacagctccaaangatgcnaanggacacattattttgatttccgaaagcacaacttttggtgaaatcttccaaactgaaaactggtttaatgccttatttgtttggccactcagctgggtattaaacaaattagcaccagtcatcacagtaggtggngcaatcgctgtcgttactgcggttgtaaatggtttactagcagtatttacattgaagtctcagatgggcatgcaaagaatgcaaatgttgcagcctgagttaaacaagattcaacgtaaatatgaaggtcgtgatgatcaagcatctaagatgcgtatggctcaagaacaacagcagttaatgaataagtacaacgttaaccctggttctatgatgttagtacagtttattcagttaccaatcatcatggcaatgttcatggctatccaacgtgcagaagcagttgtcaatggtacattcttaggaatgaacttacaggtaaagcctagcgaagcattcggcttactatttaaaggtgatttaagtggnttaccatacatcatcttgttcttattaatggctgttacacaggttatcttagtattattaccaatgtacttccaaaagaagaaggctgctgcagaagctgngaaacatcaccgtaagccagaacctacaaataaccaaaacgtnatgatgcagatgtacatgattgttatggtacttgcattcggtttaatgtggcaatcaggtatgtccttattctggttcatccgtaacatcgtagatattattaagacaattattgtccaaaatatcatggagaacaattcacagaaagaaggcttaagataatgcaaatctatactgcaaaaacacttgaagaacttctacaaaacgctgctgaagaaaagggtgttacaatcgatgaattagaatacacagttgtggaagagaaaaaaggattattgggaattggtaattctgtatccgcaaaagtatttagttctgaagatgtaaaagaatttatctttgattacttaggtganttctttacacatattgatttggatattgangttgcgttagaggaactagatgatagttatgtaatcaatctaaattctgataacaatgctatnctcatcggtaagatgggtaagacattagctgcattcaatactgtattacgtgctgctgtaaacgctgantttgaaaagcgcattgatgtattaattganatcaatcactacaaagaagagcgctattacaagattcgttcaatggcaaagcgtatcgcaaaacaggtacaacgttcaaaggtt

SEQ ID NO: 1604 - DNA, 4000 bp, Escherichia coli
  misc_feature (1)..(1): n is a, c, g, or t
  misc_feature (3)..(5): n is a, c, g, or t
  misc_feature (7)..(8): n is a, c, g, or t
  misc_feature (12)..(15): n is a, c, g, or t
  misc_feature (17)..(17): n is a, c, g, or t
  misc_feature (20)..(20): n is a, c, g, or t
  misc_feature (22)..(24): n is a, c, g, or t
  misc_feature (26)..(26): n is a, c, g, or t
  misc_feature (29)..(29): n is a, c, g, or t
  misc_feature (31)..(31): n is a, c, g, or t
  misc_feature (33)..(34): n is a, c, g, or t
  misc_feature (37)..(40): n is a, c, g, or t
  misc_feature (62)..(62): n is a, c, g, or t
  misc_feature (103)..(103): n is a, c, g, or t
  misc_feature (106)..(114): n is a, c, g, or t
  misc_feature (117)..(120): n is a, c, g, or t
  misc_feature (122)..(123): n is a, c, g, or t
  misc_feature (126)..(133): n is a, c, g, or t
  misc_feature (136)..(147): n is a, c, g, or t
  misc_feature (149)..(157): n is a, c, g, or t
  misc_feature (159)..(164): n is a, c, g, or t
  misc_feature (166)..(169): n is a, c, g, or t
  misc_feature (171)..(174): n is a, c, g, or t
  misc_feature (177)..(179): n is a, c, g, or t
  misc_feature (181)..(181): n is a, c, g, or t
  misc_feature (183)..(188): n is a, c, g, or t
  misc_feature (191)..(193): n is a, c, g, or t
  misc_feature (195)..(196): n is a, c, g, or t
  misc_feature (198)..(199): n is a, c, g, or t
  misc_feature (201)..(209): n is a, c, g, or t
  misc_feature (211)..(217): n is a, c, g, or t
  misc_feature (219)..(224): n is a, c, g, or t
  misc_feature (226)..(230): n is a, c, g, or t
  misc_feature (232)..(244): n is a, c, g, or t
  misc_feature (246)..(246): n is a, c, g, or t
  misc_feature (249)..(253): n is a, c, g, or t
  misc_feature (255)..(265): n is a, c, g, or t
  misc_feature (267)..(269): n is a, c, g, or t
  misc_feature (271)..(271): n is a, c, g, or t
  misc_feature (273)..(281): n is a, c, g, or t
  misc_feature (283)..(285): n is a, c, g, or t
  misc_feature (288)..(290): n is a, c, g, or t
  misc_feature (293)..(298): n is a, c, g, or t
  misc_feature (300)..(300): n is a, c, g, or t
  misc_feature (302)..(303): n is a, c, g, or t
  misc_feature (305)..(306): n is a, c, g, or t
  misc_feature (308)..(308): n is a, c, g, or t
  misc_feature (310)..(310): n is a, c, g, or t
  misc_feature (312)..(312): n is a, c, g, or t
  misc_feature (315)..(320): n is a, c, g, or t
  misc_feature (322)..(322): n is a, c, g, or t
  misc_feature (325)..(327): n is a, c, g, or t
  misc_feature (329)..(333): n is a, c, g, or t
  misc_feature (335)..(336): n is a, c, g, or t
  misc_feature (338)..(345): n is a, c, g, or t
  misc_feature (347)..(348): n is a, c, g, or t
  misc_feature (351)..(370): n is a, c, g, or t
  misc_feature (372)..(384): n is a, c, g, or t
  misc_feature (386)..(386): n is a, c, g, or t
  misc_feature (388)..(388): n is a, c, g, or t
  misc_feature (390)..(391): n is a, c, g, or t
  misc_feature (393)..(404): n is a, c, g, or t
  misc_feature (406)..(408): n is a, c, g, or t
  misc_feature (412)..(415): n is a, c, g, or t
  misc_feature (418)..(421): n is a, c, g, or t
  misc_feature (423)..(427): n is a, c, g, or t
  misc_feature (429)..(434): n is a, c, g, or t
  misc_feature (436)..(439): n is a, c, g, or t
  misc_feature (441)..(449): n is a, c, g, or t
  misc_feature (451)..(451): n is a, c, g, or t
  misc_feature (453)..(454): n is a, c, g, or t
  misc_feature (457)..(458): n is a, c, g, or t
  misc_feature (460)..(475): n is a, c, g, or t
  misc_feature (477)..(478): n is a, c, g, or t
  misc_feature (481)..(484): n is a, c, g, or t
  misc_feature (486)..(489): n is a, c, g, or t
  misc_feature (491)..(491): n is a, c, g, or t
  misc_feature (493)..(493): n is a, c, g, or t
  misc_feature (497)..(502): n is a, c, g, or t
  misc_feature (506)..(508): n is a, c, g, or t
  misc_feature (510)..(519): n is a, c, g, or t
  misc_feature (522)..(534): n is a, c, g, or t
  misc_feature (536)..(536): n is a, c, g, or t
  misc_feature (538)..(539): n is a, c, g, or t
  misc_feature (542)..(542): n is a, c, g, or t
  misc_feature (544)..(546): n is a, c, g, or t
  misc_feature (549)..(551): n is a, c, g, or t
  misc_feature (553)..(559): n is a, c, g, or t
  misc_feature (561)..(562): n is a, c, g, or t
  misc_feature (564)..(569): n is a, c, g, or t
  misc_feature (572)..(579): n is a, c, g, or t
  misc_feature (581)..(592): n is a, c, g, or t
  misc_feature (595)..(595): n is a, c, g, or t
  misc_feature (597)..(600): n is a, c, g, or t
  misc_feature (602)..(602): n is a, c, g, or t
  misc_feature (604)..(604): n is a, c, g, or t
  misc_feature (608)..(611): n is a, c, g, or t
  misc_feature (613)..(613): n is a, c, g, or t
  misc_feature (615)..(619): n is a, c, g, or t
  misc_feature (621)..(622): n is a, c, g, or t
  misc_feature (625)..(628): n is a, c, g, or t
  misc_feature (630)..(633): n is a, c, g, or t
  misc_feature (635)..(640): n is a, c, g, or t
  misc_feature (643)..(646): n is a, c, g, or t
  misc_feature (648)..(654): n is a, c, g, or t
  misc_feature (657)..(657): n is a, c, g, or t
  misc_feature (660)..(662): n is a, c, g, or t
  misc_feature (664)..(665): n is a, c, g, or t
  misc_feature (667)..(672): n is a, c, g, or t
  misc_feature (674)..(675): n is a, c, g, or t
  misc_feature (677)..(689): n is a, c, g, or t
  misc_feature (691)..(691): n is a, c, g, or t
  misc_feature (693)..(696): n is a, c, g, or t
  misc_feature (699)..(706): n is a, c, g, or t
  misc_feature (708)..(708): n is a, c, g, or t
  misc_feature (710)..(713): n is a, c, g, or t
  misc_feature (715)..(717): n is a, c, g, or t
  misc_feature (720)..(723): n is a, c, g, or t
  misc_feature (725)..(726): n is a, c, g, or t
  misc_feature (730)..(730): n is a, c, g, or t
  misc_feature (732)..(735): n is a, c, g, or t
  misc_feature (738)..(738): n is a, c, g, or t
  misc_feature (740)..(740): n is a, c, g, or t
  misc_feature (742)..(742): n is a, c, g, or t
  misc_feature (752)..(752): n is a, c, g, or t
  misc_feature (758)..(758): n is a, c, g, or t
  misc_feature (764)..(764): n is a, c, g, or t
  misc_feature (803)..(803): n is a, c, g, or t
  misc_feature (1010)..(1010): n is a, c, g, or t
  misc_feature (1989)..(1989): n is a, c, g, or t
  misc_feature (1994)..(1994): n is a, c, g, or t
  misc_feature (2148)..(2148): n is a, c, g, or t
  misc_feature (2580)..(2580): n is a, c, g, or t
  misc_feature (2583)..(2583): n is a, c, g, or t
  misc_feature (2592)..(2592): n is a, c, g, or t
  misc_feature (2594)..(2595): n is a, c, g, or t
  misc_feature (2607)..(2607): n is a, c, g, or t
  misc_feature (2675)..(2675): n is a, c, g, or t
  misc_feature (2714)..(2714): n is a, c, g, or t
  misc_feature (2822)..(2822): n is a, c, g, or t
  misc_feature (3022)..(3022): n is a, c, g, or t
  misc_feature (3032)..(3032): n is a, c, g, or t
  misc_feature (3035)..(3035): n is a, c, g, or t
  misc_feature (3037)..(3037): n is a, c, g, or t
  misc_feature (3040)..(3040): n is a, c, g, or t
  misc_feature (3118)..(3118): n is a, c, g, or t
  misc_feature (3174)..(3174): n is a, c, g, or t
  misc_feature (3257)..(3257): n is a, c, g, or t
  misc_feature (3362)..(3362): n is a, c, g, or t
  misc_feature (3443)..(3443): n is a, c, g, or t
  misc_feature (3449)..(3449): n is a, c, g, or t
  misc_feature (3459)..(3459): n is a, c, g, or t
  misc_feature (3473)..(3473): n is a, c, g, or t
  misc_feature (3476)..(3476): n is a, c, g, or t
  misc_feature (3482)..(3482): n is a, c, g, or t
  misc_feature (3484)..(3484): n is a, c, g, or t
  misc_feature (3486)..(3486): n is a, c, g, or t
  misc_feature (3491)..(3495): n is a, c, g, or t
  misc_feature (3498)..(3499): n is a, c, g, or t
  misc_feature (3501)..(3503): n is a, c, g, or t
  misc_feature (3509)..(3510): n is a, c, g, or t
  misc_feature (3516)..(3520): n is a, c, g, or t
  misc_feature (3522)..(3524): n is a, c, g, or t
  misc_feature (3526)..(3526): n is a, c, g, or t
  misc_feature (3528)..(3528): n is a, c, g, or t
  misc_feature (3531)..(3531): n is a, c, g, or t
  misc_feature (3533)..(3534): n is a, c, g, or t
  misc_feature (3536)..(3537): n is a, c, g, or t
  misc_feature (3539)..(3540): n is a, c, g, or t
  misc_feature (3542)..(3545): n is a, c, g, or t
  misc_feature (3547)..(3549): n is a, c, g, or t
  misc_feature (3551)..(3552): n is a, c, g, or t
  misc_feature (3555)..(3555): n is a, c, g, or t
  misc_feature (3558)..(3559): n is a, c, g, or t
  misc_feature (3563)..(3565): n is a, c, g, or t
  misc_feature (3567)..(3568): n is a, c, g, or t
  misc_feature (3572)..(3572): n is a, c, g, or t
  misc_feature (3574)..(3574): n is a, c, g, or t
  misc_feature (3576)..(3577): n is a, c, g, or t
  misc_feature (3581)..(3582): n is a, c, g, or t
  misc_feature (3584)..(3584): n is a, c, g, or t
  misc_feature (3587)..(3589): n is a, c, g, or t
  misc_feature (3591)..(3591): n is a, c, g, or t
  misc_feature (3593)..(3594): n is a, c, g, or t
  misc_feature (3596)..(3596): n is a, c, g, or t
  misc_feature (3598)..(3598): n is a, c, g, or t
  misc_feature (3601)..(3601): n is a, c, g, or t
  misc_feature (3605)..(3605): n is a, c, g, or t
  misc_feature (3607)..(3607): n is a, c, g, or t
  misc_feature (3609)..(3609): n is a, c, g, or t
  misc_feature (3613)..(3613): n is a, c, g, or t
  misc_feature (3622)..(3624): n is a, c, g, or t
  misc_feature (3626)..(3626): n is a, c, g, or t
  misc_feature (3628)..(3629): n is a, c, g, or t
  misc_feature (3631)..(3632): n is a, c, g, or t
  misc_feature (3635)..(3635): n is a, c, g, or t
  misc_feature (3637)..(3640): n is a, c, g, or t
  misc_feature (3643)..(3643): n is a, c, g, or t
  misc_feature (3647)..(3648): n is a, c, g, or t
  misc_feature (3650)..(3650): n is a, c, g, or t
  misc_feature (3652)..(3652): n is a, c, g, or t
  misc_feature (3654)..(3654): n is a, c, g, or t
  misc_feature (3656)..(3657): n is a, c, g, or t
  misc_feature (3659)..(3660): n is a, c, g, or t
  misc_feature (3662)..(3663): n is a, c, g, or t
  misc_feature (3666)..(3666): n is a, c, g, or t
  misc_feature (3669)..(3669): n is a, c, g, or t
  misc_feature (3671)..(3672): n is a, c, g, or t
  misc_feature (3677)..(3677): n is a, c, g, or t
  misc_feature (3681)..(3686): n is a, c, g, or t
  misc_feature (3688)..(3690): n is a, c, g, or t
  misc_feature (3692)..(3692): n is a, c, g, or t
  misc_feature (3695)..(3696): n is a, c, g, or t
  misc_feature (3699)..(3699): n is a, c, g, or t
  misc_feature (3701)..(3701): n is a, c, g, or t
  misc_feature (3703)..(3704): n is a, c, g, or t
  misc_feature (3706)..(3706): n is a, c, g, or t
  misc_feature (3708)..(3709): n is a, c, g, or t
  misc_feature (3714)..(3714): n is a, c, g, or t
  misc_feature (3717)..(3719): n is a, c, g, or t
  misc_feature (3721)..(3722): n is a, c, g, or t
  misc_feature (3724)..(3727): n is a, c, g, or t
  misc_feature (3731)..(3731): n is a, c, g, or t
  misc_feature (3733)..(3735): n is a, c, g, or t
  misc_feature (3739)..(3741): n is a, c, g, or t
  misc_feature (3743)..(3748): n is a, c, g, or t
  misc_feature (3752)..(3753): n is a, c, g, or t
  misc_feature (3755)..(3756): n is a, c, g, or t
  misc_feature (3758)..(3760): n is a, c, g, or t
  misc_feature (3762)..(3763): n is a, c, g, or t
  misc_feature (3765)..(3766): n is a, c, g, or t
  misc_feature (3770)..(3771): n is a, c, g, or t
  misc_feature (3773)..(3773): n is a, c, g, or t
  misc_feature (3775)..(3777): n is a, c, g, or t
  misc_feature (3779)..(3780): n is a, c, g, or t
  misc_feature (3782)..(3787): n is a, c, g, or t
  misc_feature (3789)..(3790): n is a, c, g, or t
  misc_feature (3796)..(3796): n is a, c, g, or t
  misc_feature (3800)..(3800): n is a, c, g, or t
  misc_feature (3804)..(3806): n is a, c, g, or t
  misc_feature (3808)..(3809): n is a, c, g, or t
  misc_feature (3811)..(3813): n is a, c, g, or t
  misc_feature (3858)..(3858): n is a, c, g, or t
  misc_feature (3884)..(3884): n is a, c, g, or t
  misc_feature (3887)..(3887): n is a, c, g, or t
  misc_feature (3899)..(3899): n is a, c, g, or t
  misc_feature (3902)..(3902): n is a, c, g, or t
  misc_feature (3926)..(3926): n is a, c, g, or t
  misc_feature (3935)..(3935): n is a, c, g, or t
  misc_feature (3992)..(3992): n is a, c, g, or t
nannnanngggnnnngngtncnnngnccncngnnccnnnnccggcactggcatatcctccanaaccagatcttgtccaaacgccgcaattgaatgggctgggnggnnnnnnnnnttnnnncnngtnnnnnnnncannnnnnnnnnnntnnnnnnnnntnnnnnntnnnnannnntcnnntntnnnnnnttnnnanntnnannnnnnnnntnnnnnnntnnnnnntnnnnntnnnnnnnnnnnnngncannnnncnnnnnnnnnnngnnntngnnnnnnnnnannnaannntgnnnnnngntnntnnancntnaannnnnnanacnnnannnnncnngnnnnnnnnanncannnnnnnnnnnnnnnnnnnnannnnnnnnnnnnngntngnngnnnnnnnnnnnntnnnaatnnnnaannnnannnnnannnnnnannnnannnnnnnnngntnnttnntnnnnnnnnnnnnnnnncnnatnnnngnnnnangngttnnnnnntttnnnannnnnnnnnnatnnnnnnnnnnnnngnannatngnnnatnnnannnnnnntnngnnnnnnggnnnnnnnntnnnnnnnnnnnntgnannnngnangcannnngnannnnngnntannnnannnnannnnnnagnnnnannnnnnntanttnnnanntnnnnnntnntnnnnnnnnnnnnnantnnnnagnnnnnnnntnannnnannnaannnnanngganannnnctnancnccaaagatgntttttnaccttntcataaaaaacaggaacctcattcaaggggtcattcatncccagtgtctcaatggggatattgcccttgtaattggaggattgaatgatggagcagagccgtttgaggtccatgggcgtttgtaccccattgatcagtaacttttcttttacctgccagttcacagccaggggcaatgattttcggatttcttcgtaagggtctgtggcaatgaaattacctgtgtccactaccaatcccagccanggactgttgatagaccctatcagttcatggcattcatctgcagttctcagaaagtcgttgtggttttgtatgcccagtatgacaccatgggattttgccttttcgaggcatttgttcaatgcaaacaaaattcgttcattcacccttttcctttcatcaccggtactgtattgcttggctgtaaaaatgcgcaatacaggagctcccatcttggctgccacttctatccaacgcaaaacagtgtcaatttctttggccaatgcattgctgtcgctgtacgaaaattcatttcgtactcccgtgccactgatctcaatccccactgcatgcgcctttcttttgaacgcataaatttcagtatctgatggtgtttcaggataagaagaaaaataatatcctgtcatgtctacggcatcaaagccagtgttggcgcagaattcgagcaattcatccttgctgatttttttcttcatcagcatatcattgaaggagtatgcgttcaggcttaggcggaaacgattggctttcttcgatgggatgtcatcagaaaaaggaacagcccttgccagcgagatggctggaagggctgtgagaaaatttcttctgttgaagttgggcatgttagattgttgacatgtcaataacgaacctgtatttgatatcacccttgatcatccgctcatacgcctcgtttatttgagagaccgcaatggtctcgatttctgcaaaaatgctgtgttcatgacagaaatcaagcatctcctgggtttcttgtatgcttccaatcatagaaccaacgatgcttcgcctgttcttgatcagggcaaaaggagaaacttttggctggtgctcgggcaaacctaccaccaataattttccgtagagtccgagcaaattgaggtactgtgtataatcatggtcggctgaaatagcatccagcacaatatcaaaagatgatgcatggtcattcagcactgcnggatncttggccaagataaaatgatgtgcgcccagtttagaggcttcctgaaccttagacgctgatgtactgataacggtaacttcagccccaaaagcaacagcaaatttcaccgccatatggcccagtccgcccagtccaactaccgccactttcatncctgccttgacacctgcaaaccgaaggggagaataagtggtgatgccagcacagagcagcggtgcaatgcctgccaggttttcctcgcccttgatccgcaagacatagttttcatcagtgacaatttcagcagaatatccacccatggtgagcatgcctgaaccatccctttccggtgcgttataggttccggtcatcccttcttcacaatattgctcatggttgctcttgcaatttttacaggtacggcagctgtcaaccattacacctactcccactgtttgaccaacggtgaactgtgttacagcactgccgactgcttttaccttccccacaatttcatgacccggaacaacaggataaacggtgccagcccactcactccttactgtatggatgtcactgtgacagatgccacaataaagaatttcnacntgaacatcntnngggcgaaggtcncttctttggatgttcagcggttcaataggagattggctgctggatgctccgtaagctttaacaattgncataaatatttatttttctgaattgattactgttttgcngccaggtattttgcaggctctttttggaactcagccttgcattctgctgaacaaaaaccataggccttgtcttcataatggcaggtatcgctgattccggcagagacnggcattccacaggcaaaatcagttgtattgaccaccatttctggtgtaaactggctgtggttttccatggatgattccatttctgcaggcttgttttcaacagcagctttttcggtcttgttagaacaggcaagtgagaagatgataaaggaaagggtaacgatagaatttctcattgttttcttttgaagttacttaanatctactaantcntngtngcgcacaaaattgcgataggtttgtcaatttccattgaaaacgggttaattttatcaataatttctagaaatgcagcnaaataatacatcaatggccatcaggcttatcaaactcaaggcaatttggttgccanttctatttttttgcactgcgttgactgctcaacaaaaaactaaaaataatttacccattggtgttttcgactctggaacaggngggctgacggtattggaagccatgcttaccctggatgccttcaacaacattaccggtaaaccgggtgctgatggcatgctcgattttgacaaagaatatttccantacctcgcagaccaggccaacatgccttatggaaactatgctgctgaaaacaaaacaaaactcttgcaggaacatgtggtnaaaaanatggattttntgctcaagaacagntangatatnantnggatnnnnnaannannncccaannaaaaannnnngnnnangntgntnntnntnncnnnnannncnnctnctnntttnnngnnggangngnngaannanttnnnanannanantgncacnangnctcntgttgttgnnntnannanngcngnnnnganggcnncntngncnnannannccnccnannaaaangggnnnnnngnnntnttnnccncngnngntnntgttnctnnngnngnnnncccnannnccannngnnnnnnggcnncnncnnngnngnnggcnncncnnntnntnnnnnncnngggtgntttngggnnngnngnnnccatcgatcgcgattacagtttttatgttgataccgcaagtgccnacagaaaagattataagggaccatcngtnaacaatacgaantanaagattgatacggcactgctcaangtctacaanttcaacaaggaaaacaacaagctgctctgcgagtacgatgacaagggcaagtgtctngacatcca

SEQ ID NO: 1605 - DNA, 4000 bp, Escherichia coli
  misc_feature (1986)..(1986): n is a, c, g, or t
  misc_feature (2235)..(2235): n is a, c, g, or t
gacgagttggcggcgttgcgacgcgcgcggacgctcgcgcgcgatgtgttgcgcgtgttggcggtgatgcgcgcgttcgcggagacacagcgcgcgatcgtgagcgacatggcgtcgttgaatgacgtcgtggcgcgtcattaaacagcgttcagcgcgcggtcgcgatgtcgcgcgccgacgccgcgccaccgcacgcgctggaagacttgtccacgttcacggtgcgcgaaatcatcaacgatggacgcgatgcggcggggaaattggtgattctcggtcagtttgcaaattgctcgagcgacgcattggtgaagctgcagcgcgcgccgttgccgcacgacgagcgaggcgtgcgcgagatgctggaacgcatccgtttgcgttcgcgcgcgccgtatagcggggcagagtacgggtattacgtcggggagctcgcgccgtcgacgtcggcgtcgagcggcggcgaagacgtcgagtgcgacgtgctgtatccgggatgtttgctcgacgccgacgagacgagccgggcgaagttgctgaagaaacacatcacgcgaagctcgacgcaaaagttggtgtgcgtgcgagaaacacccgagttgtacgcgaaggcgcacgaaaagtatatcgcttcgatcccgcgcgaagcgacggcgtgggtgcgaaagattttgagtctggaaaaggaacgcgagcggttgttgcattgcgacgacgactttttgctcaacgttgactcgaaatggacgacacatcccgattgcgacggcgccgatcgcgcgacttggcgcgcgcactcgagcgtgactgatttatattgcctcggtttgtgcgttcgcgaagactttaagagtttgcgagacgcgcgcgccgagcatttgccgctgcttcgagcgatgctgcgcaagggtcgcgccgtcatcgaagacatttacggcgtcaatgcggaagaaatgcgcgtattcgtgcactaccctccgcagttttatcactttcacgtgcattatcaagcgctcagcgccaaggagcagggatgcgcgtgcgagcgggcgcactcgctcgaggacatcatcgacaacctcgagcgagacggtgaccactacgcgcgcgctaacttatcgctcaagatgggtgagcgagacgcgctgtacgcgttttacaacgacgcagccacgcgcgcgtgaaatacaacccaacccaaaccgactcgacgcggcggttgcgccgccgcgtcgccgcctcactcgccgcctcgcgcgcgtcgtctcgtcttcgcgatgacggcggcgctggaaagcgcgatgcgcggcgtcggcatcgacgcgtccagcgcgtccaaatccttcgcgcgacgcttcgatgcgtcgtcgcgcgtcgtcgccgtcccgcgcgcgcgtcgtcggcgcgtcgaggcttcgtcgtcgtcgttcgtcgcgcgcgcgacgtccgcgcgctcgagcggcatcgcgcgcggtcgccacgcgcggtcgcgtccgcgcgacgccatcgtcgcgcgcgccgaacgcgaaacccgcctggtgtcggtgctcacgtcgctgccgcggcggttcaacctgtactttcagcgcagaaattatcgcgtgacgctttggcgcgccatcagcgcgtactttgggttctatctcgcaaacgtcatgacgctgagcttcggggccatagggatcaacgacgtcgtcgcgggagcgctgagcgtggcgttttttgaggtggtgacgcggatttattacgcgagcgccgagacgaacaaatggctcgaatttctcaactggttcaaggtcgggtactgttactccctgatcgccgacgcgttcaaactcgggtcgtgagcgcgcgcgcgcgcgcgtcggatttcgaaatcgcgagcgaaaactcgtcttgtaatacaacaatgtggatacagtagtttcatttcattcgtccacggttggcgaaccgtcgagttgccgcaaagcctcgtacacnccgatgccgcacgacacggacaaattcaaactcctcacgtgactttcgtcgatgggaattctacgcacaccccccgtggctttgcacgcctccatcgccgcgtctggcagccccgtggtctcggcgccgaacaacaaccaatcccccggtcgatacgcgccgtcctccgcgtgcggccgcgcgccgaattttgaaaacgccaccaaccgcccacgctcgtccccgagctcgcgccaatacgcgtaaaangcatcccaatcatcgtgcaccttgacgcacaccgatttccaatagtccaacccggcgcgcttcaactgcgcgtcgtcgagcgaaaatccgagcggcgccaccaagtgcagcggcaccctcgacgccgcgcacgtccgcgcgatgcacccggtgttcccgggaatctttggcgtcaccaaaaccacgtgcaggtccttcctctgcgcgtcgctcgccgtctcgatcgcgcgcacggtgacgttcggtcccatggcgtcgccgccgccaccgacgcgcaccgccgtcccgcgcgcgagcggcgcgcgcgcgcgcgcgtcgacgcgacgggcgagcgcgagcgtgcgcgcgatcgttcgcgcggcgtcgttcgtgcgtatcgacgcgcgcgcgcgcatcgatgcgcgacgccgagtgatgcgatcggtgtgcgcgcacacgcacacgcgcgcgcgtcgcgcgcgacccggcgatgacgcgcggcgtcgcgagcgacgcgatgaccgcgcgcgatcgcgtcgtcgccgcgctgtgcgcgtgcgtcgcgctcgcgctcgtgcacgtcgcgatgatgtttaagacgagcgcgaaacagcgacggcgcgttcgcggcgtcgtgcgcggcgcggggcgcgggagagtgattggattttatcacccgagcggtggggacggtggcggcggcgaacgcgtgctgttcgccgcgatcgcggcggcgcagcgaggtgatttcgatggcgatcggcgcggcgcgcgaggcgacgacgccgacgccgacgcggcggagaaggaaggcgaggcggcgattatgtcgcgcgcggacgagcgccgggacgcgcggtcggacgtgagatcgaacagtgcgcgcgagacgcgcgaatggagagcgacggagggaagggatgtcacgtgttgcgtgtacgcgggcgcgacgtcggcgcgaggcgacgaacccgtcgaggacggcgacgaactcatcgcgcgcgcgcgcgaacggttcgggatcgagttgcgagcgcccataaacgttattagactcacgcgtgagcgatgggcgcgcgcggagacgtacaaacggtgcacgatattggggcagtttatcggcggcgcgtggctcgggctcgaggcgctgtggacgttcgcgccggatgtgttcgtggataccgtcggacacgcggcgacgtatccgatcgcgcgatatctgtttgggtgccaaacagtggcgtacgtgcactatccgacggtgtcgagggacatgatcgcgcgcgtggagagcggaagactgatgtacaacaacagccgcctgttcgcgtcgtccaagtttttgagcggcctcaaggtactttattaccgcgcctttgccgtcgtgtacgggtggtgcggacgatcgtgtaagtgcgtgatggtgaactcttcgtggactaaatcgcacatcgacgcattgtggcgggttgattcacgggtggtgtatcccccgtgcaacgtcgaagacttgtccaaactcccgttgacgcgcccgaggttgaacgcgcgcgggacgccggtgaaaaaggacaagtcgtcgatacgcgttgttagcgtggggcagtttcgaccggaaaaagcgcacgtggttcaaatcgccgcctggaaggctttgaaaaagttcaagacgaaatcgagcaagattgaaaacgccattttggtcttcgtcggtggatgccgtgacgaagccgaccgcgagcgcttggcagatttgcaacaaagtgtcaaagatctggagctcgag

SEQ ID NO: 1606 - DNA, 4000 bp, Escherichia coli
  misc_feature (1443)..(1443): n is a, c, g, or t
  misc_feature (1479)..(1479): n is a, c, g, or t
  misc_feature (1738)..(1738): n is a, c, g, or t
  misc_feature (1796)..(1796): n is a, c, g, or t
  misc_feature (2002)..(2002): n is a, c, g, or t
  misc_feature (2015)..(2015): n is a, c, g, or t
  misc_feature (2287)..(2287): n is a, c, g, or t
  misc_feature (2377)..(2377): n is a, c, g, or t
  misc_feature (2464)..(2464): n is a, c, g, or t
  misc_feature (2473)..(2473): n is a, c, g, or t
ggctggatttgagtccgttgaattcggcctccctgtgaaattgctcaaaggggctatgacggttcgaattcatgctgattacgctcgaactgaagatgatgtgacatgggtcgaatgccggcttgtttctgatttgtccaattcgaagggtgaagtgtttggtgaacgtgagcatcacaaggccatggttcgattggtcgagaaatgtgatgacatctgtccattcctggaacgagaagtccatgctttgccaaacattggtattcctgctcctggtgaagtgattgaaggcccctcgttcatctatcgccggtacttccacggaccacgcttccagtcacatggtggtgtgttgcgtggcattggcgatgatgccatgcctggtgcagacgggattgccttgatgcgccaccaattgcctgcgtccgatcagttcgctcacgaagcgaatggcgaatcggtgctgttggaagcccttccgatgttgattgaagctggtttccaaaacgctggtctcgtggcgatggaggcagaaggcttctcttctctcccaatcggtattgagtggtcctcaatgctgagggtcccagatcgagatgaacaacttcgaatgcgcagccttctaatggccgttgaagaagctggtgtcaccgttcacgatgttgtaatcgttggtgacgatgacgcccctgtgcttgccctcaaaggcttgcgactcaaaggaatggcgcccgtctcgaattcggatgcattccaattggaccgttgacgaggtttgatgatgtccgtggaagaactacaccccccgggtgtgaatcaaccacgaatgctcctgcttcgcatgcctgtacgttccttttcgattgatgaggtggcattggcgaatgccgatgaggtggccacttttgcgattgaaaaacgacgtgatgagcatctttctggccgttggttgttggggcaagccgttgaggcttggggattggacatcgccggtttgtcggtccatcgaactgatcatcgagcaccataccttcgacacatacctggtttgtggagaaacacgcccttgccgtcaatcagcatcggacacgcctctggatgggcctttgtggccattattgagcatggatggcggattggaatcgatgcggaatctgcgaaccgtgggttgcaagaaaatgcattcaacctgatgtgtaagggcgaagaattgcttgcattgcaggacgcaccatcgcatgcaatcgaactctgggttgccaaagaagcggtgcaaaaagcgttgggattaggcatgcatcttaatccacgcgatattggaattccaattggagttccacatgcaactattacaattgaaaatttaaatttgcaattggtaaattgggttaacgactcgatgcaaatgagtcttgcttggggccaattttccctctccattcnaacccccgaggatgcgcttctcgacgccacccgcgnagcgatgcaagaaggtgaatggggcgttggttgcaagaccactcggggcaattgttgatcagcgccagaaggcgtaactgtctcggcttgattcccagggcaggccgagttggatgccaatttccgttagaatgacgtaattgaacagcatgtaggaaatgtaggtcactgcaaggaccagaagagatatgttgatgattttccgacgttctctctttgcttggtcaagcgtgcagatgccttggtttcggaagtagancaccaaaccaattcccacgctggcaagggctatgaggcccataagtggtctgaaccangaatatccatcatcgccccagtacaatgtgtctgagatgacggcgccagttgatacggtggcgagtccaaacatcaccaagacgaccgatgggaggcaacacatcgatgcaattaacgtggaacttgcgatgaccttccaaagcgaccgcagagggttgtctttggtcgtagcatacgcatcgctcatgttgggaattctgtgctnctgcttttgaagngatgttttgcttctcaagcgaggttacggatttccggggtctggtcggccacaatgaattcaagcattgcagcccacattacaaactcgatcgacttctccaattccgcttgtcctccgacggaactgatcatgttgtcgagggtgtcattcggtgagtggtaggcgtcatagtcatcgtcgtatgcgccgaggtggaagattgtctgagcacctctgtctcgaaacgtcacgtggtctgaccggccaaatgtgtcttcatggacatccatnaccaagttgtcatgttcatcccagtgttggtcacaacctgctccataagtgccgtcgatcctcaaatccatcggcgctttgaggatgttnctgtgcacatggtccatcacttcggtgatcggcagttcgtcaacggagggatcgttgtccggtccagaccatgcgtggtaggggaanggctcaccngtgtccttcaatgcgggccacgagatgcccatcatatccatgttaatgtagaaacgaagctccttgtcttgagggaggcagtaatcacagtcattgtttgcgaatgcattggagcctcggagcccttcctcttcagatgaccagagggcgaggaatgtgtcgcattcaacttcaaggtcaacaaacgcctttgcgtacaacatcattgccacagtccctgccgtgttgtcataggcgccttcgtaggtgcctcctgcgggtggtgatgctggaggtgcgatgtccatgtgcgcacccatgccctggacgcaggtgtcagagcgtccctctttccaagcaataatgttcaacgattcaggttgagttgggttgaggtggtcggtcacccgcatgatgtgagtttcatacccaaggccttcgaaatggccgtggaagaagctagcagctcgttcaaacgcagggtttggtgaccccatccatcggttgatgtagccgccgcactccgttgagtctgcacatacattcagaatgaactccatcttgtcgaaccactcttcgccatttacaatgggcgttccgttttccacaatgaggtcaatggttgctccgctgccatcctcgtacacgatgttcaggacggttgattcgacatagggcgttgtgaggatcttcccgatcagaataccatcttcctgtacttggacaacgccaagggggacgatgctgttgttcacaaacagcaagacatcttgttgaaccacaagacgtgtgccctctccttcgagcgtgaacgtatgccattcaccagctcgcaacggaagatcacctgctgggaggaaatcgattttgaggacatcggcttttgtttcacgatcgctgtcagcttcgccaaaacaaccggcaagcggtgcgagcatcatcaacgcaatcaggccaaaggctcgaacagagtttctcatgagggtccccgactttagggcgacctcttcccctcttaggggttcgctttctttggaatcgctggacataaagttcagtgactttgatttcgtgaacttgatatagggtgacacacaggccactatgtaactgatagttcagtagtggaaaggtgagtcgatgacgagcggtgaagattgggaagaaaaactggttgagcaacttgtggaaatgttccgaaacatgggcatggacatggacaaagaacaaatccgcggcatgatggaacagttccgctctcagttcgaaaacatgggcctcgatgctgaaaaaatcgcaaaaggcgatgtgaatttcaatttcgatctttctcacttggccaagatgttccagtctggaaaaccaatggaagacattctctccaacctaggcatggacgtccaagtcgatgccagccctgttgaaatcaaagcgccaaagatggatgaaccagacgacatcatcaatattccagcaaacgatgtttacctcgaaggctggaacatggcagtgacggtcgacttcacgctgcgcggcgaagtcgaacaa

SEQ ID NO: 1607 - DNA, 4000 bp, Escherichia coli
  misc_feature (32)..(32): n is a, c, g, or t
  misc_feature (504)..(504): n is a, c, g, or t
  misc_feature (838)..(838): n is a, c, g, or t
  misc_feature (1298)..(1298): n is a, c, g, or t
  misc_feature (1691)..(1691): n is a, c, g, or t
  misc_feature (2169)..(2169): n is a, c, g, or t
  misc_feature (2685)..(2685): n is a, c, g, or t
  misc_feature (2927)..(2927): n is a, c, g, or t
  misc_feature (3754)..(3754): n is a, c, g, or t
  misc_feature (3814)..(3814): n is a, c, g, or t
  misc_feature (3953)..(3953): n is a, c, g, or t
gttgaacctttttactggtcatttaaatctgntgggccagaactcaagatgttgggtgccatgcaaaacagagtttgtttgtttctgatatcaatggtttttataactatgagtgtgcccgcgatgtcatacgaggaacccaagtacaaaatcatcacaaagactgacatctatgaggtgcggcggtatgaacagcggactgttgctcaggcaaaatatgataaggcggacagtggcttcagaattttattcgactatatatccggtgaaaatgaaagcgcaaccgatgtcgcgatgacgatacccgtcgctcaatctacagaaatcaatatgacggccccagtcactcagactaatactcgcgggaaaatggtgatgcagtttttcctaccaaaaaaatacaccaaagaaacagcacccagaccaaaagatggcaggatcgatattattgaccttccaaccacttattatgcagttatctcctattcaggatttgcatctganaaaaactttcaaacacaccatagaaaactaaaaaacgcgcttgatgaaagtagaattactgttagtggccctccaatcagagcgacctacaactcaccatttactctaccattctttcgccgcaacgaggctatgtacccactagattgggattaaatattcgattaataaatcgagattacagttcaaagatcataattcggaagcctccctgtctacaatcgtatcactgttagactgtggactccccctgatagagaaatcacttttttctcacataattcgctaattaaatttttggcaagcacctgaaataaagcgcatgtttgaatgngtctcgattttggtgaagggtggatggaaagagacgtgggccgttcagagacctattttggccgaaaccccagcgtctgatagccggatggtctcgctaaacccctttgaaacaaatagaaaaaaggccccgctagggacctgtttttgggtttgcgatgtgcaagtggcggagggacggggattcgaaccccggaggggcgttaaccccaacacgctttccaggcgtgcgccttaaaccactcggccatccctcccagtacgcaactgttattcgaccttgattagctcttcggggcgaaagttaacaggcttggctcatcatgtaaactagccgaaacagcttcgaattagcgttttcaagcaccaaccccaaaatattaaacctcaacatcacatccgattgtgggggaaacgccaaactcaaaccgagcccaacaattgccatggttagaatgtanaaattcactggtcagaaaatactggtcactagataaatctcttgtgtcgagttgcagttatgaacatgatgatcttattatgaaatatttttttcgacttatcgccacccttgcgggactggtcgctgcctatgctatttggcaggacctgaccagcagctatagcgccagcacgccacttggccggttatggtatctatatagcccaacaacattacagaccaccgaatccattatcagccgctatattgacccgtgcgggttgattacggcattagattgttcgccctttttatggcatccgtttatcgccaccattttaggctggccagccgccttggtcatgatcggattcagcattatattctggtgggttggtggcttgtttggccngcatttaacgcgccccaaaaaggccgcgcgcgcgctcaaacgacagggtgaaaaatagccggtgatatgcagttcctaatcgaatcgcgataaaacctcaaatagtcgcaagtttcaccgccataggccgcaccaaagacaggtcagagcctagcgttaattatcacccattttcaaggcttcgaaaaaggcgttctgcggaatttcgaccttgccgaattggcgcattttctttttgccctctttttgcttatcgagaagctttttcttgcggctgatatcgccaccataacattttgccgttacgtctttgcgcagcgccgcaatcgtttcacgcgcaatgactttgccgccaatcgcggcttgcagtgccactttgaacatttgacgtggcacaaggtcttttagccttatgcaaattgcacgacctttgccttcggcctgatcacgatgcacaatcatcgacaaggcatcgacnagatcgccgttcacaaggattgacactttcacgagatcaccctcgcgatagctatcaagcgcatagtcaaagctggcatagccgcgggtgattgatttcaaccggtcataaaaatcgaaaacaacttcattcaacggcaggcggtaaacagccattgcccgattgccagcataggtaaggtcaatctgttcgccgcgccgctcggtacaaagcgttaaaaccggccctaaaaattcatcaggcgtcataatggtggctttgatccaaggctcttcgatcgaggcaagacggctaacttcgggcatatcggccggattatgcaaatataaatgtttcccatcggtaagggtcatttgataaacaaccgatggcgctgttgaaatcagctcaagattaaattcgcggctcaatcgctcgcggatcacttccatatgaagaagacctaaaaatccgcagcgaaagccaaagccaagcgccgctgaggtttcagcctcgaatgaaaaagacgcatcattnagtgatagtttttcaagcgcctcacgaaggccgctgaaatcatttgtgtccaccggaaacaagccgcagaacaccactggaattgatggcgcaaatccgggcaaggctgtgtcggttgggcggcgctcttcggtgatcgtatcacccacctttgcatcggcaacgcgtttcacgccagcattgataaagccaatttcacccggaccaagctgatcaagcgcaatcggttttggcgcaaaaanaccaacgcgttcgataacatgggttgcgcctgtcgccatcatacggattttcatgccctttttcagcacgccatgacgcacccgcaccaaggtcataacgccaagataggcgtcataccagctatccaccaaaagcgcctgcaagggggcatccttgtcgccaacaggtggcggtaattttgtgaccagcgcttcgagaatatcttcaatacctgcgcccgtttttgccgatgctgcaatggcatcatcagcaggcaaaccaatcacttcttcaatttgggctttgacgcgttcaggctcagccgcgggaaggtcaatcttattgagaaccggcacaatttcatgatcggcattgatcgcctgatagacattggccagcgtttgcgcctcgacgccctgactagcatcaacaataagcaatgagccttcacaagccgccaatgatcgcgatacctcatagccaaaatccacatggcctggcgtatccatcagattcaaaacataggattgtccgtcttttgctttgtaatccagccggacagtttgcgccttaattgtaatcccgcgttcgcgctcgatatccatactatccagcacttgttctttcatttcgcggtcactaagcccaccacagacctgaatcaaccgatcggcaatcgttgatttgccatgatcaatatgggcaatgatggaaaaattgcggattttgttgatgtcgatcatgatttactttgcaatctgaaacgggctgaaatggcatggttcagcccatgctatacaacaatttctgatgaaataccgcatttaatcatggttcgggttaaagnttcgcgatctttttcctgtttcaacctgccgcttgtgcgtatattatccagttcgttctntcgcgataagacagatatttcaaattctttagataaagagaagctgatgccaagcctgcgtcatgaaaaataccgcccatttatcggccctgatttaggtgaccgtacatggccgagccaacaaattaaaacagcaccnatctggtgttcggttgatttgcgtgatggcaatcaggccttgatcga

SEQ ID NO: 1608 - DNA, 4000 bp, Escherichia coli
  misc_feature (4)..(4): n is a, c, g, or t
  misc_feature (6)..(6): n is a, c, g, or t
  misc_feature (11)..(11): n is a, c, g, or t
  misc_feature (15)..(15): n is a, c, g, or t
  misc_feature (18)..(18): n is a, c, g, or t
  misc_feature (22)..(22): n is a, c, g, or t
  misc_feature (27)..(27): n is a, c, g, or t
  misc_feature (29)..(29): n is a, c, g, or t
  misc_feature (31)..(33): n is a, c, g, or t
  misc_feature (35)..(35): n is a, c, g, or t
  misc_feature (37)..(37): n is a, c, g, or t
  misc_feature (56)..(62): n is a, c, g, or t
  misc_feature (64)..(67): n is a, c, g, or t
  misc_feature (71)..(72): n is a, c, g, or t
  misc_feature (75)..(76): n is a, c, g, or t
  misc_feature (80)..(80): n is a, c, g, or t
  misc_feature (83)..(83): n is a, c, g, or t
  misc_feature (85)..(85): n is a, c, g, or t
  misc_feature (96)..(98): n is a, c, g, or t
  misc_feature (101)..(106): n is a, c, g, or t
  misc_feature (108)..(108): n is a, c, g, or t
  misc_feature (110)..(110): n is a, c, g, or t
  misc_feature (434)..(434): n is a, c, g, or t
  misc_feature (465)..(465): n is a, c, g, or t
  misc_feature (571)..(571): n is a, c, g, or t
  misc_feature (1626)..(1626): n is a, c, g, or t
  misc_feature (2980)..(2980): n is a, c, g, or t
ctcncnccctnctanccnctcnctccncncnnntngnagcccccaaatggcccagnnnnnnncnnnngtanntcnntttnttntnttgtttttccnnngcnnnnnncncncgcgcagaccggctcgaaccttcgtcggtctcttcctcacacaaaaaccaaatcaggagacgggcacacgatgttcagagtgcgtcacattgctttttcgttggccattgtcggagtcgcggcctcattgccgaccgatcttgctcacgcgaggggccaggccctaaagcgccacatccattccgcatcattggggagaaagcctgcgcggtggtgcggatggtggatgaggacccagaagggcggcgggcccgagatgaacctcgcgcgcaattgggcccgttggggcagcccgtcaggcccgcgcgtcggcgcagtggtggnttggcctcaccatgtcggcctcattaccggncaaactgcgagcggcgagtggatcgtgcgctcgggcaatgacggtgggcgggtacgcgagcggccccgctcggtggccggcgccgtgttccgcatctaatagcccncagagaagccccggttgccgagcgcgaccggggtttttagcgtcaaacgatgaggcttagttcacgcgcgacttgagcgcgtcgatgccctgcttgacgagcttgtcggcagtctcgggcgtgaggcccttggcaatgagtgtctgcgcggcaatgaccgcggcatcggcagcggcattgcggacctcgcgcaaggcctcggcctcggctcgcgcgatcttgtcctcggcaagtttcatgcgccgctcgaaatgctctttcatcgaacggcgagtctcctcggcaagaatttccgcctctttgccggcgaggctgatgatctcttgcgcctctttggcgacatcgccctcttttcgcttgtagtcggcgagtaccttttcggccgcctcgcgcaggtgcctcgcttcttcaagctccttcttgatctgggcggcgcgattgtcgagcgcagcggcgatcttcttgtgcacgccgagatagagcacgaggccgacaaaaatgaagaacgagacggcgacccagaattcgggctcgaagatgaattccatcgcttactctttccgcgcggctgccaccgccttgtcgatttccgcttttggcggcgccgcgccaatcagccggcgcactatatcggcggcgacgtccgccgctacggcgttcacgtccttcatggccgacgtcttggctgcctcgatgcgcgcctctgcctctgcgctcttctcggcgagatccgcctcgagcttcgcccgctgttgcgctgtctcctcgttgagcgcggcgcggccttcctcgacgatggcgtgcgccttctgcttcgcctcggcgagagcctgctcataggcggcgatggcttcctcggtcttgcggcgaagccgatcggcttccgcgagatcattggcaatatgtgctgcgcgtttctcgatcacgcctccgatacgcggcaaggcgacatacaccatcagcagatagagagcgccgaaggtgatgagaagccagacgagctgaggcccccaatcgagcgggttgagctgtggcatgatcgtcctcgcgcgcgncggcgaacggcggcagagctagaacacgaacaggatgatcagtgccaccacgaggccgaacaggccggtggcttccgcaagggcaaagccgagcagaagattggcgaactgcgtcggcgccgccgacgggttgcgcagcgcaccttggagataattgccgaagatcgtgccgatgcccacgccggcgccgacaagcgcgatcgaggcaagccccgcgccgatcaattttgctgctgatggatccatttctctctccctttgaaacaatattgccgattcagtgaaggctagtgatgcatgtgaagcgcgtcgttcagatagatgcaggtcaaaatcgcgaacacgtaggcctggaggagcgcgaccaggatctcaagcccggtgaacgccaccatgaaggcaagcggggcccagccgcccaagatgccgagcgcgacgacgaaggcgccgaacactttcagcatggtgtggccggccatcatgttggcgaacaaccgcaccgacagcgacagcgggcgcgtcaggtaggagatcacctcgatgaccacgagaagcggcagcatgatcaagggcacgccctcgggcacaaagaatttgaggaacttcgctccatgcttgatgaagccgatcagcgtcacgccgaggaagatgaaggcggcgagcgcgaaggtgacgatgatgtggctcgtcacggtgaacgagtaggggaccatgccgagcatgttcagcacgagcacaaacatgaacagcgtgaacacgaacgggaaatatttcatgccgtcggtgccgacattgtcgcgcaccatgttggccacaaattcgtaggagagctcggcgaccgactgcacgcgcgagggcactagcgcgcgattgcgcatggcgtaaatggtgaacagcgtgatgatcgtgccggcgatcaccatgaacagcgcggaattggtgaaggaagcatcgaagccgaacagctcgagcggaatgatccgtttgatctcgaactggtgcatggggttgggcaggccgcctgcaccggccccgccatgctctgccccttctgcggcgtatgcctcgatcacctcgaaacgcctctaatcgtcatcgtcatccaaaacagcgggcggtgcgttgccgggactcacctcggtctgcatcgccttggcggtccgcactacgttcagtatccccgcggcggagcccaagatcaaaaacaccaccatcaggaacggcgccgagccgaacagccggtcgagcgcccaaccgatgaaaccccccacgaccacgcctgcgaccagctcggtcgcgagtcttagagccttgccgagcgcggccccccgtgcctctggctccgactgtggcnccgcggcgcgctttcccttggcctccgccagttgctgcccaagcttgtcgagccgctgacgaatgctttcggggtcacggccgctaggttcgcgaccggacttgttgtcggctccggccattggcactgctcaatttccgggagagcctttggaccggctggtccttaagcttggccggcactttagtttgcgatttgcccctgtcaagaaagtccggggcttaaacagactgcaagaaagggggctcgtcattcccgcgaaagcgggaatccagtaatcaccgcgttcggttcaccaataagcgcaggggtcactggattgcccggtcaagccaggcaacgacagagaggtcgattaggagcgattaactcgcatcgcgcaggcgctctgctgtctcgaggtcgaccgagacgagctggctcacgccgcgctcggccatggtgacgccgaacagccggctcatgcgcgccatggtgagtgggtggtgggtgatgatgaggaagcgcgtatcggtctcgttggccatctcttccatcagccggcagaagcgttcgacattggcatcgtcgagcggcgcgtccacctcgtcgagcacgcagatcggcgaggggttggtgaggaacacggcgaagatgagcgcaagcgcagtcaacgccttctcgccccccgatagcagcgttagcgcctggagccgcttgcccggcgggcaggccattatctcgagcccagattcgagcggatcgtcggaatcgacgagcctgagctcggcggtgccgccgccgaacagcgtcttgaacaggcggccgaaatggccgttgaccgtatcgaaggcttcgagcagccgcttgcggccctcgcggttcaaattggcgatgccttggcggagccgcgcaatagcctgctcaacgtcggccttctcgcgctccatctcttcgagcttggcggaaagctccgcctcctcctcctcggcggcaagattaacgccgccgagcctctcgcgatcgcctttgagcttcaag

SEQ ID NO: 1609 - DNA, 4000 bp, Escherichia coli
  misc_feature (2649)..(2649): n is a, c, g, or t
gactcccacactcccaacgccggcggcctaggctgcttggccatcggtgtgggaggcgccgacgccgctgatgtgatggccggcctgccctgggaggtcaagtacccgactctagtgggcgtccgtctgacgggcgagctcagcggttggacggcccccaaagacgtgatcatctacctagccggcgtgctgactgtcgccggcggcaccaacgccattatcgagtacttcggacccggcgtgaactccataagctgcaccggcaaggccacgatcaccaacatgggcgctgaacttggcgcaaccggggacgtattccccttcgacgagcggatggccacctacctgaaagcaaccaaccgccctgaacttgccgagttggctgagagatacaagcatctgctcacatccgaccccgaggtcgagcaagacccggcccagtactacgaccgcatcgtggagatcgatctttcgactctggagcctcagatcaccgggccccattcccccgaccgcgcccgccctatatccgctatggccaaggagatcgaggaggagggcttccccgacaaactctccgtggccttggtcggtagctgcaccaactcctcctacgaggatatgagccgctgcgccgacgtggccagtcaagcaacggagcacggccttcaagccgtgtccgaattcatgattacgcccggatcggaacaagtacgggccaccatcgcccgcgacggccaacaggcggctttagaagaactaggcggcatggtgttggccaacgcctgcggcccctgcatcggacagtggaagagggaaggagttccggatggcgaaccgaactccatcgtcacgtcctacaaccggaacttccccaagcgcaacgacgcgaactccgggaccatgaacttcatcaccagtcccgagttggccgtggcgatgagcctgagcggccgcctgagtttcaatccgctcaccgatacactgaccggcgccgacggcaaagaattcatgctggaagcgcccggacccgccccggaagtacccgcgggcggctttgacgccggcgagcagggctacgtagccccgcccgaagacggaagcagcatcgacgtcaatgttgatccaaacagcacccggctgcagattttggagccctggcccgcctgggatggcgaggacttcaaggctatgccggtgctggtcaaggcggcgggaaagtgcaccactgaccatatctctccggccggggcctggctccgcttccgcggacacctggataacctgagcgacaacatgttcttgggcgcggtgaacgccttcaccgacgagcctggcaccgggaagaaccaactatccggtgagcagatacaacccatccctcagatcgcccgggagtacaaggcccagggcatgcaatggatcgccgtcggcgacaacaactacggagagggcagcagccgtgaacatgccgccatgtctccccggatgttgggcgcggcggcagtcatcacccgcagtttcgccaggatccacgaagccaacctcaagaagcagggcatattgcccctgacctttgaggacccaggcgactacgaccgcatcagggccgacgaccggctgagcatcatcgggctgtcggacctggctccaggtcagccgctggtctgcgtggtctcccatgaggacggggaagaggagcgcatcaacctgcgtcacaccatgaacctcggacagatcgattggttcaaagccggctcagcgatgaaccacatgaagaacacggcaggagggtaggcgacccctgattctgccttgaccagatgttgttggaccaagctaagccgtggttcgacaggctcagcttgagagggatgagagtaatacaaatccgttcgtcctgtccttccccggaaggatgtcgaaggaccggcatcagtcaagctctcaatgtggaactgaaacgaaaaaggggcgtcccgatcaatcgggacgcccctttttgctagttcgcgccagaagttgtttaacccaagtcgtccaaacaggcctcaacgggcttggcgatgcaggagaagatgggggtatccaccaaagtgtagggccgggccttggactcgcgaaggtccatcaccaggtccaggaagtgggacgggtcgtcggtctcaaatccgagcacgaattcctggtcgtcgagtccgaacgaatacgccgtgctgatcttcacatcagggtatttatgcccgatgacgaaatgctcgttcatcagctcctggcgttcttccttgggtagttgataccactcgtgggtcttaatgaagggatagatgaacaggtacttccggccgatgatgcgcatggtcgcggagcccgttccctcttggccttcgtgcttatgatcgtcgatatacggcgaccggcgggtcatggccaagtatgaataaggcatcgtcaggtagcgggccagatcggtgtggttaaccctggccatcagctcgttgatggcttccagttcctcgctcaccttccacagcaggaaatcggcgtcgccacgggtgccaaccatgctgtagctggacatggacacgcggtcggaaaactctcccaacacctcggcaaactgggccttgttgtcctggcgttccttcnccggaaggcgccgccactcggggtcgaccttgaagaatgaatacttcacgaaatctcgcctgacttgttctgtcatctaaccctacttcgcggtttttcggcccgccgtcgaatcttggatgcggggataccgaaattatcatagcaacggccaatggctcgtggcaacgtaaagctcgtcttgggccggttgaccgaaatataagaaccgggtctgcggcctcgttgctttcccttgtggcggtgctacaatctccgggtgtcccttacgggggcttaaatcaccagaaaattaacagaaatcgaggatgtagcgatggtaactcttggctcaggcgccttcacttatgaggtagaagagggttggggcacgctccccgacggttggtcttacaaagagtgcgccgcagtcggagttgactcccaagaaaacgtatacgttttcaaccggggcgagcatccgatgatcgtcttcgacaaggacggtaatttcctccgctcctggggcgagggtgtctaccctagggctcacggcatcacgatggggcccgacgacagcatctatctgaccgacgacggcgaccacaccgtgcgcaagtgcaaacttgacggcaccgtcatcttcaccctgggcatcagcggcaagccggcgcccttcatgagcggagaccccttcaaccgttgcacccacgttgccctggaccctcagacagccgaattctacgtatccgacggctacggcaatgcccgtgttcacaaatactcgccggacggcaagctgctgttctcctggggcgaatcaggcaccggaccgggccagttcaatatcgcccataacgtctgcaccgacaaagacggctgggtctacgtggctgaccgggagaaccagcggatacaggtcttcgacaagaacggcaagttcgagactcagtggaaggacatggcccgtccctgtggcctgtttatcgacaccagcggcgaccagagggtctacgttggcgaattgggcgcggctatcggccccaacgaccaggcgtctggcttaggcccccgaattggcatcatggatctgaagggcaattacttggccaaattgggcgacattcccgagggcgaagagcccggcacgttcatcgccccccacggtgtctgcatcaacggcaaaggcgacatcttcgtgggcgaggtatcctggacccacacgggcagccgcctcaacccaccccgtgaggtacgctccctacagaagttgaccaagaagtaggggtaggacttcagagagcagcccttcgcaacgggagggagttagggtgagggccgccctctcgcacaagacacttagatcggagca

SEQ ID NO: 1610 - DNA, 4000 bp, Escherichia coli
  misc_feature (13)..(13): n is a, c, g, or t
  misc_feature (22)..(22): n is a, c, g, or t
  misc_feature (70)..(70): n is a, c, g, or t
  misc_feature (85)..(85): n is a, c, g, or t
  misc_feature (91)..(91): n is a, c, g, or t
  misc_feature (106)..(106): n is a, c, g, or t
  misc_feature (244)..(244): n is a, c, g, or t
  misc_feature (319)..(319): n is a, c, g, or t
  misc_feature (571)..(571): n is a, c, g, or t
  misc_feature (613)..(613): n is a, c, g, or t
  misc_feature (619)..(619): n is a, c, g, or t
  misc_feature (622)..(622): n is a, c, g, or t
  misc_feature (769)..(769): n is a, c, g, or t
  misc_feature (871)..(871): n is a, c, g, or t
  misc_feature (877)..(877): n is a, c, g, or t
  misc_feature (880)..(880): n is a, c, g, or t
  misc_feature (1457)..(1457): n is a, c, g, or t
  misc_feature (2561)..(2561): n is a, c, g, or t
  misc_feature (3052)..(3052): n is a, c, g, or t
  misc_feature (3165)..(3165): n is a, c, g, or t
  misc_feature (3387)..(3387): n is a, c, g, or t
aaactttatcaancctacaganttcagttatcataaagtagtacaaatcttattgttccctgtatttggnggttctaatgtagtntggggntccgtactcggttcnttcattcttacattgttgccagaagtattgcgtttcttatccgactatcgcgatatcatttatggtgcattgttagtcattttgatggctgttcgtccagatggtattttaaccgaatctatggtagataagattagncgtaaattaggctttaaaaaagctccatacattcctgaaacacaagtattaacagaacgttttgaagcgtataancgtaaacaacaagataaacaaggataggaggggaactgaatgctattagaattaaatgacgtaagtaaaagctttggtggcgttgcagctctcacaggcatatcctttggtgttaagcaaggtgaagtgtttggtgttatcggaccaaatggtgctggtaagactacactctttaacttgattacaggtgtattccctgtaagttctggcgaaattgtatttgatggtatgtctgttgtaggcattaaaccncatagaacggtagaaatgggcattgctcgtacattccaaaanattcgnctntttggcaatatgacagctttggaaacagtattaactggtatgcattgccgaactggttctggtttcgttgctagtttcttaagaacaaaacgccaacgtattgaagaagaacgttgtcgtggcattgcctatgaatttttaaaactngtaggtcttgaagaagatgctgaagaagttgctacatcattaccatatggcaaacaacgtcgtctcgaaatcgcgcgtgctttagctacacatcctcaattnattttnctngatgaaccagcagcaggtatgaatgatagtgaaacggaagcgttacgccaattgattggtaaaattcgcgacttaggtattactgttgtcgtaattgaacatgccatggaattgatgatgaatatctgtgaccgtttggtggtattcaattttggtaaaaagattgctgaaggtacacctcaagaaattcaaaataatgaggctgttatcgaagcatacttaggtaaagaggaggtgtaatatgttaaagctagaaaacatcgtggctggttatggacatattacagccttaaaagacattagcttagaagtaccacaagggtctatcgtatccttgatcggtgccaacggcgctggtaagtcgacaacaatgaagactattatgggccttgtaaagcctacatcaggtaaggtgctatttgagggtcaagacattactggacataaaactcatcaaattgtacataatggtatttccttagtacctgaaggtcgtcaaattcttcaagatatgagcgtttacgagaatcttgaaatgggcgcttatatacgcaatgataatgagattgaagcgganattaaaaaggtatttaaacgctttccaattctcgatgaacggagctatcaactaggtggtacattatctggtggccaacaacaaatgcttgccattggtcgtgctcttatggcccgtcctaagttattgctactagacgaaccatctatggggcttgcaccattagtagtaaacgaaatctttgaaactattaaagaaattagtgcagaaggcaccaccgttctcttggtagaacaaaacgtccgtcaagcattgaaaatcgctgattatgcgtatgtattggaaacaggcaaaatggtattgtctggtccagctgatgaagtacgacatgatcctcgtgtcatggaagcttatttgggcggtcgtgtcgaataaaattaaatacaatttatttggatgtatatatctattattaaacggatatatacatccattttttttgcaaactcctaaatatagaaattttttattagtaatagaaatatatagaacaaaataacacttcgatatgtgaagaaaaatacacatatacgggtaagcattaaacatagataatttcagtattcttgatgcttcatgaaaaccatataaagaagcttcatcttgcttatatagtagttacaaagaaacgatgataaaatatgtgtacgataattaattaaatattaaatttatttaaatagttgtgttaaggtgttttgttaattgaaatgaatgctatgaggtgcatgtatgaatcaaaaatggattgctttatctcttgtcataggtacgatagccactacgggttttgcaaaggatgtttctcctgtagtagttacaacatcaaatatgaatacgtctgcatctacaattggttctgatcaagagtatcgtctacgacaaggggatgaactcatgattgatgtagtacaacaagcagatttaggtgcaaataaaactttcaccattcgaccagatggatatgtatccattcctatggcaggtaatattaaggcggatggaatgacagtagaagaattcacccgaaatgtatctaacgcattatccatatacattatcaatcctgatgtgtcggttaatgttacaaaattaggtggcgtncgcgtttatgtatttggtgaaattaataaaccaggtgcttatacattaacaaaatcgagtaccgttattgatgcgattggggtcgcgggtagtttcaactgggatacggctaagaagaagatattcttaattcatcaaaatgatcctacaaaacctattgaaatcaatttaaataatatgttgaaaactggtgatatgtcccaaaattacgttatgcgtgaaggcgatatcttgtacttaactaagaacagtaagattagtttctctagagatattgctcctattttgacaggtgcttacatggtatctcgcataggtaaagactaattagtaaaaatagtatcatatgtaagtcatataaggggggctttcattgcgttcatatttattacccggcttattacttattgtagatgttattactattattggtgtggcattgatcagtttgcttatacgatttgatggttatataacatcacattatctgnatcagatgatagatgcattgcctataatggtaatctcctatattgttatgcttttgtccatgcatctatatacgcgcatatggcgctatgcaggtatgcgcgaaatggttgcngtattgattgcgaccaccttaggagcaggacttttctatacagggatgtatgtatttgataaatctttacctagatccatatatttgattagctggattcttagtaccggtgttatcggaattggtagaatggtactccattatattgccatgcgatatggtggaaaacaaagtactgatgctgatatggtaaataccttaatcattggcgcaggtgatgcnggtgccacaattgctcgtgaaattgaacggtatcataaacggtctcgtaaggtaattggtttcatcgatgatgatgagtctaaattcaatcgtctaatgggcggcgttcgtatactaggtaatcgccatgatatcccatctattgtaaaagaaaataaggtgaaagaaattataattgccatgccttctgttacacgtaatgaaatcagaaatatcatggaaatctgttcacctcttaaatgtaaagtcaatacattaccggggatgtatcaattgttagatgatgaggtactagtatcccatttacatcctgtatccatagaagacctattagaacgtgatgaggttcgtctcgatatggatattgtagaacattatattcgcgataaggttgttctggttactggtgctggtggatctataggttcagaaatttgtcgtcaaattatgcgtgttggccctaaacagctcttattgttaggccatggtgaaaatagtatataccttatcaatcaagagttgaaaaatatatataaagacggcccgattataccaattattgcagatattagagataaacaacaattagatcaaatattcactcaatataatc

SEQ ID NO: 1611 - DNA, 4000 bp, Escherichia coli
  misc_feature (912)..(912): n is a, c, g, or t
  misc_feature (1200)..(1200): n is a, c, g, or t
  misc_feature (1368)..(1368): n is a, c, g, or t
  misc_feature (1988)..(1988): n is a, c, g, or t
  misc_feature (2421)..(2421): n is a, c, g, or t
  misc_feature (2430)..(2430): n is a, c, g, or t
  misc_feature (2439)..(2439): n is a, c, g, or t
  misc_feature (2445)..(2445): n is a, c, g, or t
  misc_feature (2487)..(2487): n is a, c, g, or t
  misc_feature (2499)..(2499): n is a, c, g, or t
  misc_feature (2505)..(2505): n is a, c, g, or t
  misc_feature (2513)..(2513): n is a, c, g, or t
  misc_feature (2539)..(2539): n is a, c, g, or t
  misc_feature (2568)..(2568): n is a, c, g, or t
  misc_feature (2583)..(2583): n is a, c, g, or t
  misc_feature (2586)..(2586): n is a, c, g, or t
  misc_feature (2604)..(2604): n is a, c, g, or t
  misc_feature (2703)..(2703): n is a, c, g, or t
  misc_feature (2771)..(2771): n is a, c, g, or t
  misc_feature (2831)..(2831): n is a, c, g, or t
  misc_feature (2947)..(2947): n is a, c, g, or t
  misc_feature (2962)..(2962): n is a, c, g, or t
  misc_feature (2976)..(2976): n is a, c, g, or t
  misc_feature (2980)..(2980): n is a, c, g, or t
  misc_feature (2983)..(2983): n is a, c, g, or t
  misc_feature (2986)..(2986): n is a, c, g, or t
  misc_feature (2989)..(2989): n is a, c, g, or t
  misc_feature (2992)..(2992): n is a, c, g, or t
  misc_feature (3019)..(3019): n is a, c, g, or t
  misc_feature (3022)..(3022): n is a, c, g, or t
  misc_feature (3088)..(3088): n is a, c, g, or t
  misc_feature (3107)..(3108): n is a, c, g, or t
  misc_feature (3118)..(3118): n is a, c, g, or t
  misc_feature (3241)..(3241): n is a, c, g, or t
  misc_feature (3397)..(3398): n is a, c, g, or t
  misc_feature (3425)..(3425): n is a, c, g, or t
  misc_feature (3778)..(3778): n is a, c, g, or t
agtgcttgccccgcccaattcttcagaggtaacctcttcgtgcgtgacagttttaacaacatttgggcccgttacaaacatgtaggaggattcctcgaccatcatgataaaatcggtcaaggcaggcgaatatactgcgccccctgcacaaggtcccatcatagctgacagttgtggtatgacgcctgaggcttgaacattgcggtaaaagatatcgctgtaccccccgagcgaaacgacaccttcttgtattcgtgcgccaccactgtcgttaagaccaatcacaggagcacccgttttcatcgcaaggtccatcacttttgtgattttttctgcgtgcgcttcggcaagtgaaccgcctaaaacggtgaaatcttgtgcataaacgtaggtaagtctgccgttcacggtaccgtaccccgtaacgactccatcgcctaaaattttctgctcatctagaccaaatagattgcttcggtgctgaacgagcgctcccatctcttggaaactcccttcgtcgagaagaaagtgaatgcgctcgcgagcggtcaatttacccttcgcgtgctgggcttctatgcgtttctcgccgccgccaactttgctctgcttttgaagttcttgcaggtgtgctcttttgtcttgcatggtggttctctgtctagtttctgtgtgccaatttacttctccgaaaaggcattacgcaaattaaccttcgtatgtcggtggaatcttttcgtttccttcgcttttctgcggatttcaacctgctcttcttcgggcaaatgaataacttctatgcactgaggcgtgcagcaaccttcgtgtttttctgcacattcttcgcattgaataaatagaagattacacgccttattggcacaatttgcatggtttgcagaaggctgggcncattgatggcattctgaaatgatctcatccgagatgctttcacctaaacgttcgtcgaaaacgaaattgatgccgtgaaatttattgggcaatttctcctcttcaatctggcgtgcataatcaatgatgccgccgtgcaattggttgacatctttaaacccatggtgcttcaaataagcagaggtcttctcgcaacgaatgccgccggtacaatacaataggatcttgcggtcttcctgacctttgagtttttccagtaccatagggagctcctcacgaaaggtttcngcctcaggaagaacagcgccttcaaaatgaccaatttcactttcatagtgattccgcatatccaccaccactggatcgtttttctctatggcgtcgttccaatccttcgctgttaagtgcgcgccaacatctgtaacatcataatcttccggctgaagtccatctgcnacaatctgctctcgaactttgacgacaagcttcaaaaatgactttccttctgtcttatccgtcacggccaatttaaagggtacatcatggaaatattccatgccgtgtataaaggcatcaaaggcatcccaatggtgctgtggaacattcatttgtgcgttaataccttcgcgagagacataaatacgtcctaaacaatcccactccgaccattgcgcgaataattcatcacgcaaggcttgcgggttttctatgatgacatatttgtaaaaagaaaccgttgtacggtggaaggattctgcatcaagcttagcctgcagttcttctcgactcaatttattaacgagcgttcttttcccagcatttggatccatagacgggtgatttatagtgcaaagataagttatctttgagggacctaattctgatctttatcacattcagagcatgaacaaaaccatccttatcctaggcgcttgcgggcaaatagggactgaacttaccttggcccttcgccagaaatacggcaacgaaagcgttgtagcatccgacattcgtcgcagcgaccttgccgaactccaagacggcccttttgaaatcctagacgccagcgatgccgntgccctgcgcgcagtatgtgagcaatataagatccataccgtataccacctcgtggccatgctcagcgctactggggagaaattcccgatgaaggcttgggacctgaacatgcaaagcttgctgcacgtgctggaattggcccgtgaaggagtcattcaaaagattttttggcccagctccattgccgtttttggaccgactactccaaaggaccataccccacagcaaaccattatggagccctcgacggtctacggcatctccaaacttgctggcgagcgttggtgtgaatactacttcaataagtacggcgtggacgttcgttccatccgctaccctggactcatttcttggaaatctcaaccgggcggcggaaccacagattatgccgtcgagatctattacaaggccttggaagaaggtcgctacacnagctttttntccgagcancgtgcnttgccgatgatgtatatggacgatgccattcgcgcgaccatngagctcactgangcaccngcggaacnggtaaaggtgcgcaacagctataatntggcgggcatcagcttcgatccagtgacnattgcggcgagcatngcngggcacattgaaggattngaaatggactgtgtaccggatttccgcgagaatatcgcggccagttggcctgctagtattgacgatagtgcggcgcaggcagattggaactggacaccngagtacgatcttgaagcgatgacggcggccatgttgggcaatctgaaggtcaagctcggactataatnctacctcgaaatattcggaaggcccgtcgtatcctgccacggttttttgccctaggtgtntgaaccccagggcctccaggactttgatgctcgcagtgttttctccgtgggtgatggcgctcagttttaattggccaaagcgctcttttgctgcttgcatgatgcgctttgaggcntcgcgggcatagccntggccttcgtggtncggntgnagngcntancccaggtcaatgagctccaaatctggncgnacgtacaatccacaaaccccaaccttggtccccgtttctttggtcacgagggtgtagttcgcatanccgcgctcgcgcagttgcnntagggcgcgntgacggatgtattcccgtgcatcttcctcgctgtggaggttgcggtcgccaataaattttagggctttcggggcggttaaaatagccagcacgagggcggcatcttcttcggtcgtcggacgnaggtagaggcggtccgattcaaaactcaaataactactcatcgtctttgtaccaggagctgtattttaaataattgttggcaatgcgctcgatttcccctttgcgcaggcgttcgggtacgggaccaatttctttcgccggcacccccgcccacanngttcccggggccaatttttttccttgngtcacgaccgatccggccgccacaatacatccctcaccgaccacacagtcgtccatgacgatggcgcccatgccgatgagcacattgtcctcgatggtgcagccgtgcacgatggcgttgtggcctatgctcacattgttgccgaccacagtggggaatttctcgtaggtgcagtggacggtagcattatcctgaacattgaccttatgaccgaaggtgatgctgttgacatcgccgcgcacgacactaccgtaccaaaagctacagccgtcgccgcatttgaattggccaataatggtggcattctcagctacaaaacactcttcgccaaattcaggtgtatgtcctaacanggacttaattaatgccatggtatgatcgtttaaggttctcttttcaaatgtacgctttgcgacttttaccacgtacctttgtatctacaaacaaccccatatcatggacatcaagcgcgtacccgttagtatttatgcagagatgaccccgaatccgaaggtcatgaagttcgtcagcaacaagctgttgttgcagaccgattctgcagaattcagaaacat

SEQ ID NO: 1612 - DNA, 4000 bp, Escherichia coli
  misc_feature (795)..(795): n is a, c, g, or t
  misc_feature (1202)..(1202): n is a, c, g, or t
  misc_feature (1205)..(1205): n is a, c, g, or t
  misc_feature (1884)..(1884): n is a, c, g, or t
  misc_feature (2428)..(2428): n is a, c, g, or t
  misc_feature (2565)..(2565): n is a, c, g, or t
  misc_feature (2602)..(2602): n is a, c, g, or t
  misc_feature (3167)..(3167): n is a, c, g, or t
  misc_feature (3335)..(3335): n is a, c, g, or t
  misc_feature (3536)..(3536): n is a, c, g, or t
gcaccttccacaaaagaaaccggatattttgtaggaaactcagcaataaaacgttcctgctcctttgcccgcatatgatattcttccggcggataaatattgggattgtaataaaataccgttacatggaaatgttctgcaagacatgcaatacaataagaactgcacggtgcacaacagctgtgcaaaaggaggcttggagcctcccctgccgtacagttttcacggatcagatcttccattattttctgataattttttttattcatctttcatctgtatacatctgattaaaaatttcttttccggtctgcgtccggaaaatttgctgatatgcctgttcaattccgtgacgattgacgtcatcttcatataaattgaccagaaaatctgcctccaccagaatctgataatccagtccttcgatattatcatatgtatgatgatgtccgatcagatagcagatacggtcgatcagataattttcaattcccacatcggaaagcattctctgtgccacaatcggtccttcctgctcctgcagctttccgtcacaccgtccatacttttcttctgccggacggattccaatgtcatgggtataagcggctgcttccaatataaaaagggatgtctcgtcaagcccttcttttgttccgatgattcttgcgaaactatgcactttcatgaaatgctgaatccgtttcggatctccggaaaaaaaggcgatcatctgtaaaaacagctcatccagctgttgcctgctgtaataactactgtcactactgtccattntgtgtttctcctttatctaacatctgcagtgcaaacgtcgctgcaatgtaaacaactgcacataaaataatcaatactgtttttttcccggcaacaccggcacaaagttctgccagaataagaagtccatgcacccagagttccgcatgatgcagcatcactgcaataactgcctcaatgataacaagcagacacataggaactaccggaacgttaaggactctcacccctacaatcaccataattgcaacaattgctgcaaaggccagtaatgtcggtacctgaaacgtctttttgttcttgtccattttttacctcaacctttattcttattttctttgtctgcgcccattataccaatttcatgcctaagaaacaagcactttttaaagtaaaaaagacacgtnttncatcggatacccgatacaaaacgtgtctgaaacgaagccaataaggggactcgaacccctgacccacgcattacgaatgcgttgctctaccaactgagccatattggcaaaacgtacttgtatataataccaaaaccgattcagaaaatcaactgttttttcataaaatttatattaaaaaaagattgacttttcacatggattctgtagaatagaaactgttgagtttataatcagtaaacaaaaaatcaactaacaatcatgtttcataaatttacgggaggcatgccatggacattggacaccgcatgaaagaactgcgcatccagtacggactgacgcaacaggagctggcggaccgtgccgagctgaccaagggctttatctcacagttggaacgaaaccagaactctccgtccatcggaactcttctggatatcatccagtgccttggtacgacaccagcagaattttttacagatgaagagccggaacagattgttttcaaacaggaagattattttgaaaaaaccgacgaagaaaaacactgctgtattgaatgggtcgttcccaatgcacagaaaaaccagatggaaccggttcgtctgactttacacgccggtggacggtcagaagtttatcagccccatgagggggaggatttcggttatgtaatcanaggaaacgtccgtatccactatgccggacaaaaccagacggtacatgccggggaatctttctattttaaagcaggaaaaaagcattatctggaaaacaccggttcgaaagatgccgtcatcatctgggttactaccccaccaaatttttaagaggacaaacgtatgagtaaacatttaattgattttattggaatttccaaatcctacgattccaatcttgtgttggatgatttaaatctgtatatccgggagaatgaatttctgacccttttaggtccgtccggatgcggaaaaactacaaccctgcgtctgctgggaggctttgaaagcccggacaagggacagattctgtttgacggacaggatatcacagctcttgcagccaatgaacggaaactgaataccgtttttcagaagtattctcttttcccgcatatgtccatcgccgaaaacattgcattcggccttaaaataagtaagaaaagcaaagcatatattcaggataaaatcaaatatgccttaaaactggtcaatctggaaggntttgaaaaccgttcggtcgattctctctccggtggtcagcagcagcgtatcgccatcgcccgtgcgattgtaaacgagccaaaagtccttcttttagatgaacctctcggtgcacttgatttaaaactgcgccagancatgcagtatgagctcatccgtctgaaagaagaactnggaattacttttgtatatgtcacccacgatcaggaagaagcactgaccatgtccgataccattgttgtcatgaatcagggatatatccagcagatcggtactccggaaaacatttacaacgaaccggaaaacgcatttgttgccgattttatcggacacagcaatatcattgacggaaccatgataaaagatgaacttgtagagattctcggtgcccgttgggcatgtgtcgacaagggattcggcaataacaagccggtcgacgttgtcatccgtccggaagatgtagaactggtcgatccttcggagggaacgctgcagggcgaagtaacctccctgatttttaaaggcgttcactatgaacttgatgtcatggccggcggctatgaatggctggttcacaccaccagatttgttccggtcggcaccaaagtcggcatcaaagtaatcccgttcaatatccagattatgcataagccggaatcttccgatgaaaaggcggtggagatcgatgcgtaaattcaaacagcaatttcttgccggtccatacctcatatggatcatnggttttatcctcctgccgcttatcatgattctttactatgcatttacaaacggcgatggcagttttacgttatcctatatcacagcgatagcagatgaaaccaaccgcaaagccatgggactttccctgagacttggaattatatgcaccatcgtgtgcctggttctntcctatccgctggcaatgattttaaataatatgaaaatcaaaaatcagggactggttgtttttatctttatgcttccgatgtggatgaactttatgctccgtatcctggcatggaaacttctgctttccaaaaatggtgtaatcaactccattctcacaggtttcgggctttcccgcatcaatatcataaatacaccaacngcagttgtccttggcatggtatacgacttcctgccatttatgctgctgccaatctacaactccatgacacgaatccgtaaagactggattgaggcggcccgtgatctgggtgccggaaatgtaaccatctttttaaagattatccttccgcttaccgtatccggaatcatcagcggaatcgtcatggtatttgtcccgtcacttacctcgtttgcaatctcgcaggtattaggcggtggtcatgttcttttaatcggaaatgtgatcgaacaggattttatgcagggtatgcaatggaatgccggaagcggtctttcctttgttcttatgatttttgtgattgcaagtatgactattgtaaatatatttgataaagaaggggagggaacatccatatgttaaaaaaatgtgcatcccggatctatatggtcctgatttttgccttcctttaccttccgattatt

SEQ ID NO: 1613 - DNA, 4000 bp, Escherichia coli
  misc_feature (105)..(105): n is a, c, g, or t
  misc_feature (124)..(124): n is a, c, g, or t
  misc_feature (151)..(152): n is a, c, g, or t
  misc_feature (229)..(229): n is a, c, g, or t
  misc_feature (1322)..(1322): n is a, c, g, or t
  misc_feature (2940)..(2940): n is a, c, g, or t
  misc_feature (3051)..(3051): n is a, c, g, or t
  misc_feature (3093)..(3093): n is a, c, g, or t
  misc_feature (3183)..(3183): n is a, c, g, or t
  misc_feature (3268)..(3268): n is a, c, g, or t
gccgtaggccgttacccaatcatcagtactgggacctcgtccagcgaattgccatagaaaatatcgccaatacattttctttacctgataactccaaaaataatnccactgcttatccattcgntaggatttgtattttcgttcctggctnncggaataattacgaccacctttcgcaggtcttcccacaacttcatgtttgggcggcaatcctgtaaatcgacgaggnaattgggtcatttggccatattgttctctttccatataagcaatcgctcgtggaacggtagaagggtcattttcattaatggcaggctgctgccccgatcgaataaaaatagtggcatagcttgaatacccgaccaaaataaggactatagatgtgagggccaatgcatattgaaattgtcttttaataattgtgaaaaccataccacccataatcgccaagcataagaataaaaatagctctaaaccgacagcattcacaatcttaggcactccattaatgatacctgtattgattatcagataaatcacgcccgtaatagctgtggttattagaaatcctttgtatgaaaattcatattttttgaaataaataatgagtgcaataaatggaagtgccagtaagttgagtaaatgaacaccagtggctaaaccaatcatataggcaataatgagaatgtatctctcattccccttttcatctgcccgttcggcccaatgaaggatgagccacaccacaatagcggtgaaaaatgttgaaaagccatacacttctgcttcaactgcattaaaccattgagaatctgtaaaagcaaatgtaagggcacctaccaaagaaccgccaaatgtaataatggcatccatagagcattcaatttttccacgataattcgaaatcagcttcacagttgaaagataaagatacatgactgctaaggcactgaccacaggtgaaatcaaattgattcggaatgcaatatccggattaaaaggaatcatagaaaaaacacgaccaataatcaaatacaaagggctccctggcggatggggtacacccaaaataaatgatgtggcaataaattcacccgaatcccaatatggcacagtatccgccatggttaataggtacacaataaaggagatgccaagcgccaacccggcaaaaattcggttcaaacgaatataatcagaatggatcaagtgttagtctttctttttttagtagcctttttggctttcttttttgctttggtctttgcttcagttttagatttttctgtcttctgatcttctgatttctcagattcttctgnagaagaatctgaacctttcttttgttcgtcgatgaaatttaatttcaattcgctgaggctatggataatatattgttcttcccattcgctgaggtttcccttcattttaacttgaagcatatccattaggtcgatatagtaagaagcctgatcaaggttacgttctaacgcatcattcatagggttttttacttttcctagagatatccatgcactttgcacgaatgtattcaccaagtgaataaataattgatcttcttttttcatttgttcttcagccatgattttcctctaaagttacttatattcaattttgttaaaaatgtttcaaaaacagccggtgaaaatacaccatatctaatgaatattgaatatccaatattcattaataaattatgaaatattcacctgcacaagtttatcctgatattctgacatgaagcgtgtatggattaattcatgtgccgactgattcaaattcggatctgttttcaccaattcaaaagctgctttgcgagcttttcttaagataggcccatcggtcaccatatccgcaattttatattttaggaatccactttggcggataccgaaaaattctcctggtcctctgatttttaaatcttcatctgaaattacaaaaccatcatttgtggattccataatctgtaggcgctttttggaattgtccgtaaaattccggcgaacgagaatgcagtaacttttttcactcccccgccccacacggccccgaagttggtgaagttgggtcaaaccaaagcgatccgcatgctcaataagcattaccgtagcgttgggtatgtcaatccccacttcaatcaccgtagtagaaatcaaaatgtgaatttcattacggccgtaagcatccatgacaacgtctttctcatcttttttcattcgcccgtgaatgaggcctactttgaattcccggaatatatttcctgaaagattcgcgtgcatttctacggcggcggctaaatcggatttttccgtctcctctaccaaaggataaaccaccatacactgacgtccggcggccacttcatctttcataaaatcgtatacttttttcaatcgttgttcatccaccactttggtcacgataggaatacgattctttggcatttcatcaatgatggataaatccatatctccatggtaggtaatggccaatgttcgtggaattggtgtggcagtcattgccaaaagatggggattcaaccctttcgatgtaaggtctcctcgctggagaacgccaaaacgatgttgttcgtccacaatagccaaacccaattctttaaatattacatccttttgaatgagggcatgggtaccgatgataatgtcgatccgtccttcagctaaaccaccaagaatggctttacgttcttttgcgggggtgcctccgacgagaatagcgcaagtcatgtgggccatttcagcatactttttaaatgatgccaaatgttgatgggctaaaatttccgtgggcgccatgactgccacctgtacattattcgccaccgcaatggccgccgctaaaacagatacgatggttttccccgatcctacatctccctgcaaaagtctgttcatngagaagggccgggccatatcatccttgatttctttaattacttttttctgggcattggtcagttcaaaatcaagactatcagaaatgagtttaacttgaggcccgattttnttcaatgctttggtccctgtttgctgtagagatgattttcgnaatgccataagcatttggagaaaaaagtgttcgtcaaattttaagcggtgaaccgcctcattcagtacctcttctgattcggcaaaatgnatatttctcagggcgctgttaatatggataagatcgttggactttcggaattcaggcgaaaaatgatcgggaatttctttaaggnaatcggaaatggttttaatgaggcggcgaaggccgcggctatccaatctcgtcttttttaattcggcgggaattgaatagaggggaatgaccaaaccggaattgacggggtcttcatcttctttcagtttatcatattcaggatgaacaatctggaagccgttgaaaaattcaactttcccactcacagccaggcggtccccaatttttatcgctttttttatgtattgtgcaccattgaaccaggtgagtgtcatcataccctttccatcagaaataatagcctgaaaatattggcgacgcttcccacggcgcaaatccgctgcttcaactttaccgataacagtggcttccatatctcttttgagtttagatattggtgtaacggtggtgcggtctaaatgcttgcgaggataataatgaagtaaatcagacactgtattaacgtcgatggctgacaaagcatccgcccgggccgggccgacacctttaacggattggagagataaggaaagcgttatggccttttcaggcacaatttattagttccattccttgcggtaagtatatgtcacaatttgagaaccatttgctggaatggtgagtgggaagtgaatggtagacgcatccttttttcgatagttcacagatgcatctcgaatcacccagtccccaaaaacatgctcgataaggcgaacttttatttctgtgtttaacgtattcgttacttcaa

SEQ ID NO: 1614 - DNA, 4000 bp, Escherichia coli
  misc_feature (1224)..(1224): n is a, c, g, or t
  misc_feature (1302)..(1302): n is a, c, g, or t
  misc_feature (1317)..(1317): n is a, c, g, or t
  misc_feature (1592)..(1592): n is a, c, g, or t
  misc_feature (1607)..(1607): n is a, c, g, or t
  misc_feature (1610)..(1610): n is a, c, g, or t
  misc_feature (1634)..(1634): n is a, c, g, or t
  misc_feature (1676)..(1676): n is a, c, g, or t
  misc_feature (1684)..(1684): n is a, c, g, or t
  misc_feature (1686)..(1686): n is a, c, g, or t
  misc_feature (1757)..(1757): n is a, c, g, or t
  misc_feature (1832)..(1832): n is a, c, g, or t
  misc_feature (1874)..(1874): n is a, c, g, or t
  misc_feature (1988)..(1988): n is a, c, g, or t
  misc_feature (1992)..(1992): n is a, c, g, or t
  misc_feature (2120)..(2120): n is a, c, g, or t
  misc_feature (2147)..(2147): n is a, c, g, or t
  misc_feature (2150)..(2150): n is a, c, g, or t
  misc_feature (2177)..(2177): n is a, c, g, or t
  misc_feature (3144)..(3144): n is a, c, g, or t
ggtcgccatcttttcctatctggtttatatgggactgggagcgatcaactgggcattcctcactcagactcccaaaccggttggcgaagccggtggaggaatggccaacgccatggtgggctcgggagtgattttgctgctcgccagcgtgattggaattcccttcggcgtgggcacagggatttatctggcagaattcggccgcaatcgcttcggcaatgtgattcgtttcgctgccgatgtgctcaacggcgttccttccatcgtgatgggcatcgccgtgtatggcctggtagttttgcggcagggacatttttccgcgctggcgggagggattgtgctgggcatcatgatggtgcccacggtttcccgctccacagaagagatgctgctcatggtgccgcagaacattcgcgaggcggccttggggctggggatcccgcagtggcgaacaacgatctcggtgacgttgcgcaccgccagctcggggatcatcaccggcatcatgctggcctttgcgcgcgtggcgggcgaaaccgcgccgctgttgtttaccgctttcggcaatcagttctggagcctgaaggtgaaccaacccatcgctgccttgccgctgcaaatctttgtttacgccatttctcctttcgacgagtggcatcggcaagcgtgggcgggagcgctggtgctggtggccctcatcgttgccacggtcgcggtggtgcgtctgctagcgcgccgtggaatgttccagggagcccactgatgggggtcggcatacgggtcagcgccctgaacgcatggtttggcaagacgcaggcgctgcgcaacattgatctggaagttcccgctaaccatgccacggccatcatcgggccttcgggctgcggtaaatccacctttgtgcgctgcttgaatcgcatgcacgaaactgtgccggaagcgcgcgtcgaaggacgggttgaaatcggcggaaccgacatttacagcaacggtaagtcgccagtggaagtgcggcgaagagtggggatggtgtttcaaaaggccaatccgtttcccaccatgtcgatttacgacaatgtggctgccgggctgaagctgaatgggctgcgcagccgccgcatgctcgacgagatcgtagagcgctcgctgcggcaggcggcgctgtgggacgaggtgaaagatctgttgaagaagaaatctggcgccagtctttccggcggccancagcaacggctgtgcatcgcgcgggcgctggcagtggaaccggaagtcatgctcatggacgagcccgcctcagcgctngacccgatctccacngctaagatcgaggaccttattttccagttgaaagaggattacaccatcgtgatcgtgacccacaacatgcaacaggcggcgcgcgtggccgaattcaccggcttcttcttgctgggcgagctggtggaattcgataagacacagaaaattttcactactccggccgacaagcggacggaagactacatcaccggcaggtttggataatgcgcgaacgatttcaccagggattagacgagctgcgggcgcgcctcttggccatgggcggcatggcngaacaggcggtagancgngccaccacggcttatcgcaaccgngacttgaagctttgccacgcggtgctggccagcgagaacgcnatcaacgncnttgagcgggagattgacgagctggcgctcgacctgctggccatgcagcagccgatggcggttgatctgcgntttatcaccgcagtgatgaagatcaacgccgacttggaacgcgttggcgatcaggcggtgaacatcgcggagcgngtgatgagcctggccaagctgccgccggccgacttgccgatngatattccccgcatggcagcaaccgtctctggaatggtgcgtcgcgcgctggaatcttttctggaggccaaagcagaattggccgaggcggtgctgaagatggatgacgtcgtngacnggatgaacgacgaagcctatgtcaacctggtgaacgccatgcaggccaacaaggaaatcacgcaacaggcgctggacgcattgctgatcgcgcgcaacctggagcgggtggcggaccacgccaccaanatcgccgaggatgtcattttctgggtncgnggcgccgatgtgcgccatcatcagccngcggagtgaaggaaaatgatcaataacctgtccactctgtggtttccgttactttgccgcggaagatgcgatagacgaacaccacgtatccaatcgccagcaacattccaaatccccaccaaatgagtccgatggaaagcgaatgcgtcccgctggcggcgttgtacatggtgatgttcagcgctgggtcggtggtcgaaatcagcagattgggataaacggccgcggccgcgcccagcagcataagagctaaataagcggaggaagcaacaaatgccgctttctctgcccgctttcgcgcgaaaacaaacatcgcaactaggctcgcggcaaccgcggcaggaatcacaagcagaatggcatggcgtcggtaattcgccagcatctcggggcgaatcgaaagcgtcgcccacagactggcaagtgtcagaaccgccagcagcggccaaagtatacctgcgacgcgcttggcgcgagcgttcaattcaccactagttttcaaagccacccaattcgcgccgtgaatcgtgagtgcaagcaatgccagcacagcagcgatcacggtataccagtccagaacgccaggctgcgaaccgattcgccaatcggtccacagcggcaggaagaaatagccgtcagcgttcagcggaactcctcggaccacgttgcccagggcggcgccgtaaaaaattgtcagcagcaggctggaaaaagcgaaacatccatcaaaaaagccgcgccacaccgccgaatccacatgcgcgcgcagctcaacgccgatgccgcgaaagatgagcagccacagaacgatcatcaacggcagataaaatccactgaaggcggaagcgtagagaagcgggaatgcgaaatagagtgtgccgccagcggccagaagccagacttcgttgccgtcccacacgggaccgatggttcgcaacaaaagcttgcgttcccggtctgtgctggnaataaacaaatagagcgcacccacgccgaggtcgaagccatccagaaccacataagcggcgatcattccagcgaccagcaaaaaccatgtggtgagcattggcattctctcaggctgcccttaccgagcgcgctgcctctttcgccggcactggaccgtgcgcgatctcccgatgcatcaggaacagaaacagaatccccagcatggtgtacaggcccatgaaaccgagtagcgtgaacaatccgttgccggcgtgaacatacttggaatatccctcgctggttcgcatcaagccgtaaaccagccacggctggcggccgacttcggcggtcatccagccggccgtgttggccacgtacggaaagggcaggcagagcagaaggatccacaacatccagcgggattcatacagccgcttacgccacagcagcaaggctgcgacgaccattaccaccacaaaaatcgttcctaagccggccatgatgtggtagctgtaatacaaaagcggaatgttggtgggccagacatctttgggaaattggttcaaccccggcacttcagccgtgctggttccgtaaatcaaaaaactcagcgcgcgattcatgatgagcggattatccatccgctggtgttcttcatccggctgcccgagaatcacgatgggagcgcccttctctgacttgaataatccttccatggcggcagtggtcaccggctggtgcctggccatgtagcgaccgtgaagatcgccggtggggaagatctgcaagatgcaaaagatggcgccgaccgtgacgccgacgcgcagaaaggcgcgggcatgctgactgaattttccttccagcaaataataggc

SEQ ID NO: 1615 - DNA, 4000 bp, Escherichia coli
  misc_feature (13)..(13): n is a, c, g, or t
  misc_feature (56)..(56): n is a, c, g, or t
  misc_feature (83)..(83): n is a, c, g, or t
  misc_feature (89)..(89): n is a, c, g, or t
  misc_feature (561)..(561): n is a, c, g, or t
  misc_feature (886)..(886): n is a, c, g, or t
  misc_feature (896)..(896): n is a, c, g, or t
  misc_feature (899)..(899): n is a, c, g, or t
  misc_feature (967)..(967): n is a, c, g, or t
  misc_feature (977)..(977): n is a, c, g, or t
  misc_feature (1583)..(1583): n is a, c, g, or t
  misc_feature (2080)..(2080): n is a, c, g, or t
  misc_feature (2158)..(2158): n is a, c, g, or t
  misc_feature (2357)..(2357): n is a, c, g, or t
  misc_feature (2416)..(2416): n is a, c, g, or t
  misc_feature (2463)..(2463): n is a, c, g, or t
  misc_feature (2469)..(2469): n is a, c, g, or t
  misc_feature (2494)..(2494): n is a, c, g, or t
  misc_feature (2498)..(2498): n is a, c, g, or t
  misc_feature (2826)..(2826): n is a, c, g, or t
  misc_feature (2865)..(2865): n is a, c, g, or t
  misc_feature (3232)..(3232): n is a, c, g, or t
  misc_feature (3237)..(3237): n is a, c, g, or t
  misc_feature (3271)..(3271): n is a, c, g, or t
gatttggaaccgntgggtcaaactctgcgtgaagtcgaaagtcaaacaaagaaaantcgagctgtctcaccatcgacatagcngattgnaagtttttccccgccaacattttcgccaacatctcttcgggcaaaacttctccggactcatagtgccctgaaataaaaccaagcgcctctctctgccaacaccagttctccataaactggctaggaagttcgaccgcatcccatgcaacaccgttaattcccgatacaccagcggcagatactttcgtcagcatatggtgcaagccatgtccgaattcatgaaacagcgtgacaacctggtcgtgggtcaacagggcaggcgcatctccaaccggcccggtaaaattacaagtcagataagcaactggcaattgaatggaagcaacctcttcacccgctgctttgacctttcttcgcactcgacattcatccatccaggcgccaccttgtttattcgggcgtgcgaacaaatctagataaaatctggcaacgcgctgaccatccttcttgatgtcgaacgtctgaacatccncgtgccatgtcacaacgtcagtcgcagggaccacgtcaatgtcatataaacggcgcacgacttcatacatgccatccaacacagaggacgctgggaaataaggtctcaacgcttcctcagagatatcaaacgtttgctcttttagcttttctgaataaaaagtaacatcccaggcttgcagctcactttttccgtaacgctgtcgggcaaactcacagagctcttcaaactgcgccgtcgcgacggagacagattttgaggcaagatcttccaggaacgtaattacctgatcagtgctctgtgccattttttttgcgatcgaatnttcggcatanttnctaaaaccaagtaactcggacttctcctttcgcagcaataaaatttcctgcatcactggagtgttgtnccactctccngcattggggccttgatccgaagctcgggttacataagcttcatagatttctttgcggaaggattcattttcacaataggtcatcaccggcaaataacttggaaattcaagcgtgaagacgtagcctttttcgcctctttgctttgccgtttggctggctaactccaacgcggtttcgggtaacccctgaagttcactgctgtcgtcaaactgtcgagaccaagccatcgttgaatcgagcacgttgtcgctgaacttgctggagagctccgatagtcgtttcgagatttccgaaaaacgctgttgttcttgctttggtaaattaaccccagacatcttgaagtctcgaattgcttgctcgatgaccatccgttgtgcctgatcaagcttaccgaactcctcgctcgcctgaatcgcctgataagcggaataaagcctcgggttttgtcccatttccgtcgcatactccgaaattttcggcaaacaggcattataagcatctcgcaactccgccgagttcactacggaattcatatgcgaaacgggtgagaaagcttggttgagtgcgtcatcaagggcttcgagttcaacaaccagatcttcgtancccattgcacccgcactcagaagacggctaactgcttctctgttgtcagcaagaatctggtcaatggccggcacgatatgctcaggtttaatgacatcaaaggggggtaattcgtgttgttctagtaatgggtttttcatgttaaatccggattctccggctcatcattcatatgaccaccgcggagtttattaataacagacgctgaatccggacgttttccaaaccagatttcaaacgccaacgctgcttgttcaactaacataccgaggccatcagcccgctctttggcacctaggtcccggcagagagataaaaagggtgtctcggtcttactgtaaatcaggtcataacaaaatgtgtgctcgccaataatctgcttgggaatcggcatttcttgcgcactctcaccagccatgggcaaacctgccgatgaaccactgatcacgagatcataattcgcggataactcagatggttttaccgcctgaattttnccagaatatttttcggccagcgccacggcctttgcatgagtgcggttgacaatatgaatactcgaagggccctgttcnagtattggttcaagaataccgctgacagcaccaccggcgcctagtaccagaatttgctttccttcaatcgaccacgctaaattctccgtcatgtcccgcaccagaccaagcccatcggtgttgtggccgctgagaagccccgaacgctcacgcttgatcgtgtttaccgcctgcgccctgctggcatattgcgataatntgtcggctaaatcgcatgcttcaaatttaaaagggacagtgatattaaagcccactgcnccctgatcaagtaacttcgccgatgcttctgcaaagccatccaaggncgcttncactttttgataggtgacagacatncctntctgatcagcaaacatctgatgaatttgtggtgaaagactatgcccaaccggattgccaataaccgccaacaaattcactatgttcccccttgtcgaatcaccgcgccagttgccaggtcaacgatctcactcgctccctgcctgccacctaattgacctggcacaatgtaatcaatttgttgtccaaaacttccgaggagctgcatgcgcgttttagctgccggtctgccggcaatatttgctgacgtagaaactataggttgtcctaccgattcgcatatcccttttaccgtcgcgtgatttgtcaatctaacggctactttgtgntgtataccactaatccaaaaagggactctttcactcttntcgacgaggtatgtcacgcctcggtcggctgagttctccaacacgcctgcttcaccagttcccagcataatatagggttttatttgttttaggctagagcctattaatatcaaccctttttcccatgagcgctttttgagcgcgagtattttcatagtcgcagtctcattttccggcagacatccaaggccccatactccttccgttgggtaagcaatgacatctccagaatgaagcttcgtagcgaccagtttgtattgccaatctctatgactcatacgcgaaatgttctgcttagattgacagcccttcgtttttatctctgattatttgggcattatccagacgctcctgttttatcttcgcngcaanactctcatcgatcatgcctaacatctgtgcagcnagataaccggcgtttcgagcaccaacggagccaatagcgacagttgccacaggaatgccggggggcatttgaaccatggaaagcaatgcatcaacaccctgcagagggcccgtatcgattggaaccccgatcaccgggcgtgttgtgtatgcggcaacaacgccaggcaaagcagcagaaagccctgcgccggcaataaacactgcacagcctcgatcttcggcttctacaacaaactgcttggtatcctctggtgttctatgggcagaatagattctgacctcataaggtatatcaaattttttcagtatctggcatgttttctccatcaccggaaggtcagaatctgagcccataagaatcgagacaaaaggggcagccataagctctccaaataaagattattagacgggtcggcacggtaccccagcccttcaaatgtttcaatcatctattcgcaatttcactcacacttgacgcaacaacctgccaattaatcatcagtacctttagtctcgtgaccagttgctacacagttgatagcaacctgccactgagctaacaaagccgaccaattcaagctcgaccagtgtttgcagaacttccgccgtgaccatgcccgtttgtttcacaaccgaatcaacacttctcggctcgagatcaatagcttcaagcacattttgctggcgctgattcagactagttggcttaagcactgggcccgtattc

SEQ ID NO: 1616 - DNA, 4000 bp, Escherichia coli
  misc_feature (714)..(715): n is a, c, g, or t
  misc_feature (831)..(831): n is a, c, g, or t
  misc_feature (1960)..(1960): n is a, c, g, or t
  misc_feature (1985)..(1985): n is a, c, g, or t
  misc_feature (1988)..(1988): n is a, c, g, or t
  misc_feature (1991)..(1992): n is a, c, g, or t
  misc_feature (1994)..(1994): n is a, c, g, or t
  misc_feature (2473)..(4000): n is a, c, g, or t
aaggtacttggaagctaccaacgaaaataccagaatcaagagtagtctctactaatgtaaagcctgaatcttgaagtccgtcacttccgctaatatcttcaatagtggaaccgacaccatcgttacaatcggtggcatcagaatttgcgtctacccattgggagtcattaaatgtaatatctaagatgtgatcaccagaaccatcaccaactttatcatcagctttagtgacgtaaacgtcaattaattctgaatcagtgttgaggtcttggtcatctacggtaacaacaacagtatctgcaattttatagttttcagaatcaaatgatactgttccactatgtgatggagcagctacttgatctgcgatctgagttacaacaccatctgcaccaagatcattatagttgattcttggggaatcctcatcagtcaaatcttcgtggacaataatgtctacgtcttgatcgattgttgagagtcctaagtaagtagatgtctgatcagtgttgagttgattcaacataagatattcgacactacctacaaatacaccagtattatcatcagtctcctctaagaggagtctatagattgcgttgttttgtctaacaccgtcatctgcaataccgaaactgaaaatatcagaaacgaatggcaaagctgctggagcagaaacatctgctgctgtatcgagttcaattgtgatctcgnngtcagttgtagacattcccattgcattgtagatgattactaatcctttctcgtctgttcctttattatcaccttgattggcacagacaaagtgattggatctgttggtcaaacagncaccatcaacaccagtagtttctgagttgacaaatgctgagaaatcaaagttccagaatgtttgtcttgtatcaatatcaaggacttcactggttaagataccagtgttgatagtaaagtttgcagtattaccaaatgatgaagatgtgttagtatatcttgcgatgttactaaatgcatctacagtcaaataataatcgtttgttcctgatcctttggcactgttagtggtatcgttatgaaccattaatggtgaaccaatttggagtgcaggtacgaggaggagtgtgttagttctgttgttgagtacaagatcttcatcaaccaaagtgttttggttgagatcttgatctcttagtgtaactgtcaatgcttcaccggaattccattcatcaccgacagaggattcttccatatcgatagtaccaaagtcatttgttactacgaaggattgtgctgcatcattgtaatcaatgacagctgttgttcctcttttagcgtcagcgttaacaactaagtttgaatcatctttatcatctgtattaacaaagacaccactgttttcagatgtttcccagaaaattaattgtttgtctggtactgaatcgtcttcagtgaaatcatttaagaatacgtctgttccgatgctttgtgcatcgtaatcgatgattaacttaccgttgtcaccgaaggagttgtcatatgcaatgtaagtatgtgaacctacattgagtacagctgtatcgtgattagatgtatcagtaaatgatacagattcactaccagttgtaacatcaaatataacaatatcttcgttggttggatctaagtttagttgattgtcagtaatggttaaatggacttgggaaccttgtgtggcaccttgtctatctacttcaatacttgcgtaatcatctaaatctgcagaattgtaatctagtgtgactacttcatctgctccggcttgctctaatacaatatcaaatacaccagtgtcaaatgcaaatgcttggatcattggccattcttcgtgttgaataccaatttgtccaattgtttgatttgcacctgttagaccttgtactggaagtgttggttgtgttccgttccatgcacttaatgttggtgnattttgtacaacggaagtaccgttnttnatnncnggtccagtggcaccgttagtactcacccaaatgaatgcagtgtttgttgcattaattgagctgtgtatgtcagtaccggtcataagtgctgagtcaaatcctcttggtaattttgagacaccgaaaccgatgttgtttaaggtgttgtttgctaacttggatgctgttttatcagcaatgtaagcataccagaaaccatctgctccttgagccaatctgatgtaatggttatcaactcttacagttggttctgccactttctcatcagtttgggttctatttggatctctaactacaatttcgacgacttgagctccaccgaatgtattattgaattgtgcattttctgcggagacataaagttggcctgcggctgcggcttctggcaccattgaaggtgcggcaataaccataccaccggctaacattattgtcattagcgtaagactagttaatttacgtcctatttcgttattcannnnnnnnnnnnnnnnnnnnnnnnnnnnnnnnnnnnnnnnnnnnnnnnnnnnnnnnnnnnnnnnnnnnnnnnnnnnnnnnnnnnnnnnnnnnnnnnnnnnnnnnnnnnnnnnnnnnnnnnnnnnnnnnnnnnnnnnnnnnnnnnnnnnnnnnnnnnnnnnnnnnnnnnnnnnnnnnnnnnnnnnnnnnnnnnnnnnnnnnnnnnnnnnnnnnnnnnnnnnnnnnnnnnnnnnnnnnnnnnnnnnnnnnnnnnnnnnnnnnnnnnnnnnnnnnnnnnnnnnnnnnnnnnnnnnnnnnnnnnnnnnnnnnnnnnnnnnnnnnnnnnnnnnnnnnnnnnnnnnnnnnnnnnnnnnnnnnnnnnnnnnnnnnnnnnnnnnnnnnnnnnnnnnnnnnnnnnnnnnnnnnnnnnnnnnnnnnnnnnnnnnnnnnnnnnnnnnnnnnnnnnnnnnnnnnnnnnnnnnnnnnnnnnnnnnnnnnnnnnnnnnnnnnnnnnnnnnnnnnnnnnnnnnnnnnnnnnnnnnnnnnnnnnnnnnnnnnnnnnnnnnnnnnnnnnnnnnnnnnnnnnnnnnnnnnnnnnnnnnnnnnnnnnnnnnnnnnnnnnnnnnnnnnnnnnnnnnnnnnnnnnnnnnnnnnnnnnnnnnnnnnnnnnnnnnnnnnnnnnnnnnnnnnnnnnnnnnnnnnnnnnnnnnnnnnnnnnnnnnnnnnnnnnnnnnnnnnnnnnnnnnnnnnnnnnnnnnnnnnnnnnnnnnnnnnnnnnnnnnnnnnnnnnnnnnnnnnnnnnnnnnnnnnnnnnnnnnnnnnnnnnnnnnnnnnnnnnnnnnnnnnnnnnnnnnnnnnnnnnnnnnnnnnnnnnnnnnnnnnnnnnnnnnnnnnnnnnnnnnnnnnnnnnnnnnnnnnnnnnnnnnnnnnnnnnnnnnnnnnnnnnnnnnnnnnnnnnnnnnnnnnnnnnnnnnnnnnnnnnnnnnnnnnnnnnnnnnnnnnnnnnnnnnnnnnnnnnnnnnnnnnnnnnnnnnnnnnnnnnnnnnnnnnnnnnnnnnnnnnnnnnnnnnnnnnnnnnnnnnnnnnnnnnnnnnnnnnnnnnnnnnnnnnnnnnnnnnnnnnnnnnnnnnnnnnnnnnnnnnnnnnnnnnnnnnnnnnnnnnnnnnnnnnnnnnnnnnnnnnnnnnnnnnnnnnnnnnnnnnnnnnnnnnnnnnnnnnnnnnnnnnnnnnnnnnnnnnnnnnnnnnnnnnnnnnnnnnnnnnnnnnnnnnnnnnnnnnnnnnnnnnnnnnnnnnnnnnnnnnnnnnnnnnnnnnnnnnnnnnnnnnnnnnnnnnnnnnnnnnnnnnnnnnnnnnnnnnnnnnnnnnnnnnnnnnnnnnnnnnnnnnnnnnnnnnnnnnnnnnnnnnnnnnnnnnnnnnnnnnnnnnnnnnnnnnnnnnnnnnnnnnnnnnnnnnnnnnnnnnnnnnnnnnnnnnnnnnnnnnnnnnnnnnnnnnnnnnnnnnnnnnnnnnnnnnnnnnnnnnnnnnnnnnnnnnnnnnnnnnnnnnnnnn

SEQ ID NO: 1617 - DNA, 4000 bp, Escherichia coli
  misc_feature (104)..(104): n is a, c, g, or t
  misc_feature (351)..(351): n is a, c, g, or t
  misc_feature (363)..(363): n is a, c, g, or t
  misc_feature (582)..(582): n is a, c, g, or t
  misc_feature (584)..(585): n is a, c, g, or t
  misc_feature (1944)..(1944): n is a, c, g, or t
  misc_feature (1989)..(1989): n is a, c, g, or t
  misc_feature (2317)..(2317): n is a, c, g, or t
  misc_feature (2390)..(2390): n is a, c, g, or t
  misc_feature (2392)..(2392): n is a, c, g, or t
  misc_feature (2674)..(2674): n is a, c, g, or t
  misc_feature (2689)..(2689): n is a, c, g, or t
  misc_feature (2716)..(2716): n is a, c, g, or t
  misc_feature (2722)..(2722): n is a, c, g, or t
  misc_feature (2731)..(2731): n is a, c, g, or t
  misc_feature (2887)..(2887): n is a, c, g, or t
  misc_feature (2968)..(2968): n is a, c, g, or t
  misc_feature (3010)..(3010): n is a, c, g, or t
  misc_feature (3079)..(3079): n is a, c, g, or t
  misc_feature (3104)..(3104): n is a, c, g, or t
  misc_feature (3106)..(3106): n is a, c, g, or t
  misc_feature (3184)..(3184): n is a, c, g, or t
  misc_feature (3190)..(3190): n is a, c, g, or t
  misc_feature (3197)..(3197): n is a, c, g, or t
  misc_feature (3202)..(3202): n is a, c, g, or t
  misc_feature (3316)..(3316): n is a, c, g, or t
  misc_feature (3322)..(3322): n is a, c, g, or t
  misc_feature (3327)..(3327): n is a, c, g, or t
  misc_feature (3416)..(3416): n is a, c, g, or t
  misc_feature (3424)..(3424): n is a, c, g, or t
  misc_feature (3429)..(3429): n is a, c, g, or t
  misc_feature (3433)..(3433): n is a, c, g, or t
  misc_feature (3445)..(3445): n is a, c, g, or t
  misc_feature (3527)..(3527): n is a, c, g, or t
  misc_feature (3562)..(3562): n is a, c, g, or t
  misc_feature (3625)..(3625): n is a, c, g, or t
  misc_feature (3634)..(3634): n is a, c, g, or t
  misc_feature (3658)..(3658): n is a, c, g, or t
  misc_feature (3859)..(3859): n is a, c, g, or t
  misc_feature (3873)..(3873): n is a, c, g, or t
  misc_feature (3877)..(3877): n is a, c, g, or t
  misc_feature (3879)..(3879): n is a, c, g, or t
  misc_feature (3890)..(3890): n is a, c, g, or t
  misc_feature (3964)..(3964): n is a, c, g, or t
  misc_feature (3976)..(3976): n is a, c, g, or t
  misc_feature (3985)..(3985): n is a, c, g, or t
ccattctggagacttgctgccgctcgatattgatctgtaccttacttgcaacttcaagtgtaatccggtcgtctcccacttttactattgttccaaagattccnccgtttgtgacaaccttgtcacccttgttaagactgtctaccattcgctggtgtgctttctgttttttttgttgtggacggataattagaaaccagaaaactcctaggattaatacaagtgggataaattggaaaaaaggactctgtgaagacgcctctcccgcggattgggcatatgcaactgattcaaatggaaacatctaattaactcctttaaaggtttatgggtaaataaaacaataaagtntagcacttcatnaaaaatatttcacgtctaaatgcgcaatttccaaaatttatttatctctcataaaatgttggaatagcaaatagtctgatttcaacacacctcacggcagttgatttgtaaagggctttcactccttcggtttccgcagcgtgttgctgcggaagcatacatctgtaatcataaaattcgtaaaatcgagtagcgaagtgattctcacggttgttgcangnncttcgcccctacgctttcacgccttcaaaaaagggaacactacttttcattaatgaacttgtaataaaattgtcattcccgcggaagcgggaatacaggagtggggtttatacggctgaataaaacttaaatcatagatgggttaggagaagcccattcctttcccctgcacggcctttcgacggcgcttcacttcgccaccgctcaggctccggaaaagttcgccggggctaccgttccggaattgttccttgtcattggtttcccccgctaagtatgacggggttacagttccggaattgctcccccgcctttgtgctttcccgctacggagagcggggctaccgttcagataaactatcctgtaaaattcctatcataaaacttcccctctgctgaaagtggggttatcttaaatgaattaattattgctcatgccgcgccaaaaagcggtcccgcaggagacgcaaaccgactccccagcgaagaaaaggttgtggaggaagcagcattggttttgagttagtttggatcaacgcaattgagtcggtcatgtttccgctggcaaggttggcaatttcggttccgaataaaacggccaaaccaattccgctggcattataacagcctgcagcgtacataccgtattctacttctgtaaacacatgcgcgttatttccgcttatacaaatcgtacccgaccaggtggattcaaacaaatcaccaccaagacggggaaaacgccgtttcagtccctctaaatgtttcgctttacgggtctttaaatcggtgaatttcatatttattgccggccatgcttcaacagtgttacgcattaaaatccgtcgatcttttgttaaacggacagtggctcccattgattgaacggacaacactccccatggagccggccggccaatagattcatcttctttttcggtcaatgggcgagtcatgctggcagtcagcgtgagggggaatgtccgattcgattttacgccacaactggccataaaactattcaccgtcacaatcagtttttgacaggtcacctgccccgagggcgtatacaattggtagccttcagtatggctccgttttcgccaatttaagaccggagcattttcatacaactccacttgttccggtaaattttctaccataccacgtgcgagtttggctggctgcagcaatatgccgccctccgtccataagcccatgcagtaataagaactgccgagtcgctgatgcagttcttcaccttcaagaattttatgtttcagttccagctctgacaacaacttgctgaaattcagcagttttttctcatggtccttaactgctgtagcatgaattttnccatttgcttccagatcgcagtcaatgtccagttcagctaccagncgctgaactgcttccactccggcatgtttgatatcatactttttccgatactcctcaagattggatgcagaaaaatgaccttcatttagaatcgaatccactagaaatccggaattcctggcacttgaaccttcgcctgcgttttggccttctaaaagaattatgcgtgactgaggatgcaaaatcgacaattgccgagccgcggcaagtcctgtgtaacccgcaccaagcacaacccaatccgcatgctgttcaccggaaagataaggccgactctggcgagacggcagttgtttaatccaaccgcaactgttgtcgttttttggtngtgtagaaatgatcttagccgccattgtgattttattttcttagtaagatgaaaactctaattgaggtattgngnaatacagttcaggaaattcttggccgcaaatgtgcgtaccagtgtttttcaacccacttgaaaaaccagacaatacaaaaagtgcagcacagatagaagaaccctgctgtgatgaacgactcaaaaggtacaaaatatcgggcattcactatttttgctgcaccaaacagatctacaatcgtaatcactcccgcaagagcactgccatgcagcataaaaatcacttcattgccgtaagcaggtaaagcacgccggaaggaaccgggaaggataatgcggcgntacatcgtgcttttngacatgccgcaagcctgggctgcttcngtttcnccgaatggngtttgttcaattgcaccccgtaatatttctgcagtgtaccccgcagtattcagggcaaaagctgtaatggcacaccaatatgcttccttgaaaagtatccagagcacgctttcacgaactgcttcaaactggcccatgccgtaatagagcaagaanatctgcaccaataacggtgttccccgaaagaaataaatataagtctttgcaggaaatctcaataatgaggtttttgaaacngccatcaaggctaaaggaactgctaatccaaatcctgaaacnaaggcgatcacgaccaactggattgtaacccaaagcccattcaaataaagcgggagattgtcaataatnacattataatccatgattcaaaccntncgtaccccaacactataacggcgattggcccaacgtaaaccaaggtcagatagcccggtaatgcacaaaaacaacagngcaacnaccaggnaaaangtaaaaggctggcgagtggcccctccagcaacacctgcattgtacatcatgtcgtgcaatccaatcactgaaacgagagcagtcgttttggccagaaccatccagttatttccnaatccnggcanagcgtggcgcaccatcagtggtaatgtaatgcgtaaaaatactttccagcttggcattccaaaggcaagagccgcttcaatttctccangggacacngccangatnccaccgcgaaangtttcggtcatgtatgctccaaaaataaaacctattgtgagggttccggcaacaaaagggctgatgtctatgtagtcccaanccagtgagtctccaatattgttgacaatgatttgnccaccatagaaaataatggtcatcagtaccaaatcaggaattccgcggatcagagtggtatanacagttgcngtgcttcgggctatcctggatttngagagcttggctatagctccaaataaaccaagaatgacagcaattaaaagggaaagtaaggcgacttctatggttagcgtcattccttccagaatcatcgggaaatagccatgtaaatcaaacattcctgaataatgtgagggaaaaaagggaaggccacggaatcctcgaattccgtggcaaaataagagaaaaattctnactttttagaggcntccncngagtattatgntaaacctcagccaagataaatcttagtaaacgtcaaaggcaaaatatttgccgttaatcatatgataaacaccnttagagcgaatnaccttaatngctaaactgaaaagt

SEQ ID NO: 1618 - DNA, 4000 bp, Escherichia coli
  misc_feature (140)..(140): n is a, c, g, or t
  misc_feature (294)..(294): n is a, c, g, or t
  misc_feature (364)..(364): n is a, c, g, or t
  misc_feature (471)..(471): n is a, c, g, or t
  misc_feature (1877)..(1877): n is a, c, g, or t
  misc_feature (3468)..(3468): n is a, c, g, or t
  misc_feature (3711)..(3711): n is a, c, g, or t
tacagattcctcccggcgaggtctgccctgcaatcgtaagattgtcattttttgttttaagttcacgttccagcatgatagtaccggaaattgcaaaaacaacagttcgtgcaccgcttttctctactgcatatcgtaangttccttccggcttgctggcagggtcatccaaacgtgtcacaacatatacagcacctccgcggccaccggtcgcattgcgaccatgaccttcagcataaggaaaagcaaataactcgccatagtccaatgttttcactccggtatcaggagagncgttttcctcaccattgctttcatcgtcgccgttgctacctatatttccttccgaatctacaatcggatnatctccggaacaggaaataaccccgaatcccaaaacaaatagcaaatagaacaaccaatatatacctttcatatcttatccgttttttaatccaaatatgtaattanacaaatatcatttagccggataaagtttctctaccaagctattgatatatacttccaaatttgtatattccttactcagattatatttgactccatctgcagaacttttcggattcagcccattggctgcctcccaagcatccggcattccgtcgccgtctgtatccacaggggcattctctttcacatatacaggccatcctcccacatccgttgccttatcaataagtcccagcacactgccgttacttcctgaggccgtataatctccattacgtacattgtctactatacgcctgtccaccgcatcagacttcaacgaagcaccggcatacagcagtacggctttataagcttctgaagcagactgcgtaaataatgccgcatcatcggttattgtaaattccgagttagcctgaatagcagactttccaccggaaggtaagagtacaccggatgtctcattcggctgcaaaccgacccaattatcattgttcacctcctccagcaaagactgataagcaggatttaattgagggcatgtaccatcaaaatagttaccattcagataaaacattccccatgttccttttgcatttttattttttccatcatctccattcggctgaaaaatgcgattgacaatatttggtttttcattggtagaaggccccggtttataataattattcacaaaattataacttcctccttcaccggcatagccgccattggtaggtccccaattataaaagacattgttgcgtaaatctactttttcattgccgggtttaccggtatacctactgccacatagacgaggagtacgactactatgatgtgccagaagattatggtggaacgtagcaggtgagccaccccaaatacctccatacccatgattacctttggtatgtacagaacggttcaaactctcgctgataatacaccactgcatagtaaaattgctattatcataaaaggaagcacactcatccgtacaccagctcatggaacaatgatctatgatgatgttcttatgttgctttccccaaagtgcatcgccactatccgcctcaccttcagttgtgaaattatcagatcccattcgaaaacgcataaaacgaataatgacattatcagcctgtacagaaaccggataacctttcaaacaaataccgtctccgggagctgtctgaccggcaattgtcaggtcaccatttactattttcagcgggctgttcaaatctatcagtccactcactgcaaacacaatcgtacgcgctccgctttggctgataccgtaacgcaaagtccctttttcgttggtgtctgccaatgaagtcaccacatacacctttccacctgctccgcctgtagtaaaccgaccggcgccatatgcaccnggaaatgcagcaatcgaagaacggtccggagcaggatactcttccaatgtattatccgtatccggattattatctccatccccattattatcagtttctggcggaacttccgttccgccagaaaccggattatcatccgaacatgccactactgaagcagaaaggatgaaacacagcaaaccaaaataaacgagtttcaatattctcataagtaagttttttaatacataaaagccggcagcagatttaccggcttttataaaacaattattcagcactgatgcttccgtagtgtcctactcccctgactgtgtataccccgtcagcagcagtcgtaacagataccgaagtttcggtagtctgtgccaaatagacgccattcacaaaaataagataacctgcagctccgtctattgcattccaacttaaagtagtaccatccaaggtagccatagtagtgcctggggtctgcatatactgtttcggattccatccctctctggcaatgatgttctcataagtatatccggcagcttcatctgcagaaagaacttttgcagtaaactgactgctgccgctaccaactgtcatatctcctgttgaaattacctgattatttttatcaaccgtattatattcgccaaaaagagcaggcgctgcgctacccgcagtccaatgaccgtctataatatccatcttcaaagcagtgttaatgaaaaccgccttcgcagaagttgattgctgacgtccgaaagaaaaagcggttatacctgcctcaccgtctatcgtacagtctttcatcacatacccataagcatcggtttcgttactacgtgaagccgtaataaaactaccattgcccgtgttataaaaagtactgttttctatcagcacatcaccacttccccagatatagtccgtactaccttcaatccatgaattttgtacataagcccggcaaataccatacgttccgttcactttctggaaacgcgtccaccacgtatcctggaatgaaaccaatttacaattattcatagccaatctatcataatggctacacagagcttcagcttgtccaccttttccaagaccaccgtcatagcggcttttcaatgcaccgtacaagttaataatggaaatgttctccaggtaaacatcagtggctttaatcaatactacacaattctgatctgtggtatatcctgcaaggcgcgcaggtgaattaggattgtgaatagaataaggccatgtatccgaattagtttgctcctctacacgattcaacgcaaattgaattttcactctgtcaggattttctccaatcaaatgaataaacggttttgttttaggtatatatacacattcattataggttcctgctgcaataaaaatcaggtaaggcgatgtcaaattggcaggagcggcattaatagcagcttgtacagtggtataatcacctcttccgtttgcatcaacaacagcatcaaacaccgtttcgctatctccaccggaaataccggaagtggctgtaaacttcaaagtaatatctttgctgtaaggacgatgctgcatatccgtcaatgtaccngcctcgataaataaggaacattcggaaccttcactgacagaataaggatagcggactttctcataattgatgacaatctgattggaagcaaccttatcattgaaataaattccggttgtcagcacttcaccggtttcttcatccttagtcggcggagtctggcgcatggctttgctaaagacaaactccacataaccatcagtacccgccgtcaaattgttctccgtttccgaatcaatattngcaagatcaacctccgtaccattgatattgcatgaaataagaacaggagcacttgtattttccttgccttcatcgttatcttcacaggcataacctgtgaagataagtaacaagaggagcaagcatttgcctactgtataaatagattttgtattcatattagttcatgttattaaatttattatttattccaacgcggatcaccgattatcttaacttcattcggaatatctgcaccgaaagtcaaatcaagcacatcggtacttgaagatgcattcgggaacagttg

SEQ ID NO: 1619 - DNA, 4000 bp, Escherichia coli
  misc_feature (1)..(2): n is a, c, g, or t
  misc_feature (4)..(5): n is a, c, g, or t
  misc_feature (7)..(8): n is a, c, g, or t
  misc_feature (12)..(12): n is a, c, g, or t
  misc_feature (14)..(15): n is a, c, g, or t
  misc_feature (17)..(18): n is a, c, g, or t
  misc_feature (21)..(21): n is a, c, g, or t
  misc_feature (23)..(24): n is a, c, g, or t
  misc_feature (26)..(27): n is a, c, g, or t
  misc_feature (29)..(29): n is a, c, g, or t
  misc_feature (31)..(31): n is a, c, g, or t
  misc_feature (35)..(35): n is a, c, g, or t
  misc_feature (38)..(39): n is a, c, g, or t
  misc_feature (41)..(43): n is a, c, g, or t
  misc_feature (45)..(45): n is a, c, g, or t
  misc_feature (47)..(47): n is a, c, g, or t
  misc_feature (49)..(55): n is a, c, g, or t
  misc_feature (58)..(60): n is a, c, g, or t
  misc_feature (62)..(62): n is a, c, g, or t
  misc_feature (64)..(69): n is a, c, g, or t
  misc_feature (71)..(71): n is a, c, g, or t
  misc_feature (73)..(73): n is a, c, g, or t
  misc_feature (77)..(77): n is a, c, g, or t
  misc_feature (80)..(81): n is a, c, g, or t
  misc_feature (83)..(83): n is a, c, g, or t
  misc_feature (86)..(86): n is a, c, g, or t
  misc_feature (88)..(89): n is a, c, g, or t
  misc_feature (92)..(93): n is a, c, g, or t
  misc_feature (95)..(98): n is a, c, g, or t
  misc_feature (100)..(100): n is a, c, g, or t
  misc_feature (102)..(106): n is a, c, g, or t
  misc_feature (108)..(108): n is a, c, g, or t
  misc_feature (110)..(110): n is a, c, g, or t
  misc_feature (112)..(117): n is a, c, g, or t
  misc_feature (119)..(123): n is a, c, g, or t
  misc_feature (125)..(126): n is a, c, g, or t
  misc_feature (128)..(130): n is a, c, g, or t
  misc_feature (134)..(134): n is a, c, g, or t
  misc_feature (137)..(137): n is a, c, g, or t
  misc_feature (140)..(141): n is a, c, g, or t
  misc_feature (144)..(145): n is a, c, g, or t
  misc_feature (147)..(147): n is a, c, g, or t
  misc_feature (149)..(151): n is a, c, g, or t
  misc_feature (153)..(156): n is a, c, g, or t
  misc_feature (159)..(159): n is a, c, g, or t
  misc_feature (162)..(162): n is a, c, g, or t
  misc_feature (164)..(166): n is a, c, g, or t
  misc_feature (168)..(169): n is a, c, g, or t
  misc_feature (171)..(172): n is a, c, g, or t
  misc_feature (174)..(174): n is a, c, g, or t
  misc_feature (178)..(179): n is a, c, g, or t
  misc_feature (182)..(182): n is a, c, g, or t
  misc_feature (184)..(184): n is a, c, g, or t
  misc_feature (186)..(186): n is a, c, g, or t
  misc_feature (188)..(188): n is a, c, g, or t
  misc_feature (192)..(196): n is a, c, g, or t
  misc_feature (198)..(199): n is a, c, g, or t
  misc_feature (202)..(202): n is a, c, g, or t
  misc_feature (204)..(205): n is a, c, g, or t
  misc_feature (209)..(209): n is a, c, g, or t
  misc_feature (211)..(211): n is a, c, g, or t
  misc_feature (217)..(218): n is a, c, g, or t
  misc_feature (220)..(224): n is a, c, g, or t
  misc_feature (226)..(227): n is a, c, g, or t
  misc_feature (232)..(236): n is a, c, g, or t
  misc_feature (238)..(239): n is a, c, g, or t
  misc_feature (241)..(242): n is a, c, g, or t
  misc_feature (249)..(249): n is a, c, g, or t
  misc_feature (252)..(252): n is a, c, g, or t
  misc_feature (258)..(258): n is a, c, g, or t
  misc_feature (263)..(267): n is a, c, g, or t
  misc_feature (270)..(270): n is a, c, g, or t
  misc_feature (273)..(273): n is a, c, g, or t
  misc_feature (275)..(275): n is a, c, g, or t
  misc_feature (284)..(285): n is a, c, g, or t
  misc_feature (287)..(288): n is a, c, g, or t
  misc_feature (290)..(290): n is a, c, g, or t
  misc_feature (292)..(292): n is a, c, g, or t
  misc_feature (294)..(294): n is a, c, g, or t
  misc_feature (297)..(297): n is a, c, g, or t
  misc_feature (299)..(299): n is a, c, g, or t
  misc_feature (307)..(307): n is a, c, g, or t
  misc_feature (311)..(313): n is a, c, g, or t
  misc_feature (321)..(321): n is a, c, g, or t
  misc_feature (323)..(323): n is a, c, g, or t
  misc_feature (325)..(325): n is a, c, g, or t
  misc_feature (334)..(335): n is a, c, g, or t
  misc_feature (339)..(339): n is a, c, g, or t
  misc_feature (341)..(341): n is a, c, g, or t
  misc_feature (343)..(345): n is a, c, g, or t
  misc_feature (347)..(347): n is a, c, g, or t
  misc_feature (355)..(356): n is a, c, g, or t
  misc_feature (358)..(360): n is a, c, g, or t
  misc_feature (364)..(364): n is a, c, g, or t
  misc_feature (373)..(374): n is a, c, g, or t
  misc_feature (376)..(376): n is a, c, g, or t
  misc_feature (380)..(380): n is a, c, g, or t
  misc_feature (383)..(384): n is a, c, g, or t
  misc_feature (386)..(386): n is a, c, g, or t
  misc_feature (388)..(394): n is a, c, g, or t
  misc_feature (400)..(400): n is a, c, g, or t
  misc_feature (407)..(407): n is a, c, g, or t
  misc_feature (409)..(410): n is a, c, g, or t
  misc_feature (416)..(417): n is a, c, g, or t
  misc_feature (420)..(421): n is a, c, g, or t
  misc_feature (425)..(427): n is a, c, g, or t
  misc_feature (433)..(435): n is a, c, g, or t
  misc_feature (438)..(438): n is a, c, g, or t
  misc_feature (441)..(442): n is a, c, g, or t
  misc_feature (444)..(444): n is a, c, g, or t
  misc_feature (447)..(448): n is a, c, g, or t
  misc_feature (450)..(450): n is a, c, g, or t
  misc_feature (453)..(453): n is a, c, g, or t
  misc_feature (456)..(457): n is a, c, g, or t
  misc_feature (460)..(461): n is a, c, g, or t
  misc_feature (465)..(465): n is a, c, g, or t
  misc_feature (467)..(469): n is a, c, g, or t
  misc_feature (471)..(471): n is a, c, g, or t
  misc_feature (473)..(473): n is a, c, g, or t
  misc_feature (475)..(478): n is a, c, g, or t
  misc_feature (482)..(484): n is a, c, g, or t
  misc_feature (486)..(486): n is a, c, g, or t
  misc_feature (489)..(491): n is a, c, g, or t
  misc_feature (493)..(495): n is a, c, g, or t
  misc_feature (497)..(497): n is a, c, g, or t
  misc_feature (500)..(500): n is a, c, g, or t
  misc_feature (502)..(503): n is a, c, g, or t
  misc_feature (507)..(507): n is a, c, g, or t
  misc_feature (512)..(512): n is a, c, g, or t
  misc_feature (515)..(517): n is a, c, g, or t
  misc_feature (522)..(522): n is a, c, g, or t
  misc_feature (533)..(533): n is a, c, g, or t
  misc_feature (539)..(539): n is a, c, g, or t
  misc_feature (541)..(541): n is a, c, g, or t
  misc_feature (550)..(550): n is a, c, g, or t
  misc_feature (603)..(603): n is a, c, g, or t
  misc_feature (610)..(611): n is a, c, g, or t
  misc_feature (704)..(704): n is a, c, g, or t
  misc_feature (761)..(761): n is a, c, g, or t
  misc_feature (1430)..(1430): n is a, c, g, or t
  misc_feature (2014)..(2014): n is a, c, g, or t
  misc_feature (2028)..(2028): n is a, c, g, or t
  misc_feature (2048)..(2048): n is a, c, g, or t
  misc_feature (2183)..(2183): n is a, c, g, or t
  misc_feature (2367)..(2367): n is a, c, g, or t
  misc_feature (2430)..(2430): n is a, c, g, or t
  misc_feature (2517)..(2518): n is a, c, g, or t
  misc_feature (2784)..(2784): n is a, c, g, or t
  misc_feature (3495)..(3495): n is a, c, g, or t
  misc_feature (3498)..(3498): n is a, c, g, or t
  misc_feature (3501)..(3502): n is a, c, g, or t
  misc_feature (3504)..(3504): n is a, c, g, or t
  misc_feature (3729)..(3731): n is a, c, g, or t
  misc_feature (3734)..(3734): n is a, c, g, or t
  misc_feature (3739)..(3741): n is a, c, g, or t
  misc_feature (3748)..(3750): n is a, c, g, or t
  misc_feature (3753)..(3755): n is a, c, g, or t
  misc_feature (3757)..(3757): n is a, c, g, or t
  misc_feature (3759)..(3759): n is a, c, g, or t
  misc_feature (3761)..(3763): n is a, c, g, or t
  misc_feature (3766)..(3768): n is a, c, g, or t
  misc_feature (3770)..(3773): n is a, c, g, or t
  misc_feature (3775)..(3786): n is a, c, g, or t
  misc_feature (3788)..(3789): n is a, c, g, or t
  misc_feature (3792)..(3794): n is a, c, g, or t
  misc_feature (3797)..(3797): n is a, c, g, or t
  misc_feature (3799)..(3799): n is a, c, g, or t
  misc_feature (3802)..(3803): n is a, c, g, or t
  misc_feature (3805)..(3805): n is a, c, g, or t
  misc_feature (3807)..(3808): n is a, c, g, or t
  misc_feature (3810)..(3814): n is a, c, g, or t
  misc_feature (3816)..(3818): n is a, c, g, or t
  misc_feature (3821)..(3824): n is a, c, g, or t
  misc_feature (3826)..(3826): n is a, c, g, or t
  misc_feature (3830)..(3837): n is a, c, g, or t
  misc_feature (3840)..(3841): n is a, c, g, or t
  misc_feature (3843)..(3850): n is a, c, g, or t
  misc_feature (3852)..(3852): n is a, c, g, or t
  misc_feature (3854)..(3854): n is a, c, g, or t
  misc_feature (3856)..(3864): n is a, c, g, or t
  misc_feature (3866)..(3866): n is a, c, g, or t
  misc_feature (3868)..(3883): n is a, c, g, or t
  misc_feature (3885)..(3887): n is a, c, g, or t
  misc_feature (3890)..(3892): n is a, c, g, or t
  misc_feature (3897)..(3909): n is a, c, g, or t
  misc_feature (3911)..(3921): n is a, c, g, or t
  misc_feature (3924)..(3927): n is a, c, g, or t
  misc_feature (3929)..(3934): n is a, c, g, or t
  misc_feature (3937)..(3938): n is a, c, g, or t
  misc_feature (3940)..(3940): n is a, c, g, or t
  misc_feature (3942)..(3949): n is a, c, g, or t
  misc_feature (3951)..(3957): n is a, c, g, or t
  misc_feature (3959)..(3968): n is a, c, g, or t
  misc_feature (3970)..(3974): n is a, c, g, or t
  misc_feature (3976)..(3976): n is a, c, g, or t
  misc_feature (3978)..(3983): n is a, c, g, or t
  misc_feature (3985)..(3998): n is a, c, g, or t
  misc_feature (4000)..(4000): n is a, c, g, or t
nntnncnnggcncnncnnggncnntnncnanggcnccnncnnngncngnnnnnnncannncngnnnnnngngnggcngcnncnacngnntcnncnnnnangnnnnngncngnnnnnncnnnnncnntnnngccngcnacnncgnngncnnngnnnncgntgncnnngnngnngntggnngcngngncngtgnnnnngnnggncnnggcngngctggnncnnnnngnnctggnnnnngnngnnccagccncgncagccngggcnnnnngcnccncncgcaaagcnngnncncncngcncncgttgcanagcnnnggcagctncngnccctagtanngccncnannntntccactcnncnnnctgnttgggccanntnagcncgnngnannnnnnnttgctnagcggtnanncggggnnctnnaggnnntgaggnnnctnagnntnccnnanccnccnnggnnactngnnnancngnnnnagcnnntntannngnnncngantnnaccncttgngcnnncggcncgccggctggngcgccngncgctggtgngccttggcttggcgcagctgacacgccttgagctgatgcacctgccactgcgncagctgnngcgcctggcgctacggcgactggctggccttgaactgcggcagctggttggccggccgcgcccagaggcggcagggcgtcggtgaggaaatgntcaatgcgtcggcttggggcagccgaggggaaagtaaccccctgcccaagctgacgncctaccccaatacgggccagggcgacgtcgtccatgttcatatccccacccaaaatatgggccccaggcaaaccagccagcttccaccaggcgtgggccagctggcgccgggcggtggtggggtgggtggccaggtgcacgctagccacgttaagcggcacctgcccgacgccgtcgaccaaagtagccgccagcatcaggcgcgttgaagcggtaaacagcgcatagggcagcttgccaccctcgcggcgcacaatcgtgggcacgccccgccccagccgctccacacgccaagtttgcaccggtaggcgcgacaaaatggcgttaccaaaaccgcgcagaggggccagtggctccaacactcgcagcgggtcgtcaccaaaggtgcgcacctggctgcggcgtgggcggtgacgcaggcggtctactcccccagcgtaggtggcggcaaaacgccaatgcgggtaaccggcctgctcagctagcaaacccgccaaatccacccggcctgagcggttttggtgcaaatccacttcctgcagcaaaaccacgtcagcgttcagctcacgcagctgctgggccacctgactgtaaagctggtgagcaacttgagggctgtagggctgaccagaagccacctcggctagcgtggcagtgtcattggcccgnccgtactggaggtttgcgctggccaggcgtagttttgtgatcactctttaggctcgttagttgcgaaacttagcgccaccgagttcatgcagtaacgctgaccggtgggggtggcgggggcgtcgtcgaaaacgtggcccaggtgggagccgcagttagcgcagcgcacctcggtacgctcataacccagcttgtaatctgagtgcagcgtcaccgcatcggtttccttggggtcatagaaggacggccagccacagcccgactcgaacttggtggtggatttaaacagctgcgccccgcaggcccggcaagagtagatgccttcacggttttcgctcagcagctcgccggtgaaaggcatttcggtgccagcctgacgcagcacctcatactcagccgggtttaggcgctcacgccactgggcgtcagtgagctgcgcaaactcttgattctcactcatgactcatccttggttttatccgacacggcaggtagtacagcggttttatccacttcatttattcccgcctcggcgtcaggggcctgggtggagatggcgtcaggggcctgggtggagatggcgncaggggcctgggtnaccttagcggcagccccagntgagccagcagcgacggcgtcgggggccgcaccagagcgtcctacctcagccgcaccagagcgaagggcctctaccttggccttagcgctacggctagccgcgctgagcacaccgcgtgcctgctccgggcgcanctgccgctttgcctcctcaatcgcagaaatctgggctacctgcgtggggtcagagagcaccatggtggccggctcaggtgcgttagttgcttccgacccggtttgcacgcccggcaacagtccacggcgcaaaatccgacgccgccgcatcttcttggagcgcactgcggccgcctgcacccgngcttcctcaatgggatcgccctgctcagctttagttactgccggctgggacttggtgtcactngatagctgcgccaattcctgggctagcttagccaccttttcaggggtgggatcttgcatgacggtaacgttttccacctccacacgnngacgcggcagggcatagggggcttctttttgcagccaagtcaccatttcttcacgcacatggcattgcagtttgaaggcatcaacactgtttgctgccgaaacagttaggcgcacccggatcaaagagttttgggcatcaattactgatagcgctgcgtcacgcccatcccaggtggatgaggaggccacaaacttagctagctgcgcccgcatagcggcgataggtgcacgccaatccaggtcaaaattgatttgtgcagtctgncgttcatcacgacgcgaccagttagtaaaagggttctctgtgaagtatttgctgggcagcaagatacggcgcccgtcagcggccaaaaccaccacataggtgaacgtgatttcttcgattcggccagagtcagtggcattaataaccacctggtcatccacacggatagcgtcagtgatggccagctgcacacctgcaaacaggtttcccagcactgattgtgcagccaaaccggctaccaccgaaaccagaccggcactagcaagcagcgaccccatagccaggcgtgcttgtgggaaagtcatgacgatggtgattgcaccaataatgatgacgataacttcagctactcgccgcagaatctgggcctgggtggtgatcttattggcccggcgcacattggtgggatcattgcgcgattcggcatgggccaccacggtagccgaaatggctttaacccagcttacgcacacccaggtcagggccgctttaaacaggattaccagcaacaaaatagcgtagcgataccaggccggggaggaagtgccctccatggccagttgggcgccgattagcgcgccaacaatggcaaacagtgcgtagaaagagttacgccccttgtcccccacgtggtgccacagcagggagcggcgtccggccacatgcactgcaataactacagctaaagccagcaccaggccgattgatagnccnagnncngtgcgccacagcaggctgaaagtgtctaaggtgaccgctgcggcagattctgtgggcgatggcgtggggataggagtcgccaccgcgagtatgtgcccctgatttaacatggcagccacactagtagcgcaggctgtgcgcaagctgtggttttacccgcgcgtccgtataggtaaggcagtccacaaagcttgaggttgcaacataaaactcactgttcacagnnnccncagannncccaaannnggnnncntnannnccnnntnnnnannnnnnnnnnnncnnccnnnccncnctnncngnngnnnnnannnccnnnncnaacnnnnnnnnccnncnnnnnnnncncngnnnnnnnnncncnnnnnnnnnnnnnnnnannnaannnccccnnnnnnnnnnnnnannnnnnnnnnnttnnnngnnnnnnccnncngnnnnnnnncnnnnnnncnnnnnnnnnncnnnnnancnnnnnncnnnnnnnnnnnnnnan

SEQ ID NO: 1620 - DNA, 4000 bp, Escherichia coli
  misc_feature (2010)..(2010): n is a, c, g, or t
  misc_feature (3024)..(3024): n is a, c, g, or t
  misc_feature (3279)..(3279): n is a, c, g, or t
  misc_feature (3285)..(3285): n is a, c, g, or t
  misc_feature (3287)..(3287): n is a, c, g, or t
  misc_feature (3289)..(3289): n is a, c, g, or t
  misc_feature (3291)..(3291): n is a, c, g, or t
  misc_feature (3294)..(3296): n is a, c, g, or t
  misc_feature (3299)..(3299): n is a, c, g, or t
  misc_feature (3302)..(3302): n is a, c, g, or t
  misc_feature (3304)..(3304): n is a, c, g, or t
  misc_feature (3307)..(3307): n is a, c, g, or t
  misc_feature (3309)..(3326): n is a, c, g, or t
  misc_feature (3328)..(3328): n is a, c, g, or t
  misc_feature (3331)..(3331): n is a, c, g, or t
  misc_feature (3334)..(3334): n is a, c, g, or t
  misc_feature (3337)..(3337): n is a, c, g, or t
  misc_feature (3339)..(3343): n is a, c, g, or t
  misc_feature (3346)..(3350): n is a, c, g, or t
  misc_feature (3355)..(3357): n is a, c, g, or t
  misc_feature (3359)..(3361): n is a, c, g, or t
  misc_feature (3365)..(3365): n is a, c, g, or t
  misc_feature (3367)..(3377): n is a, c, g, or t
  misc_feature (3379)..(3386): n is a, c, g, or t
  misc_feature (3389)..(3389): n is a, c, g, or t
  misc_feature (3391)..(3391): n is a, c, g, or t
  misc_feature (3393)..(3402): n is a, c, g, or t
  misc_feature (3407)..(3407): n is a, c, g, or t
  misc_feature (3409)..(3413): n is a, c, g, or t
  misc_feature (3418)..(3418): n is a, c, g, or t
  misc_feature (3420)..(3425): n is a, c, g, or t
  misc_feature (3427)..(3427): n is a, c, g, or t
  misc_feature (3430)..(3430): n is a, c, g, or t
  misc_feature (3432)..(3433): n is a, c, g, or t
  misc_feature (3436)..(3436): n is a, c, g, or t
  misc_feature (3438)..(3451): n is a, c, g, or t
  misc_feature (3454)..(3458): n is a, c, g, or t
  misc_feature (3461)..(3461): n is a, c, g, or t
  misc_feature (3472)..(3473): n is a, c, g, or t
  misc_feature (3479)..(3480): n is a, c, g, or t
  misc_feature (3482)..(3485): n is a, c, g, or t
  misc_feature (3487)..(3488): n is a, c, g, or t
  misc_feature (3490)..(3492): n is a, c, g, or t
  misc_feature (3499)..(3501): n is a, c, g, or t
  misc_feature (3504)..(3504): n is a, c, g, or t
  misc_feature (3506)..(3506): n is a, c, g, or t
  misc_feature (3508)..(3508): n is a, c, g, or t
  misc_feature (3512)..(3520): n is a, c, g, or t
  misc_feature (3522)..(3527): n is a, c, g, or t
  misc_feature (3529)..(3530): n is a, c, g, or t
  misc_feature (3532)..(3532): n is a, c, g, or t
  misc_feature (3535)..(3535): n is a, c, g, or t
  misc_feature (3538)..(3538): n is a, c, g, or t
  misc_feature (3540)..(3540): n is a, c, g, or t
  misc_feature (3544)..(3545): n is a, c, g, or t
  misc_feature (3549)..(3550): n is a, c, g, or t
  misc_feature (3553)..(3553): n is a, c, g, or t
  misc_feature (3559)..(3559): n is a, c, g, or t
  misc_feature (3562)..(3562): n is a, c, g, or t
  misc_feature (3565)..(3565): n is a, c, g, or t
  misc_feature (3568)..(3568): n is a, c, g, or t
  misc_feature (3571)..(3571): n is a, c, g, or t
  misc_feature (3573)..(3574): n is a, c, g, or t
  misc_feature (3576)..(3577): n is a, c, g, or t
  misc_feature (3579)..(3584): n is a, c, g, or t
  misc_feature (3586)..(3587): n is a, c, g, or t
  misc_feature (3589)..(3589): n is a, c, g, or t
  misc_feature (3591)..(3600): n is a, c, g, or t
  misc_feature (3602)..(3603): n is a, c, g, or t
  misc_feature (3605)..(3609): n is a, c, g, or t
  misc_feature (3612)..(3612): n is a, c, g, or t
  misc_feature (3615)..(3615): n is a, c, g, or t
  misc_feature (3618)..(3618): n is a, c, g, or t
  misc_feature (3623)..(3623): n is a, c, g, or t
  misc_feature (3626)..(3629): n is a, c, g, or t
  misc_feature (3631)..(3631): n is a, c, g, or t
  misc_feature (3634)..(3634): n is a, c, g, or t
  misc_feature (3638)..(3638): n is a, c, g, or t
  misc_feature (3641)..(3641): n is a, c, g, or t
  misc_feature (3643)..(3647): n is a, c, g, or t
  misc_feature (3654)..(3655): n is a, c, g, or t
  misc_feature (3657)..(3664): n is a, c, g, or t
  misc_feature (3666)..(3667): n is a, c, g, or t
  misc_feature (3669)..(3672): n is a, c, g, or t
  misc_feature (3674)..(3674): n is a, c, g, or t
  misc_feature (3677)..(3678): n is a, c, g, or t
  misc_feature (3681)..(3682): n is a, c, g, or t
  misc_feature (3684)..(3687): n is a, c, g, or t
  misc_feature (3691)..(3691): n is a, c, g, or t
  misc_feature (3694)..(3694): n is a, c, g, or t
  misc_feature (3697)..(3697): n is a, c, g, or t
  misc_feature (3700)..(3701): n is a, c, g, or t
  misc_feature (3704)..(3704): n is a, c, g, or t
  misc_feature (3706)..(3707): n is a, c, g, or t
  misc_feature (3709)..(3710): n is a, c, g, or t
  misc_feature (3712)..(3712): n is a, c, g, or t
  misc_feature (3715)..(3716): n is a, c, g, or t
  misc_feature (3719)..(3720): n is a, c, g, or t
  misc_feature (3722)..(3730): n is a, c, g, or t
  misc_feature (3732)..(3732): n is a, c, g, or t
  misc_feature (3734)..(3734): n is a, c, g, or t
  misc_feature (3737)..(3742): n is a, c, g, or t
  misc_feature (3745)..(3746): n is a, c, g, or t
  misc_feature (3748)..(3749): n is a, c, g, or t
  misc_feature (3751)..(3752): n is a, c, g, or t
  misc_feature (3754)..(3755): n is a, c, g, or t
  misc_feature (3757)..(3758): n is a, c, g, or t
  misc_feature (3760)..(3761): n is a, c, g, or t
  misc_feature (3763)..(3763): n is a, c, g, or t
  misc_feature (3765)..(3765): n is a, c, g, or t
  misc_feature (3768)..(3770): n is a, c, g, or t
  misc_feature (3772)..(3775): n is a, c, g, or t
  misc_feature (3777)..(3784): n is a, c, g, or t
  misc_feature (3786)..(3790): n is a, c, g, or t
  misc_feature (3792)..(3793): n is a, c, g, or t
  misc_feature (3795)..(3796): n is a, c, g, or t
  misc_feature (3798)..(3799): n is a, c, g, or t
  misc_feature (3801)..(3802): n is a, c, g, or t
  misc_feature (3804)..(3805): n is a, c, g, or t
  misc_feature (3807)..(3809): n is a, c, g, or t
  misc_feature (3813)..(3813): n is a, c, g, or t
  misc_feature (3816)..(3817): n is a, c, g, or t
  misc_feature (3823)..(3824): n is a, c, g, or t
  misc_feature (3826)..(3827): n is a, c, g, or t
  misc_feature (3829)..(3830): n is a, c, g, or t
  misc_feature (3832)..(3834): n is a, c, g, or t
  misc_feature (3836)..(3836): n is a, c, g, or t
  misc_feature (3838)..(3839): n is a, c, g, or t
  misc_feature (3841)..(3842): n is a, c, g, or t
  misc_feature (3844)..(3844): n is a, c, g, or t
  misc_feature (3848)..(3848): n is a, c, g, or t
  misc_feature (3850)..(3850): n is a, c, g, or t
  misc_feature (3852)..(3858): n is a, c, g, or t
  misc_feature (3861)..(3861): n is a, c, g, or t
  misc_feature (3864)..(3864): n is a, c, g, or t
  misc_feature (3867)..(3868): n is a, c, g, or t
  misc_feature (3870)..(3870): n is a, c, g, or t
  misc_feature (3873)..(3873): n is a, c, g, or t
  misc_feature (3876)..(3877): n is a, c, g, or t
  misc_feature (3879)..(3880): n is a, c, g, or t
  misc_feature (3883)..(3884): n is a, c, g, or t
  misc_feature (3886)..(3886): n is a, c, g, or t
  misc_feature (3888)..(3888): n is a, c, g, or t
  misc_feature (3893)..(3893): n is a, c, g, or t
  misc_feature (3895)..(3895): n is a, c, g, or t
  misc_feature (3897)..(3897): n is a, c, g, or t
  misc_feature (3899)..(3911): n is a, c, g, or t
  misc_feature (3913)..(3917): n is a, c, g, or t
  misc_feature (3919)..(3920): n is a, c, g, or t
  misc_feature (3922)..(3923): n is a, c, g, or t
  misc_feature (3925)..(3925): n is a, c, g, or t
  misc_feature (3928)..(3933): n is a, c, g, or t
  misc_feature (3935)..(3935): n is a, c, g, or t
  misc_feature (3937)..(3937): n is a, c, g, or t
  misc_feature (3939)..(3939): n is a, c, g, or t
  misc_feature (3943)..(3943): n is a, c, g, or t
  misc_feature (3945)..(3946): n is a, c, g, or t
  misc_feature (3962)..(3962): n is a, c, g, or t
  misc_feature (3965)..(3969): n is a, c, g, or t
  misc_feature (3972)..(3976): n is a, c, g, or t
  misc_feature (3978)..(3978): n is a, c, g, or t
  misc_feature (3982)..(3984): n is a, c, g, or t
  misc_feature (3986)..(3989): n is a, c, g, or t
  misc_feature (3994)..(3995): n is a, c, g, or t
  misc_feature (3997)..(3997): n is a, c, g, or t
gcacgcgaacgcttgcgcgacgcgcttgagcgtcgcgcgtcgaccgacggcgagaaagacttcgttttctttgtgtttaccatagtcactcgccgccttgttgaagaggtttttttgttcgacgagttcgcgctcggcgcgggcgaggcgacgtttgagctcgtccgggtcgttcgtcggcgtccgtggacgcgtcggggatccgagctggggcgggggcgacggtggggtggtggtcatcgcggcgcggtgtgaggtttacccaaggcgaagagagagtttgttggtttgttggttgaatgtactactgtaagaatcgctgctatcgggctatcgcgctacggtgagctagttactagtgagaatcgcgggcgtggtgccaccgcgtgtgtcgttttcgtcgtgcgtcagtgttgctccggcgcgaatgcgcgttggatgtgctctagaaggaatttggcggcggctcgattaacgtgggcgttgtgcgcgtcgcaactcagacgttgcacgcaagatggacatccgtcggcacgcgagcacgcgcagtcgtcgacgatggatttcgcacgactgatgagttctggaaagagtttcgacgcgcggctggtgatgccgacgccgccgaggtggcgatcgtaaatgagaaagcgatgcggggcgtatcggcgaccgcgttctgcgtgtaaatcggcggagaagcactcgcaaccgacatcgttttctccgcacggaatgtggagaggtaaggcgttgaggagcgcgtgcgatgcggcgtggacgccggcgcgtaaatcgatgccggcgtcggtcgcgagcgcgcacaccgagtctggtatgcgcaaccacgcgccgacggtgtcgaatcgcgtctcgcgcggcggaaagctttcctggtcgaatttcgcctgcgaaccgcgagcgacgcggctgaaacccgtaaagacggttctgatttccacgtcatcgcacttgacacactgtcgaagcggaagctggctgtcggtctccccgtacgcgcgctgtccgccgggaacaaagcagacggtttcgtgcttcacgcgcgtaaagtacttgacatccgcctgcctcacaaaggcgcgacgacgctccatgtcgagtttttgacacaacagcgttctcccttggtgcgtgtacacggcgccttcgtacacctcgaagaacgctttggaggcttcgatgctagagatgactttaccgaggggctccgccttggtcgccttgctttgatcaaagacttcgtaacgctcctcctcaatcgtccgcactgaaacgtcgagggctggtgttttcgtcgcgcacgccaagagggggtgtgcggtaatatcctcggcgttaccacgcaccaaggcggttgggtccacggcgatgcgacctttgcgaaccatcgactgcgcgacgcctcgagtcaaatcgccaaagtacacttcgtccacgtctccgttcgcgaacaaggggagctcgtacgccgcgcacgcgagatgctgctcgacgatggatggatttctcggatcgacgtaagacatctccaaaggcgcatcaaacagcgctcgaggctgacgcataaagtgttggtcgagaggaccgtcaaaggcgacgtaaatcgacagcgcgtggccttctctgcgcccagctcgaccagcctgctgccataaagacgcgacagatcccggaaatcccaagtgtaaagtcacatcgagcgatccgacgtcaattccgagctcgagggcgttcgtcgtcgccacaccgagtaaagatcccgaaaaaagttccttttcgatgacgcgtcgttcgcccgcttcgtacccgccgcgatacgacgccaccttgtccgccagatgaggcgccgacgagcgcaagatttcgcgcgtgtacacgagcacgagctcgcacaatttcctcgtcttgcaaaacgccaagcaacgcaagttgtgctggacgcactcggctagaatttgtgaaatttccacaaccgggctcgtcctcgcnccgtcctctggtggacgccgcgcgtcaacctctcccggttgtttctccgccgccgtcgtcgtcgtcgtcgcctccccgttccgaagcctttttgccaacgcagctttaccgcgctcgatcggcaactgacgacgaaatttcctctccgtgttcgtctgcgacgtctgccccggtttcagcgtcggattccacaacagaaacgtcttttcgccgcgcggcgccccgtcgttggtcaccacttcaatctcatcttcgctcgcatcgcgcgttcgccaaccgatcaaatccctcgcgtgttccccagggttcgccaccgtcgcgctgctgatgataaactgcgggcacgatccgtaaatctctgcgcaaatccttcgcagtcttcgcacgatgagcgccacgtgcgaaccaaagacgccagagtacgcgtgcgcttcatcgatgacgacgtaacgcaacccagagagaaacttggcccactgcttatgcgccggcatgatgctcacgtgaagcatgtctggattggtgatgatgagtcgcgagttggcgcgcacgtcgacgcgcgcatcctctcgagtatcgccgtcaaagacgccgacgtcaaacacagtttcttcgccacgcggaacgctcgacagaatgttccgtaaagctctcagttgatcttgcgcgagcgcctttgtcggaaacatgtacagcgccgtcgcagtcgggtcaccgagcaacgtctcaatcgtcgggacgttgtagcacacggatttaccgctcgccgtaccggaactcacgatgacgtgtcggcgtcgcgcgttcagtcgctcccccaaaatcgcttcgatcgcgctcgcctggtgactgaagagcgatttcgtcaagtcgatcccaaccccggcaaaggcttgaatcgtggcgtcgctcaaaagcctttggatcttttccggcgaccacgcgacgcgacgcgccgttttcggcgtcatggtttcgacgtgtttgatttgtccgcgcgcgccgagcgtctgngttaaatgttccacaaaggttttcacatccatcggttccgtgctgcgacagtgcccgccggaatccttcgtcgcgtccttcttcgtcgtcgccgtcccggcgtcgccgctttcttcggcgcccgcccgttgtttcctctttgcccgcaatcgcggcggcgctggcggtcgatccatcgcctcgggcggaaccgtcatcgtcgacgagcgatttcgaacgcgcgcgtcgtcgtcgtcgtcgtcgtcgtcgtcgtcntcgtcntncntnttnnncgncgncnccncnnnnnnnnnnnnnnnnnncnccncgncgncnnnnncgnnnnncgtcnnntnnntcgncnnnnnnnnnnngnnnnnnnngangncnnnnnnnnnnccccncnnnnncgccncnnnnnncnccncnnccncnnnnnnnnnnnnnncgnnnnnccncctcgtcgtcnncgtcgnncnnnncnngnnnccgccgnnnctncncnacgnnnnnnnnncnnnnnncnncnccnccncntccnncgcnncgncgacgncgncgnccnccncnncnngnnnnnncnncngnnnnnnnnnngnngnnnnntcntcntcntccgncgnnnngncgncganganannnnncgtcgtnngnnnnnnnngnngnnnngnggnntcnncnnnngganganganganncgncnncnncntcnncgnngnnnnnnnnntncnccnnnnnnacnncnncnncnncnncnncncntcnnncnnnnannnnnnnntnnnnncnncnncnncnncnncnnngccnccnnccaccnncnncnncnnnancnncnncntcgncngnnnnnnntgntgncgnngnaanaannannacnncntngtcgncncntnnnnnnnnnnnnncnnnnncnncnncncgnnnnnnancncnccgncnntcgtcgtcgtcgtcgncgnnnnncgnnnnncntcgnnnannnnctccnncntcg

SEQ ID NO: 1621 - DNA, 4000 bp, Escherichia coli
  misc_feature (576)..(576): n is a, c, g, or t
  misc_feature (612)..(612): n is a, c, g, or t
  misc_feature (1985)..(1985): n is a, c, g, or t
  misc_feature (2015)..(2015): n is a, c, g, or t
ttagatccaaaagatatttatgaagaagacacagacaaaggaaagtttatttttgcaaaaacacaaaaaaaagaaactccagttattgaggaaattaagaaaaatattcctcattttttaaatggcctgcaatggcgaaaaaaaatgcgttggggcaatcatgatctttcttggggcagacctttaaaatcaattttatgtttatttgataaacaaactatttcatttaatttttttcatttaacatcaacaaatgtcacttatgtggatggtccattagatgataaagcagttgttataaaagattatagtcattttaaaaaaatattaactgataaaagaattacctttgataacgcagagagagaaaaattaattactaaaaatattcaatcgtttcttaaaaagaatgattgtgaattagaaattaataataaattacttaagcaagtcattaatcttgttgaggatccaattgttctaaaaggatcatttttaaaagattttttaaaattaccagaagagcttctcattttaacaatgcagcatcatcaaagatatttcccaatgcgctcnactaacaatcataagttaattaataattttattgtngttgcaaataaagaagatattacaaataaaattataaaagggaatgaaagagttcttgccgcacgtttatcagatgcaaaatttttctgggaaaaaaataaaagtcaaaatctagtaaaacaagtaaataaacttaagggaatcactttttatcaaagtcttggttcgcttcatgataaaacgcaaagaataagagttttagcatcattaattgcagattttattaattgtaaaaaagatgatgcagaaatagcagcttcaatttgtaaagcagatttagtttcagatttagtaggagaatatccagagcttcagggtgtgttaggaaagtattttgcagtagagcaaggttttagcttacaaatcgcaaatgcaatctcagatcattatttaccgattggaccagaagatagagtgccaaaagaaaaaatttcaattgcagtcgctctttctgataagattgataatttagttggattcttcggtatcaatgaaaagccaacaagctcaaaagatccttacgcgctaagaagatcagcacttggtattcttagaatattaatagaaaatagaatttctatttcattaaaagagttaattaataactcaaaaaactcatatcttacgcaaagagtgaatatacaaaaccctaagtttgctgaggagattttggttttcatttcagatcgttttaaaaacttacttaaagatcaaaaagttagacctgatgttattgaatctgttttatttaatagtagatccgatgattattattcattgtttactaaaattaaaaatttaaacaaagtagtaaaaagtaatgatgggctaaatgttattgcagtgtacaaaagatgtgcaaatatcttagagcaatcaaaaaaagatcttaaacaagaactttttggagatcccgaaattgttttatttaaacataacgaagagaattttttatttgaaaaaataaatgaaattagagaacattatacaactcctgcacgattacgaacggtagaacagacgatgggtttgctagctggcacaaaaggttttgttgataagttttttgataacgtaaaagttaatgatgaaaacgaacaaattaaaaagaacagattagagttattatttctattgtgtaaaacttttgatagctttgctgacttttcaaaatttgaggtttaaaaatgccaaagtgggtttatcagtttaatagttcaaattgcgaaggaactgtctcgcaaaaacctcttttaggtggaaaaggtgcaaaccttgcggagatgggaaaattaggccttcctgttcctccgggatttacaattacaacagaagtttgcactgagttttataaaaataatcaaaaatatccngccgatcttaaaattcaagtagaagacgcnataaaaaatattgaaaaaattttaggaaaaaattttggcgatgttaacaatcctttattagtatcagttagatcaggcgcaagagtgtctatgcccggaatgatggatactgttttaaatttaggactgaacgacaaaactgttttaggattaattaaaaaaactaataacgaaacatttgcttatgatagctacagacgctttattcaaatgtatagcaacgttgtccttgaagtagatcatcataattttgaggatttgcttgataattataaactaacaaaaggtgtattgtcagacacagatcttaaagctgaagattggaaaacaattgttggcaattataaagatattgtaaagaaaaatacaaaaaaagatttccctcaagattcccatgaacaattatggggagcaataagtgccgtatttcaatcttggcaaaatcaaagagcaaaaacatacagaagattaaataatattcctgaagagtggggcacagcagtcaatattcaatctatggtgtttggtaatatgggcaatgattgtgcaacgggcgttgcatttaccagaaacccgtccacaggagaaaatagtttttatggagaatatttaattaatgcacaaggagaagatgttgttgcaggaattcgaactccaagaaatattactaaaaaagaaagattagagtcatcttctgaggatttatcattagaggagacaatgccagaagcattcgctgaacttacaaaaatttataaaaaattagagactcactaccgtgatatgcaggatattgaatttaccattgagaataaaaagctttggatgttacagacaaggtcagggaaaagaactgcaaaagcttcaattaagattgcagtagatatggttagtgaaaaattgatcacaaaagatgaggcattacttagaattgatccaaaaattttagatacacttcttcatccaactttagatccaaaagctaaaaaaaatataatagcaaaaggacttccagcatcaccaggtgctgcaaccggaaaagttacttttaatgcagacgatgccgagcaaatgaaggctaataatcaaaatactattttagttcgagttgaaacatctccagaagatattcacggaatgcacgctgctgttggaattttaacttgcagaggaggaatgacaagccatgccgctgttgttgcaagaggaatgggaagaccctgcgtttcaggcgctggagttataaaaatagattatgcagctaaacttttcaaagtagacaacgctgaagtaaaagagggcgacattattacaatcgatggttcaacaggcgaagtaatgcttggagaagttaagacaattaacccagacatctcaggagatttttctgagatgatgaaatgggccgatgaagttagaactttaaaaattagagcaaacgccgaaaccccattagactctcgaactgctagaggatttggtgctgaaggaattggactttgtagaacagagcatatgttttttgatgaagaaagaattttatatgtaagacagatgatcctttcaaaaactaaagaagatcgtctaaaagccttagataaaattttaccatttcaaagaaaagattttgtcgaaatttttacaatcatgaaaggtctacctgttacagttagactgttagatcctcctttgcatgaatttttaccaaaaactgaaaaagaaatagatattgtagcgaaatctttaaaaattcattcaagtgaaattaaaaatagaattaattatttgcatgaagaaaatcctatgctgggtcacagaggttgtcgtctagcaatttcttttcctgaaatttacgaaatgcaatgtcgagcaatttttgaagctttatatgaattacaaaaacaaaaagttgaagctgtcattccggaaattatgattccacttgttgcaacagaaagagaaattgaaattttaagagaattagt

SEQ ID NO: 1622 - DNA, 4000 bp, Escherichia coli
  misc_feature (1567)..(1567): n is a, c, g, or t
  misc_feature (1985)..(1986): n is a, c, g, or t
  misc_feature (1993)..(1993): n is a, c, g, or t
tttcgcagcctgatctgttaggtttgatacatcataagttaatgtatacagcatctttgaagtgctgtcggtcacaggtcttgcttccataaacccgtggtaaagatcatagaactccccttccaccgcaggttgcgtatacccataggaaagcgcagtttgcgccaccatgatttcgattacacgcccacccataagtgagcgcactgatcccataccgccatcgccggaagtaatctcacaaggcagcctcaaccactcactaatggcgcagtaattgccgaccttttcccaaacttctgcggcaggtttgttgatgtcgatctccatatcgatggtcacatattcctgtgccatcgctggaaagaaaactagtagagctacaactgcaagcactggttttaatatatagcgcatagggccttcctcattgataatcgcgatgtcggatgatccagtagataaccatccctaacgcgcggggctcttttatactgacagaagagcaagaaaagaggggcaagtagtatcagacatgtcaatgacatgtcacatcatgtagggcatgagaaaaatttaaagatatgaggcagaattcagagaggctttaataaatatcgaagcttgatttcgatgctttgcgtttgacagtggcgccgtcagttagaaccgccgagcaatctccgcactgcagaagtctctgcgtcttccagcgagcgcgacaaattgcttaaagcatcaaattgctcgtccgcgagcacccatccattggcagatgtaatttcgtcaacgcaagaaaacatactgacgaaattatcggtctcagattgcacggtaatgggttttctttgatttgcataacaggatagaaaatcatcaaggataaaatctattgttatatcagaatttcgctgaagctcacctcccgacattgagagaatcctggcaataaacctcaaggtgcttacttctagcaaagtaacgctagcgttttgcgatgtcacatcttcctgcattctgagcaacgaaggtattggtcgttctccaaaatagccaacgtactcatttactacttcctccaggctagaccgtgcttgtttatagggttctgaccaattgaaatttgaatcagaagtcggcgcctgtgccaccgcaagttggttatgttcagcagaaagttgcccgatctgagagtaaagatcgttgatgagataggctgagactgcgatgaaagaagctgttaggtaagatagccaacctacccttgagggagggagagttgagcctaaccatgccgataagcttccttttcggggcctcttcttctgtggagacgactctctagatgaagacatgaaatcggagaagggtagctcgaatagagctgctaacgctttagcgctttctacggaaggctggacttgcccgttctcaatgcggtgaatagtcctgacactcaatccggtcaggtcggacagatccgattgcgaccatcctttctcttttctcagttcttttatgtccatttctcggaccggatagcgtattagagccacttgaatagatngcgtattgttatgtcactgcgtgatttcgaaatagtctacacccatgcttgtagccagtcacgtagggctcaacctaatttcgttgcttttcgtcgcaaagacccgaccaaatgggggctatatctgggttcgtggagcagtttggaccaaattcttcaaagaaaacgcggccttaagtccttaccattagggaattcgctgctatcccttgatttccaatctggaaaggcaaaagctattgagtttagagcccgtggccccctaacgctcagcgcaatgaactgccttccatcaaatgtcataatgaggaagctttcctcttgtctagacgttagaggttaccatttagacatctgtcccgagtttcacagctagaaaatcttcaagaagcttgactcacttttttatttctgtatnntctttcnccgcaccgatttgatccagattgcggggtgcgttacaaataccagctaaatcggacccactttttggaacccgatctagcgccgctgggtcgggttttttcgtttcagcctatggttagcccatacatctcacttacggggtggccatgaaacgacccgtctacagaaagcaagtgtcatgtcgtgatttgatcctattgccgcgacaaaaaagaaagcgctaaaacggaatctttcccaggatccaacattgactagatggagtttttctatgcgaaaactgtatgttaacgcgcgttatttattagtgcctgcgatgacgatcgcaacaatcattggactatatttgggaggattttacgtatggcttggagtcgtgctttttggggtaaataccatcctggatactcttacgaaagatatacatctccgggcagattttgatgattcaggaaactcttttggagttaagggctttcaatactctgttatgtatctgatgcttccaatttttattgtcctgcagacagcgcttgcaaacaatctgtataagtttgtgtccctcggtgtgttggaaacaagcgagatcataggatctatcctgtcatgcggattgtgggcggggcttggcataatctacgggcatgaactctcgcacaacaaaaaagaaggctttgctgtttccagggcaataatggctctcagtggggcctcacactttacctatgctcatgtgttcaatcatcacttagatttgggacatgaaaaagacccggcgacagcccccagggggagaaatgtatatgcgcatgcctggctgtcgcatatgggtcagtcgaaattttcctatgatttagagcggaaaaaacttcagcaagctaatagtagatttctgtctactcgaaatatgtggttgcgcggctatctctatagccttcctactgtcgtgcttttcgtttggagtggaggcatcgtcggcgtggctgcccttttggccgtctggtcaatatcaaatttccttttagaggcgctcaatttcatgggccattacggtctaatccgggaacaaagtaaacctgttgagcacaggcattcttgggataacgataatttattcacgagctggtttttcatcgaaataggtcggcagtgtgatcatcatgtgagaggtgaaacatttttttgggagctggatgatgtccaagggccaaattacgggattggatatttctctctattcgtcttaaccctcataccaggcctttttcgggcgtttgttcagaagcatcttgataattgggataacaacttcgcaacggaaggtgaaaagaaaattatcgaagaatatttcccgaataagacaagtttattgggcgcatagcaatgctccagcgactgttaaatagaaaaaaatccttctctgtgaacgtctcacctggcaatcatcattttgcgctcgaccggaaagagactctattggctggagcgctgaaagccggcctgaattggcctcacaagtgccaagttggtagttgtgggagatgcaaatgcaaaattctcgacggcgctataagaccggagattgatttcaactacgtcttgacgcctgctgaagtcagagctggatatattctcgcttgtcagtcaacgccaaaaacagatctaaaagtaactgtaaacctcctcaacaaaggaaattagcaatgaaaaataatctcgccttttttgcaatgatcacatggacaatatctgcgggcgcaggtttgtatttttcggggatactcgcccagcacacagcaattggctggtcattaatagcagcattaattttgctgggtatccatattggaaatctaattctatatttcaagttagctggtgatgaaccatacaaatggaaacgagagagcgaggccaaaggcgttagcgcgtaattcttatgaagaaaacagaacaggattatctaatatttaccggtacctgcaatgcaggtaccggtgttgttgc

SEQ ID NO: 1623 - DNA, 4000 bp, Escherichia coli
  misc_feature (627)..(627): n is a, c, g, or t
  misc_feature (918)..(918): n is a, c, g, or t
  misc_feature (939)..(939): n is a, c, g, or t
  misc_feature (1050)..(1050): n is a, c, g, or t
  misc_feature (1302)..(1302): n is a, c, g, or t
  misc_feature (1320)..(1320): n is a, c, g, or t
  misc_feature (1434)..(1434): n is a, c, g, or t
  misc_feature (1452)..(1452): n is a, c, g, or t
  misc_feature (1455)..(1455): n is a, c, g, or t
  misc_feature (1521)..(1521): n is a, c, g, or t
  misc_feature (2210)..(2210): n is a, c, g, or t
tggtccctcggcatccgacccgtcttcaaaaccgtcgacacctgcgccgccgaattcgaagccaccaccccctactactactccagctacgaactcgaccccgccgccgaaaccgaagtcaccccccaaaccaccaaagaaaaaatcatcatcctcggctccggccccaaccgcatcggccaaggcatcgaattcgactactcctgcgtccacgcagccctagaactctcccgcgtcggatacgaaaccgtcatggtcaactgcaaccccgaaaccgtctccaccgactacgacaccgccgaccgcctctacttcgaacccctcaccttcgaagacgtcatggaggtctaccacgccgaaacccaatccggcaccgtcgccggcgtcatcgtccaactcggcggccaaacccccctcggactcgccgaaaaactccgcgacgccggcgtcccagtcatcggcaccacccccgaagccatcaacctcgccgaagaccgcggcgaattcggcgaagtactccacgccgccaacctccccgcacccgccttcggcaccgccaccagcttcgccgaagccaaaaacgtcgccaaccacatcggctaccccgtcctcgtccgcccctcctangtcctcggcggccgcggcatggaaatcgtctacgacgaaccctccctcgccgactacatccaacgagccaccgaaatcacctccgaccaccccgtcctcgtcgaccgcttcctcgacaacgccatcgaaatcgacgttgacgccctctgcgacggcaccgacgtctacctcgccggcgtcatggaacacatcgaagaagccggcatccactccggcgactccgcctgcgccctcccacccatgaccctcggccccgaagacatcgacaaagtccgcgcctccaccgtcgcnctcgcccacggcatcggcgtncacggcctcatgaacgtccaattcgccctcaaagacgacatcctctacgttattgaagccaacccccgcgcctcccgcaccgtccccttcgtctccaaagccaccggcgtncacctcgccaaagccgccgcccgcatcatgaccggcaccaccatcgcccagctcaaagccgaaggactcatccccaccgactacgacggcggctccctgcccctcgacgcccccatcgccgtgaaagaagccgtcctccccttcaaccggttccgccgccccgacggcacctccctcgacaccctcctctccccggaaatgaaatccaccggcgaagtcatgggcctcgccgacaacttcggcgccgcctangccaaagccgaacaggcngccttcggtgccctccccaccaccggcaccgtcttcgtctcggtagccaaccgggacaaacgcaccctcattttccccatccaacgcctcgcctccctcggattcaccatgctngccaccaccggcaccgcngcnatgctgcgccgcaacggtgtgcaatgcgaaaccgtcctcaaacactccgacgtcgcccaacccggngatacccggaaatccattgtggatttgatccgcgccggggaggtggacctgattttgaacacgccggccgggtcggcgggcgcacggcatgatggctatggcattcgggcggccgccgtgaatgtgggcgtgcccctgattaccaccgtgcagggggtgacggctgcggtgcagggcattgaagcactgcaacgaggcgggttgggggtgcgtgcgctgcaagaactcgaccactcgccgaaacacgccgcctatgtggccgccaaaaccgccgccgaagactcaatggggaaaggggagtagggtccatgcacgactcgggcaacactgactctgatagcacctttggggagaaactccgggcggcgggggagcggcacggccgcctctgcgtgggcatcgacccacacaaatccctgctcgaatcctggggattcgaaaacaccatcgagggattggccgcgttcagcaccatctgtgtggatgccttcgctggccatgtagcgttagtgaaaccccaagtggcgttttacgaggccttcggttcagacgggtttgccgtgctagaaaccaccatggccgcgctgcgttcggctggaacgctggtggtggcggacgcaaaacggggcgatattggctccaccatggcgggctatgccgaagcatggttgacaccaggatcgcccctngaggcggatgctgtgacgttatcaccctacctggggttcgaatcgctccgccccgcacttgacatcgcacaaaaattcggtaaaggggtgtttgtgttggcggccaccagtaacccagaagccgccaccgtgcagggttgccacacggagcacggggtcaccatatcacagcagatcgtcgacgcatgcgcgcaggaaaactcggcctaccagccggcggttggaagcgtcggagtggtggtgggtgccaccttggctacgccaccagatttgcggaaactccatggtccggtgctgctccccggagtgggggcacagggggcaaccgccaaagatgttaagcggatcacaaaagatttggtggggttgagttttcccagcgtatcgcggggtatcctttcggtcgggccgaaagtttctactctgaaaaaagccgtagacaatgtggtgaaagaaatttaatatttgaccatttcgccagttcgcgtcacacgataggggcgaaatggacgcctattgacctgcgactttccaattgaaattggcgattacctgatcttttgtgattaggtgctacactggggcgaaatctaccgggatattcccagtgcatgtttcctgcgtgtatggtagatttccgcaggtggaatcatttactgattttcactgcaacctatagacatttatcgaacttattgaatcggaggaatcccgtggcccttccacagttgaccgatgagcagcgcaaagaagccctcgctaaggctgccgaggcgcgtaaggcacgtgcagagctcaaagagcagctcaagcgcggtgacatttccctgaaggaggttttggcaaaggcctccagcgacgaaatcattggtaagaccaaggtctcggctcttttggaatccttgcccaaggttggcaaggtgaaggctaaggaaatcatggacgagctggagatcgcccagactcgccggctgcggggcttgggtgaccgtcagcgtcgcgccctgctggagcgtttcggtttctctgaggactaaaacgtggttggcgataaccctcatcagggccggttagtggtattacttggcccgtctgccgtgggaaagtccacggtggttcatcgcctccgcgaagaattgcccaccatgtatttttcggtctctatgaccacccgtgctccccgccctggggaggtagatggtgtgcactatttcttcgtgacccccgaggagttccaacgtcgaattgacgccggtgaaatgctcgaatgggcggatattcacggcgggctgcaacgttcgggaactcccgcgggccccgtcgaccaggcgctttcggccggccgcccagtgttggtggaggtagatctggtgggggctcgtgcgatcgccgccataaaacccgaggcggagactgtgtttttagcgcccccttcatgggaagtgctggtggaacggctcactgggcgtggtacggaatctgatgctactattcagcgtcggttagaaaccgctcgggtagaacttgcggcgcagaacgaattccggcacgtcattgtcaacgatgatgtggagcgggcggtagcccaattgcggaatattttgttaggcgtcaagtgagccgattgggtcccgcatatttgagggactaagctagaaaccgcagtataaacgttcaagtaaaggtatcaatatctcgtgagcaaagtgtcggaaagcaatcagcgcgtctacgataagccgatcggtatcactgatccgccaattgatgagctactggaccacgtatcc

SEQ ID NO: 1624 - DNA, 4000 bp, Escherichia coli
  misc_feature (2)..(4): n is a, c, g, or t
  misc_feature (6)..(16): n is a, c, g, or t
  misc_feature (18)..(19): n is a, c, g, or t
  misc_feature (21)..(25): n is a, c, g, or t
  misc_feature (27)..(27): n is a, c, g, or t
  misc_feature (29)..(29): n is a, c, g, or t
  misc_feature (33)..(33): n is a, c, g, or t
  misc_feature (39)..(39): n is a, c, g, or t
  misc_feature (41)..(43): n is a, c, g, or t
  misc_feature (45)..(45): n is a, c, g, or t
  misc_feature (47)..(51): n is a, c, g, or t
  misc_feature (53)..(55): n is a, c, g, or t
  misc_feature (57)..(60): n is a, c, g, or t
  misc_feature (64)..(66): n is a, c, g, or t
  misc_feature (71)..(72): n is a, c, g, or t
  misc_feature (82)..(82): n is a, c, g, or t
  misc_feature (86)..(86): n is a, c, g, or t
  misc_feature (89)..(90): n is a, c, g, or t
  misc_feature (92)..(92): n is a, c, g, or t
  misc_feature (94)..(94): n is a, c, g, or t
  misc_feature (96)..(98): n is a, c, g, or t
  misc_feature (101)..(102): n is a, c, g, or t
  misc_feature (104)..(105): n is a, c, g, or t
  misc_feature (107)..(110): n is a, c, g, or t
  misc_feature (113)..(114): n is a, c, g, or t
  misc_feature (116)..(117): n is a, c, g, or t
  misc_feature (120)..(124): n is a, c, g, or t
  misc_feature (126)..(126): n is a, c, g, or t
  misc_feature (128)..(128): n is a, c, g, or t
  misc_feature (130)..(132): n is a, c, g, or t
  misc_feature (134)..(136): n is a, c, g, or t
  misc_feature (138)..(138): n is a, c, g, or t
  misc_feature (140)..(140): n is a, c, g, or t
  misc_feature (143)..(154): n is a, c, g, or t
  misc_feature (156)..(158): n is a, c, g, or t
  misc_feature (160)..(161): n is a, c, g, or t
  misc_feature (163)..(164): n is a, c, g, or t
  misc_feature (167)..(169): n is a, c, g, or t
  misc_feature (171)..(171): n is a, c, g, or t
  misc_feature (173)..(180): n is a, c, g, or t
  misc_feature (182)..(189): n is a, c, g, or t
  misc_feature (191)..(192): n is a, c, g, or t
  misc_feature (194)..(194): n is a, c, g, or t
  misc_feature (197)..(197): n is a, c, g, or t
  misc_feature (199)..(224): n is a, c, g, or t
  misc_feature (226)..(228): n is a, c, g, or t
  misc_feature (230)..(230): n is a, c, g, or t
  misc_feature (232)..(234): n is a, c, g, or t
  misc_feature (236)..(236): n is a, c, g, or t
  misc_feature (238)..(238): n is a, c, g, or t
  misc_feature (240)..(240): n is a, c, g, or t
  misc_feature (242)..(243): n is a, c, g, or t
  misc_feature (246)..(246): n is a, c, g, or t
  misc_feature (248)..(249): n is a, c, g, or t
  misc_feature (251)..(258): n is a, c, g, or t
  misc_feature (260)..(267): n is a, c, g, or t
  misc_feature (269)..(283): n is a, c, g, or t
  misc_feature (285)..(296): n is a, c, g, or t
  misc_feature (298)..(302): n is a, c, g, or t
  misc_feature (304)..(304): n is a, c, g, or t
  misc_feature (306)..(308): n is a, c, g, or t
  misc_feature (310)..(314): n is a, c, g, or t
  misc_feature (316)..(317): n is a, c, g, or t
  misc_feature (319)..(319): n is a, c, g, or t
  misc_feature (322)..(323): n is a, c, g, or t
  misc_feature (327)..(327): n is a, c, g, or t
  misc_feature (329)..(329): n is a, c, g, or t
  misc_feature (331)..(332): n is a, c, g, or t
  misc_feature (334)..(335): n is a, c, g, or t
  misc_feature (337)..(340): n is a, c, g, or t
  misc_feature (342)..(360): n is a, c, g, or t
  misc_feature (362)..(365): n is a, c, g, or t
  misc_feature (367)..(373): n is a, c, g, or t
  misc_feature (375)..(378): n is a, c, g, or t
  misc_feature (380)..(380): n is a, c, g, or t
  misc_feature (382)..(384): n is a, c, g, or t
  misc_feature (386)..(387): n is a, c, g, or t
  misc_feature (389)..(389): n is a, c, g, or t
  misc_feature (392)..(401): n is a, c, g, or t
  misc_feature (403)..(407): n is a, c, g, or t
  misc_feature (409)..(409): n is a, c, g, or t
  misc_feature (412)..(412): n is a, c, g, or t
  misc_feature (414)..(417): n is a, c, g, or t
  misc_feature (420)..(433): n is a, c, g, or t
  misc_feature (435)..(438): n is a, c, g, or t
  misc_feature (440)..(441): n is a, c, g, or t
  misc_feature (443)..(462): n is a, c, g, or t
  misc_feature (464)..(466): n is a, c, g, or t
  misc_feature (468)..(476): n is a, c, g, or t
  misc_feature (478)..(478): n is a, c, g, or t
  misc_feature (480)..(481): n is a, c, g, or t
  misc_feature (484)..(484): n is a, c, g, or t
  misc_feature (488)..(488): n is a, c, g, or t
  misc_feature (490)..(495): n is a, c, g, or t
  misc_feature (499)..(517): n is a, c, g, or t
  misc_feature (520)..(523): n is a, c, g, or t
  misc_feature (525)..(525): n is a, c, g, or t
  misc_feature (530)..(531): n is a, c, g, or t
  misc_feature (534)..(534): n is a, c, g, or t
  misc_feature (537)..(538): n is a, c, g, or t
  misc_feature (540)..(540): n is a, c, g, or t
  misc_feature (543)..(544): n is a, c, g, or t
  misc_feature (546)..(547): n is a, c, g, or t
  misc_feature (549)..(550): n is a, c, g, or t
  misc_feature (552)..(556): n is a, c, g, or t
  misc_feature (558)..(561): n is a, c, g, or t
  misc_feature (564)..(567): n is a, c, g, or t
  misc_feature (569)..(579): n is a, c, g, or t
  misc_feature (581)..(581): n is a, c, g, or t
  misc_feature (583)..(588): n is a, c, g, or t
  misc_feature (590)..(593): n is a, c, g, or t
  misc_feature (596)..(596): n is a, c, g, or t
  misc_feature (598)..(598): n is a, c, g, or t
  misc_feature (600)..(600): n is a, c, g, or t
  misc_feature (603)..(603): n is a, c, g, or t
  misc_feature (606)..(606): n is a, c, g, or t
  misc_feature (608)..(609): n is a, c, g, or t
  misc_feature (611)..(619): n is a, c, g, or t
  misc_feature (622)..(624): n is a, c, g, or t
  misc_feature (627)..(642): n is a, c, g, or t
  misc_feature (644)..(645): n is a, c, g, or t
  misc_feature (647)..(647): n is a, c, g, or t
  misc_feature (650)..(651): n is a, c, g, or t
  misc_feature (654)..(655): n is a, c, g, or t
  misc_feature (658)..(660): n is a, c, g, or t
  misc_feature (662)..(663): n is a, c, g, or t
  misc_feature (666)..(667): n is a, c, g, or t
  misc_feature (669)..(670): n is a, c, g, or t
  misc_feature (672)..(674): n is a, c, g, or t
  misc_feature (676)..(677): n is a, c, g, or t
  misc_feature (679)..(685): n is a, c, g, or t
  misc_feature (693)..(694): n is a, c, g, or t
  misc_feature (696)..(696): n is a, c, g, or t
  misc_feature (698)..(698): n is a, c, g, or t
  misc_feature (700)..(700): n is a, c, g, or t
  misc_feature (702)..(704): n is a, c, g, or t
  misc_feature (706)..(706): n is a, c, g, or t
  misc_feature (708)..(708): n is a, c, g, or t
  misc_feature (710)..(713): n is a, c, g, or t
  misc_feature (717)..(717): n is a, c, g, or t
  misc_feature (719)..(725): n is a, c, g, or t
  misc_feature (727)..(727): n is a, c, g, or t
  misc_feature (729)..(730): n is a, c, g, or t
  misc_feature (735)..(737): n is a, c, g, or t
  misc_feature (739)..(739): n is a, c, g, or t
  misc_feature (742)..(743): n is a, c, g, or t
  misc_feature (745)..(746): n is a, c, g, or t
  misc_feature (749)..(751): n is a, c, g, or t
  misc_feature (753)..(753): n is a, c, g, or t
  misc_feature (756)..(756): n is a, c, g, or t
  misc_feature (759)..(759): n is a, c, g, or t
  misc_feature (761)..(763): n is a, c, g, or t
  misc_feature (765)..(765): n is a, c, g, or t
  misc_feature (767)..(768): n is a, c, g, or t
  misc_feature (771)..(773): n is a, c, g, or t
  misc_feature (778)..(778): n is a, c, g, or t
  misc_feature (780)..(780): n is a, c, g, or t
  misc_feature (782)..(785): n is a, c, g, or t
  misc_feature (787)..(787): n is a, c, g, or t
  misc_feature (789)..(789): n is a, c, g, or t
  misc_feature (791)..(796): n is a, c, g, or t
  misc_feature (799)..(799): n is a, c, g, or t
  misc_feature (801)..(801): n is a, c, g, or t
  misc_feature (803)..(803): n is a, c, g, or t
  misc_feature (805)..(807): n is a, c, g, or t
  misc_feature (812)..(812): n is a, c, g, or t
  misc_feature (814)..(819): n is a, c, g, or t
  misc_feature (824)..(827): n is a, c, g, or t
  misc_feature (829)..(833): n is a, c, g, or t
  misc_feature (836)..(838): n is a, c, g, or t
  misc_feature (840)..(840): n is a, c, g, or t
  misc_feature (842)..(843): n is a, c, g, or t
  misc_feature (850)..(850): n is a, c, g, or t
  misc_feature (853)..(853): n is a, c, g, or t
  misc_feature (856)..(857): n is a, c, g, or t
  misc_feature (859)..(859): n is a, c, g, or t
  misc_feature (861)..(862): n is a, c, g, or t
  misc_feature (864)..(868): n is a, c, g, or t
  misc_feature (871)..(871): n is a, c, g, or t
  misc_feature (873)..(876): n is a, c, g, or t
  misc_feature (878)..(880): n is a, c, g, or t
  misc_feature (882)..(886): n is a, c, g, or t
  misc_feature (888)..(890): n is a, c, g, or t
  misc_feature (895)..(898): n is a, c, g, or t
  misc_feature (900)..(902): n is a, c, g, or t
  misc_feature (906)..(910): n is a, c, g, or t
  misc_feature (912)..(912): n is a, c, g, or t
  misc_feature (915)..(915): n is a, c, g, or t
  misc_feature (917)..(919): n is a, c, g, or t
  misc_feature (921)..(922): n is a, c, g, or t
  misc_feature (925)..(925): n is a, c, g, or t
  misc_feature (927)..(927): n is a, c, g, or t
  misc_feature (930)..(931): n is a, c, g, or t
  misc_feature (935)..(935): n is a, c, g, or t
  misc_feature (938)..(940): n is a, c, g, or t
  misc_feature (948)..(950): n is a, c, g, or t
  misc_feature (953)..(953): n is a, c, g, or t
  misc_feature (956)..(957): n is a, c, g, or t
  misc_feature (959)..(959): n is a, c, g, or t
  misc_feature (962)..(963): n is a, c, g, or t
  misc_feature (965)..(967): n is a, c, g, or t
  misc_feature (969)..(969): n is a, c, g, or t
  misc_feature (972)..(974): n is a, c, g, or t
  misc_feature (976)..(976): n is a, c, g, or t
  misc_feature (978)..(978): n is a, c, g, or t
  misc_feature (982)..(982): n is a, c, g, or t
  misc_feature (986)..(988): n is a, c, g, or t
  misc_feature (993)..(993): n is a, c, g, or t
  misc_feature (996)..(997): n is a, c, g, or t
  misc_feature (999)..(999): n is a, c, g, or t
  misc_feature (1001)..(1002): n is a, c, g, or t
  misc_feature (1005)..(1007): n is a, c, g, or t
  misc_feature (1009)..(1009): n is a, c, g, or t
  misc_feature (1011)..(1012): n is a, c, g, or t
  misc_feature (1015)..(1017): n is a, c, g, or t
  misc_feature (1019)..(1022): n is a, c, g, or t
  misc_feature (1024)..(1025): n is a, c, g, or t
  misc_feature (1030)..(1032): n is a, c, g, or t
  misc_feature (1034)..(1034): n is a, c, g, or t
  misc_feature (1039)..(1039): n is a, c, g, or t
  misc_feature (1041)..(1046): n is a, c, g, or t
  misc_feature (1306)..(1306): n is a, c, g, or t
  misc_feature (1749)..(1749): n is a, c, g, or t
  misc_feature (1988)..(1988): n is a, c, g, or t
  misc_feature (1992)..(1992): n is a, c, g, or t
  misc_feature (3693)..(3693): n is a, c, g, or t
  misc_feature (3695)..(3698): n is a, c, g, or t
  misc_feature (3702)..(3706): n is a, c, g, or t
  misc_feature (3709)..(3711): n is a, c, g, or t
  misc_feature (3714)..(3722): n is a, c, g, or t
  misc_feature (3726)..(3730): n is a, c, g, or t
  misc_feature (3733)..(3735): n is a, c, g, or t
  misc_feature (3740)..(3740): n is a, c, g, or t
  misc_feature (3745)..(3745): n is a, c, g, or t
  misc_feature (3749)..(3750): n is a, c, g, or t
  misc_feature (3753)..(3756): n is a, c, g, or t
  misc_feature (3758)..(3758): n is a, c, g, or t
  misc_feature (3760)..(3764): n is a, c, g, or t
  misc_feature (3767)..(3771): n is a, c, g, or t
  misc_feature (3773)..(3773): n is a, c, g, or t
  misc_feature (3775)..(3775): n is a, c, g, or t
  misc_feature (3779)..(3779): n is a, c, g, or t
  misc_feature (3781)..(3783): n is a, c, g, or t
  misc_feature (3786)..(3791): n is a, c, g, or t
  misc_feature (3793)..(3795): n is a, c, g, or t
  misc_feature (3798)..(3801): n is a, c, g, or t
  misc_feature (3805)..(3813): n is a, c, g, or t
  misc_feature (3815)..(3827): n is a, c, g, or t
  misc_feature (3829)..(3841): n is a, c, g, or t
  misc_feature (3845)..(3846): n is a, c, g, or t
  misc_feature (3850)..(3851): n is a, c, g, or t
  misc_feature (3853)..(3856): n is a, c, g, or t
  misc_feature (3859)..(3861): n is a, c, g, or t
  misc_feature (3863)..(3871): n is a, c, g, or t
  misc_feature (3873)..(3873): n is a, c, g, or t
  misc_feature (3875)..(3875): n is a, c, g, or t
  misc_feature (3880)..(3883): n is a, c, g, or t
  misc_feature (3886)..(3891): n is a, c, g, or t
  misc_feature (3893)..(3899): n is a, c, g, or t
  misc_feature (3902)..(3903): n is a, c, g, or t
  misc_feature (3905)..(3905): n is a, c, g, or t
  misc_feature (3907)..(3909): n is a, c, g, or t
  misc_feature (3917)..(3919): n is a, c, g, or t
  misc_feature (3921)..(3922): n is a, c, g, or t
  misc_feature (3925)..(3931): n is a, c, g, or t
  misc_feature (3935)..(3936): n is a, c, g, or t
  misc_feature (3938)..(3939): n is a, c, g, or t
  misc_feature (3941)..(3950): n is a, c, g, or t
  misc_feature (3953)..(3955): n is a, c, g, or t
  misc_feature (3957)..(3958): n is a, c, g, or t
  misc_feature (3961)..(3961): n is a, c, g, or t
  misc_feature (3963)..(3964): n is a, c, g, or t
  misc_feature (3966)..(3972): n is a, c, g, or t
  misc_feature (3974)..(3975): n is a, c, g, or t
  misc_feature (3977)..(3977): n is a, c, g, or t
  misc_feature (3979)..(3981): n is a, c, g, or t
  misc_feature (3984)..(3986): n is a, c, g, or t
  misc_feature (3988)..(3988): n is a, c, g, or t
  misc_feature (3990)..(3991): n is a, c, g, or t
  misc_feature (3993)..(3993): n is a, c, g, or t
  misc_feature (3996)..(4000): n is a, c, g, or t
gnnngnnnnnnnnnnngnncnnnnngngngcgngcgcgngnnngngnnnnngnnngnnnncgcnnncgccnncgcccccccncccnccnncncncnnnccnncnncnnnnccnncnnccnnnnncncncnnncnnncncnccnnnnnnnnnnnncnnngnngnncgnnngngnnnnnnnncnnnnnnnncnncntcntnnnnnnnnnnnnnnnnnnnnnnnnnngnnngngnnngngngngnnggngnngnnnnnnnncnnnnnnnnannnnnnnnnnnnnnngnnnnnnnnnnnncnnnnncncnnncnnnnncnncnccnnccgncngnngnncnnnngnnnnnnnnnnnnnnnnnnngnnnngnnnnnnngnnnngngnnngnncncgnnnnnnnnnncnnnnncncgngnnnncgnnnnnnnnnnnnnngnnnngnngnnnnnnnnnnnnnnnnnnnnannncnnnnnnnnngngnncgngcgngnnnnnncgannnnnnnnnnnnnnnnnnngcnnnngnggggnnggnggnngnggnngnngnngnnnnngnnnncgnnnngnnnnnnnnnnngngnnnnnncnnnnccncncngcngcncnncnnnnnnnnncgnnngannnnnnnnnnnnnnnngnncncgnncgnncgnnngnnggnngnngnnngnncnnnnnnngcctactnngncngncnnntnantnnnnttantnnnnnnntngnncgcgnnngncgnnanntgnnnanggncgncnnncngnnccnnnctccngngnnnncngngnnnnnngcngnanannnacggngnnnnnncgcgnnnncnnnnncannncncnnaaacgcncgncanncncnncnnnnncgncnnnncnnncnnnnngnnncggcnnnntnnntcgnnnnnancgntnnnanncgncncgnncccncgnnncgccgcgnnncgncgnngngcnncnnncncgnnngncnccgnaggnnnccgancgnncncnncgnnncncnngcnnncnnnncnnccgannngnccgangnnnnnncgggagcccgaaggtcgcgtcggggcggacgcgattcgcgtccgtcggtcgccggcgcatcgccgcgtcggactcgagacgcgcgcgtggtatccgcctcgatccgccggaggctcgaaagactgacctcgctcttccctgccgcgcgtccgcgtcggtcgatcccccgtcgacccttttcttttctcgtctgccgccctcgcagacgctctcgacgcagccaaggtctttcttttccgaacgcaaattttttttagtgnaacgtgacgcgatgaaagtcaccgtcgccaccacctcggcggcgcgccgttcgggcgccgagctcaaggcgttcgacgtcaaggcctccacggtcgtcgaagggttcaaggtgacctgcgtcgtgaagccggcgacgccctccgtgtcgttcgaccccgcgtttcgactcaacaccaagccgccgtcggcgacggcggacgccaccgtcgccaaggacggcgtgacgctcttcctggacaacctgcaggacgcggtttcgaaaaaaaaactggcgccgcgcgtcaaggtggagcgcaaggtgaccgtcgccggcgaggcgtacgcggtggacgccgaactcgcgatgaagggcaacatcaagaccgccgacgtggtcacggtgagcgtcaaggcgcccgcgctcgccgggttcgcgcccaaagccacgtacagcaccgggccnaaaggtttgtctctggtgctcgccggcgacgtcgccggcggcgacaccaacgtcgagctcaaggcggagcacttcccgaagaaggcgggcgcgccgaccgcgctcaccgccgcggtcacgcagaagctccccgagaagatcaaggctaagctgacgctcaaggacgacctgtccggctcggtcgagctgcacaagggcgcggcatccatcgaggcgccgctcgggaagggcgggaaaangccnggcgtcggcgacgtcgtcttcaagtacaaaaagtccttcgagtacgacctgtgaggactcccacgttcgtggacgttccggtgcgtcgttcggagaaccctctatggccggcgcgactccgaagccccccgcgcgcggaactgtcccgtccgcggatgacggcgtctcacggtagctcgtctattttacacacttttctagtcgtcctcctcctcttcttcgctcgcggcggcgtcgtcggcgtcggcgtcggcgccctcgaggcacgcgcgtatcagctccatctcctgcgggctgcactccttccactgcccgacggtgagcccctcgagcccgatgcccatgatctccgtccggtgcaggtcccgcacgacgtacccgacggcgtcgaacatccggcggatctgccggttccgaccctcgcgcagcgtgatggccaccgccgcgtttcgcgtttctttcccgccgacgaaacgcacgtcgcacggtaacgtccgcgcggtcacgatcctgtccaccttgtccctcctcacgggcgtgctgatgaccacgccctcccgcagcgttcgcaggtcctcctcgcgtgccgggcggtccaagcacacgacgtacttcttctccttccgcgcgcgcgcgcgcagcgcggcgttgggaagccgcccgtcggaggtgagcaggatgagcccggtggagtctttgtccagcctgcccaccggaaacacgcgttcggggtaccgcacggcgtccaggatgttcgtgcggtcgcgccggtccgtcgtgcacgtgatgcccctcggcttccagtacttgacgtagcggaacgcgctcgtcgattgatcgaaggtttggtttttcgtctcccaatcgatcggctcgccgtcgaggcgcacgacgtccccggggaagacgcgcgcgcccgcggaggccaccgcgccgttcacggtgacccgcccccgctccaccagcttgtcgctctcgcgccgggacgtgaagtccttgaaacacttgttcacgcgcacgccgtcactcgcgctcggcgcgcgctcgcctctcggcggagacgcccctcgagagggcacgtctccgccgggcgcgcgcacgtccacgacgcggaagtcctcgccttcgtccagagaaacggtggattgcgcccacgcgcgggacctccgggggccggcgtggcgccacgcgccctcttcgccgcgcttggacccgcgtgggtcgtcctcctcgggggcaccctcgtcgcgcgcgatgcgctcgccccagcccacgcgaccggggccggcgtcgtcgcgaacgcgcctgcctccgtctcggccgccgcgaccgccgcgaccgccgcgaccgcccgcgcgcccgcgcgaacgcccgcgcgagggcgaagccgaccggcctcctccgcgcgagtaggcgagcgggacgaccgcgcgacgaagcggcggcgacggcggtgggcgcttcgcgaaatcgcgaagagtcgagtgcccccgcgtggtaggcaccacccacggcgtcgtcccggccggtcgcgtcccgcgacgcgcggccgggaccgccacccccacgggcgcgagcgacgccatggtgtccgcgcgaccgagactgcggcgcgaggatgccggaagagcgacttgagacggacggggtaaacagtgtcctgaagttcagtttgtacagcagctgatataaatcacgcangnnnnaaannnnnccnnnttnnnnnnnnngagnnnnnccnnngcgcnccccncgcnncgnnnncncnnnnnaannnnncncncccncnnntcnnnnnncnnntcnnnngcgnnnnnnnnntnnnnnnnnnnnnngnnnnnnnnnnnnncgcnncggnngnnnncgnnncnnnnnnnnncncnccccnnnnccnnnnnnannnnnnngcnncncnnngcgcgcgnnncnngannnnnnncgcnncnncnnnnnnnnnnccnnncnncgngnngnnnnnnntnntntnnntgnnntncnncnccnnnnn

SEQ ID NO: 1625 - DNA, 4000 bp, Escherichia coli
  misc_feature (166)..(167): n is a, c, g, or t
  misc_feature (170)..(170): n is a, c, g, or t
  misc_feature (368)..(368): n is a, c, g, or t
  misc_feature (401)..(401): n is a, c, g, or t
  misc_feature (452)..(452): n is a, c, g, or t
  misc_feature (1441)..(1441): n is a, c, g, or t
  misc_feature (1594)..(1594): n is a, c, g, or t
  misc_feature (1600)..(1600): n is a, c, g, or t
  misc_feature (1992)..(1992): n is a, c, g, or t
  misc_feature (2050)..(2050): n is a, c, g, or t
  misc_feature (2524)..(2524): n is a, c, g, or t
  misc_feature (2593)..(2593): n is a, c, g, or t
  misc_feature (2599)..(2599): n is a, c, g, or t
  misc_feature (2635)..(2635): n is a, c, g, or t
  misc_feature (2656)..(2656): n is a, c, g, or t
  misc_feature (2750)..(2750): n is a, c, g, or t
  misc_feature (2863)..(2863): n is a, c, g, or t
  misc_feature (3019)..(3019): n is a, c, g, or t
  misc_feature (3141)..(3141): n is a, c, g, or t
  misc_feature (3146)..(3146): n is a, c, g, or t
  misc_feature (3156)..(3157): n is a, c, g, or t
  misc_feature (3172)..(3173): n is a, c, g, or t
  misc_feature (3191)..(3191): n is a, c, g, or t
  misc_feature (3214)..(3214): n is a, c, g, or t
  misc_feature (3223)..(3223): n is a, c, g, or t
  misc_feature (3227)..(3227): n is a, c, g, or t
  misc_feature (3270)..(3270): n is a, c, g, or t
  misc_feature (3279)..(3279): n is a, c, g, or t
  misc_feature (3293)..(3294): n is a, c, g, or t
  misc_feature (3322)..(3322): n is a, c, g, or t
  misc_feature (3328)..(3328): n is a, c, g, or t
  misc_feature (3331)..(3331): n is a, c, g, or t
  misc_feature (3357)..(3357): n is a, c, g, or t
  misc_feature (3392)..(3392): n is a, c, g, or t
  misc_feature (3395)..(3395): n is a, c, g, or t
  misc_feature (3433)..(3434): n is a, c, g, or t
gcaggcggtcggcgcgcacgcgggtttgcaggtctttattcaggtcgttggtgcccatcaccatacattgcagcttgggatgcgcgccaatcgcggcggcattcagcatcgcaccgggggtttccatcatcgcccaaagcgggatgtcgcccgtgatttcggccanngcntccagatcggcggggctgccgactttgggcagcaaaatggcgtcgcagtccatcttcgccgcggcgcgggcatcgtcggcaccccattcggtgtccagcccgttgatgcggatcaccttataccggctgccatagccgccgtctttcagcgccgtggcgagtgtttcacgtgcagcggttttctcttccgggatcacngcgtcttcgaggtcaaagataatcgcatcggcnggcagcccgcgggctttgtctaacgcgcggtccttggagccggggatatanagaacggaacgcagggggcgggtgattttcgacatttgcgactctccaagaaataatgttgcgtgcaggtctgcatttttagacgaaaacttcaagcgcaaacgcgccgcagcgcagcgtcagataatttgcggctttaacgcggccttcaggttttgctgccagaaggaaaggcgtcttggtgcgtgtgtaagtgtaagaggtgtagaatggtaaaactgtttaacctgatcgggctggcaactgccgcggcggcggtggtggcgctgacgcaggatgtcgcggcgggaacgcgaaccgcaggttgtgacggatgccacaagatttccgcgaaaatttcgcacccgccgcaggatcaacaaactaaggaggcgggccccatttgatatgtcatagattataaaagcggcgaaaaaagatgcggatcgccggaacgcaatcgccacatcatcgttgatatcacaaccgagtgattatcacccggaacttctaaaggagtatcaacaatgaaacgtattcttggcacaaccgcaatcatcctgagcttgactggtcccgcatttgcagatgcacatgcagctggttttggtaccgtgacagcgcaagaaactgacttcttcgcgtccgacctgatcggcatgcgtatctacaattccgagacagaagttgaagcaaactccaccatcgccgctgacggcgaaaaggaatgggacgacatcggcgaaatcaacgacgtcctgctggattccgaaggcaacgttaaggccgtaatcctcggcattggcggcttcctcggcatgggtgagcgtgacgtaagcgtgaacatggacgagattcgcatcgtgaccgaagaaggtgacagcgacgaccgtttcctcgtggtgaacacaagcaaagagatgcttgaaaaagccccagcgttcgaacgtatggacgacgaagctgacatggaaaccgaagcaaacatggacgccaacgccgacatgaangctgacacagacatggcagcgaccgacatgaacgccgaagctgaggtcgacacagagaccgaaatggaagcggatgccgaagcactggcaaacgaagctgaaatggaagccgaagaagcagccgctgaaacagagcaggccgttgatgaagcnaccacngaaatggccgaaggggcaaacgaacttgagcaagacatggaacgccccatgctgacagccccagcggttgagcgtgaaggctatgccaacgccacagctgatgaagttgccgcgctgacagcagaagaccttgaagggtcctatgtttacggtgccaacgacgagaccgtcggtgaaatcggtgcccttgttatgggtgacaacggcgaagttggccaagttgtgatcaacgtcggtggtttcctgggcattggcgaaaagccagtagccgttacatgggacgagctgcaaatcatgaagaacgctgaaggcgacgacttccgcatctacatcgacagcagcgaagaagcgctggaagcacagcccgaataccaaggctaagcgtaacgctnagtcaaattcggcaatagcttgctgaaaagctgaccaagacgggatcgtttcgaaagnaacggtcccgttttttatggctctgcgcgatgtgacgtgatgccggaccaagcgcaacttgcacggtgcgcttcatttcggtatcccgaagcgaaatgtaaccctgtcggagtataccacatggccagacccaagatcgcgcttatcggcgcagggcaaatcgggggcacgcttgcccatctcgcagcaatcaaggaactgggcgacgttgtcctgttcgacatcgccgaaggtatcccgcagggtaaggccctcgatatcgcagaatcgggcccatccgccaaattcgacgcgaccatgaccggcgcgaacgactactctgaaatcgctggcgcagacgtttgcatcgtgactgccggtgttgcgcgtaagcccggtatgagccgtgatgacctgctgggaatcaacctgaaggtcatgaaatcggttggcgaaggcattgctgcccacgcaccagacgcattcgttatctgnatcaccaacccgctggacgcgatggtttgggcgctgcgcgaattctccggtctgccccaccacaaggtntgcggnatggccggtgtgcttgattcggcacgcttccgtcanttcctcgcgactgaattcaangtctccatgaaagacgtcactgccttcgttctgggcggccacggcgatacaatggtgcccctgacgcgctattccaccgttgcgggtatcccantgcctgatctggtgaaaatgggctggaccacacaggataagctggacgcgatcgttcagcggacccgtgatggcggtgccgaaatcgttggcctgttgaaaaccggttcggcnttctacgcgcctgcgacatcggcaatcgaaatggccgaagcctatctgaaagaccaaaaacgcgttctgccatgcgccgcctatgttgacggtgcctatggtctggacggcttctacgtcggcgtgcccaccgtgatcggtgctggtggcgtcgancgtgtggtcgagattgcgatgaacaaggacgaacagtccatgttcgacaactctgtgaacgccgttaaaggcttggtcgatgcgtgcaaaggcatcgatgaatcgctgaagtaataccctanggtgnagcgggcggnngtggtcgagatcacnntaaaccccgcccgctgcncctgcactttgctattggacgancccgcgggntgangccaaagccgctctctccccccgctcagatcagtctccgcagntagccaaanctgccgcgtcgcannttgaagacatgcgcatcatgcggcgcgnaaacgnacncttggggctgagttttcgcccaaacngtcgccgaaaagcccgatgaatttggttggctttngtncttgtgatcacagctggaaaattagtgatcacaaattnnggaaatgtccggcgctaaccgaagggtttgggcaactgcgccaataaaccgcttcaaattcacgcctctggacgtgacagtcccaaaaataccgttatctatgaccgcaacctgacgagaaaaggaatccatcatggcagatgtgaaccggggcaatcgcccgctgtcaccccacctgacgatctatcgcccgcaactgacctccatgacgtcgatcctgacgcggatcaccggcaacgcgatgctggtcgccgcgctgctgatcgtctggtggttcctcgcggcggcaacgtcggcggagtattttgatatcgcgaacggtttcatcaccagctggttcggtgatctggtcatgttcctgtcgctgctggggctgtggtatcacacgctggccggtatccggcacctgatctgggacaacggctatgcgctggatatcccgacggctgaaaagctgggctgggccgcgctgatcggttcagtcgttttgaccatcatcaccgcgctgatcatctgagggatagacacatggcttatttgacagaccgcaaacgcgctatgggcat

SEQ ID NO: 1626 - DNA, 4000 bp, Escherichia coli
  misc_feature (137)..(137): n is a, c, g, or t
  misc_feature (407)..(407): n is a, c, g, or t
  misc_feature (482)..(482): n is a, c, g, or t
  misc_feature (509)..(509): n is a, c, g, or t
  misc_feature (620)..(620): n is a, c, g, or t
  misc_feature (659)..(659): n is a, c, g, or t
  misc_feature (785)..(785): n is a, c, g, or t
  misc_feature (863)..(863): n is a, c, g, or t
  misc_feature (869)..(869): n is a, c, g, or t
  misc_feature (962)..(962): n is a, c, g, or t
  misc_feature (965)..(965): n is a, c, g, or t
  misc_feature (1028)..(1028): n is a, c, g, or t
  misc_feature (1040)..(1040): n is a, c, g, or t
  misc_feature (1043)..(1043): n is a, c, g, or t
  misc_feature (1100)..(1100): n is a, c, g, or t
  misc_feature (1115)..(1115): n is a, c, g, or t
  misc_feature (1145)..(1145): n is a, c, g, or t
  misc_feature (1256)..(1256): n is a, c, g, or t
  misc_feature (1397)..(1397): n is a, c, g, or t
  misc_feature (1556)..(1556): n is a, c, g, or t
  misc_feature (1670)..(1670): n is a, c, g, or t
  misc_feature (1844)..(1844): n is a, c, g, or t
  misc_feature (1868)..(1868): n is a, c, g, or t
  misc_feature (1988)..(1988): n is a, c, g, or t
  misc_feature (2441)..(2441): n is a, c, g, or t
  misc_feature (2443)..(2443): n is a, c, g, or t
  misc_feature (2466)..(2467): n is a, c, g, or t
  misc_feature (2470)..(2482): n is a, c, g, or t
  misc_feature (2484)..(2484): n is a, c, g, or t
  misc_feature (2490)..(2490): n is a, c, g, or t
  misc_feature (2495)..(2498): n is a, c, g, or t
  misc_feature (2500)..(2501): n is a, c, g, or t
  misc_feature (2503)..(2505): n is a, c, g, or t
  misc_feature (2507)..(2507): n is a, c, g, or t
  misc_feature (2509)..(2509): n is a, c, g, or t
  misc_feature (2511)..(2511): n is a, c, g, or t
  misc_feature (2516)..(2516): n is a, c, g, or t
  misc_feature (2518)..(2520): n is a, c, g, or t
  misc_feature (2524)..(2524): n is a, c, g, or t
  misc_feature (2526)..(2527): n is a, c, g, or t
  misc_feature (2533)..(2534): n is a, c, g, or t
  misc_feature (2542)..(2542): n is a, c, g, or t
  misc_feature (2544)..(2544): n is a, c, g, or t
  misc_feature (2546)..(2547): n is a, c, g, or t
  misc_feature (2553)..(2553): n is a, c, g, or t
  misc_feature (2564)..(2564): n is a, c, g, or t
  misc_feature (2569)..(2572): n is a, c, g, or t
  misc_feature (2608)..(2608): n is a, c, g, or t
  misc_feature (2614)..(2616): n is a, c, g, or t
  misc_feature (2628)..(2628): n is a, c, g, or t
  misc_feature (2632)..(2632): n is a, c, g, or t
  misc_feature (2641)..(2642): n is a, c, g, or t
  misc_feature (2645)..(2645): n is a, c, g, or t
  misc_feature (2649)..(2649): n is a, c, g, or t
  misc_feature (2653)..(2654): n is a, c, g, or t
  misc_feature (2662)..(2662): n is a, c, g, or t
  misc_feature (2666)..(2666): n is a, c, g, or t
  misc_feature (2675)..(2675): n is a, c, g, or t
  misc_feature (2681)..(2681): n is a, c, g, or t
  misc_feature (2689)..(2693): n is a, c, g, or t
  misc_feature (2695)..(2698): n is a, c, g, or t
  misc_feature (2700)..(2700): n is a, c, g, or t
  misc_feature (2702)..(2702): n is a, c, g, or t
  misc_feature (2704)..(2704): n is a, c, g, or t
  misc_feature (2707)..(2707): n is a, c, g, or t
  misc_feature (2712)..(2712): n is a, c, g, or t
  misc_feature (2715)..(2716): n is a, c, g, or t
  misc_feature (2719)..(2719): n is a, c, g, or t
  misc_feature (2722)..(2722): n is a, c, g, or t
  misc_feature (2727)..(2729): n is a, c, g, or t
  misc_feature (2735)..(2735): n is a, c, g, or t
  misc_feature (2739)..(2739): n is a, c, g, or t
  misc_feature (2741)..(2741): n is a, c, g, or t
  misc_feature (2756)..(2756): n is a, c, g, or t
  misc_feature (2760)..(2760): n is a, c, g, or t
  misc_feature (2767)..(2767): n is a, c, g, or t
  misc_feature (2769)..(2770): n is a, c, g, or t
  misc_feature (2772)..(2772): n is a, c, g, or t
  misc_feature (2776)..(2776): n is a, c, g, or t
  misc_feature (2784)..(2785): n is a, c, g, or t
  misc_feature (2788)..(2788): n is a, c, g, or t
  misc_feature (2793)..(2793): n is a, c, g, or t
  misc_feature (2797)..(2797): n is a, c, g, or t
  misc_feature (2800)..(2800): n is a, c, g, or t
  misc_feature (2802)..(2802): n is a, c, g, or t
  misc_feature (2806)..(2806): n is a, c, g, or t
  misc_feature (2811)..(2811): n is a, c, g, or t
  misc_feature (2817)..(2817): n is a, c, g, or t
  misc_feature (2824)..(2824): n is a, c, g, or t
  misc_feature (2826)..(2826): n is a, c, g, or t
  misc_feature (2831)..(2832): n is a, c, g, or t
  misc_feature (2834)..(2834): n is a, c, g, or t
  misc_feature (2836)..(2836): n is a, c, g, or t
  misc_feature (2838)..(2839): n is a, c, g, or t
  misc_feature (2841)..(2841): n is a, c, g, or t
  misc_feature (2844)..(2844): n is a, c, g, or t
  misc_feature (2850)..(2850): n is a, c, g, or t
  misc_feature (2853)..(2854): n is a, c, g, or t
  misc_feature (2858)..(2858): n is a, c, g, or t
  misc_feature (2861)..(2861): n is a, c, g, or t
  misc_feature (2863)..(2863): n is a, c, g, or t
  misc_feature (2866)..(2866): n is a, c, g, or t
  misc_feature (2870)..(2873): n is a, c, g, or t
  misc_feature (2884)..(2884): n is a, c, g, or t
  misc_feature (2886)..(2887): n is a, c, g, or t
  misc_feature (2891)..(2891): n is a, c, g, or t
  misc_feature (2893)..(2893): n is a, c, g, or t
  misc_feature (2896)..(2896): n is a, c, g, or t
  misc_feature (2899)..(2899): n is a, c, g, or t
  misc_feature (2901)..(2901): n is a, c, g, or t
  misc_feature (2903)..(2903): n is a, c, g, or t
  misc_feature (3061)..(3061): n is a, c, g, or t
  misc_feature (3694)..(3694): n is a, c, g, or t
  misc_feature (3865)..(3865): n is a, c, g, or t
  misc_feature (3949)..(3949): n is a, c, g, or t
gcagttccgatacttctacagaagtagtaccgataagcactgggcgaccagctaccgatagttctactactttgtcaattacagcgttgtatttctcgcgtttggttttatagataaggtcgttgtggtctttgcgngcaatagggcggttggttgggatttccattacatccaacttgtagatttcccaaaactcaccagcctcagtaatcgctgtacctgtcatacccgatagcttgctgtacatacggaagtagttttgcaaggtgatagtagcgtaggtttgggtagccgcttcaatcttcacattctctttagcctcaatcgcttggtgcaatccgtcagagtaacgtcttccgtccattatacgacctgtttgctcgtctacgataagtactttattatcnattactacatactctacatctttttcaaagagcgtgtaggcttttagcagctggttgagggtatgaatacgctcnctttttacgctgaagtctttaaaaagnttatctttaagcgcggcttcttcttcaataggcagttttttgttctctatttcagcaatttctacccctatatcaggaagtacaaagaaatctttatcaccatcgtaggcnatatcggcaaatcctttgtcggtaagttctatttggttntttttttcgtcaatcacgaagtacaattcggcatccacctttggcatttcgcgattgttatcctgcatatagtagttttcggttttctgtagcaattgttttacaccttcttcgctaaggaatttnataagggcattgtttttaggcagcccacggtgtacgcgcaataggaggaatcccccttctttagtatttccttcagcnataagnttgcgggcatcggcaagcactttagtaaggtaggtacgttgtttagctaccaaatcggctactataggtttaagttcgttgaactcgtgtaantcncctttaggagtaggtcctgaaatgataagcggcgtacgggcatcgtcaataagcaccgagtcnacctcatcgacnatngcgtagttgtgagcgcgttgcaccaagtcttcagaagtgtgcgccatattgtcgcgnaggtagtcaaaaccnaattcgttattagttccgtaagtaatatcngcgttataagcgttgcggcgagcggcagaattaggctggtgattgtcaatacaatctacacgcaaaccgtgaaactcaaatagaggtcccatccaagcactatcgcggcgngcaaggtagtcgttcacggttaccaagtgcaccccattgcctgtaagggcgttgaggtatacaggaagagtagccacgagagttttaccttcccctgtttgcatttcggcaattttaccttggtgaagtgctatccccccnataagttgcacatcgtaatgcaccatatcccaagtaacatcttttccagcggcgtcccaatggtttttccagatagctttatcgccatcaattgatacgtagtcgtgtgaggcagatagctcacgatcacgttcagtagctgttacggcaatagtctcnttgttagcaaagcggcgcgctgtttctttcatagtagcaaacgcttcaggcaaaatgtcgtttagcactttttccgaaacctgataagcctcctgacttagtttgtctatctcnacatagaggtcttccttagcgtctatgctatcagtagcgttagcctgctcttgtaaggtagcaattttgctatcaagagcggcgcgagcttcttttattttatttttaaactcaatggttttagctcgcagctcgtcattgctgatgttttcaagttgccctgcgtaagttttnattttttctactatgggctgaatngcttttaaatcgtttttggctttgtcgcctacgaatatttttattagggaattgataagactcatttatataattatgaattttgaattatgaattgtcaataaatataccaaagggggnggggctgacaaattgtcagtttgttttattattttgttaattaaaaaaagtctctcgttggagacttttttaatattcatcttcattccaaaggaaatcttcttcagaaggataatcaggccatatttcatcaatagattcatacatatcgccttcgtcttccatttcttgcagattttcaactacttccataggggctcctgtacggatagcatagtctataagttcgtctttggtagcaggccaaggtgcatcacttaggtgtgaagcgagttctaacgtccagtacataaagtttgtattttgaaaattttcggcaaaagtaatattttttattgagtatgcaaatttttcagaagatttttttgtttcttgccaaatctccctatgcgcaccccctgcccgtgcagcttacctacctttccgaaccttcagcgaaggttgagcgaaggntnagcgaaggataagcgaaggatannctnnnnnnnnnnnnnanatcaangaaannnnanngnnnananangtaanannnactnannaaaaanngtgtaatnanannataatngtatcttttantaagnnnnttataagaaagtcttaacatcgtaatttgttgatantaagtnnntttaaaaaatantttnctatttganntantttngcannattttttnatantaaaatatntaacgnttgatttnnnnntnnnnanantntanaatanatnnatnatnatttnnnaataanattngnataaaattaaaatantganaagaaantnntnaaanaaacattnntanataanaaancantnaaangaaanattctnaaaaaantnaattnnantntnntnttnggaaanaanncctntananaanattnnnnaagtttttaantnnttancnagncantnantgggacaactaacacgaagttagtagtagtatttatattatatgcattgagaaaggcttccttttttgtgaaaggaagtctttttttacgaatattgtgttttgtattgtttttttttgtacatttgcacgctttataaacttataaataattttatnatacaacaagcaattatgaaaaattccattcttttagtggaggacgatatagttttctcaaagatgctaagtcgttttttagaacgtaatggttatgatgtaatagggtgttatacgctagaagaagcgggaaaaaaccttgatatgtcaataaaaatggtttttacagaccttagattacccgatggagatggtatcagcttcctcaaacgtgtaaaaaacgcttaccctacaatgcctgtagtggtaatgacaagttatgccgaagtatctacagcggtagaagctatgaaattaggagcttttgattatatatcgaaaccttttcagcaagaagacgtgctgaatgtaataaaaaacgcccaaaatagtatgcacaatatagctacagcgggcactatttttactgaaaaaccagccgataatagcgtacctgctaaagtagccaaactacctgttatagatgacgataacccttatatagaaggggtaagtgccgcttctaaaaagttaagcaagtttatcaacctcgtagcgcccaccgatatgtctgttttgataatgggtgaaagtggtacaggtaaagaagtggttgcaaaatctatccatatgaagagtagccgccgcaataanccttttataccggtagattgtggtgctattcctaaagaaatagcagcaagtgagttctttggacacgtaaaaggttcgtttacaggggctattaccgataaaaaaggtcattttgaggaggctaatggcggtactatcttccttgatgaagtgggtaacctaagctatganaaccaaatacagctactgcgcgctttgcaagaacgccgtataaaaccaataggtagctctaaagaaatagaagtagatatcagngtgttggcagctaccaatgaagatttgttggaggctgtgaaaaaaggcgaa

SEQ ID NO: 1627 - DNA, 4000 bp, Escherichia coli
  misc_feature (160)..(160): n is a, c, g, or t
  misc_feature (2663)..(2663): n is a, c, g, or t
  misc_feature (3610)..(3610): n is a, c, g, or t
  misc_feature (3613)..(3613): n is a, c, g, or t
  misc_feature (3714)..(3714): n is a, c, g, or t
  misc_feature (3809)..(3809): n is a, c, g, or t
  misc_feature (3860)..(3860): n is a, c, g, or t
aatagagacacgttccatacatgcatcatcatcacttacatctatgataggagaatgtggtttacatttttacaaagttggaaaaattgcaactataatgagtgaaatgaaatcactcacatatccatactacataatttataaaaatatcatagaaggnaatcacacagtactattattagaatataatcaaaacaaagattttttcttagatcctaaggatgcactaaaggaattactagaaacagaagaaggtcaaggaagaaaagttctcacagaatcaagttatgccattgtcgcttcaagaattggttttaaggatcagacaataatttcaggcaaattatccagtctagcacaaacagattttggaaaaccaccacatacagtaatcattccaggtagattacattttacagaatcagatgcattaagattatttggtcagtgtatagatgagccatttgataattcggaaaaaacagaaaaaatttcaaagcaaatgatggaaaaatatgttcccatggtaagagaagctcttgaagaaattataccatattataaaaatcaaaaagaatttgaagtaattttagataatgcagaacgatatattgatcaggcagagatatttctagctgaaggtcgagacgaaaatgcaattttgagtatagggtatgctgatggactagttgatgcattaagattggcaaaaggccttgaatttaaaatgtaaaattatcaataaattaaagagtgggtcaaggattagaaaaaatattggaattaatagaaaaaataatactctcaataatgtatgtgtcccaaattaatggaaaattaccaatagagtcaatcaaagaaaaaactatgttttctgaggaacaaattaaagaagaaattagtaaattaatagaaaaaaatttggttaatgaggatcaaataacactaaccgaaatgggaagagattcaattcacatagtactagcaggtggtgtttttgacatcattcatccaggtcacatttccacattaaatgcagcaaaagcattaggagatgtactagtagtggtggtagcaactgacaatacagcagttaaaatgaaaaaacgaagaccaattcacagtcaagaacaaagacaagaattagttaatgcattagcagtagttgatctgtgtttgataggccaagaaaatgatatttttaaaacagtaaatctagtaaaaccacaaattattgcattaggttatgatcagatccatcaagaacaatacattacagaaggatgtaaaaaaataaaacttgatgcaaaagttgctagattacaatcaccaattcctgaaagctctagttctaaaatagaaaaagagtatggagaatcaattcacggcatttaagaatcaattacaatttttattgaaacttttgaaccatcttttaatttagcatttttacgtaaacatgttttagaaattaattcaattacagaatcgtcatgatgagtacgttcaagtattattaattgacaattaatagaattattcagtttagctggaaaacatttcacccagccatatgttctcttaccatcagaaaaacttttaattttaatgccatctaaagtttcaaattgtttaatagattcttgatgaatttttttatccaatctaacattcaaagtaccaggaaatggaacatatccaattttagatatgaattgttttgtgtatccctttaatcccatgtaatatgcaccttcacccattcccgaaaccaaagtacctttaagatcaactgaggatggagaagaatctaaactcttttgtaaaatagatgacagtttcaccatttcagaaaatcccttacttgtaatttttacagataaatttcttccactaattattctagtgatgaatttattttgctctaattcaagtaaatgtttagacgcagcttgttgtgatttatgaatattttttcccaaagaagaagtagtaatactaacaaaattgtattttgctcctttagataacaggtaggagagagttaagaggtgctgaatttttagttcagtcatctaaaatcctaagatacgcctaaatcagcaaatgtcttaagagtcataccatcagagttagacaattttgcaactctgtgtccaactacacattcaattccagcattttttgctccttccaataatcgctttgtgataattccatccaataggaggtatttgattccagattgagatgatagtttgctaactacttcgctaattggaactttaaaaatttcattttgatcaccatctaatgcaacagcttctaaagtttcattaagattagggaaaattttggaagctacatctgcaatagatttgtcatcttcactgttgagttttggtgcaggtttaccatttttaatttcatcagcaataggttctaaaatttcgcttaatctttgaggagttaactcttctacttcaacaccggtatctgcttgtaattcataatcaagtgtaacaactgattttaattctttaagaataaatccgcctgctctatctccatcgatgaaagcaacaacagtatctttttcagagcataattctttaattgattcatcaatttttgcaccttcaattgcaagaacattatcatanccagctcttaaaagattgataacatcagctctaccttcaactaaaattatccattttgaattaaacactccagaactgcaagttaattttgatggtccatatgtagatagtttaccagaatcaccttgatgaacatcatttaacatggtttcaccttcactaacagtttttgttgcccatttttgtttaatttcttttgcacgtcttacaatatcatctttctttgcagcacgtacatcatcaattgcatctaaagtaaatttacaatcaaatggaccaactttatcaatactttctatacctgctgcaatcaatgcgcaagtatcaatatcagtactcataggaattacagcatttccatttgtagtattagatgtagatttagcaataacttcaatacgtcctacttttgaaactcgttgcagttcattcaggttcatctctgggcctaacagtccttctgtttggccaaaaatggcgccgattatatctgctcgttcaacgagtccatcaacttcgtaggaaagtttaacgtgatatttgacaattcctgattgaggcatatactcttcatctcctttatcattatatcctggaatcctattctgcgatatatgagggtatcgaaaaatatgagatatagcaaacgctaatgaaattaaaaaatgaaaataatgatactagtttattcggtactaaatgagtgaccacaagaacaggattttgtaacatttggattgttaattttaaatccagaacccattaggctttcaatatagtcaacgtttgcaccttgtaaatgatcaacactgtagctatcaactaagagtttaactccattttcttcaagaactaaatcatcttcttctggtgctttttcaaagcccattccataagataatccagaacaacctccaccttgaacatatactcgtaagtattcaggngantcggcttcttctttcatgaattcatgaattttctcagctgcttttgcagtaactgtaaccattttttgtgtttgttcagttgccattatgatcaaaaatcnattttaaattataataagcttttccccaccaacatactagtaatacagtaggctcgataaataataaaaataaaaaagagactgaaatagcttantttttggatttatttacaaatgcagtcattcgttcttggcgatcaggatgngtaaagcaatttctccaagcaaggagttcaatagaaagaccagtatcaagatctgcatttcttcctttattgattgcaactttagacatctgaacacccatagttgaacatccagcgatttgttgtgccattttcaaagc

SEQ ID NO: 1628 - DNA, 4000 bp, Escherichia coli
  misc_feature (3)..(3): n is a, c, g, or t
  misc_feature (6)..(7): n is a, c, g, or t
  misc_feature (10)..(18): n is a, c, g, or t
  misc_feature (20)..(20): n is a, c, g, or t
  misc_feature (22)..(35): n is a, c, g, or t
  misc_feature (37)..(38): n is a, c, g, or t
  misc_feature (40)..(41): n is a, c, g, or t
  misc_feature (43)..(47): n is a, c, g, or t
  misc_feature (49)..(54): n is a, c, g, or t
  misc_feature (56)..(57): n is a, c, g, or t
  misc_feature (59)..(59): n is a, c, g, or t
  misc_feature (63)..(64): n is a, c, g, or t
  misc_feature (66)..(66): n is a, c, g, or t
  misc_feature (68)..(72): n is a, c, g, or t
  misc_feature (74)..(75): n is a, c, g, or t
  misc_feature (80)..(80): n is a, c, g, or t
  misc_feature (82)..(85): n is a, c, g, or t
  misc_feature (87)..(98): n is a, c, g, or t
  misc_feature (100)..(101): n is a, c, g, or t
  misc_feature (103)..(103): n is a, c, g, or t
  misc_feature (105)..(105): n is a, c, g, or t
  misc_feature (108)..(108): n is a, c, g, or t
  misc_feature (110)..(123): n is a, c, g, or t
  misc_feature (125)..(127): n is a, c, g, or t
  misc_feature (129)..(133): n is a, c, g, or t
  misc_feature (135)..(139): n is a, c, g, or t
  misc_feature (141)..(153): n is a, c, g, or t
  misc_feature (155)..(156): n is a, c, g, or t
  misc_feature (158)..(160): n is a, c, g, or t
  misc_feature (163)..(163): n is a, c, g, or t
  misc_feature (165)..(165): n is a, c, g, or t
  misc_feature (169)..(169): n is a, c, g, or t
  misc_feature (171)..(173): n is a, c, g, or t
  misc_feature (175)..(176): n is a, c, g, or t
  misc_feature (180)..(180): n is a, c, g, or t
  misc_feature (182)..(190): n is a, c, g, or t
  misc_feature (193)..(201): n is a, c, g, or t
  misc_feature (203)..(205): n is a, c, g, or t
  misc_feature (207)..(209): n is a, c, g, or t
  misc_feature (212)..(212): n is a, c, g, or t
  misc_feature (216)..(216): n is a, c, g, or t
  misc_feature (220)..(221): n is a, c, g, or t
  misc_feature (225)..(230): n is a, c, g, or t
  misc_feature (234)..(235): n is a, c, g, or t
  misc_feature (237)..(238): n is a, c, g, or t
  misc_feature (240)..(241): n is a, c, g, or t
  misc_feature (243)..(243): n is a, c, g, or t
  misc_feature (245)..(245): n is a, c, g, or t
  misc_feature (247)..(248): n is a, c, g, or t
  misc_feature (250)..(250): n is a, c, g, or t
  misc_feature (252)..(252): n is a, c, g, or t
  misc_feature (254)..(255): n is a, c, g, or t
  misc_feature (257)..(257): n is a, c, g, or t
  misc_feature (260)..(260): n is a, c, g, or t
  misc_feature (262)..(267): n is a, c, g, or t
  misc_feature (272)..(272): n is a, c, g, or t
  misc_feature (275)..(275): n is a, c, g, or t
  misc_feature (278)..(278): n is a, c, g, or t
  misc_feature (280)..(281): n is a, c, g, or t
  misc_feature (284)..(284): n is a, c, g, or t
  misc_feature (286)..(290): n is a, c, g, or t
  misc_feature (292)..(292): n is a, c, g, or t
  misc_feature (295)..(299): n is a, c, g, or t
  misc_feature (301)..(301): n is a, c, g, or t
  misc_feature (303)..(303): n is a, c, g, or t
  misc_feature (305)..(305): n is a, c, g, or t
  misc_feature (307)..(307): n is a, c, g, or t
  misc_feature (312)..(313): n is a, c, g, or t
  misc_feature (316)..(317): n is a, c, g, or t
  misc_feature (320)..(320): n is a, c, g, or t
  misc_feature (323)..(325): n is a, c, g, or t
  misc_feature (328)..(328): n is a, c, g, or t
  misc_feature (331)..(334): n is a, c, g, or t
  misc_feature (336)..(336): n is a, c, g, or t
  misc_feature (338)..(338): n is a, c, g, or t
  misc_feature (340)..(344): n is a, c, g, or t
  misc_feature (346)..(358): n is a, c, g, or t
  misc_feature (360)..(360): n is a, c, g, or t
  misc_feature (362)..(362): n is a, c, g, or t
  misc_feature (365)..(365): n is a, c, g, or t
  misc_feature (368)..(369): n is a, c, g, or t
  misc_feature (371)..(371): n is a, c, g, or t
  misc_feature (374)..(374): n is a, c, g, or t
  misc_feature (378)..(379): n is a, c, g, or t
  misc_feature (381)..(381): n is a, c, g, or t
  misc_feature (383)..(383): n is a, c, g, or t
  misc_feature (385)..(385): n is a, c, g, or t
  misc_feature (387)..(387): n is a, c, g, or t
  misc_feature (389)..(395): n is a, c, g, or t
  misc_feature (397)..(397): n is a, c, g, or t
  misc_feature (399)..(407): n is a, c, g, or t
  misc_feature (409)..(409): n is a, c, g, or t
  misc_feature (411)..(416): n is a, c, g, or t
  misc_feature (418)..(419): n is a, c, g, or t
  misc_feature (483)..(483): n is a, c, g, or t
  misc_feature (510)..(510): n is a, c, g, or t
  misc_feature (525)..(525): n is a, c, g, or t
  misc_feature (570)..(570): n is a, c, g, or t
  misc_feature (572)..(572): n is a, c, g, or t
  misc_feature (577)..(577): n is a, c, g, or t
  misc_feature (601)..(601): n is a, c, g, or t
  misc_feature (606)..(606): n is a, c, g, or t
  misc_feature (616)..(616): n is a, c, g, or t
  misc_feature (618)..(618): n is a, c, g, or t
  misc_feature (639)..(639): n is a, c, g, or t
  misc_feature (663)..(663): n is a, c, g, or t
  misc_feature (687)..(687): n is a, c, g, or t
  misc_feature (690)..(690): n is a, c, g, or t
  misc_feature (699)..(699): n is a, c, g, or t
  misc_feature (702)..(702): n is a, c, g, or t
  misc_feature (735)..(735): n is a, c, g, or t
  misc_feature (792)..(792): n is a, c, g, or t
  misc_feature (849)..(849): n is a, c, g, or t
  misc_feature (851)..(852): n is a, c, g, or t
  misc_feature (1043)..(1043): n is a, c, g, or t
  misc_feature (1109)..(1109): n is a, c, g, or t
  misc_feature (1265)..(1265): n is a, c, g, or t
  misc_feature (1304)..(1304): n is a, c, g, or t
  misc_feature (1307)..(1307): n is a, c, g, or t
  misc_feature (1322)..(1322): n is a, c, g, or t
  misc_feature (1442)..(1442): n is a, c, g, or t
  misc_feature (1499)..(1499): n is a, c, g, or t
  misc_feature (1589)..(1589): n is a, c, g, or t
  misc_feature (1847)..(1847): n is a, c, g, or t
  misc_feature (1985)..(1985): n is a, c, g, or t
  misc_feature (1991)..(1991): n is a, c, g, or t
  misc_feature (2371)..(2371): n is a, c, g, or t
  misc_feature (2389)..(2389): n is a, c, g, or t
  misc_feature (2605)..(2605): n is a, c, g, or t
  misc_feature (2806)..(2806): n is a, c, g, or t
  misc_feature (2926)..(2926): n is a, c, g, or t
  misc_feature (2986)..(2986): n is a, c, g, or t
  misc_feature (3031)..(3031): n is a, c, g, or t
  misc_feature (3094)..(3094): n is a, c, g, or t
  misc_feature (3118)..(3118): n is a, c, g, or t
  misc_feature (3235)..(3235): n is a, c, g, or t
  misc_feature (3334)..(3334): n is a, c, g, or t
  misc_feature (3391)..(3391): n is a, c, g, or t
  misc_feature (3433)..(3433): n is a, c, g, or t
  misc_feature (3487)..(3487): n is a, c, g, or t
  misc_feature (3541)..(3541): n is a, c, g, or t
  misc_feature (3568)..(3568): n is a, c, g, or t
  misc_feature (3598)..(3598): n is a, c, g, or t
  misc_feature (3601)..(3601): n is a, c, g, or t
  misc_feature (3715)..(3715): n is a, c, g, or t
  misc_feature (3736)..(3736): n is a, c, g, or t
  misc_feature (3763)..(3763): n is a, c, g, or t
  misc_feature (3814)..(3814): n is a, c, g, or t
  misc_feature (3859)..(3859): n is a, c, g, or t
  misc_feature (3931)..(3931): n is a, c, g, or t
  misc_feature (3973)..(3973): n is a, c, g, or t
  misc_feature (3976)..(3976): n is a, c, g, or t
ggnggnnaannnnnnnnncngnnnnnnnnnnnnnngnnanngnnnnngnnnnnntnnanaaannangnnnnntnnttttntnnnncnnnnnnnnnnnncnngntnaangnnnnnnnnnnnnnncnnncnnnnnannnnnannnnnnnnnnnnntnncnnnttnancccngnnnannaaantnnnnnnnnnaannnnnnnnnannngnnnaantttntttnnaaannnnnnaggnnanntnnantngnnangntnntnaantnnnnnnaaaanaanaantnnaancnnnnntnttnnnnngntngntnttttnnttnnttnaannnaanaannnncngngnnnnnannnnnnnnnnnnnananaanaannantgntttnncnantngncnnnnnnngncnnnnnnnnntnannnnnncnnagggaggcaacacatgattacaggtatccagattactaaagctgcaaatgacgatctgctcaantctttctggctgctggacagcgagaanaacgaagcgcgctgngtcgttgcgaaagcgggttttgctgaagatgaaatcgtgccggtnancaaantgggcgaaatcgaataccgtgaanttccnatggaagtgnanccggaagtgcgcgtggaaggnggtcagcacctgaacgtaaacgtnctgcgccgcgaaacgctgatggangcngttgagcanccngaaaaatacccacagctgactatccgcgtgtcnggctatgcggttcgctttaactcactgactccagaacagcagcgcgacgttatcgcncgtacctttactgaaagcctgtaacggcttcagcaggggggaataaaaaagccgggnanntccccggctttttttactcttcagttttcgtctctggtgcggcagagcttggcttacggcgcttaccaatatttttggtatcgcggtggcgctgcttcacgcgcggtttctctttttctttctcttttctctcagcacgtttcgcgagcgctttcttggacggtttacccgtcatcttttcactcggcgcncgcgtggtcgggcggagttcgtcaataacgcgcgctttcagcggctcatcaacatagcggccaatnttctgcagcagcaggtagtcatgcgcttcgaccagtgaaatcgcaatccctttgcggcccgcgcggccggtacggccaatacggtgcaggtaggtatctccgctgcgcggcatatcgaagttaatgacgtggctgacgtccgggatgtcgatcccncgtgcggcaacgtcagtcgcaaccagcacgttaacgcgnccntcggtcaggcgcttnatgccttcggtacgcttgatctgcgccatctcgccttcaagatagcagttgttgatcccggcgttacgcagcatttcagccagctcgtgcacgcgctcgcgcttacgcacaaacacgatngtgcgcagagcatcttcctgcttcagcaggtgtttcagcaattcgaccttgtgctcnaggttgtccgcgcggtagtaccactggtggatcttcttacgctcacgggtggacggcgtcgccgagacttccaccggatcttccagcagncgctctgcgaagtctttgatcgcttccccttcgagggtggcagagaacagcatcgtctggttacgccagcgcgtttccccggcaatgtgctcgatatcctgtgcgaagcccatgtccagcatgcggtcggcttcgtcgaggatcagcgtttcaaccgcgcggcagtcgaagttctcttctttaatgtactgcagcaggcgtcccgtcgtcgcaacgacgatgtcctggttttcgctgaacacttcggcgtggttcatntacgcaacgccgccggtgatggtggcgatatccagatgagtatttgccgcgagttcacgcgcgtgatcggcaacctgcattgccagttcgcgcgtaggcgtcaggattaaaatacgcggcgggccagattttttacgnggaaantcgagcagatgctgcaacacaggcagcaaataggctgctgtcttccccgtgccggttggcgcagaaccgagcacatcgcggccctcaagcgcaggcggaatggccgctgcctgaatggcggtcgggcgtgtaaagcctttgctctcaagtgcattgagcaggctttcatcgagttcaagttcggaaaaagtcgttacagtcatgttctacctctgtgtggggcgctgattatagacgttacggctgtaatcttcatctgtttgtatggatatcgcttttcggccacttcgctttcccctatgctactccagtttcacttagaaggttgccctgacatgtctcaactcaaagcgcagctgcgccgcgatggttttacgttnaaacaattttttgtcgcncacgatcgctgtgccatgaaagtcggtacagacggtattttactgggagcgtgggcgcctgtcgcaggtgttaagcgtattcttgatatcggtaccggcagcgggctggtggcgttgatgctggcgcagcgtacggaagaacatgtcaccattgatgccgtcgaactggatgcgcaggccgcagagcaggcgagtgacaatatggccgaatctccntgggcagcccgaatgaaggtggaatgcgcagatgtgctcgcctgggcgcctgaacaaaccgcgcgttacgatctgatcgtcagcaaccctccctactacgagcccggcgttgagtgcgggacacccgagcgtgaacaggcgcgttataccggctccctcgatcataaagcgctgctcaccagtgcggcagaactcatctcngaagaaggttttttctgtgtggtcctgcctgagagtaccggcaacacgttcatcggtatcgcgcaggagatcggctggacgttacgtctgcgtaccgatatttcggatacggaaggacgnctgccgcaccgcgtgctgctggcgctctcgccaaaagagggtgaatgctttaatgaccgnatggtgatccgtgggccagaccagcgttattccgaagattacacngctctgacccaggcattttatctgtttatgtaaacctgcggggcgagtatcgacgggccggantcagcaagctgatccgggtagtcnagggtatagtgcagcccgcggctctctttacgcatcatcgcgcagcgaacaatcagctcggcaacctgcaccagattgcgcagctccagcaggttattggatacgcggaaattggcntagtactcatcaatttcctgctgcagcatggtgatgcggcgcaaggcgcgttccaggcgtttcgtggtgcgcacaatccccacgtagtcccacataaanagccgtagctcatgccagttgtgctggatcacgaccagctcgtccgggttatccacncggctttcatcccaggctggcaggtgctctgtctcgcgggcntaaggcatgcgcttcgtgatgtcttccgctgctgaccagccgtacaccagacantcaagcagcgagttagaggccatacggttcgcgccgtgaagtccggtatagctnacctcaccgatagcatacagaccgtcnacatcggtacgtccatgatcgtcaaccatnacnccaccgcaggtatagtgggccgctggcacaatgggcaccggatcgcgcgttaaatcaatgccaagattgagcagcttttcgtaaatcatcgggaaatgctggcgaatgaactcngctggcttatggctgatatcnagatacatgcagtccacgccaagacgnttcatttcatgatcgatggcgcgggcaacgatatcgcgcggggccagttcnccccgggcgtcaaagtcgggcataaagcgggagccgtcagggcgnttcagataagcgccttcaccgcgcagggcttccgtcagcaggaagttgcgcgcctgagggtggaacagggcngttgggtgaaactgattaaactcgaggttcgccacccggcanccngcgcgccaggccatcgcgataccg

SEQ ID NO: 1629 - DNA, 4000 bp, Escherichia coli
  misc_feature (578)..(578): n is a, c, g, or t
ccaaaatacggaatgatgtgttgctccatcatatatcgtttgttcttcatggtgcgttccttcagctcattctgcttatcttcaaaataaacttccataaattcacttagcttcatatccatacttctgctgttattcaatttcttctgtcgctcatactcaagagcctctcgctttgtctcaaaacctctttttcttcgctttttcttttcacccctggcatttgtttcaaaccattgggctgtccatttcttagtgtctttttctttgtatgccatactgctctcctttcctatcctactgataattcgtagccatacatttttttcgcccaatacgctcttggaattcttccagccattgtgatatatccttgcgaagccaactcttcattcatgctttttaccagcttgtacgcatgagatttggaacaattcaattctcgggctacatcatcggcactcatcatatattgataattcgccatacattcgtcctcccttctatactttgaatctcgttacatttctagtatttgttttgtgtatgattttcgtacattcatattatcactacanatttcccttgtcaagatttcgtaattatatttttacgatattcgtatatgctatttttgaaaattattcttttatgtctttcgtatttgtgctatgataataattatatttatgcaattcgtaaattttaaatttatgaaaacaggaggtttcaatgggagacggtaagaaactgaaagaaatattagacagtaaaggcacgaatgtccgccagattgcaaaagcaactggtatcagtgccacaacactttattcaattattcaaaaggattctaatatccgatttgactttgcacttagactggcaaatgaattagaaattgacgtgaatgagatatgctctgccagtcccttttcgggtgcaatcacagaagaagaaatatatcctacattaccgaatggattgaatggcgctcttgacggaaatcgggtaaaaacgtatttaaaaaattccatgtacccgcttatgtatcttttcgggaaaaacagtatgcctgatgtggataatttgctgacttccttttaccagttggatgatgaagctaggaaagaagtggtggaaacgatacaattcaagctgcagtatcacagagatcccgaacgggcagaacagattaaacagattaagggatggtaaaaataactccagtgaatcgttgaattcactggagttattgcctaatgatcaatatcctgtcttttgacaatcttcaagtagtttctctttaaatcatttactgagccaaagaatatttgctctgatttcgaaaaggaatgattctgtatttttagctttaacagttcaaaagtgcatatcatatcagccacctgaaacaacctataatccgatggttttacttttcgaaactccactcttggcaaaaatgcattaaacaaggtcgataatattttgtttaactctacttgtccattatcatagtatattttaaccaagtcgaacgaaagcaagaagtcatagtgctccctaataaaaacagatatttgctttgaaagtttacccgttgcttcaacaatatcttcaatatgctttttctctatatggaaagctttatattttaccccactctgtctcataaacgtaaccatcttattaaatatctttctacgttctatataatccatttcagagtattcttcctcttttcgaataatagggcctgtatgtatacaatgattttctaatcccaaaagtgataattctctatttaaatattccattggctcttgaatggatgcttcttgttcatgaaataccattgtaactatataccaaggagaatgataatcatattcaccaaaatccccagactcatcaataaaaatacttagttctttcatatagcgccttcttacttcaaattctgtaaaaaaaatggcggggatatacccgccaataatggggaacctccccatccgctgatggacccgggtctttcgaccagcccaaactgtaatgcattacagctttattctatgcacattatatcacgtctattcataattttcaaggtcaatctcatgctttctgtttggtaatttaagctttccgaaatattataccataatatctccgaatatatcaaaaatcgacatctgtccatctgactttttttgtgacatataattccatatagttttatctaacacactttcacccacttctaatacagatgcagtctttcgcaatattctacttgcttccttataatcggctgtcaaaacacctgctatttcaagaaattgaaacatatgcctgtcaatcggaatcgcttgctgaccagatagtaatttcatataatcaatagtctttcttcctactccattaatttctaataagctctccgcattcccatcatccaaaatccactccgccaaatcatcttctgtatttatattacaattatacaaatacaaagccaaattacagattgtgttttgctttcttttatttttccattgtattatttcctcaattggtattgtctgaaatagtattataaaatcacatgttgtcctataatccgaatatttgctcagaatattataaactcttggatacaccacacttttgtaattcattcctgcttgcaatactgaatctgtcaatgttgctgccatattataatatggtgttctttgtgtaatttcagcataattatggggaattctttccaaaaggtctataaccttttgaactgagttatctatattatccattaatcttttcctctagtatattatttatcgcattaatgcgatcaacacagtttggacacgctccacatggcatatctgaatttacctgacatgaatacgttatctcaataggagcatttagttctaatcctaactttgccacctctgtttttgtcatttcacgaaatggcatattaatcctaatagagccatattcatataacaaactttccaattttgtaaaaaattccatagaacaatctatctcttttgcatggttgctattaataaatgcggtatacacatcttttattcccatagattgcgcatatgcagatgccaatgaaataaacaaaatatttctatacgggagatacatatcctctgccacaacattatcttcccacaaattggcttctattatcattctcgaatttgattccttataaacatcaccaatttttataacacgcacattatctacatattcttcaggaagtacttgtaaaagtgtttgatattccttatccttacagtgttgaccgtaatcaataaataaaattactacatttttattttctttagcaagcttatatgccaaaacggtagaatccattccaccagaagcaagcaaaagacaatcaaaattattctccatttttcaccatcctactaaccacagtaaatactgcatcaattacttgactcttcgtcttgcaataatatgtacatgaattctttaaaaacatattatccagtttgagatacggatcataaagtattattggttttccatttgcttgataattcccgatttctaccaacgttccttggtcgttgtagagtaatgttgctatcattatcttgcattccgataacaattccatatctttagcaaatatagcacgttcttcattcatgtccatctctttattcacttgtccattttcttggattggtctccgaggtttaaaattatgatataaaagagaatcctctaaaatatccaatttctctgtatctacataatcaaaatctggagctgccatataaattggatagtttactctttcattccatggaactcttattccttccatttcaacaaaatcttcaatattctgaacaatgagctctacattttctttaaatttttcttgttgaattgtttgtgcatataaacttgacatccacgctgcaaatgc

SEQ ID NO: 1630 - DNA, 4000 bp, Escherichia coli
  misc_feature (716)..(716): n is a, c, g, or t
  misc_feature (1116)..(1116): n is a, c, g, or t
  misc_feature (1946)..(1946): n is a, c, g, or t
  misc_feature (1985)..(1985): n is a, c, g, or t
  misc_feature (1991)..(1991): n is a, c, g, or t
  misc_feature (1994)..(1994): n is a, c, g, or t
  misc_feature (2009)..(2009): n is a, c, g, or t
  misc_feature (2024)..(2024): n is a, c, g, or t
  misc_feature (2039)..(2039): n is a, c, g, or t
  misc_feature (2045)..(2045): n is a, c, g, or t
ctattattgggccgagaatggatgtaatggcgcctgatatgggtaccgatgagcaaaccatggcttggatcatggacacctacagcatgaaggtggggtatgcgtgcccggaaattgtaacagggaaacccgttgagctagggggttgtttagggcgcagagaagctactggacgaggtgttaccttttgtattttggaagcgctgaaggatctcaacattaaacctgaggaagctactgctgtggttcaggggtttggtaatgttggggcgatcacctgtgctgaactttctcaaaaagggattaaggttatagctgtttcggataggtatggcgcaattcataactcccttggcatcgatatcgttgagctgcaaaattttgtatcggcgggtaacttacttaaggacttccccaaagcaaagcagatcgatgcggatgaaatgctgatacttccctgcacggttttggtgcctgctgcacttgaaagagtgattcatgtaaagaatgctgcacagcttaagtgcaagatactagcagaagctgccaacggcccgactacccccgaggcggatgccatcattagtaaaagtgatatttatgtaatcccggacattttgtgtaatgcgggtggtgttacggtttcgtactttgaatgggtgcaggatattcagcaattgttatggagcgaagagcaggttaatcataaattatangagttgatgattaatgcattcaggcgggtgcgagatttggcgttgaacaagaaaatatcgatgaggttggcggctctatccttgggggtagagaaaatagcccgtgaaaagatcaaacggggcttgtttccctaaaatacttttagatcaatctggagagtttatgccggttcaaatttcccctgcaacccttaaagaatggctcgatcaggggcatagtatttatcttcttgatgtccgagaaccttgggaaaatcagttcgctgccattcctaatagcgttttggtatctttgggcgacctttccaatagtttggatgaggtaacacctcctaaagatgctaaagttgttgtttattgccatcatggggttcgaagcttatctggggctgcaattctngaaaatgcaggcataacccctgcttattcacttgctggcggcattgaggcttggtcttgtgaaattgatccaaatattcccagatatcgctaaaaaaggggcaaatatggcttctttaagtcattttgatgatcagggcgccagcagaatggtggatacttcgaataaagaggaaacccaacgccttgctagggctagtgccattgttcgaatggaagaatctacggccgagttaatccggaacaaagagctttccaagggcgatgttttagaggttgcaaggttagcgggcattcaggctgccaagaaaacttgggatctcattcctctatgccatcccttggcaattacgggtgtaaaacttgatttctcgttttttgagaaaaacttgcttagaataactgcagtggtaaaagtatttggcaggacaggggtcgaaatggaagcccttacggctgttagtgttgctgcccttacggtttatgatatgtgtaaatctgtggataaagttatgaccattacggaaatccggttagatgaaaagactggtggaaagagcggttcatttgtcaggcaataatgacaaaccgcattccgatctccatgaaatgggccataatatgaacgcctcattgatgtactccacattttttactcccgaacgatatgactcaatgctcccgattcgttcagaccttgaacaagtcgaacgcattatctcgcgcgagcttatttctaggcataaagaattcaccgacatccttgatcatgtgagtcaatacaaaggcaaaaggcttcgccctgctctccttcttgcttgtgctcatgcntgtggtttagtcaatgaaagccattgggttttgggcgcngctgtnganctgattcatacagcntccttggttcatgangatgttttggattcngctcanatgcgcaggcatttgcccgctgttcataccctttggggaaccaaatctgctgttttgcttggagattgccttttcactaacgccttccaaatgactagtaatttagaaaacaaccgtgcttgcaaggttattggtagaagtgcccaccggatttgcgagggcgaacttttgcaaagctttcattcgggtgatattaacatcactgaagccacctaccttgatatcattgatggcaaaaccgcagaaatgatttctgcaagttgtgaattaggtgctgcttacgctggggcgagtgaagcggtgattgaatctatggctagttttggtcgtaatctgggcatggcttttcaaatcgctgatgatattcttgatcttgttggccatgaaaatcaaacaggcaaatctcttggcaccgacctcgatcagaaaaaacttactttgccactcatatggcttttgcaaaatggccctaatgtagaaaagaataagattaaaagtttgcttgagaaagattctaccgcacagagagtccagataaaaaagcttcttagtgattctggtgcaattgattacgccaagaacaaggcggaacaatttattgcatctggcaagagggatttacaggcacttgctccttcggcattcagaaacattctgcatcttatcacagatcagatactaaaccgttcctgctaattgcaatttatagtcaatgatatgtcgaagagttcgcttaatttaagtggattctttgagttcatttatttgaggttatgccaaacatagaggttttccactttcttgcgggcccactcggttttacgcagaaacttaaggctcgatttaatgcttggatcgtgcgtgaagcaattaatggtgatacggctaccaagttcttgccagccataatattcaaccaactcggtcagaattttctcgagcgtgattccgtgcagcggattgttttgctggtaattatccattttgtacatgaatccgaatcattcgactattgggaacataaacacccgctttatcagggtcggggataacccattcctaattatatgttttgcgggcatttatccaaaagatactgcggaagtgcgatggattgtgaaaacataaatcaatcgattgctgcgaacctccaggttgggacgctgggtgggtatacaccgttataaaaggcttcggttccaatagattctaataccttcttaagggcatgcctgcgaaccgttatgtagtaatactcacatcgtgaatccctaatgtaatcccaaacttggtagagttgatcggtttctttaataactgcatgaagatcttcaccaaatgcaggctcgagattcactcttgcgctaaggtgatgcctataagcacggttgaaccctagcatttcttggatgactaagcgatcagggaatcgcatggaatcaaacaccaaaggggcatcatatagctcgttgtagcgttttttaaggagttttacatccgattgaaaatcagatgacctaagcaaaatgtattggtgttcacgcggatctagaatttcgaagtttaaggcgattgcctgaacgaatggagagagatcagcttcgtcttgaattgatttctcggagtctgacatttctaatggggataataacaacattcctgcgagtatgaactctgatagtgccatgactgtttctcctcatgaaagttaccggaatggaacaaaacatgaaccgagatcaatgctggcctacttaattataggtaggctacgggacgttttttcacctgctttacaacgaaatctttatttttgaacctgactaaaactaaatcctgatatctaatcagcaaagttaatgccaaacctttaattctttaaaatcgaagattattggttcagaattgacctataaacgccatatacctgattccaaacctactttttagtgctt

SEQ ID NO: 1631 - DNA, 4000 bp, Escherichia coli
  misc_feature (746)..(746): n is a, c, g, or t
  misc_feature (814)..(814): n is a, c, g, or t
  misc_feature (826)..(827): n is a, c, g, or t
  misc_feature (835)..(836): n is a, c, g, or t
  misc_feature (845)..(846): n is a, c, g, or t
  misc_feature (875)..(875): n is a, c, g, or t
  misc_feature (878)..(878): n is a, c, g, or t
  misc_feature (884)..(886): n is a, c, g, or t
  misc_feature (892)..(892): n is a, c, g, or t
  misc_feature (1136)..(1137): n is a, c, g, or t
  misc_feature (1140)..(1140): n is a, c, g, or t
  misc_feature (1146)..(1146): n is a, c, g, or t
  misc_feature (1255)..(1255): n is a, c, g, or t
  misc_feature (1275)..(1275): n is a, c, g, or t
  misc_feature (1286)..(1286): n is a, c, g, or t
  misc_feature (1589)..(1589): n is a, c, g, or t
  misc_feature (1592)..(1593): n is a, c, g, or t
  misc_feature (1596)..(1597): n is a, c, g, or t
  misc_feature (1771)..(1771): n is a, c, g, or t
  misc_feature (1988)..(1989): n is a, c, g, or t
  misc_feature (3152)..(3152): n is a, c, g, or t
tgacaagtagcaatttcccttgtccaatcaattgaaagccctatagactttaattgcgacctcattaaattgatgttttgataagtccattctgacggtgatttttttgcaacgattgcagcattttctgcaggaagaccaaatgcatcccaacccattggatgcataacattaaatccacacatttttttataccgggccaccacatctcccaaggcatagtttctaacgtgtcccatatgaattttacccgaaggatatggaaacatttccaatacataatatttctttttgtttttatctgttgctgtttgaaaaattttttctttttcccatttctgttgccacaagcgctcaacttttttatggttgtatcttgatgacacgttgctaactttgagagagtcttattttttttgctttgttcagaatagcgttttcaagctttgcatcattatcaatattattttttatgtctacccattggccatttgacaatgattggcaaaaagagttgacttttaaattatcagtcttcatttcatatcccttaataaatatatttatcttacatctttcgttaggggcgccttggttggcataccaatcagtgattattatacccgcaaaaggatccacagaagcaagaggcataaaatctatagtctccaaacttcctttccacaagtatggattaatgggcaatccaacggaggtagttgttgttttttcagacttattaatcncacccaaagacaaaccttttttgccaagcaagccaccaccggactttaatctgttttctgcgtcagcnagcgccaattgnngttcttcnngagtgccgnnaggaaaggttgtgcccgatcttttgattnttncacctnnngtttgngcctctaattcagaggtatcaattcccctggtttcattacaagatgttaagaggaaagaaaggatgggaagcaggaaaatcaaaataagctttctattcataatagacaagtattccaatcaagtgaaaaaataaacaaaaaaaaagcggcttatttgaagccgcttttataatagaataaaaaattataggttattagaagcttacagtagccccaacataccaagatgagccactaaatgcnnccncagatncaccttcatcatttgagtcttggtttctgtatccaactgttccagtaacgcctgaagctataacataatcaacacttgctccaattacgtccactgagtcttcagcgcntgttgcgttggtgccaagancttcatctttngcatcaccactagttgcgccaacattaaacgtaatgtcgccagatacatattttgcacccacagatgcaaatgaaccctgcatttggttgttttctgcaacccagtcaccatccataaagcctgcaccgacagttaagtcgccagtttccacagttgcccctacatggtaaacagcgttatctttagtagcagattgactgttattagtagcatcgtggtaaccagcacccactgtcacggttgaatcacccgcagtagttacataagtaacacctaccgcataagcgttttcaagcgtaacngtnncannagcgccgcttgtttcagacacatcactattaaatgctgctgaaacattcgcactgaaaccttcaatgccaaaagcatctgccgcagttgcataatcaaatccaaccttatcagaagatgcgccagttgttaaagcaccagctgaattgttacttgaagtgttagtaattcccanttcgccgccaccaccaggaacggaaacagcgtgtgccgctgatgctgaacctgcttcaattaattgtagtgatgatccgtcagtgaaagtcaatgttaaaccacttgcatctgattcagctccaccttcatcagttagagtgaagccagtagcaatttttacccctgcatcagtagtctcagaaatgctaacattgaagttagtcaattgtttttcnncaactgtatcactgtcagaggaatcaggattttctccttcaacaccaactctggtatgaccagagaaagttgccgaagcagcttccgcaacgccagcagcgcccatagttgaggcaagagcacttgctagtaatagttcttttttcataattactccttttgagttaatgaatattcattaatagtgaagaaaatatttcttcacttaaagacagatatacaataaattttttttctcgacaatttcagataaaaaatatatttttttttaaaaatgttgtaaatttacaacaaaatattattaagaaaatgggctttcaacatcaacaatacaaccaaattctatcatttataaataaaaattgcagaaaatcaataaatacacccaaaattatcgctatatcaaaaaatcacccgatatcaagcgtaagagaagccattgatagcggtgttaggatctttggtgaaaataaagttcaagaagcgctttcaaaattcagtgatttaaagaaacagcacaattcaattgaattgcacttaacgggccctttacagacaaacaaggtaaaatcagcattatctatatttgatatatttcaaacactggatagggaaaaattagcgattgaatttaataagcgtatggtaagggattcagataagaaatttttcattcaagtgaacacaggaaacgaaaaacaaaaaacaggcgtacacttagcatcttcgtctgatttcatagatttctgtcagcaagatttaaacttgtcaattattggattaatgtgcatgccgccaataaatgatgatcccacgaaacattttaccattctgaaaaatttagctgagaaaaaaaacttacagttcttaagtatgggtatgagcgcagattataaaaaagccttaatcctcggagccactcatataagaatcggaactttgttgttcggaagcagatagattatgaaaattgatgtagcaattatgaatgacaaccaagaatcagagatctgcagatttatcagcgctataaatgaattcaatatttttttaaaaccgattgaagatattgacaataaaacaaacggacttacaatcattattgttaacaaaaaagaagatgaaaaacaaattaaggatttaaaaaaattactagcacgcgnacgtactaactttatttttttaattccatcttcattaaaatcaatatcaaaagcaaccaataataagattgtttattttccaataaacataattgattttgaaaaagaaatttcaaaacacacaaacaatatgaccataaagtttggttgcttcagtttgaccaaccaaaatcttttatttgagaataacaatcagtacatatatttaacagaaccagaggcacatataattaaactactttttttgaataaattagttaaaaaaagtcaaattaaaagtgaggttttaaaattaagcgctgccgttgaaagcaaatctcttgaaactcacttgtatcgtttaagaaaaaaattatcaacattaagtcctaatatttcgattagatctgatgataaaaataatttagtaattactgagactaattgaataaggggttggcgagactaaacattttatcatccagagcagggttgtagttcgcatttacaatggcaaaactcgtgagaccctctgagttgttaatttcaatttttctaagctttattggtgatttttcaaaaataattttaatattattgatctcgtctttgatttttatttttttaataaaattaaaagaattattttcatcattaaacttaatatcttctaaaaattttttatcataaaaaaaatcaaaaaaaatttttgccacagtgtttttgggattgaaatattccacttcttttaaatcaagattataatacatagctttattatcttttataacaaagaccatttgtgttggcgcgctatactctattctcaatctgtttttttttaaaaaaaattcaccttcttgaagagc

SEQ ID NO: 1632 - DNA, 4000 bp, Escherichia coli
  misc_feature (154)..(155): n is a, c, g, or t
  misc_feature (232)..(232): n is a, c, g, or t
  misc_feature (238)..(238): n is a, c, g, or t
  misc_feature (241)..(241): n is a, c, g, or t
  misc_feature (343)..(343): n is a, c, g, or t
  misc_feature (385)..(385): n is a, c, g, or t
  misc_feature (394)..(394): n is a, c, g, or t
  misc_feature (397)..(397): n is a, c, g, or t
  misc_feature (403)..(403): n is a, c, g, or t
  misc_feature (412)..(412): n is a, c, g, or t
  misc_feature (418)..(418): n is a, c, g, or t
  misc_feature (424)..(424): n is a, c, g, or t
  misc_feature (427)..(427): n is a, c, g, or t
  misc_feature (433)..(433): n is a, c, g, or t
  misc_feature (436)..(436): n is a, c, g, or t
  misc_feature (451)..(451): n is a, c, g, or t
  misc_feature (453)..(453): n is a, c, g, or t
  misc_feature (457)..(457): n is a, c, g, or t
  misc_feature (459)..(459): n is a, c, g, or t
  misc_feature (463)..(463): n is a, c, g, or t
  misc_feature (465)..(465): n is a, c, g, or t
  misc_feature (469)..(469): n is a, c, g, or t
  misc_feature (482)..(482): n is a, c, g, or t
  misc_feature (489)..(489): n is a, c, g, or t
  misc_feature (495)..(496): n is a, c, g, or t
  misc_feature (556)..(556): n is a, c, g, or t
  misc_feature (580)..(581): n is a, c, g, or t
  misc_feature (583)..(583): n is a, c, g, or t
  misc_feature (610)..(610): n is a, c, g, or t
  misc_feature (616)..(616): n is a, c, g, or t
  misc_feature (619)..(619): n is a, c, g, or t
  misc_feature (637)..(637): n is a, c, g, or t
  misc_feature (643)..(643): n is a, c, g, or t
  misc_feature (667)..(667): n is a, c, g, or t
  misc_feature (685)..(685): n is a, c, g, or t
  misc_feature (715)..(715): n is a, c, g, or t
  misc_feature (788)..(788): n is a, c, g, or t
  misc_feature (1261)..(1261): n is a, c, g, or t
  misc_feature (1513)..(1513): n is a, c, g, or t
  misc_feature (2611)..(2611): n is a, c, g, or t
  misc_feature (3442)..(3442): n is a, c, g, or t
  misc_feature (3444)..(3444): n is a, c, g, or t
  misc_feature (3454)..(3454): n is a, c, g, or t
  misc_feature (3507)..(3507): n is a, c, g, or t
  misc_feature (3519)..(3519): n is a, c, g, or t
  misc_feature (3549)..(3549): n is a, c, g, or t
ggctaagtctcctgcattatggatggtttttcctctcagggtcttgccaaaatagtaagatacatcagggaagaagtaaaaagctccttcagggagattggtcttgaatccttctatttcgttgagtaattcatgtactatatcccgacggtgnnggtactcgtctatcatatattgtattttgctcaagggagctttcagggcggtgatactagcgcgctgagctatacanttggcnccnctggtgatctgtccttgcatcttggcacaggccttggtaatccaagcgggagctcccatatatcccatgcgccaaccgggcatcgcaaaggccttggagagnccattaacagtaatagtacgctcatacatcccttctatttcngccatggangtntgttgncctatatanttaatntgttcntanatctcntcngaaaggaagaagatntnaggntntttncnaagnacttgggctaagncttctanctcttnncgagagtaaatggtaccactaggattgccaggggagctaagccataccattttggtacgnggagtgatagctgcttcaagctgnncnggagtaatcttgaagttgccttcaagngtagtnggnatatccacgggcactccnccagcnattttagtaatatcagaataactnacccaatagggggtaggnaggatgacctcatcaccagggttgatcatnactaaagcaacattcgagagacattgcttagcacctgttgatacaataatctgatcaggggtgtagttcaggnggttgtctttcttgaatttctcacagatgacttcttttagttccatgtagccatccacgggcgaatacttgttgtaattctgctcaatagcttcgatggctgcttgttttacaaagtcaggtaccgcaaaatcgggttcacccaagctaaggctgatgatgtccttcccctgtgcctttagttcacgagccttggcggccatggcaagggtggcggagagtgccatattatttacacgatcggataaaaactctttcataggtttgtcgaaatttagtaggatgcgttccaaaaaacaaaagtacgattttttttggcaagtaggtcaagaactattaaaaaaatttgcgtatctttttttttaagactacttttgtcctttctaacaaaaaaacatgaaagaaattgtacttattacaggtgcttcctctgggatagggaaggctactgcggagctcttggctaaggcaggntatatagtatatgggagtgcaaggaatcctcaagaagttctacaaggagttaccatgttggctatggatgtgcgagatactgcttctgtgcagcaagctatagctactattatgcagcgcgaaggacgtatagatatccttattaacaatgctggagtaggcatcacaggagctatagaggagactcctatagaggccttggagaatgcctttgagactaacttcttcggggctgtacgcaccattcaagcngtacttcctattatgcgaagtcagtgtaaaggaatggttatcaatattacttctattgcatcctacatgggcttgcctttcagaggggggtattcggcaagtaagggcgccctatccctgcttacagagacactacgtatggaaacacaacaatttggcatcaccttctgtaacttagctccaggtgatgtagctaccgatattgcttctcggcgctttcatactccagccatagagggttctccttacaaacaatatgccgaggcactgccactgatgaatgaggatgtagacaaaggaatgcctgctgaagccatagctcagaagattgtccaaatcataagaaaaaagaatcctaagggacactatgtaaagggaaaattcatagaacgactctctctgttgttaaaggccatattaccagctaagtgctttgagaaattgctcaaaaaacattataacctctaaggggtaagttgttaaaagtcaataggataaaagaattgttaataacttattagagtaagtatttttatatttcgtagaaaagccttatttttgccccatgaaaaccataggaatttcaaaatattatcacatctaccaaaagccaggagatcgccggttttatgtacagatgcctgaacagactttggagtttcgcttctgtgaactcttggagtttcgcggcaaagtacaggccatagacctctctgctcattttgactactctcagccaggtatagagatacttactttctgtggtggtaagtacctatgtgtattcactacagagcaaatagtagacttgcaaaagttgctttttgagatatttgaaggggtatctgagaaagaaatctttaccaaatatgtactattatgattgtggttacaggaggcacagggctggtaggagctcatttgctctatgaactactttgtgctggtgctactactataagagccctttatcgcaagagtaaaaacacttctcttttagaaaaaatatttcaaacatataatcctaatgccttgccccttatccaaaaaatagagtgggtacaggctgatattttggatgttccagctttagaaagngcactacaaggggtggacttcctttatcattgtgcaggtatggtctcctttgacgattcagatgcccaactactttatcagaacaacgtagaaggtactgcaaatatagtgaatatagccctatatcggggagtgaaaaaactttgttatgtgagtactattgctactttctcagcaaaagaaggaacagaggttaccgaacaaactccacaagagctatctgttgccaatgacaaagcctatgctctgagcaaatacagtgcagaaatggaagtatggagaggagtacaagagggcttgcctgcgatagtcgtatatccttcagtagtggtaggagtaggagtggaacaacattcggcaatgaatattcaaaaactatgtagaagtcgatatattacccagggggggacaggttttgtagcagctcaggatgtagcccatgctatgcgactacttatggaatcctttgtagagaatcaggggttcatcctcagtggcgaaaatctttcctatcagcagttttttcaatacctcagcgaaagtcatcctaagcttcctaagaaaaaaatgctatccactaatgccttgcgttggctttcctatgcagatacttttttatcctttttcgggaagaagcgacaactctcgcctaagatggtgcaaacactacaatctgtctccttttacaatggagagaagataacccatacccttccttttacttatactcccatacaagaagtactgaagaggttagtattataatttttaactacttaataaccaataaattattaaaatcaaggattatgatgttacacagaaaaatantngttattaccntacttttattcttaggagggggactgttcgtacaggcacaaacacgtgtttcnggtcaagtgatngatgagcaaggagaaccgattccctttgcnaatgttatttttaaaaacactcatataggaaccgcttgtgatgagaacggtaagttttctcttttctctcagaaaaattataccactattgaagtgtcttcagtagggtttaccactaaggaagtaaagctcaaagggcatgataccgaaaagttgaaaatagtgttggctatagaagagttggaggccttagtctttgtggaaaaacctaagaagaatctttcgaaaaaggagaatccagcctatcctattctacaaaaaatatgggctaataagcataaaaatatacttacccaaaccaaggcttatcagtacaaacgctatgagactgtggagttgggattgaacaacttagactctgttttcctaaaaaaagccttacagtctgaatataaagagataagaaacattctttccgagaaaaagtacaagcaatacttctctatgccta

SEQ ID NO: 1633 - DNA, 4000 bp, Escherichia coli
  misc_feature (169)..(169): n is a, c, g, or t
  misc_feature (187)..(187): n is a, c, g, or t
  misc_feature (334)..(334): n is a, c, g, or t
  misc_feature (525)..(525): n is a, c, g, or t
  misc_feature (1059)..(1059): n is a, c, g, or t
  misc_feature (1263)..(1263): n is a, c, g, or t
  misc_feature (1470)..(1470): n is a, c, g, or t
  misc_feature (1491)..(1491): n is a, c, g, or t
  misc_feature (1692)..(1692): n is a, c, g, or t
  misc_feature (1782)..(1782): n is a, c, g, or t
  misc_feature (1818)..(1818): n is a, c, g, or t
  misc_feature (1926)..(1926): n is a, c, g, or t
  misc_feature (2040)..(2040): n is a, c, g, or t
  misc_feature (2070)..(2070): n is a, c, g, or t
  misc_feature (2169)..(2169): n is a, c, g, or t
  misc_feature (2508)..(2508): n is a, c, g, or t
  misc_feature (2574)..(2574): n is a, c, g, or t
  misc_feature (2700)..(2700): n is a, c, g, or t
  misc_feature (2814)..(2814): n is a, c, g, or t
  misc_feature (2824)..(2824): n is a, c, g, or t
  misc_feature (3881)..(3881): n is a, c, g, or t
gcactagccgaagagctccaggtaggcctggtataccagcagcacctgctccgagaactccgcattgcggtccgtgagcggggccagcttgatgatcgtcgccgccagcgccggccccaccgtgtcgggggtatgcacgcgaatgccggaaaactgcgcccgggtcacnctcgccgccgcatacagngccgaaaaatccgccacgtccacgtcgtattccgcgcaaaacacgtccgcgataatgagcaattgctccccgcttaacgacggaaaacccatggcttacccgcggtttctccgaattcgggccgccaacacggcctgctccgggatnatggtttccgcgagttgggcgatgtgggcgtcggcaagcgtgcgttgggcggagaccacgatggcgcgcacggcggcctcttgcttgctgcaaccccaggcgtcggcaagcagggagagggcgcgatcttggtgggaatctagtcgaagcgtcatggccatggtatcactatgataccactagttgggcangcggtatcatgggatgctgtgagtgattatgatcgtattctccccatcgacctcaacgaggagatgcaaacctcctacattgactacgccatgtcggtcattgtgggtcgggcgctgccggaggttcgggacggcctgaagcccgtccaccgccgcatcctctacgccatgtacgactccggctatcggcccgaccgcggctatgtcaagtccgcccggcccgtgtcggacaccatgggccaattccacccgcacggcgactccgctatctacgacaccctggtgcggctcgcccaggactggaatatgcgctacccgctggtcgacggccagggcaactttggttcccgcggcaacgacggccccgccgccatgcggtacaccgagtgtcggctcaccccgctcgccatggaaatggtgcgggacatccgcgaaaacaccgtggatttctcccccaactacgacggcaaaaccatggaacccgacattttgccgtcccgggtgccgaacctgctcatgaacggctccaacggnattgccgtgggcatggccaccaacattcccccgcacaacctgcgggagctggccgacgccatctattggctgttggaaaacccggatgcggacgacgccaccgccctggaagcctgcatggagcatatcaagggccccgatttccccaccgccggcctcatcgttggcacccagggcatcaaggacgcctacaccaccgggcgnggttccatccgcatgcgcggcgtgaccagcatcgaggaggagggcagccggcaaaccattgtgattaccgaactgccctaccaggtcaacccggataatctgatttccagcatcgccgagcaggtgcgggacggtaaacttgccggcatctccaagatcgaggacgaatcctccgaccgggtgggcatgcgcatcgtggtcacgctnaagcgggatgccgtgccgcgngtggtgctcaataacctgtataagcactcccagctgcaaaccaacttcggtgcgaacatgctttcgatcgttgatggggtgccgcgcacgctccggctggatcagatgctccgctactatgtggcccaccagatcgaagtgatcgtgcgccgcacccaatatcgcctggacgaggcggagaagcgggcccacattctgcgnggcctggtgaaggccctcgacatgttggacgaggtcattgcgctgatccgccggtcggaaaccgtggatgttgcccgccgcggcctcatngacctgctcaccattgacgaggtgcaggccgatgcnattctcgccatgcagctgcggcgcctggccgccctggaacgccagaagatcattgatgagctcgccgagatcgaggcgatcattgccgacctgaaggacattttggcntccccgggccggcagcgcgccattgtccgcgatgaactgaaagagattgtggacaagtacggtgacgatcgccggtcgcaaatcattgccgccaccggtgacgtgaccgaagangacctgatcgcccgcgaaaacgtggtggtnaccatcacgtctacggggtatgcgaagcgcaccaaggtggatgcgtataagtcgcagcgccgcggcggcaagggggtgcggggcgccgagctgaagcangacgatgtggtgcggcacttctttgtgtgctccacccacgactggattctgttcttcaccaattttggtcgggtgtaccggttgaaggcctacgagttgccggaggcgtcccggacggcccgcgggcagcacgtggcgaacctgctggaattccagccggaggagcggattgctcaggtcattcagatccaaagctatgaggatgccccctacctggtgttggcgacggttcagggtcgggtgaaaaagtcccggctgtccgactatgaatccgctcgttccggcgggttgattgcgattaacctgaatgagggagacaagctcattggcgcttcgctntgttccaatgaggacgatttattgttggtgtctgaggaaggtcaatccattcggtttagcgccgangatgaacagttgcgccccatgggtcggtcgacggcgggggtaaaggggatgcgattccggggtgacgatcatctgctcgccatgacggtggttcgggacggttcgtaccttctggtggcgaccgcnggcggctacgggaagcggacgtcgatggacgaatattccgtgcaaggccggggtggggtcggtgttgtaacattcaaatacaacccgaaacggggcaaattgattggcgcgttngcggtcgatnatgacgaccaaatctttgccattacctccgccggcggggttattcggacggaagtaaaccaaatccgaccaagctctcgtgccacaatgggagttcgtttggttaatctagaagacggcattgagctccttgccatcgaccgtaatgttgagggcgaaggcgaggaggaagtagaagccgtggctactgccaagtcgcgcgctcctaagcaagaaaccattgaggaagaagattaatggctactcgtgaatacacggtgcaacgtattgccccgatgtcggcgttccgcacggcgttttcgctctctatcatcggcctggcggcctggataatttgtgctgtggtgctctatttaggcatggcggcgtttggggtgtgggaccaggtcaatcaggttattggtggcgtgggcggcgaccaaaccctatcgtttggcgtggtgatgtccctggtggcactcattggcgctatttttgccatctttttctccgcgctcgccccgctgactgcggtgctgtataacgcggtggtggatttgtttggtggcattcgcgtgacactccgctacgaagcagagtagaatagctttacgacgctgtaacgcaggcgaaactaggccccgagcaggcgatttgccaagtcccggtcatactgggtaaagttctatctcgttccccggggcctatagctcagtcggttagagcgcatcgctgataacgatgaggtcgcaagttcgattcttgctaggcccactggaacatggggcattagctcaattggtagagcatctgctttgcaagcagaaggtcaggagttcgattctcctatgctccacaataagggccgtcaatcataatgattgacggccctaaaactattggaggatgagggtggttaacctaaagttggggtaagggtgggggtgattgccggccagatatcattaaaaactatgcaagttaggcaatccaaacctccctatcggctcagtgcccaagcccggcttaccattgtctgttcggtgcttttgacctggctttccgtcgtgggaatgtcnttatccatcatgggggccggggccgtcattgatgggggtggcagcgagctgattctgtggggagtgattctcacgtttgccaccatcatgatccgcaccatggtggtggcccggggtca
